United States Patent Application Publication US 2024/0327476 A1 - sequence listing, part 28

SEQ ID NO: 31360 - DNA, 1814 bp, Homo sapiens
  source 1..1814: mol_type = unassigned DNA
tcaatggtaaggcagtgctgtggaaatctgtctgtgtaactggggtgctatgcaggcctgtctgggtgactgtcagggacaactgtcctaccacaccaaggacacagccctgggggtgcttttcttcatagccaaagaagctgcaggaaacccaccctagtgggacaaagaccaatgcagggtcagtccccacagccaggtgatgcaaacaggctggacgtgggccgcctcccctccagcttgacttgtgacagggaaaccaatgcagcagcagcagggccaccagagtcctgtcctggggacaggcttccttccagcgggcggggagtgggtgctcctgccagaccagcctggcttccacggttccagagaccctgttctccctcagcccagtccccgcccccactccttggctttatgagttcattggctgaagtcacccggagacaatgctgagtgttccacccctgagtcgaagcccagcccagggcagcccagccagacgcctccggtagtgtaaatgaggacaatgcctgctggcccacatgacggggggatgtagacggcagcggcgccagtcgctcctggcaccatggacgatgccacagtcctaaggaagaagggttacatcgtaggcatcaatcttggcaagggttcctacgcaaaagtcaaatctgcctactctgagcgcctcaagttcaatgtggctgtcaagatcatcgaccgcaagaaaacacctactgactttgtggagagattccttcctcgggagatggacatcctggcaactgtcaaccacggctccatcatcaagacttacgagatctttgagacctctgacggacggatctacatcatcatggagcttggcgtccagggcgacctcctcgagttcatcaagtgccagggagccctgcatgaggacgtggcacgcaagatgttccgacagctctcctccgccgtcaagtactgccacgacctggacatcgtccaccgggacctcaagtgcgagaaccttctcctcgacaaggacttcaacatcaagctgtctgactttggcttctccaagcgctgcctgcgggacagcaatgggcgcatcatcctcagcaagaccttctgcgggtcggcagcatatgcagcccccgaggtgctgcagagcatcccctaccagcccaaggtgtatgacatctggagcctgggcgtgatcctgtacatcatggtctgcggctccatgccctatgacgactccgacatcaggaagatgctgcgtatccagaaggagcaccgtgtggacttcccgcgctccaagaacctgacctgcgagtgcaaggacctcatctaccgcatgctgcagcccgacgtcagccagcggctccacatcgatgagatcctcagccactcgtggctgcagccccccaagcccaaagccacgtcttctgcctccttcaagagggagggggagggcaagtaccgcgctgagtgcaaactggacaccaagacaggcttgaggcccgaccaccggcccgaccacaagcttggagccaaaacccagcaccggctgctggtggtgcccgagaacgagaacaggatggaggacaggctggccgagacctccagggccaaagaccatcacatctccggagctgaggtggggaaagcaagcacctagcatgacaatggccccgttgtgtgtggtgggggtcggggttggggggcatggtgcagtcggccttcacgtaaactaagtaggcaggtaggatctgaagaaggcacaggtgcaagtaaaattcgtcaattaaaccactattttgatt

SEQ ID NO: 31361 - DNA, 1368 bp, Homo sapiens
  source 1..1368: mol_type = unassigned DNA
cggggactggaggcctctggccatggcgcctggagacggggtcgcgcagaccccggacacccgaggggggcgcagcaggccagggcaacccgccgcgaggcggcgtccacgccgaggagccgcgcattcccggtccacacagacgcggcggagcgccctcccaggcgggactacaactcaatgcctggcacgggggcgggctcggcggtgacttaatccgggctgagtttggtggtggtagtgagggcaggtaggggcactgcccattttggccaagggtcacacagcatctacatcacaattgcaccggagtttaaaaatgtctggccctgtccctccccaccacccgccgctgtgtccagacagagaatgttctaacgctgggggcggctgcggatgaagtccttggggagaaaaggagcaggccaagggcgatggtggagtagagctgcctctcagaggcagcatgagctgagagggtgataggaaggcggcgctagacagcatggaggactttctgctctccaatgggtaccagctgggcaagaccattggggaagggacctactcaaaagtcaaagaagcattttccaaaaaacaccaaagaaaagtggcaattaaagttatagacaagatgggagggccagaagagtttatccagagattcctccctcgggagctccaaatcgtccgtaccctggaccacaagaacatcatccaggtgtatgagatgctggagtctgccgacgggaaaatctgcctggtgatggagctcgctgagggaggggatgtctttgactgcgtgctgaatggggggccactgcctgaaagccgggccaaggccctcttccgtcagatggttgaggccatccgctactgccatggctgtggtgtggcccaccgggacctcaaatgtgagaacgccttgttgcagggcttcaacctgaagctgactgactttggctttgccaaggtgttgcccaagtcacaccgggagctgagccagaccttctgcggcagtacagcctatgctgcccccgaggtgctgcagggcattccccacgatagcaaaaaaggtgatgtctggagcatgggtgtggtcctgtatgtcatgctctgtgccagcctaccttttgacgacacagacatccccaagatgctgtggcagcagcagaagggggtgtccttccccactcatctgagcatctcggccgattgccaggacctgctcaagaggctcctggaacccgatatgatcctccggccttcaattgaagaagttagttggcatccatggctagcaagcacttgataaaagcaatggcaagtgctctccaataaagtagggggagaaagcaaacccaaaaa

SEQ ID NO: 31362 - DNA, 1257 bp, Homo sapiens
  source 1..1257: mol_type = unassigned DNA
tcctagtggagggctgagtccagcatcccagactcgtgtgactatataggcaagcatttggggacctacttcactttgataccctagccttcagcagctcaaggtgttggcctttggataggaggcttccaagtagtaaagctccctgctctcagcaagcccaacaccatggggaagggagatgtcttagaggcagcaccaaccaccacagcctaccattccctcatggatgaatatggttatgaggtgggcaaggccattggccatggctcctatgggtcggtatatgaggctttctacacaaagcagaaggttatggtggcagtcaagatcatctcaaagaagaaggcctctgatgactatcttaacaagttcctgccccgtgaaatacaggtaatgaaagtcttgcggcacaagtacctcatcaacttctatcgggccattgagagcacatctcgagtatacatcattctggaactggctcagggtggtgatgtccttgaatggatccagcgctacggggcctgctctgagccccttgctggcaagtggttctcccagctgaccctgggcattgcctacctgcacagcaagagcatcgtgcaccgggacttaaagttggagaacctgttgctggacaagtgggagaatgtgaagatatcagactttggctttgccaagatggtgccttctaaccagcctgtgggttgtagcccttcttaccgccaagtgaactgcttttcccacctcagccagacttactgtggcagctttgcttacgcttgcccagagatcttacgaggcttgccctacaaccctttcctgtctgacacctggagcatgggcgtcatcctttacactctagtggtcgcccatctgccctttgatgacaccaatctcaaaaagctgctaagagagactcagaaggaggtcactttcccagctaaccataccatctcccaggagtgcaagaacctgatcctccagatgctacgccaagccactaagcgtgccaccattctggacatcatcaaggattcctgggtgctcaagttccagcctgagcaacccacccatgagatcaggctgcttgaggccatgtgccagctccacaacaccactaaacagcaccaatccttgcaaattacgacctgaaaatggctgagggagggggctaagagaggagcaaagcaggaggtcttgggctaaaaatcttttttaccaaaaataaatctaagtctgatttagtttcatcaa

SEQ ID NO: 31363 - DNA, 1321 bp, Homo sapiens
  source 1..1321: mol_type = unassigned DNA
aaaaagaactgcttctctttctttccccctccaagttcctagtggagggctgagtccagcatcccagactcgtgtgactatataggcaagcatttggggacctacttcactttgataccctagccttcagcagctcaaggtgttggcctttggataggaggcttccaagtagtaaagctccctgctctcagcaagcccaacaccatggggaagggagatgtcttagaggcagcaccaaccaccacagcctaccattccctcatggatgaatatggttatgaggtgggcaaggccattggccatggctcctatgggtcggtatatgaggctttctacacaaagcagaaggttatggtggcagtcaagatcatctcaaagaagaaggcctctgatgactatcttaacaagttcctgccccgtgaaatacaggtaatgaaagtcttgcggcacaagtacctcatcaacttctatcgggccattgagagcacatctcgagtatacatcattctggaactggctcagggtggtgatgtccttgaatggatccagcgctacggggcctgctctgagccccttgctggcaagtggttctcccagctgaccctgggcattgcctacctgcacagcaagagcatcgtgcaccgcctgatgcccagcctttctgctgctggtagggacttaaagttggagaacctgttgctggacaagtgggagaatgtgaagatatcagactttggctttgccaagatggtgccttctaaccagcctgtgggttgtagcccttcttaccgccaagtgaactgcttttcccacctcagccagacttactgtggcagctttgcttacgcttgcccagagatcttacgaggcttgccctacaaccctttcctgtctgacacctggagcatgggcgtcatcctttacactctagtggtcgcccatctgccctttgatgacaccaatctcaaaaagctgctaagagagactcagaaggaggtcactttcccagctaaccataccatctcccaggagtgcaagaacctgatcctccagatgctacgccaagccactaagcgtgccaccattctggacatcatcaaggattcctgggtgctcaagttccagcctgagcaacccacccatgagatcaggctgcttgaggccatgtgccagctccacaacaccactaaacagcaccaatccttgcaaattacgacctgaaaatggctgagggagggggctaagagaggagcaaagcaggaggtcttgggctaaaaatcttttttaccaaaaataaatctaagtctgatttagtttcatc

SEQ ID NO: 31364 - DNA, 896 bp, Homo sapiens
  source 1..896: mol_type = unassigned DNA
ctgcttctctttctttccccctccaagttcctagtggagggctgagtccagcatcccagactcgtgtgactatataggtaatgaaagtcttgcggcacaagtacctcatcaacttctatcgggccattgagagcacatctcgagtatacatcattctggaactggctcagggtggtgatgtccttgaatggatccagcgctacggggcctgctctgagccccttgctggcaagtggttctcccagctgaccctgggcattgcctacctgcacagcaagagcatcgtgcaccgggacttaaagttggagaacctgttgctggacaagtgggagaatgtgaagatatcagactttggctttgccaagatggtgccttctaaccagcctgtgggttgtagcccttcttaccgccaagtgaactgcttttcccacctcagccagacttactgtggcagctttgcttacgcttgcccagagatcttacgaggcttgccctacaaccctttcctgtctgacacctggagcatgggcgtcatcctttacactctagtggtcgcccatctgccctttgatgacaccaatctcaaaaagctgctaagagagactcagaaggaggtcactttcccagctaaccataccatctcccaggagtgcaagaacctgatcctccagatgctacgccaagccactaagcgtgccaccattctggacatcatcaaggattcctgggtgctcaagttccagcctgagcaacccacccatgagatcaggctgcttgaggccatgtgccagctccacaacaccactaaacagcaccaatccttgcaaattacgacctgaaaatggctgagggagggggctaagagaggagcaaagcaggaggtcttgggctaaaaa

SEQ ID NO: 31365 - DNA, 2513 bp, Homo sapiens
  source 1..2513: mol_type = unassigned DNA
ttttgcccagacagggcgtgactcgccttggttcttgcattataggccctcgcgttcaccttgcctctggggtgttgcgcaggccagtcagaaactccgagctctcaaaggagccaggtgccccagttaaggccccttttcccgttttcgccccgtctagggactctacgcgaagcccagggctccacgtagtcacgggctgggtacatgatgttggggggcagctgctgctcgaagtcggactcaccccaatccctggaacggattctgctccctggtggtgatgggtatcccttgctagtggcctctcatcggaaactgaccattcaggatgattatgagtcacaaagcagggaggctagggtggccccggggcggggtcccggacccccaccctaaggcggagtgacgcccgcagtcacttcacaaggcaaaaattgttacggggcaataaaaggcacaacagcggccaatgtctggcagtgggcacatgggggtgcgggggtgtaggtgccaagcgccatggcttagacccgagattggagtccggccgccccccgacagcagccgcctcctgccccccgtgcgccctaggcgccaccatgtcgggagacaaacttctgagcgaactcggttataagctgggccgcacaattggagagggcagctactccaaggtgaaggtggccacatccaagaagtacaagggtaccgtggccatcaaggtggtggaccggcggcgagcgcccccggacttcgtcaacaagttcctgccgcgagagctgtccatcctgcggggcgtgcgacacccgcacatcgtgcacgtcttcgagttcatcgaggtgtgcaacgggaaactgtacatcgtgatggaagcggccgccaccgacctgctgcaagccgtgcagcgcaacgggcgcatccccggagttcaggcgcgcgacctctttgcgcagatcgccggcgccgtgcgctacctgcacgatcatcacctggtgcaccgcgacctcaagtgcgaaaacgtgctgctgagcccggacgagcgccgcgtcaagctcaccgacttcggcttcggccgccaggcccatggctacccagacctgagcaccacctactgcggctcagccgcctacgcgtcacccgaggtgctcctgggcatcccctacgaccccaagaagtacgatgtgtggagcatgggcgtcgtgctctacgtcatggtcaccgggtgcatgcccttcgacgactcggacatcgccggcctgccccggcgccagaaacgcggcgtgctctatcccgaaggcctcgagctgtccgagcgctgcaaggccctgatcgccgagctgctgcagttcagcccgtccgccaggccctccgcgggccaggtagcgcgcaactgctggctgcgcgccggggactccggctagaagccgggtggttccagccattcctgcagccaagggcactgggccagggcggcgcacgcgcaagaggcgcgcttcgagggaatatgcgaagctgccgcgtgctgctgcacatgcgctttttcccttccgcttccctccctttcttcccacgggggagtccgcagttgcccttgttcggaatccacgttccccgcgatcccgggagctggaggcgcatgcgcatccgcgattccctgcgaccaggccccgagagggcgagaccagaggggacggaagcattgcgcctgcgcggaactctcagcctctgcgcggagggcgtcccttcccaaccagccgtgggtgccaggttcccggttggaacctgcaataaactcgctgttcctcgcacctggctctaacggtggcccccatttgcggactagtggagaagcgatcgctccatccggggaaggcaggcgcgggtaccctattttagagtcacgcatgttgaggttattgctccaagactcaaaagggagtcgggaggattcgagcctggaccttttgagctccccagtatgggcaaactcaaaggagctttgttgtccccgggtcgtgatgtcgctgtgatgatgggctgggaagcaagtggaccccagcgcctcgccgtccacatcttttaagaatggaacagccaggggtggggcgagggtggcctgtctccacgtaaagtaggagtttatagataaggaaactgaggcccacatggatgtcacttgccaaaaggcagaggcatgagccacttcacccggctcacagctgtaatttgaacccagatctagcaacagtgacgttgcgggggtgggggaagccctccctgctgtgggtccctttcctctcgggaagagggggtgggggagtcagggcggggctgggcgagattcagctggactcactagctcgttccttcctctgttccttcatgtagtcatgcatttcttgagcacctactgtctgccaggccccagagctcatggcgaagagacttgggcccatccctgccgaaaacgagacaattgaaaagtcaagtaaaataaaagaatgacatgg

SEQ ID NO: 31366 - DNA, 2071 bp, Homo sapiens
  source 1..2071: mol_type = unassigned DNA
actgccaccgccatgatgagtgtggcggaagcacttgagatggtccgcggcacggctaggaagtcccggacagtagtgtaactatccgaccgcgcgggaaagctctggcggcggaccctgggtaggaatgcgctgccgggctgcagctgaggggtctttactcctcttttgcccagacagggcgtgactcgccttggttcttgcattataggccctcgcgttcaccttgcctctggggtgttgcgcaggccagtcagaaactccgagctctcaaaggagccaggtgccccagttaaggccccttttcccgttttcgccccgtctagggactctacgcgaagcccagggctccacgtagtcacgggctgggtacatgatgttggggggcagctgctgctcgaagtcggactcaccccaatccctggaacggattctgctccctggtggtgatgggtatcccttgctagtggcctctcatcggaaactgaccattcaggatgattatgagtcacaaagcagggaggctagggtggccccggggcggggtcccggacccccaccctaaggcggagtgacgcccgcagtcacttcacaaggcaaaaattgttacggggcaataaaaggcacaacagcggccaatgtctggcagtgggcacatgggggtgcgggggtgtaggtgccaagcgccatggcttagacccgagattggagtccggccgccccccgacagcagccgcctcctgccccccgtgcgccctaggcgccaccatgtcgggagacaaacttctgagcgaactcggttataagctgggccgcacaattggagagggcagctactccaaggtgaaggtggccacatccaagaagtacaagggtaccgtggccatcaaggtggtggaccggcggcgagcgcccccggacttcgtcaacaagttcctgccgcgagagctgtccatcctgcggggcgtgcgacacccgcacatcgtgcacgtcttcgagttcatcgaggtgtgcaacgggaaactgtacatcgtgatggaagcggccgccaccgacctgctgcaagccgtgcagcgcaacgggcgcatccccggagttcaggcgcgcgacctctttgcgcagatcgccggcgccgtgcgctacctgcacgatcatcacctggtgcaccgcgacctcaagtgcgaaaacgtgctgctgagcccggacgagcgccgcgtcaagctcaccgacttcggcttcggccgccaggcccatggctacccagacctgagcaccacctactgcggctcagccgcctacgcgtcacccgaggtgctcctgggcatcccctacgaccccaagaagtacgatgtgtggagcatgggcgtcgtgctctacgtcatggtcaccgggtgcatgcccttcgacgactcggacatcgccggcctgccccggcgccagaaacgcggcgtgctctatcccgaaggcctcgagctgtccgagcgctgcaaggccctgatcgccgagctgctgcagttcagcccgtccgccaggccctccgcgggccaggtagcgcgcaactgctggctgcgcgccggggactccggctagaagccgggtggttccagccattcctgcagccaagggcactgggccagggcggcgcacgcgcaagaggcgcgcttcgagggaatatgcgaagctgccgcgtgctgctgcacatgcgctttttcccttccgcttccctccctttcttcccacgggggagtccgcagttgcccttgttcggaatccacgttccccgcgatcccgggagctggaggcgcatgcgcatccgcgattccctgcgaccaggccccgagagggcgagaccagaggggacggaagcattgcgcctgcgcggaactctcagcctctgcgcggagggcgtcccttcccaaccagccgtgggtgccaggttcccggttggaacctgcaataaactcgctgttcctcgcacctggctctaacggtggcccccatttgcggactagtggagaagcgatcgctccatccggggaaggcaggcgcgggtaccctattttagagtcac

SEQ ID NO: 31367 - DNA, 9288 bp, Homo sapiens
  source 1..9288: mol_type = unassigned DNA
ggcgcgagttggaaagtttgcccgagggctggtgcaggcttggagctgggggccgtgcgctgccctgggaatgtgacccggccagcgaccaaaaccttgtgtgactgagctgaagagcagtgcatccagattctcctcagaagtgagactttccaaaggaccaatgactctgtttcctgcgccctttcattttttcctactctgtagctatgtctcgatcccgccatgcaaggccttccagattagtcaggaaggaagatgtaaacaaaaaaaagaaaaacagccaactacgaaagacaaccaagggagccaacaaaaatgtggcatcagtcaagactttaagccctggaaaattaaagcaattaattcaagaaagagatgttaagaaaaaaacagaacctaaaccacccgtgccagtcagaagccttctgacaagagctggagcagcacgcatgaatttggataggactgaggttctttttcagaacccagagtccttaacctgcaatgggtttacaatggcgctacgaagcacctctcttagcaggcgactctcccaacccccactggtcgtagccaaatccaaaaaggttccactttctaagggtttagaaaagcaacatgattgtgattataagatactccctgctttgggagtaaagcactcagaaaatgattcggttccaatgcaagacacccaagtccttcctgatatagagactctaattggtgtacaaaatccctctttacttaaaggtaagagccaagagacaactcagttttggtcccaaagagttgaggattccaagatcaatatccctacccacagtggccctgcagctgagatccttcctgggccactggaagggacacgctgtggtgaaggactattctctgaagagacattgaatgataccagtggttccccaaaaatgtttgctcaggacacagtgtgtgctccttttccccaaagagcaacccccaaagttacctctcaaggaaaccccagcattcagttagaagagttgggttcacgagtagaatctcttaagttatctgattcttacctggatcccattaaaagtgaacatgattgctaccccacctccagtcttaataaggttatacctgacttgaaccttagaaactgcttggctcttggtgggtctacgtctcctacctctgtaataaaattcctcttggcaggctcaaaacaagcgacccttggtgctaaaccagatcatcaagaggccttcgaagctactgcaaatcaacaggaagtttctgataccacctctttcctaggacaggcctttggtgctatcccacatcaatgggaacttcctggtgctgacccagttcatggtgaggccctgggtgagaccccagatctaccagagattcctggtgctattccagtccaaggagaggtctttggtactattttagaccaacaagaaactcttggtatgagtgggagtgttgtcccagacttgcctgtcttccttcctgttcctccaaatccaattgctacctttaatgctccttccaaatggcctgagccccaaagcactgtctcatatggacttgcagtccagggtgctatacagattttgcctttgggctcaggacacactcctcaatcatcatcaaactcagagaaaaattcattacctccagtaatggctataagcaatgtagaaaatgagaagcaggttcatataagcttcctgccagctaacactcaggggttcccattagcccctgagagaggactcttccatgcttcactgggtatagcccaactctctcaggctggtcctagcaaatcagacagagggagctcccaggtcagtgtaaccagcacagttcatgttgtcaacaccacagtggtgactatgccagtgccaatggtcagtacctcctcttcttcctataccactttgctaccgactttggaaaagaagaaaagaaagcgatgtggggtctgtgaaccctgccagcagaagaccaactgtggtgaatgcacttactgcaagaacagaaagaacagccatcagatctgtaagaaaagaaaatgtgaggagctgaaaaagaaaccatctgttgttgtgcctctggaggttataaaggaaaacaagaggccccagagggaaaagaagcccaaagttttaaaggcagattttgacaacaaaccagtaaatggccccaagtcagaatccatggactacagtagatgtggtcatggggaagaacaaaaattggaattgaacccacatactgttgaaaatgtaactaaaaatgaagacagcatgacaggcatcgaggtggagaagtggacacaaaacaagaaatcacagttaactgatcacgtgaaaggagattttagtgctaatgtcccagaagctgaaaaatcgaaaaactctgaagttgacaagaaacgaaccaaatctccaaaattgtttgtacaaaccgtaagaaatggcattaaacatgtacactgtttaccagctgaaacaaatgtttcatttaaaaaattcaatattgaagaattcggcaagacattggaaaacaattcttataaattcctaaaagacactgcaaaccataaaaacgctatgagctctgttgctactgatatgagttgtgatcatctcaaggggagaagtaacgttttagtattccagcagcctggctttaactgcagttccattccacattcttcacactccatcataaatcatcatgctagtatacacaatgaaggtgatcaaccaaaaactcctgagaatataccaagtaaagaaccaaaagatggatctcccgttcaaccaagtctcttatcgttaatgaaagataggagattaacattggagcaagtggtagccatagaggccctgactcaactctcagaagccccatcagagaattcctccccatcaaagtcagagaaggatgaggaatcagagcagagaacagccagtttgcttaatagctgcaaagctatcctctacactgtaagaaaagacctccaagacccaaacttacagggagagccaccaaaacttaatcactgtccatctttggaaaaacaaagttcatgcaacacggtggttttcaatgggcaaactactaccctttccaactcacatatcaactcagctactaaccaagcatccacaaagtcacatgaatattcaaaagtcacaaattcattatctctttttataccaaaatcaaattcatccaagattgacaccaataaaagtattgctcaagggataattactcttgacaattgttccaatgatttgcatcagttgccaccaagaaataatgaagtggagtattgcaaccagttactggacagcagcaaaaaattggactcagatgatctatcatgtcaggatgcaacccatacccaaattgaggaagatgttgcaacacagttgacacaacttgcttcgataattaagatcaattatataaaaccagaggacaaaaaagttgaaagtacaccaacaagccttgtcacatgtaatgtacagcaaaaatacaatcaggagaagggcacaatacaacagaaaccaccttcaagtgtacacaataatcatggttcatcattaacaaaacaaaagaacccaacccagaaaaagacaaaatccaccccatcaagagatcggcggaaaaagaagcccacagttgtaagttatcaagaaaatgatcggcagaagtgggaaaagttgtcctatatgtatggcacaatatgcgacatttggatagcatcgaaatttcaaaattttgggcaattttgtccacatgattttcctactgtatttgggaaaatttcttcctcgaccaaaatatggaaaccactggctcaaacgaggtccattatgcaacccaaaacagtatttccaccactcactcagataaaattacagagatatcctgaatcagcagaggaaaaggtgaaggttgaaccattggattcactcagcttatttcatcttaaaacggaatccaacgggaaggcattcactgataaagcttataattctcaggtacagttaacggtgaatgccaatcagaaagcccatcctttgacccagccctcctctccacctaaccagtgtgctaacgtgatggcaggcgatgaccaaatacggtttcagcaggttgttaaggagcaactcatgcatcagagactgccaacattgcctggtatctctcatgaaacacccttaccggagtcagcactaactctcaggaatgtaaatgtagtgtgttcaggtggaattacagtggtttctaccaaaagtgaagaggaagtctgttcatccagttttggaacatcagaattttccacagtggacagtgcacagaaaaattttaatgattatgccatgaacttctttactaaccctacaaaaaacctagtgtctataactaaagattctgaactgcccacctgcagctgtcttgatcgagttatacaaaaagacaaaggcccatattatacacaccttggggcaggaccaagtgttgctgctgtcagggaaatcatggagaataggtatggtcaaaaaggaaacgcaataaggatagaaatagtagtgtacaccggtaaagaagggaaaagctctcatgggtgtccaattgctaagtgggttttaagaagaagcagtgatgaagaaaaagttctttgtttggtccggcagcgtacaggccaccactgtccaactgctgtgatggtggtgctcatcatggtgtgggatggcatccctcttccaatggccgaccggctatacacagagctcacagagaatctaaagtcatacaatgggcaccctaccgacagaagatgcaccctcaatgaaaatcgtacctgtacatgtcaaggaattgatccagagacttgtggagcttcattctcttttggctgttcatggagtatgtactttaatggctgtaagtttggtagaagcccaagccccagaagatttagaattgatccaagctctcccttacatgaaaaaaaccttgaagataacttacagagtttggctacacgattagctccaatttataagcagtatgctccagtagcttaccaaaatcaggtggaatatgaaaatgttgcccgagaatgtcggcttggcagcaaggaaggtcgtcccttctctggggtcactgcttgcctggacttctgtgctcatccccacagggacattcacaacatgaataatggaagcactgtggtttgtaccttaactcgagaagataaccgctctttgggtgttattcctcaagatgagcagctccatgtgctacctctttataagctttcagacacagatgagtttggctccaaggaaggaatggaagccaagatcaaatctggggccatcgaggtcctggcaccccgccgcaaaaaaagaacgtgtttcactcagcctgttccccgttctggaaagaagagggctgcgatgatgacagaggttcttgcacataagataagggcagtggaaaagaaacctattccccgaatcaagcggaagaataactcaacaacaacaaacaacagtaagccttcgtcactgccaaccttagggagtaacactgagaccgtgcaacctgaagtaaaaagtgaaaccgaaccccattttatcttaaaaagttcagacaacactaaaacttattcgctgatgccatccgctcctcacccagtgaaagaggcatctccaggcttctcctggtccccgaagactgcttcagccacaccagctccactgaagaatgacgcaacagcctcatgcgggttttcagaaagaagcagcactccccactgtacgatgccttcgggaagactcagtggtgccaatgcagctgctgctgatggccctggcatttcacagcttggcgaagtggctcctctccccaccctgtctgctcctgtgatggagcccctcattaattctgagccttccactggtgtgactgagccgctaacgcctcatcagccaaaccaccagccctccttcctcacctctcctcaagaccttgcctcttctccaatggaagaagatgagcagcattctgaagcagatgagcctccatcagacgaacccctatctgatgaccccctgtcacctgctgaggagaaattgccccacattgatgagtattggtcagacagtgagcacatctttttggatgcaaatattggtggggtggccatcgcacctgctcacggctcggttttgattgagtgtgcccggcgagagctgcacgctaccactcctgttgagcaccccaaccgtaatcatccaacccgcctctcccttgtcttttaccagcacaaaaacctaaataagccccaacatggttttgaactaaacaagattaagtttgaggctaaagaagctaagaataagaaaatgaaggcctcagagcaaaaagaccaggcagctaatgaaggtccagaacagtcctctgaagtaaatgaattgaaccaaattccttctcataaagcattaacattaacccatgacaatgttgtcaccgtgtccccttatgctctcacacacgttgcggggccctataaccattgggtctgaaggcttttctccccctcttaatgcctttgctagtgcagtgtattttttcaaggtgctgttaaaagaaagtcatgttgtcgtttactatcttcatctcacccatttcaagtctgaggtaaaaaaataataatgataacaaaacggggtgggtattcttaactgtgactatattttgacaattggtagaaggtgcacattttaagcaaaaataaaagttttatagttttaaatacataaagaaatgtttcagttaggcattaaccttgatagaatcactcagtttggtgctttaaattaagtctgtttactatgaaacaagagtcatttttagaggattttaacaggttcatgttctatgatgtaaaatcaagacacacagtgttaactctacacagcttctggtgcttaaccacatccacacagttaaaaataagctgaattattatttcatggtgccattgttccaacatcttccaatcattgctagaaaattggcatattcctttgaaataaacttatgaaatgttttctctcttaaaatatttctcctgtgtaaaataaatcattgttgttagtaatggttggaggctgttcataaattgtaaatatatattttaaaagcactttctatttttaaaagtaacttgaaataatatagtataagaatcctattgtctattgtttgtgcatatttgcatacaagagaaatcatttatccttgctgtgtagagttccatcttgttaactgcagtatgtattctaatcatgtatatggtttgtgttcttttactgtgtcctctcacattcaagtattagcaacttgcagtatataaaatagttagataatgagaagttgttaattatctctaaaattggaattaggaagcatatcaccaatactgattaacattctctttggaactaggtaagagtggtctcttcttattgaacaacctcaatttagtttcatcccacctttctcagtataatccatgagaggtgtttccaaaaggagatgagggaacaggataggtttcagaagagtcaaatgcttctaatgtctcaaggtgataaaatacaaaaactaagtagacagatatttgtactgaagtctgatacagaattagaaaaaaaaaattcttgttgaaatattttgaaaacaaattccctactatcatcacatgcctccccaaccccaagtcaaaaacaagaggaatggtactacaaacatggctttgtccattaagagctaattcatttgtttatcttagcatactagatttgggaaaatgataactcatcttttctgataattgcctatgttctaggtaacaggaaaacaggcattaagtttattttagtcttcccattttcttcctattactttattgactcattttattgcaaaacaaaaaggattacccaaacaacatgtttcgaacaaggagaattttcaatgaaatacttgattctgttaaaatgcagaggtgctataacattcaaagtgtcagattccttgggagtatggaaaacctaatggtgcttctcccttggaaatgccataggaagcccacaaccgctaacacttacaattttggtgcaaaagcaaacagttccagcaggctctctaaagaaaaactcattgtaacttattaaaataatatctggtgcaaagtatctgttttgagcttttgactaatccaagtaaaggaatatgaagggattgtaaaaaacaaaatgtccattgatagaccatcgtgtacaagtagatttctgcttgttgaatatgtaaaatagggtaattcattgacttgttttagtattttgtgtgccttagatttccgttttaagacatgtatatttttgtgagcctaaggtttcttatatacatataagtatataaataagtgattgtttattgcttcagctgcttcaacaagatatttactagtattagactatcaggaatacacccttgcgagattatgttttagattttaggccttagctcccactagaaattatttcttcaccagatttaatggataaagttttatggctctttatgcatccactcatctactcattcttcgagtctacacttattgaatgcctgcaaaatctaagtatcacttttatttttctttggatcaccacctatgacatagtaaacttgaagaataaaaactaccctcagaaatatttttaaaagaagtagcaaattatcttcagtataatccatggtaatgtatgcagtaattcaaattgatctctctctcaataggtttcttaacaatctaaacttgaaacatcaatgttaatttttggaactattgggatttgtgacgcttgttgcagtttaccaaaacaagtatttgaaaatatatagtatcaactgaaatgtttccattccgttgttgtagttaacatcatgaatggacttcttaagctgattaccccactgtgggaaccaaattggattcctactttgttggactctctttcctgattttaacaatttaccatcccattctctgccctgtgattttttttaaaagcttattcaatgttctgcagcattgtgattgtatgctggctacactgcttttagaatgctctttctcatgaagcaaggaaataaatttgtttgaaatgacattttctctca

SEQ ID NO: 31368 - DNA, 668 bp, Homo sapiens
  source 1..668: mol_type = unassigned DNA
aagattctgaactgcccacctgcagctgtcttgatcgagttatacaaaaagacaaaggcccatattatacacaccttggggcaggaccaagtgttgctgctgtcagggaaatcatggagaataggtatggtcaaaaaggaaacgcaataaggatagaaatagtagtgtacaccggtaaagaagggaaaagctctcatgggtgtccaattgctaagtgggttttaagaagaagcagtgatgaagaaaaagttctttgtttggtccggcagcgtacaggccaccactgtccaactgctgtgatggtggtgctcatcatggtgtgggatggcatccctcttccaatggccgaccggctatacacagagctcacagagaatctaaagtcatacaatgggcaccctaccgacagaagatgcaccctcaatgaaaatcgtacctgtacatgtcaaggaattgatccagagacttgtggagcttcattctcttttggctgttcatggagtatgtactttaatggctgtaagtttggtagaagcccaagccccagaagatttagaattgatccaagctctcccttacatacctactatgaaagaattactaaaggacgtaatccagaaagaagatatatgaaaccggaacgaatcagtccgggacacgaggccatg

SEQ ID NO: 31369 - DNA, 1615 bp, Homo sapiens
  source 1..1615: mol_type = unassigned DNA
agacacacacaccagcagctacacctacacgctgaccatcacaggcacacagaggcacatccacctcacatccacctcatacttgtgtactctcagggttcagtctttcatcctatccctctctgatctgtgcctcccaataccttccaagatgtttacagagacccttctccctgtgcagttaggagtgtaaggcaagagagcccctacttcatggggcagatcaagagctgagaccaaagatggtctatgttgctgaccttgtcctgtcctcctgctgtcttaaactatgatccctgctgcggtcactgaagcctttccctgtgagcagtggtgtgtgagagccaggcgtccctctgcctgcccactcagtggcaacacccgggagctgttttgtcctttgtggagcctcagcagttccctctttcagaactcactgccaagagccctgaacaggagccaccatgcagtgcttcagcttcattaagaccatgatgatcctcttcaatttgctcatctttctgtgtggtgcagccctgttggcagtgggcatctgggtgtcaatcgatggggcatcctttctgaagatcttcgggccactgtcgtccagtgccatgcagtttgtcaacgtgggctacttcctcatcgcagccggcgttgtggtctttgctcttggtttcctgggctgctatggtgctaagactgagagcaagtgtgccctcgtgacgttcttcttcatcctcctcctcatcttcattgctgaggttgcagctgctgtggtcgccttggtgtacaccacaatggctgagcacttcctgacgttgctggtagtgcctgccatcaagaaagattatggttcccaggaagacttcactcaagtgtggaacaccaccatgaaagggctcaagtgctgtggcttcaccaactatacggattttgaggactcaccctacttcaaagagaacagtgcctttcccccattctgttgcaatgacaacgtcaccaacacagccaatgaaacctgcaccaagcaaaaggctcacgaccaaaaagtagagggttgcttcaatcagcttttgtatgacatccgaactaatgcagtcaccgtgggtggtgtggcagctggaattgggggcctcgagctggctgccatgattgtgtccatgtatctgtactgcaatctacaataagtccacttctgcctctgccactactgctgccacatgggaactgtgaagaggcaccctggcaagcagcagtgattgggggaggggacaggatctaacaatgtcacttgggccagaatggacctgccctttctgctccagacttggggctagatagggaccactccttttaggcgatgcctgactttccttccattggtgggtggatgggtggggggcattccagagcctctaaggtagccagttctgttgcccattcccccagtctattaaacccttgatatgccccctaggcctagtggtgatcccagtgctctactgggggatgagagaaaggcattttatagcctgggcataagtgaaatcagcagagcctctgggtggatgtgtagaaggcacttcaaaatgcataaacctgttacaatgtt

SEQ ID NO: 31370 - DNA, 2796 bp, Homo sapiens
  source 1..2796: mol_type = unassigned DNA
aagcctgcttctctatgcttataacccagcctccattccttcgacgccaccattttaaagggatttactgcacggacttctcccaagttcctaggcattatcttctggaccctatcctgcagaggtgaagcgtccctttggggactctcgctgggtgagagggacaagaaacacccactaggacccaaccccggcagccagcggctcgagcatgcgctgagagtttgtgcagctggccctggctgccgccgctgcctcgtccggactcggagaggacttgggagggacagcggcgctgggaggtggcttagcagagactttccagcaactgctgcccaggacttttttttttttttttctttttcccaggaggcggcgacggcggcggcggggggagaggaagagaaagaagcgtctccagctgaagccaatgcagccctccggctctccgcgaagaagttccctgccccgatgagcccccgccgtgcgtccccgactatccccaggcgggcgtggggcaccgggcccagcgccgacgatcgctgccgttttgcccttgggagtaggatgtggtgaaaggatggggcttctcccttacggggctcacaatggccagagaagattccgtgaagtgtctgcgctgcctgctctacgccctcaatctgctcttttggttaatgtccatcagtgtgttggcagtttctgcttggatgagggactacctaaataatgttctcactttaactgcagaaacgagggtagaggaagcagtcattttgacttactttcctgtggttcatccggtcatgattgctgtttgctgtttccttatcattgtggggatgttaggatattgtggaacggtgaaaagaaatctgttgcttcttgcatggtactttggaagtttgcttgtcattttctgtgtagaactggcttgtggcgtttggacatatgaacaggaacttatggttccagtacaatggtcagatatggtcactttgaaagccaggatgacaaattatggattacctagatatcggtggcttactcatgcttggaatttttttcagagagagtttaagtgctgtggagtagtatatttcactgactggttggaaatgacagagatggactggcccccagattcctgctgtgttagagaattcccaggatgttccaaacaggcccaccaggaagatctcagtgacctttatcaagagggttgtgggaagaaaatgtattcctttttgagaggaaccaaacaactgcaggtgctgaggtttctgggaatctccattggggtgacacaaatcctggccatgattctcaccattactctgctctgggctctgtattatgatagaagggagccggggacagaccaaatgatgtccttgaagaatgacaactctcagcacctgtcatgtccctcagtagaactgttgaaaccaagcctgtcaagaatctttgaacacacatccatggcaaacagctttaatacacactttgagatggaggagttataaaaagaaatgtcacagaagaaaaccacaaacttgttttactggacttgtgaatttttgagtacatactatgtgtttcagaaatatgtagaaataaaaatgttgccataaaataacacctaagcatatactattctatgctttaaaatgaggatggaaaagtttcatgtcataagtcaccacctggacaataattgatgcccttaaaatgctgaagacagatgtcatacccactgtgtagcctgtgtatgacttttactgaacacagttatgttttgaggcagcatggtttgattagcatttccgcatccatgcaaacgagtcacatatggtgggactggagccatagtaaaggttgatttacttctaccaactagtatataaagtactaattaaatgctaacataggaagttagaaaatactaataacttttattactcagcgatctattcttctgatgctaaataaattatatatcagaaaactttcaatattggtgactacctaaatgtgatttttgctggttactaaaatattcttaccacttaaaagagcaagctaacacattgtcttaagctgatcagggattttttgtatataagtctgtgttaaatctgtataattcagtcgatttcagttctgataatgttaagaataaccattatgaaaaggaaaatttgtcctgtatagcatcattatttttagcctttcctgttaataaagctttactattctgtcctgggcttatattacacatataactgttatttaaatacttaaccactaattttgaaaattaccagtgtgatacataggaatcattattcagaatgtagtctggtctttaggaagtattaataagaaaatttgcacataacttagttgattcagaaaggacttgtatgctgtttttctcccaaatgaagactctttttgacactaaacactttttaaaaagcttatctttgccttctccaaacaagaagcaatagtctccaagtcaatataaattctacagaaaatagtgttctttttctccagaaaaatgcttgtgagaatcattaaaacatgtgacaatttagagattctttgttttatttcactgattaatatactgtggcaaattacacagattattaaatttttttacaagagtatagtatatttatttgaaatgggaaaagtgcattttactgtattttgtgtattttgtttatttctcagaatatggaaagaaaattaaaatgtgtcaataaatattttctagagagt

SEQ ID NO: 31371 - DNA, 1495 bp, Homo sapiens
  source 1..1495: mol_type = unassigned DNA
attccttcgacgccaccattttaaagggatttactgcacggacttctcccaagttcctaggcattatcttctggaccctatcctgcagaggtgaagcgtccctttggggactctcgctgggaggcggcgacggcggcggcggggggagaggaagagaaagaagcgtctccagctgaagccaatgcagccctccggctctccgcgaagaagttccctgccccgatgagcccccgccgtgcgtccccgactatccccaggcgggcgtggggcaccgggcccagcgccgacgatcgctgccgttttgcccttgggagtaggatgtggtgaaaggatggggcttctcccttacggggctcacaatggccagagaagattccgtgaagtgtctgcgctgcctgctctacgccctcaatctgctcttttggttaatgtccatcagtgtgttggcagtttctgcttggatgagggactacctaaataatgttctcactttaactgcagaaacgagggtagaggaagcagtcattttgacttactttcctgtggttcatccggtcatgattgctgtttgctgtttccttatcattgtggggatgttaggatattgtggaacggtgaaaagaaatctgttgcttcttgcatggtactttggaagtttgcttgtcattttctgtgtagaactggcttgtggcgtttggacatatgaacaggaacttatggttccagtacaatggtcagatatggtcactttgaaagccaggatgacaaattatggattacctagatatcggtggcttactcatgcttggaatttttttcagagagagtttaagtgctgtggagtagtatatttcactgactggttggaaatgacagagatggactggcccccagattcctgctgtgttagagaattcccaggatgttccaaacaggcccaccaggaagatctcagtgacctttatcaagagggttgtgggaagaaaatgtattcctttttgagaggaaccaaacaactgcaggtgctgaggtttctgggaatctccattggggtgacacaaatcctggccatgattctcaccattactctgctctgggctctgtattatgatagaagggagccggggacagaccaaatgatgtccttgaagaatgacaactctcagcacctgtcatgtccctcagtagaactgttgaaaccaagcctgtcaagaatctttgaacacacatccatggcaaacagctttaatacacactttgagatggaggagttataaaaagaaatgtcacagaagaaaaccacaaacttgttttactggacttgtgaatttttgagtacatactatgtgtttcagaaatatgtagaaataaaaatgttgccataaaataacacctaagcatatactattctatgctttaaaatgaggatggaaaagtttcatgtcataagtcaccacctggacaataattgatgcccttaaaatgctgaagacag

SEQ ID NO: 31372 - DNA, 569 bp, Homo sapiens
  source 1..569: mol_type = unassigned DNA
agtgccgagcacagctgtcctcgaggaggggcgtggagtgagggaggttttcaagagcgtctcatcagaatgcacagggctccgccgcgtgtcccctgagaacgcgagtttactgtgcgacttcattcatccggatagttgctcttttcttttcccagcagatcgctgccgttttgcccttgggagtaggatgtggtgaaaggatggggcttctcccttacggggctcacaatggccagagaagattccgtgaagtgtctgcgctgcctgctctacgccctcaatctgctcttttggttaatgtccatcagtgtgttggcagtttctgcttggatgagggactacctaaataatgttctcactttaactgcagaaacgagggtagaggaagcagtcattttgacttactttcctgtggttcatccggtcatgattgctgtttgctgtttccttatcattgtggggatgttaggatattgtggaacggtgaaaagaaatctgttgcttcttgcatggtactttggaagtttgcttgtcattttctgtgtagaactggcttgtggcgtttg

SEQ ID NO: 31373 - DNA, 693 bp, Homo sapiens
  source 1..693: mol_type = unassigned DNA
accccttcaccccccttctcaaacacaaatattatcatataataaaagcctgcttctctatgcttataacccagcctccattccttcgacgccaccattttaaagggatttactgcacggacttctcccaagttcctaggcattatcttctggaccctatcctgcagaggaggcggcgacggcggcggcggggggagaggaagagaaagaagcgtctccagctgaagccaatgcagccctccggctctccgcgaagaagttccctgccccgatgagcccccgccgtgcgtccccgactatccccaggcgggcgtggggcaccgggcccagcgccgacgatcgctgccgttttgcccttgggagtaggatgtggtgaaaggatggggcttctcccttacggggctcacaatggccagagaagattccgtgaagtgtctgcgctgcctgctctacgccctcaatctgctcttttggttaatgtccatcagtgtgttggcagtttctgcttggatgagggactacctaaataatgttctcactttaactgcagaaacgagggtagaggaagcagtcattttgacttactttcctgtggttcatccggtcatgattgctgtttgctgtttccttatcattgtggggatgttaggatattgtggaacggtgaaaagaaatctgttgcttcttgcatgg

SEQ ID NO: 31374 - DNA, 551 bp, Homo sapiens
  source 1..551: mol_type = unassigned DNA
attcacacccgagctgcgggacggggtagaggggtgcggagttggagtgcccaggaactgtcctaactagaagggcgctcattctctcgggcttgccggtggcgcctctgacgtgtccgggatcgctgccgttttgcccttgggagtaggatgtggtgaaaggatggggcttctcccttacggggctcacaatggccagagaagattccgtgaagtgtctgcgctgcctgctctacgccctcaatctgctcttttggttaatgtccatcagtgtgttggcagtttctgcttggatgagggactacctaaataatgttctcactttaactgcagaaacgagggtagaggaagcagtcattttgacttactttcctgtggttcatccggtcatgattgctgtttgctgtttccttatcattgtggggatgttaggatattgtggaacggtgaaaagaaatctgttgcttcttgcatggtactttggaagtttgcttgtcattttctgtgtagaactggcttgtggcgtttggacatatgaacaggaacttatg

SEQ ID NO: 31375 - DNA, 551 bp, Homo sapiens
  source 1..551: mol_type = unassigned DNA
agggctccgccgcgtgtcccctgagaacgcgagtttactatcgctgccgttttgcccttgggagtaggatgtggtgaaaggatggggcttctcccttacggggctcacaatggccagagaagattccgtgaagtgtctgcgctgcctgctctacgccctcaatctgctcttttggttaatgtccatcagtgtgttggcagtttctgcttggatgagggactacctaaataatgttctcactttaactgcagaaacgagggtagaggaagcagtcattttgacttactttcctgtggttcatccggtcatgattgctgtttgctgtttccttatcattgtggggatgttaggatattgtggaacggtgaaaagaaatctgttgcttcttgcatggtactttggaagtttgcttgtcattttctgtgtagaactggcttgtggcgtttggacatatgaacaggaacttatggttccagtacaatggtcagatatggtcactttgaaagccaggatgacaaattatggattacctagatatcggtggcttactc

SEQ ID NO: 31376 - DNA, 1698 bp, Homo sapiens
  source 1..1698: mol_type = unassigned DNA
cggagagaacgccggtggcggggctggtagcccggcagccgcaggtggggccacgagcgctggctgagggaccgagccggagagccccggagcccccgtaacccgcgcggggagcgcccaggatgccgcgcggggactcggagcaggtgcgctactgcgcgcgcttctcctacctctggctcaagttttcacttatcatctattccaccgtgttctggctgattggggccctggtcctgtctgtgggcatctatgcagaggttgagcggcagaaatataaaacccttgaaagtgccttcctggctccagccatcatcctcatcctcctgggcgtcgtcatgttcatggtctccttcattggtgtgctggcgtccctccgtgacaacctgtaccttctccaagcattcatgtacatccttgggatctgcctcatcatggagctcattggtggcgtggtggccttgaccttccggaaccagaccattgacttcctgaacgacaacattcgaagaggaattgagaactactatgatgatctggacttcaaaaacatcatggactttgttcagaaaaagttcaagtgctgtggcggggaggactaccgagattggagcaagaatcagtaccacgactgcagtgcccctggacccctggcctgtggggtgccctacacctgctgcatcaggaacacgacagaagttgtcaacaccatgtgtggctacaaaactatcgacaaggagcgtttcagtgtgcaggatgtcatctacgtgcggggctgcaccaacgccgtgatcatctggttcatggacaactacaccatcatggcgggcatcctcctgggcatcctgcttccccagttcctgggggtgctgctgacgctgctgtacatcacccgggtggaggacatcatcatggagcactctgtcactgatgggctcctggggcccggtgccaagcccagcgtggaggcggcaggcacgggatgctgcttgtgctaccccaattagggcccagcctgccatggcagctccaacaaggaccgtctgggatagcacctctcagtcaacatcgtggggctggacagggctgcggcccctctgcccacactcagtactgaccaaagccagggctgtgtgtgcctgtgtgtaggtcccacggcctctgcctccccagggagcagagcctgggcctcccctaagaggctttccccgaggcagctctggaatctgtgcccacctggggcctggggaacaaggccctcctttctccaggcctgggctacgggggagggagagcctgaggctctgctcagggcccatttcatctctggcagtgccttggcggtggtattcaaggcagttttgtagcacctgtaattggggagagggagtgtgcccctcggggcaggagggaagggcatctggggaagggcaggagggaagagctgtccatgcagccacgcccatggccaggttggcctcttctcagcctcccaggtgccttgagccctcttgcaagggcggctgcttccttgagcctagtttttttacgtgatttttgtaacattcatttttttgtacagataacaggagtttctgactaatcaaagctggtatttccccgcatgtcttattcttgcccttcccccaaccagtttgttaatcaaacaataaaaacatgtttttttttttttttttt

SEQ ID NO: 31377 - DNA, 582 bp, Homo sapiens
  source 1..582: mol_type = unassigned DNA
atggggcgcttccgcgggggcctgcggtgcatcaagtacctgctgcttggcttcaacctgctcttctggctggctggatcggccgtcattgcttttggactatggtttcggttcggaggtgccataaaggagttatcatcagaggacaagtccccagagtatttctatgtggggctgtatgttctggttggagccggggccctgatgatggccgtggggttcttcgggtgctgcggagccatgcgggagtcgcaatgtgtgcttggatcattttttacctgcctcctggtgatatttgctgctgaagtaaccactggagtatttgcttttataggcaagggggtagctatccgacatgttcagaccatgtatgaagaggcttacaatgattaccttaaagacaggggaaaaggcaatgggacactcatcaccttccactcaacatttcagtgctgtggaaaagaaagctccgaacaggtccaacctacatgcccaaaggagcttctaggacacaagatctttggcatgatattcagcatggtcctctgctgtgcgatacgaaactcacgagatgtgatatga

SEQ ID NO: 31378 - DNA, 793 bp, Homo sapiens
  source 1..793: mol_type = unassigned DNA
ggagcctgccgctccccgcgctcgtagcgcgggcctggggactggggatcccgccgccgggccgcagcatggggcgcttccgcgggggcctgcggtgcatcaagtacctgctgcttggcttcaacctgctcttctggctggctggatcggccgtcattgcttttggactatggtttcggttcggaggtgccataaaggagttatcatcagaggacaagtccccagagtatttctatgtggggctgtatgttctggttggagccggggccctgatgatggccgtggggttcttcgggtgctgcggagccatgcgggagtcgcaatgtgtgcttggatcagctatccgacatgttcagaccatgtatgaagaggcttacaatgattaccttaaagacaggggaaaaggcaatgggacactcatcaccttccactcaacatttcagtgctgtggaaaagaaagctccgaacaggtccaacctacatgcccaaaggagcttctaggacacaagaattgcatcgatgaaattgagaccataatcagtgttaagctccagctcattggaattgtcggtattggaattgcaggtctgacgatctttggcatgatattcagcatggtcctctgctgtgcgatacgaaactcacgagatgtgatatgaagctacttctacatgaaaattgcaatctaaagctttcataccaaatgtcacaggagctgtctcccagctcatttttaacactgaaatgacattaggatctaaaataatttgctgtcaattgtacatttgcatga

SEQ ID NO: 31379 - DNA, 3177 bp, Homo sapiens
  source 1..3177: mol_type = unassigned DNA
ggggactggggatcccgccgccgggccgcagcatggggcgcttccgcgggggcctgcggtgcatcaagtacctgctgcttggcttcaacctgctcttctggctggctggatcggccgtcattgcttttggactatggtttcggttcggaggtgccataaaggagttatcatcagaggacaagtccccagagtatttctatgtggggctgtatgttctggttggagccggggccctgatgatggccgtggggttcttcgggtgctgcggagccatgcgggagtcgcaatgtgtgcttggatcattttttacctgcctcctggtgatatttgctgctgaagtaaccactggagtatttgcttttataggcaagggggtagctatccgacatgttcagaccatgtatgaagaggcttacaatgattaccttaaagacaggggaaaaggcaatgggacactcatcaccttccactcaacatttcagtgctgtggaaaagaaagctccgaacaggtccaacctacatgcccaaaggagcttctaggacacaagaattgcatcgatgaaattgagaccataatcagtgttaagctccagctcattggaattgtcggtattggaattgcaggtctgacgatctttggcatgatattcagcatggtcctctgctgtgcgatacgaaactcacgagatgtgatatgaagctacttctacatgaaaattgcaatctaaagctttcataccaaatgtcacaggagctgtctcccagctcatttttaacactgaaatgacattaggatctaaaataatttgctgtcaattgtacatttgcatgagtacgtatgtttggctcattactggtttaccccttgagtgaatgcctgtttatgatgactgagagcatattcatgtgtgatctgcgtgtttctggaatatgctttatacgtaatgaaatctgtttgctgggaattcctgattcttgttatataagaagaacaacctatttcgctcccagaaaaaaaagatcaaagagctttcagaaactttgagaacttggctatttagaaaaagtgataatgggtcagtttctcagactgtagccattgaaaattagatgcagagaattcagagatttcttcttaatggaagtaataagctgtaagaattgagagatcacaatggagtgttaaaactgactgtgtctaagttgggtgtaagggtttcctgggtttttttatatacatgctctccccagaatacagtaaaccacagttttagaactaaacacatctgtaaaactaaatatagcatggaaaatccaatttgaataagtcatgctttcctagaatttaaaaataaaaaagtcttcctctggaaagagaagtcacacagacaatcatgtgccctataaaagtgagtgtttataggactaaaaaacttttaacaactttttaaggaaatatttttgttcttatacaaaaacatgtaaatattgctttattactttcattttctgaccctgctgtaaactactgcaaccctcacatcctcaaagggacttttatgtcaaactcttctgtttctccaaatataaggaaaaaagactaaagcaagagatctggcagttgaaaattgtgggaaagagaatttgtatgggcactgtatctatgaaatacctcataacttacgtttacatgttttcctaactttttgtatttttcttgtatagccacctagagaattcttcatagattaagaactacagttttcaccacttaacataagtaaaacaaagtccttcataatttaaccattagcatctttggccaaaccaaaataaagaaaagcatcttctcctagttgtgtgtgggcaacagaaacaagttaaggaaacaaaaatacttatatatacacagaacaaaaataatgttctttttatgcaaatcccctgtgaaaataaaattttcaatgtttttttggtcttaacgcttcattttaacttagtaaacccaaatttaggatttacattggcaaatttttcagtgatttttaacgtgttacatttagtaaaccatagattttttaaaaactacattttgtaaggccacacataagtgaaaatacggaaggctttggaaacccccagatgaacttctatacatgtgaaaacacaagtctttgagtgtgcactaaaagtgtcacactcccaaaaaactcacaaaacattttgctaaaaagatatgactgcttgaaatagtctctctcccatggagaaccacatttctctttctgccatacttgctactgctactgattttggaggaaatttttctagaagaacaaaggtcatatttgaggcaagctaaaaacttaattatacatggctactttactgtgtctgtagctaaagaaaaattattttacaaaaattacttcatgaaatatagtttgtaccccagtagttgagaaatgtgaccttttaggcaaagaacaggcagtccatctctcttagctttagtttatctctctgcctgaagacaggaaacaggcccaagtgcatactcgggttctttccaactcagaatcatctctgattccacaaaagtgagtttagtttcctatctgaattaacaactttaaaggagactataatagttaaaagtggaagaatagaaataaataaatttaaaatgaaattaattaaagtagaagagaagggttctgttccatgtacgattaatgtgccccttttggagataagctttccaaaatatgcgtatgagtaaaattagagaattccaccactaagcaacaatagattttatatgtgtgtgtggatatatatacacacacacacagaaagatgaatatatatatatatatatctgtatagacacacatataatatatatagatatataatccctatatatcttgaatctacaaatatctttatatgtatataatttgaatatatacatgtatgtatatacagatgtgtgtgtatatatatatatacatacacatatacataaattttcagctatttctgttcccctgaactaatttgagattagacccaaacatgcttttaaatgtctcatgccaaggcactgaattaagacttcttaatgttgaaatattttaagtgatttcatattaaattttctatatactgaaa

SEQ ID NO: 31380 - DNA, 671 bp, Homo sapiens
  source 1..671: mol_type = unassigned DNA
ggcctgcggtgcatcaagtacctgctgcttggcttcaacctgctcttctggctggctggatcggccgtcattgcttttggactatggtttcggttcggaggtgccataaaggagttatcatcagaggacaagtccccagagtatttctatgtggggctgtatgttctggttggagccggggccctgatgatggccgtggggttcttcgggtgctgcggagccatgcgggagtcgcaatgtgtgcttggatcattttttacctgcctcctggtgatatttgctgctgaagtaaccactggagtatttgcttttataggcaagggggtagctatccgacatgttcagaccatgtatgaagaggcttacaatgattaccttaaagacaggggaaaaggcaatgggacactcatcaccttccactcaacatttcagtgctgtggaaaagaaagctccgaacaggtccaacctacatgcccaaaggagcttctaggacacaagatctttggcatgatattcagcatggtcctctgctgtgcgatacgaaactcacgagatgtgatatgaagctacttctacatgaaaattgcaatctaaagctttcataccaaatgtcacaggagctgtctcccagctcatttttaacactgaaatgacattaggatctaaaataa

SEQ ID NO: 31381 - DNA, 6035 bp, Homo sapiens
  source 1..6035: mol_type = unassigned DNA
ctgcagcctccgcagaggcgattggctgaagctaccggccgcgtggggcgggactcggttgccagggagcggcgcgggagccctgaggggactgcggcggctgcgcggaggagcgaggcacttgctggggtcggggctgcgcgacggcgcaggggctgcggggagcgccgcgcaggccgtgcagttcctagcgaggaggcgccgccgccattgccgctctctcggtgagcgcagccccgctctccgggccgggccttcgcgggccaccggcgccatgggccagtgcggcatcacctcctccaagaccgtgctggtctttctcaacctcatcttctggggggcagctggcattttatgctatgtgggagcctatgtcttcatcacttatgatgactatgaccacttctttgaagatgtgtacacgctcatccctgctgtagtgatcatagctgtaggagccctgcttttcatcattgggctaattggctgctgtgccacaatccgggaaagtcgctgtggacttgccacgtttgtcatcatcctgctcttggtttttgtcacagaagttgttgtagtggttttgggatatgtttacagagcaaaggtggaaaatgaggttgatcgcagcattcagaaagtgtataagacctacaatggaaccaaccctgatgctgctagccgggctattgattatgtacagagacagctgcattgttgtggaattcacaactactcagactgggaaaatacagattggttcaaagaaaccaaaaaccagagtgtccctcttagctgctgcagagagactgccagcaattgtaatggcagcctggcccacccttccgacctctatgctgaggggtgtgaggctctagtagtgaagaagctacaagaaatcatgatgcatgtgatctgggccgcactggcatttgcagctattcagctgctgggcatgctgtgtgcttgcatcgtgttgtgcagaaggagtagagatcctgcttacgagctcctcatcactggcggaacctatgcatagttgacaactcaagcctgagctttttggtcttgttctgatttggaaggtgaattgagcaggtctgctgctgttggcctctggagttcatttagttaaagcacatgtacactggtgttggacagagcagcttggcttttcatgtgcccacctacttacctactacctgcgactttctttttccttgttctagctgactcttcatgcccctaagattttaagtacgatggtgaacgttctaatttcagaaccaattgcgagtcatgtagtgtggtagaattaaaggaggacacgagcctgcttctgttacctccaagtggtaacaggactgatgccgaaatgtcaccaggtcctttcagtcttcacagtggagaactcttggccaaaggtttttgcggggaggaggaggaaaccagctttctggttaaggttaacaccagatggtgcccctcattggtgtccttttaaaaaatatttactgtagtccaataagatagcagctgtacaaaatgactaaaatagattgtaggatcatatggcgtatatcttggttcatcttcaaaatcagagactgagctttgaaactagtggtttttaatcaaagttggctttataggaggagtataatgtatgcactactgttttaaaagaattagtgtgagtgtgtttttgtatgaatgagcccattcatggtaagtcttaagcttgttggaaataatgtacccatgtagactagcaaaatagtatgtagatgtgatctcagttgtaaatagaaaaatctaattcaataaactctgtatcagcccccaacatattatttttcattatttgggggatatttcagttccagagcagcagtatcatgttttctttgttggtgctgtctatagttcatcatggtttacgtgtgttttcgttatagctgttgccagattctaaagggcttgatattcaaaaaaccacagatgctttcagtccagtatatcctagaaatatagagctctactttgtgcaatgcactggggatacagtggcgatactgtccttgtcttcaaggagttcggagtcctagtataggagacatacataggagaagataattttcacactgcagtggttgtagtaatagaatgggagtccaaaggggagttccggagaggtcaggggtgacttcctggaggagatgcccaagcttggaggctggataggctttgttgaaagatggtacacaagagtgtgaaacaaaattgtgtgtgcagggagcttaaaatacaaggctggggaaagaagttggagaagcaggaaagcccaggccctctagtgtcttacggaacatcctgtggaggtgagagctgacttgtaggtggaagcagctctttggaggtttgatttggaaggtgaactgagaagaaggtggtgatgcaagccggccgtgctgaagccaggatgaattggtgtgactgggcttcagttaggctggcatagcagttgagagagcttagcagtgggcagcagggcactgttgggggcggtggtgagcggtggattctggctgtttggaggcaggacagtggtggaattcgatcattgattggacgtgggacagagaagggagaagagaagactcatctaggatgagtcccaggtttctggctcagtcaactggggaaacaaagtcacagagctagggagtagttagagaacacatctgggggtgtgactcatggtcagttttgggctcgtcagttttgagatgcccaaatatcatgcagatctgtcccacctgaaaatggagaagacacgggaaaggagaggagtaaaaactaactccttttcacaaagtggaagttaccagaatgtgatttcagaggccccgggggatttatcatgtgactactgacccatcccacctcttgcccctgcctgttgcacagtgggcaagaatgtttgtgacctttcactaccaccacctcccccgagcatggtccccccagttttcaatatgaaccatcctgtgggtaccctgtcacaggctggccctgaggtgagcaatatttggactgtgatgttggttgttctccactctttctacaggacagaacagggcctctagagtgggaaatggctttgggaaatatgccaagcagtagccttgttcttcaacttgcccaagaggataattctccacacccttcctgtactcagtcctcagtttgcctggtgagagagcagcctcctcccgtgtgctctgccagctggacccagactggccatattaccagtgagaccaaaaagatggaggtggggaggtagctctgaggtctgggaaaccattccagctcctgccagttttaacttgtgtttaattcctggcacagttgtcctggaaatgcctttttctcttgcctgggaaccactagaaggggatgttgtctgtgttggccagggccatgcaaattcaacatcttgtttctgcccttcccccgtgtagctgaggctaggtgttggcattacccagtgcttgttcttcagagagcaaaagcactgctcgtcatgtctgaaatttagtgagtgagctcacccactaggctggtgtttcctgcccgtggctgcacattggaagcaccggggcactttgagaactacagatgcctgggtcccagagcatctaaggtgctctagggtgtgtccaggacacagccctggttgaggaccactgctatattgtatggcctcttttaaaaaagttaattttacttggaaatgatttcaaagctacagaaaagttgcaagaataaaaactgtacaaatgaggctcaaatatcctttgcccagatacacctattaacatttcgtcccattctatctgtcatgtgtgttctcaaatgtgtgtgcgttctctctcccttgcgccaaccccctgtctctccctctccctccctcctgctgcctccacacctgtcatggccttttacccctaatacctcagtgggtacttaccaagaagaagatactctctgacgactgcagtacagttgtcaaattccgtccatctaacactgatagaatacctcaccactcatattcccattggccgcatcgtgtcctctatagcacctttccctctgcggtgctggatctggtctggatcaggtaatcagttgagttgtcatgtctccttggtcttctttaatctggatcatttccatagctttgtctgtgatgataggaacagtttgtaaggatacagttcgttttaggtggtgctgcttatctgtgtttgtctgcgatttcctcgtgattagatttggttttgcattccaggtggctgaaccactacctgcgtcacgcggcctctcagggcatcgcatctcgaggcacacaatgcccatctgccccacagtggggatgttcgttttgatcatctagtccaaggaggaggaaatgtgaacaggaaggttttaatataagtaattgttaactgtgtagaaggtagttaactactaaaagggataaaaaagagctctaaagcagcttagcagagaacagccatcacccctagggctaagggaagagaaaacagagaaggaacgtggaaactcagaggaggttccccaaggtggagagacctccgaggggtggctgtggttgcctgggatatgctgcctgtcccatgctggagaatcaacttactggaggtgcccccccgccaagccacaggagcagagagctgtcacggtggggaatgctgctgggacccgtgcaggacgaaaggagacagaagaaaaaggccatcttcctcctctagccttgttagccccttcagagcccactgtgggtcaggctggcaaagggtaaaggagttttcagagccccctcttcagtgtgacaaggaagggcaaggtcagggaaatttggagttaagaggcaataaatgagtacctggcacacctagtcgaggtgtgtccactttctccatagcatggttactgtttttttcttttcaactaataagaaatctctggagacacactgtctccatgtacataccctgttcctcatgagactcttcccccattccccgaccaggttcagcaaatgttgctgattctggcctgattcaatctttatgatgactgccaagcgacgtttctgcagcccagcactccttcctcatttgccagtcatccctcccttctccttcatttattttcatatatccactatggattcccattttttcaaaagtcgacttcatcattgacctttggggatgggggaagagttcctcagatagttcccgacttggccagcgagagccccttcgagtgcctcctatatcccagcatttttggaagcactcccctaatttctgatctaacaagatgttccaggcccctgggcaccagccatggatcagtgtttgtcccaggagccctggtccctggcactaggtgtgcttattgcagctggggtgtctttgcttcttgtcctatagatgattgacagagcttgtcttactgccttttttaagtgtatttttttaaacaaaagtaattggtgctttaaaaaatgtgaacaatacagacatctgtaaagaagtacccacagggaagcaagttcagcagttcagcaatggcatgtgtctttgcagactacatacacagaaacagacttggtattgggttttggtttttgctttttgctaataggaattttatcctacaagatcctctttctgtcttcacaacatagtctgatgctccttccatgtctaactgtaggatttgtcattccattgtgttagctgtgtgggtacattagtaccatgattaaccaaggtgtataaagggcaggcctgcaggctgcctccagtgcctccactactcgccacagtgatcatctctatacacacactgcagtcatttacaatttttaaaatgaaaacaatttttattgagatgcaattcacatggcataaaattaacgattttaaagtaaa

SEQ ID NO: 31382 - DNA, 1647 bp, Homo sapiens
  source 1..1647: mol_type = unassigned DNA
acttgctggggtcggggctgcgcgacggcgcaggggctgcggggagcgccgcgcaggccgtgcagttcctagcgaggaggcgccgccgccattgccgctctctcggtgagcgcagccccgctctccgggccgggccttcgcgggccaccggcgccatgggccagtgcggcatcacctcctccaagaccgtgctggtctttctcaacctcatcttctggggggcagctggcattttatgctatgtgggagcctatgtcttcatcacttatgatgactatgaccacttctttgaagatgtgtacacgctcatccctgctgtagtgatcatagctgtaggagccctgcttttcatcattgggctaattggctgctgtgccacaatccgggaaagtcgctgtggacttgccacggtggaaaatgaggttgatcgcagcattcagaaagtgtataagacctacaatggaaccaaccctgatgctgctagccgggctattgattatgtacagagacagctgcattgttgtggaattcacaactactcagactgggaaaatacagattggttcaaagaaaccaaaaaccagagtgtccctcttagctgctgcagagagactgccagcaattgtaatggcagcctggcccacccttccgacctctatgctgaggggtgtgaggctctagtagtgaagaagctacaagaaatcatgatgcatgtgatctgggccgcactggcatttgcagctattcagctgctgggcatgctgtgtgcttgcatcgtgttgtgcagaaggagtagagatcctgcttacgagctcctcatcactggcggaacctatgcatagttgacaactcaagcctgagctttttggtcttgttctgatttggaaggtgaattgagcaggtctgctgctgttggcctctggagttcatttagttaaagcacatgtacactggtgttggacagagcagcttggcttttcatgtgcccacctacttacctactacctgcgactttctttttccttgttctagctgactcttcatgcccctaagattttaagtacgatggtgaacgttctaatttcagaaccaattgcgagtcatgtagtgtggtagaattaaaggaggacacgagcctgcttctgttacctccaagtggtaacaggactgatgccgaaatgtcaccaggtcctttcagtcttcacagtggagaactcttggccaaaggtttttgcggggaggaggaggaaaccagctttctggttaaggttaacaccagatggtgcccctcattggtgtccttttaaaaaatatttactgtagtccaataagatagcagctgtacaaaatgactaaaatagattgtaggatcatatggcgtatatcttggttcatcttcaaaatcagagactgagctttgaaactagtggtttttaatcaaagttggctttataggaggagtataatgtatgcactactgttttaaaagaattagtgtgagtgtgtttttgtatgaatgagcccattcatggtaagtcttaagcttgttggaaataatgtacccatgtagactagcaaaatagtatgtagatgtgatctcagttgtaaatagaaaaatctaattcaataaactctgtatcagccccc

SEQ ID NO: 31383 - DNA, 1459 bp, Homo sapiens
  source 1..1459: mol_type = unassigned DNA
atgtgggagcctatgtcttcatcacttatgatgactatgaccacttctttgaagatgtgtacacgctcatccctgcttttcatcattgggctaattggctgctgtgccacaatccgggaaagtcgctgtggacttgccacgtttgtcatcatcctgctcttggtttttgtcacagaagttgttgtagtggttttgggatatgtttacagagcaaaggtggaaaatgaggttgatcgcagcattcagaaagtgtataagacctacaatggaaccaaccctgatgctgctagccgggctattgattatgtacagagacagctgcattgttgtggaattcacaactactcagactgggaaaatacagattggttcaaagaaaccaaaaaccagagtgtccctcttagctgctgcagagagactgccagcaattgtaatggcagcctggcccacccttccgacctctatgctgaggggtgtgaggctctagtagtgaagaagctacaagaaatcatgatgcatgtgatctgggccgcactggcatttgcagctattcagcagctgctgggcatgctgtgtgcttgcatcgtgttgtgcagaaggagtagagatcctgcttacgagctcctcatcactggcggaacctatgcatagttgacaactcaagcctgagctttttggtcttgttctgatttggaaggtgaattgagcaggtctgctgctgttggcctctggagttcatttagttaaagcacatgtacactggtgttggacagagcagcttggcttttcatgtgcccacctacttacctactacctgcgactttctttttccttgttctagctgactcttcatgcccctaagattttaagtacgatggtgaacgttctaatttcagaaccaattgcgagtcatgtagtgtggtagaattaaaggaggacacgagcctgcttctgttacctccaagtggtaacaggactgatgccgaaatgtcaccaggtcctttcagtcttcacagtggagaactcttggccaaaggtttttgcggggaggaggaggaaaccagctttctggttaaggttaacaccagatggtgcccctcattggtgtccttttaaaaaatatttactgtagtccaataagatagcagctgtacaaaatgactaaaatagattgtaggatcatatggcgtatatcttggttcatcttcaaaatcagagactgagctttgaaactagtggtttttaatcaaagttggctttataggaggagtataatgtatgcactactgttttaaaagaattagtgtgagtgtgtttttgtatgaatgagcccattcatggtaagtcttaagcttgttggaaataatgtacccatgtagactagcaaaatagtatgtagatgtgatctcagttgtaaatagaaaaatctaattcaataaactctgtatcagcccccaac

SEQ ID NO: 31384 - DNA, 1530 bp, Homo sapiens
  source 1..1530: mol_type = unassigned DNA
acttgctggggtcggggctgcgcgacggcgcaggggctgcggggagcgccgcgcaggccgtgcagttcctagcgaggaggcgccgccgccattgccgctctctcggtgagcgcagccccgctctccgggccgggccttcgcgggccaccggcgccatgggccagtgcggcatcacctcctccaagaccgtgctggtctttctcaacctcatcttctggtttgtcatcatcctgctcttggtttttgtcacagaagttgttgtagtggttttgggatatgtttacagagcaaaggtggaaaatgaggttgatcgcagcattcagaaagtgtataagacctacaatggaaccaaccctgatgctgctagccgggctattgattatgtacagagacagctgcattgttgtggaattcacaactactcagactgggaaaatacagattggttcaaagaaaccaaaaaccagagtgtccctcttagctgctgcagagagactgccagcaattgtaatggcagcctggcccacccttccgacctctatgctgaggggtgtgaggctctagtagtgaagaagctacaagaaatcatgatgcatgtgatctgggccgcactggcatttgcagctattcagctgctgggcatgctgtgtgcttgcatcgtgttgtgcagaaggagtagagatcctgcttacgagctcctcatcactggcggaacctatgcatagttgacaactcaagcctgagctttttggtcttgttctgatttggaaggtgaattgagcaggtctgctgctgttggcctctggagttcatttagttaaagcacatgtacactggtgttggacagagcagcttggcttttcatgtgcccacctacttacctactacctgcgactttctttttccttgttctagctgactcttcatgcccctaagattttaagtacgatggtgaacgttctaatttcagaaccaattgcgagtcatgtagtgtggtagaattaaaggaggacacgagcctgcttctgttacctccaagtggtaacaggactgatgccgaaatgtcaccaggtcctttcagtcttcacagtggagaactcttggccaaaggtttttgcggggaggaggaggaaaccagctttctggttaaggttaacaccagatggtgcccctcattggtgtccttttaaaaaatatttactgtagtccaataagatagcagctgtacaaaatgactaaaatagattgtaggatcatatggcgtatatcttggttcatcttcaaaatcagagactgagctttgaaactagtggtttttaatcaaagttggctttataggaggagtataatgtatgcactactgttttaaaagaattagtgtgagtgtgtttttgtatgaatgagcccattcatggtaagtcttaagcttgttggaaataatgtacccatgtagactagcaaaatagtatgtagatgtgatctcagttgtaaatagaaaaatctaattcaataaactctgtatcagccccc

SEQ ID NO: 31385 - DNA, 1849 bp, Homo sapiens
  source 1..1849: mol_type = unassigned DNA
agttttaagtttcgcccaatgaaaaaacaaaaggagagggacagaaggcgggtcggtgacgtaatgcgggttgattggcatgcaggccttggacgtccaggattagccacgcatttcgccaatccagaggcaggggagggacggtgcaggcgcagagtattgggtttggctggcctcgatttaaagagacagaagctgtcggggtcctggaagacggtccccaataccctccccccaagtccttgggaccacttgggtccccagagctggggagatggtttgtggcggctttgcctgctccaagaatgcgctttgcgctctcaacgtggtctacatgctggtgagcttgttgctcattggagtggctgcttggggcaagggcctgggtctggtgtccagcatccacatcatcggcggagtcattgctgtgggagtcttccttctccttattgcagtggctggactggtgggtgctgtcaaccaccaccaagtcctgctgttcttttacatgatcatccttggtttggtcttcatcttccaatttgtaatctcttgctcatgtctggctattaaccgaagcaaacagacagatgtcatcaatgcttcttggtgggtcatgagcaacaagactcgggatgaactggaaagaagttttgattgttgtggcttattcaacctcacaaccctgtatcaacaagattatgatttctgcactgcaatctgcaagagccagagccccacatgccagatgtgtggagaaaagtttcttaagcattcagacgaagccctgaaaatcctagggggtgttggactcttctttagctttacagagatccttggtgtttggctagcaatgagatttcggaatcagaaggatcctagagccaaccccagtgcctttctatgagactttggatccttctgacttttcttctgctctctctaagctttctcttcctcccttagggaatatctagggtctgtaaccgttttggtttgagaaaaaggaaaggccccttgtcacatcctctaaaattgatggaatagcaagactttatgccttgacatattttagtgggagccagactataaggaataaaaggaaaaactttcttcctctctctccaagaggatatgggaagcttctgtgagtgcataggatgggggctggagtcattcttagctgtttcccttcctctgtccatatactggatcacctcaacataccctggtgtggctctaagggtaaatcagggatagggccaaggagaaaacaaccaagaactctttcctgtaataagcaggatccagtttgagaaagtttagcgaatataaaagtaaaagccatttaaaaatctatattctttttttttttttgacacagagtcttgctctgttgcccaggctggagtgcaatggcatgatctcggctcaccgcaacctctgcctcccgggttcaagcgatcctcctgcctcagtctcccaagtagctgggattacaggtgtgcaccaccacgcctgactaattttgtatttttagtagagacagggtttcaccatgttagtcaggctggtctcgaactcctgacctcaggtgatccacccgcgttggcctcccaacgtgctgggattataggcgtgagccaccacgccccgcctaaaatccatattcaaagaagcaatttcagttcctttctaagctttgtcagtcaaggggctccactgacttcctaggccctgtaatttaaccagtctttaaggttttgcaggaaagtcccttcttccaagtggtttttccaaatcgcacaatggcaaagccaaacagaggaagaaacattaaaaaaaaaaa

SEQ ID NO: 31386 - DNA, 1318 bp, Homo sapiens
  source 1..1318: mol_type = unassigned DNA
agggcgatgttgacagacagacagaggggcggatgcagcctacctcctgggcagtgagctgcggtctgaggcccctgcccagctggaaaccacagggaggggaagggaggggaggagaggagaggagaggaaccgtcatggggccttggagtcgagtcagggttgccaaatgccagatgctggtcacctgcttctttatcttgctgctgggcctctctgtggccaccatggtgactcttacctacttcggggcccactttgctgtcatccgccgagcgtccctggagaagaacccgtaccaggctgtgcaccaatgggccttctctgcggggttgagcctggtgggcctcctgactctgggagccgtgctgagcgctgcagccaccgtgagggaggcccagggcctcatggcagggggcttcctgtgcttctccctggcgttctgcgcacaggtgcaggtggtgttctggagactccacagccccacccaggtggaggacgccatgctggacacctacgacctggtatatgagcaggcgatgaaaggtacgtcccacgtccggcggcaggagctggcggccatccaggacgtgtttctgtgctgtgggaagaagtctcctttcagccgtctggggagcacagaggctgacctgtgtcagggagaggaggcggcgagagaggactgccttcagggcatccggagcttcctgaggacacaccagcaggtcgcctccagcctgaccagcatcggcctggccctcacggtgtccgccttgctcttcagctccttcctgtggtttgccatccgctgtggctgcagcttggaccgcaagggcaaatacaccctgaccccacgagcatgtggccgccagccccaggagcccagcctcttgagatgctcccagggtggacccacacattgtctccactccgaagcagttgctattggtccaagaggatgctcgggtagtcttcggtggctgcaggagagcgatgctgcgcctctgcccctctcctgccacctggctgcccacagagctctccagggcagaagtcgcggtgggctcagtgggtgccctgagcggggtctctcagactgacgtcaggccttggtgggctgcactctcacctggaggctccggggaagcatctgcctccaggaccattcaggctgttgacaagtcaactcctcatggctgtaggactgaggttcccaagtccttgtccctggtcctgtggtccctccaccttcaaaccagcaatggtgcattgagcaaattgtggtcaaatatacatcacatcaaatttaccatcttaa

SEQ ID NO: 31387 - DNA, 999 bp, Homo sapiens
  source 1..999: mol_type = unassigned DNA
atggggccttggagtcgagtcagggttgccaaatgccagatgctggtcacctgcttctttatcttgctgctgggcctctctgtggccaccatggtgactcttacctacttcggggcccactttgctgtcatccgccgagcgtccctggagaagaacccgtaccaggctgtgcaccaatgggccttctctgcggggttgagcctggtgggcctcctgactctgggagccgtgctgagcgctgcagccaccgtgagggaggcccagggcctcatggcagggggcttcctgtgcttctccctggcgttctgcgcacaggtgcaggtggtgttctggagactccacagccccacccaggtggaggacgccatgctggacacctacgacctggtatatgagcaggcgatgaaaggtacgtcccacgtccggcggcaggagctggcggccatccaggacgtgtttctgtgctgtgggaagaagtctcctttcagccgtctggggagcacagaggctgacctgtgtcagggagaggaggcggcgagagaggactgccttcagggcatccggagcttcctgaggacacaccagcaggtcgcctccagcctgaccagcatcggcctggccctcacggtgtccgccttgctcttcagctccttcctgtggtttgccatccgctgtggctgcagcttggaccgcaagggcaaatacaccctgaccccacgctctccagggcagaagtcgcggtgggctcagtgggtgccctgagcggggtctctcagactgacgtcaggccttggtgggctgcactctcacctggaggctccggggaagcatctgcctccaggaccattcaggctgttgacaagtcaactcctcatggctgtaggactgaggttcccaagtccttgtccctggtcctgtggtccctccaccttcaaaccagcaatggtgcattgagcaaattgtggtcaaatatacatcacatcaaatttaccatcttaa

SEQ ID NO: 31388 - DNA, 1332 bp, Homo sapiens
  source 1..1332: mol_type = unassigned DNA
aaagctgcggcggcggttcgcgtttctcgtgtccgcttgactgacagctgcgcggcgggagcgggcggcgcgagcgggaggcggcggcgcagagcttggggcttccttggtcgcacccaccacctgcctgcccactggtcagccttcagggaccctgagcaccgcctggtctctttcctgtggccagcccagctgggaggctgtggcgtgctgggtgtcggcatctggctggccgccacacaggggagcttcgccacgctgtcctcttccttcccgtccctgtcggctgccaacttgctcatcatcaccggcgcctttgtcatggccatcggcttcgtgggctgcctgggtgccatcaaggagaacaagtgcctcctgctcactttcttcctgctgctgctgctggtgttcctgctggaggccaccatcgccatcctcttcttcgcctacacggacaagattgacaggtatgcccagcaagacctgaagaaaggcttgcacctgtacggcacgcagggcaacgtgggcctcaccaacgcctggagcatcatccagaccgacttccgctgctgtggcgtctccaactacactgactggttcgaggtgtacaacgccacgcgggtacctgactcctgctgcttggagttcagtgagagctgtgggctgcacgcccccggcacctggtggaaggcgccgtgctacgagacggtgaaggtgtggcttcaggagaacctgctggctgtgggcatctttgggctgtgcacggcgctggtgcagatcctgggcctgaccttcgccatgaccatgtactgccaagtggtcaaggcagacacctactgcgcgtaggccgcccaccgcccgcttctctgccaaaaggacgcccacggggagatggccgcacccacagctgcctttcccaccaccagcctcggtgctctgccccatgctgggaggagggagggagggacaggtgcctggagcccccggaaccctgtttctggaaggccctagctcaggtggcttcagggcctccggaccccccctgggaggggtggccacgtgctggctgcggaacccagggcaggggtgggaggggcctccagcactttttatatttacgtattctccaaagcagtgttcacacgggagccagcctgtggcccccagcctcctggaaaacaggttggcgctggaggagccgggtcttggcatcctggaggtggccccactggtcctggtgctccaggcggggccgtggacccctcacctacattccatagtgggcccgtggggctcctggtgcatcttaataaagtgtgagcagcaaccttg

SEQ ID NO: 31389 - DNA, 1423 bp, Homo sapiens
  source 1..1423: mol_type = unassigned DNA
gtctgagcagggccgtaaagctgcggcggcggttcgcgtttctcgtgtccgcttgactgacagctgcgcggcgggagcgggcggcgcgagcgggaggcggcggcgcagagcttggggcttccttggtcgcacccaccacctgcctgcccactggtcagccttcagggaccctgagcaccgcctggtctctttcctgtggccagcccagaactgaagcgctgcggcatggcgcgcgcctgcctccaggccgtcaagtacctcatgttcgccttcaacctgctcttctggctgggaggctgtggcgtgctgggtgtcggcatctggctggccgccacacaggggagcttcgccacgctgtcctcttccttcccgtccctgtcggctgccaacttgctcatcatcaccggcgcctttgtcatggccatcggcttcgtgggctgcctgggtgccatcaaggagaacaagtgcctcctgctcactttcttcctgctgctgctgctggtgttcctgctggaggccaccatcgccatcctcttcttcgcctacacggacaagattgacaggtatgcccagcaagacctgaagaaaggcttgcacctgtacggcacgcagggcaacgtgggcctcaccaacgcctggagcatcatccagaccgacttccgctgctgtggcgtctccaactacactgactggttcgaggtgtacaacgccacgcgggtacctgactcctgctgcttggagttcagtgagagctgtgggctgcacgcccccggcacctggtggaaggcgccgtgctacgagacggtgaaggtgtggcttcaggagaacctgctggctgtgggcatctttgggctgtgcacggcgctggtgcagatcctgggcctgaccttcgccatgaccatgtactgccaagtggtcaaggcagacacctactgcgcgtaggccgcccaccgcccgcttctctgccaaaaggacgcccacggggagatggccgcacccacagctgcctttcccaccaccagcctcggtgctctgccccatgctgggaggagggagggagggacaggtgcctggagcccccggaaccctgtttctggaaggccctagctcaggtggcttcagggcctccggaccccccctgggaggggtggccacgtgctggctgcggaacccagggcaggggtgggaggggcctccagcactttttatatttacgtattctccaaagcagtgttcacacgggagccagcctgtggcccccagcctcctggaaaacaggttggcgctggaggagccgggtcttggcatcctggaggtggccccactggtcctggtgctccaggcggggccgtggacccctcacctacattccatagtgggcccgtggggctcctggtgcatcttaataaagtgtgagcagcaa

SEQ ID NO: 31390 - DNA, 1462 bp, Homo sapiens
  source 1..1462: mol_type = unassigned DNA
actgccccagcctcaggctctgtgcatctcccccgagcccccaccacatatgtgcggaggcccctgggggcccaggcctgtcctcagtcccgactgggctctacctgaggaccctggggagcctgggcctggccctcctcagagcttggggcttccttggtcgcacccaccacctgcctgcccactggtcagccttcagggaccctgagcaccgcctggtctctttcctgtggccagcccagaactgaagcgctgcggcatggcgcgcgcctgcctccaggccgtcaagtacctcatgttcgccttcaacctgctcttctggctgggaggctgtggcgtgctgggtgtcggcatctggctggccgccacacaggggagcttcgccacgctgtcctcttccttcccgtccctgtcggctgccaacttgctcatcatcaccggcgcctttgtcatggccatcggcttcgtgggctgcctgggtgccatcaaggagaacaagtgcctcctgctcactttcttcctgctgctgctgctggtgttcctgctggaggccaccatcgccatcctcttcttcgcctacacggacaagattgacaggtatgcccagcaagacctgaagaaaggcttgcacctgtacggcacgcagggcaacgtgggcctcaccaacgcctggagcatcatccagaccgacttccgctgctgtggcgtctccaactacactgactggttcgaggtgtacaacgccacgcgggtacctgactcctgctgcttggagttcagtgagagctgtgggctgcacgcccccggcacctggtggaaggcgccgtgctacgagacggtgaaggtgtggcttcaggagaacctgctggctgtgggcatctttgggctgtgcacggcgctggtgcagatcctgggcctgaccttcgccatgaccatgtactgccaagtggtcaaggcagacacctactgcgcgtaggccgcccaccgcccgcttctctgccaaaaggacgcccacggggagatggccgcacccacagctgcctttcccaccaccagcctcggtgctctgccccatgctgggaggagggagggagggacaggtgcctggagcccccggaaccctgtttctggaaggccctagctcaggtggcttcagggcctccggaccccccctgggaggggtggccacgtgctggctgcggaacccagggcaggggtgggaggggcctccagcactttttatatttacgtattctccaaagcagtgttcacacgggagccagcctgtggcccccagcctcctggaaaacaggttggcgctggaggagccgggtcttggcatcctggaggtggccccactggtcctggtgctccaggcggggccgtggacccctcacctacattccatagtgggcccgtggggctcctggtgcatcttaataaagtgtgagcagcaaccttg

SEQ ID NO: 31391 - DNA, 1426 bp, Homo sapiens
  source 1..1426: mol_type = unassigned DNA
tggacgcacatcctgctctgggcagaagggcaggacaggggccctgagtaacggtggcctggggtcagagccaggttcagctgcgaggctgctggtggctgtggagagcttggggcttccttggtcgcacccaccacctgcctgcccactggtcagccttcagggaccctgagcaccgcctggtctctttcctgtggccagcccagaactgaagcgctgcggcatggcgcgcgcctgcctccaggccgtcaagtacctcatgttcgccttcaacctgctcttctggctgggaggctgtggcgtgctgggtgtcggcatctggctggccgccacacaggggagcttcgccacgctgtcctcttccttcccgtccctgtcggctgccaacttgctcatcatcaccggcgcctttgtcatggccatcggcttcgtgggctgcctgggtgccatcaaggagaacaagtgcctcctgctcactttcttcctgctgctgctgctggtgttcctgctggaggccaccatcgccatcctcttcttcgcctacacggacaagattgacaggtatgcccagcaagacctgaagaaaggcttgcacctgtacggcacgcagggcaacgtgggcctcaccaacgcctggagcatcatccagaccgacttccgctgctgtggcgtctccaactacactgactggttcgaggtgtacaacgccacgcgggtacctgactcctgctgcttggagttcagtgagagctgtgggctgcacgcccccggcacctggtggaaggcgccgtgctacgagacggtgaaggtgtggcttcaggagaacctgctggctgtgggcatctttgggctgtgcacggcgctggtgcagatcctgggcctgaccttcgccatgaccatgtactgccaagtggtcaaggcagacacctactgcgcgtaggccgcccaccgcccgcttctctgccaaaaggacgcccacggggagatggccgcacccacagctgcctttcccaccaccagcctcggtgctctgccccatgctgggaggagggagggagggacaggtgcctggagcccccggaaccctgtttctggaaggccctagctcaggtggcttcagggcctccggaccccccctgggaggggtggccacgtgctggctgcggaacccagggcaggggtgggaggggcctccagcactttttatatttacgtattctccaaagcagtgttcacacgggagccagcctgtggcccccagcctcctggaaaacaggttggcgctggaggagccgggtcttggcatcctggaggtggccccactggtcctggtgctccaggcggggccgtggacccctcacctacattccatagtgggcccgtggggctcctggtgcatcttaataaagtgtgagcagcaaccttg

SEQ ID NO: 31392 - DNA, 1430 bp, Homo sapiens
  source 1..1430: mol_type = unassigned DNA
cgtgcggccagggtcccgtggccggaggtgtccgaccgggagcggctggagccggacgcgagcggggcgcgcgagttcgagcccagagccgacacgcagcaacaagtgggagcttggggcttccttggtcgcacccaccacctgcctgcccactggtcagccttcagggaccctgagcaccgcctggtctctttcctgtggccagcccagaactgaagcgctgcggcatggcgcgcgcctgcctccaggccgtcaagtacctcatgttcgccttcaacctgctcttctggctgggaggctgtggcgtgctgggtgtcggcatctggctggccgccacacaggggagcttcgccacgctgtcctcttccttcccgtccctgtcggctgccaacttgctcatcatcaccggcgcctttgtcatggccatcggcttcgtgggctgcctgggtgccatcaaggagaacaagtgcctcctgctcactttcttcctgctgctgctgctggtgttcctgctggaggccaccatcgccatcctcttcttcgcctacacggacaagattgacaggtatgcccagcaagacctgaagaaaggcttgcacctgtacggcacgcagggcaacgtgggcctcaccaacgcctggagcatcatccagaccgacttccgctgctgtggcgtctccaactacactgactggttcgaggtgtacaacgccacgcgggtacctgactcctgctgcttggagttcagtgagagctgtgggctgcacgcccccggcacctggtggaaggcgccgtgctacgagacggtgaaggtgtggcttcaggagaacctgctggctgtgggcatctttgggctgtgcacggcgctggtgcagatcctgggcctgaccttcgccatgaccatgtactgccaagtggtcaaggcagacacctactgcgcgtaggccgcccaccgcccgcttctctgccaaaaggacgcccacggggagatggccgcacccacagctgcctttcccaccaccagcctcggtgctctgccccatgctgggaggagggagggagggacaggtgcctggagcccccggaaccctgtttctggaaggccctagctcaggtggcttcagggcctccggaccccccctgggaggggtggccacgtgctggctgcggaacccagggcaggggtgggaggggcctccagcactttttatatttacgtattctccaaagcagtgttcacacgggagccagcctgtggcccccagcctcctggaaaacaggttggcgctggaggagccgggtcttggcatcctggaggtggccccactggtcctggtgctccaggcggggccgtggacccctcacctacattccatagtgggcccgtggggctcctggtgcatcttaataaagtgtgagcagcaaccttg

SEQ ID NO: 31393 - DNA, 1025 bp, Homo sapiens
  source 1..1025: mol_type = unassigned DNA
gagcagggccgtaaagctgcggcggcggttcgcgtttctcgtgtccgcttgactgacagctgcgcggcgggagcgggcggcgcgagcgggaggcggcggcgcagaactgaagcgctgcggcatggcgcgcgcctgcctccaggccgtcaagtacctcatgttcgccttcaacctgctcttctggctgggaggctgtggcgtgctgggtgtcggcatctggctggccgccacacaggggagcttcgccacgctgtcctcttccttcccgtccctgtcggctgccaacttgctcatcatcaccggcgcctttgtcatggccatcggcttcgtgggctgcctgggtgccatcaaggagaacaagtgcctcctgctcactttcttcctgctgctgctgctggtgttcctgctggaggccaccatcgccatcctcttcttcgcctacacggacaagattgacaggtatgcccagcaagacctgaagaaaggcttgcacctgtacggcacgcagggcaacgtgggcctcaccaacgcctggagcatcatccagaccgacttccgctgctgtggcgtctccaactacactgactggttcgaggtgtacaacgccacgcgggtacctgactcctgctgcttggagttcagtgagagctgtgggctgcacgcccccggcacctggtggaaggcgccgtgctacgagacggtgaaggtgtggcttcaggagaacctgctggctgtgggcatctttgggctgtgcacggcgctggtgcagatcctgggcctgaccttcgccatgaccatgtactgccaagtggtcaaggcagacacctactgcgcgtaggccgcccaccgcccgcttctctgccaaaaggacgcccacggggagatggccgcacccacagctgcctttcccaccaccagcctcggtgctctgccccatgctgggaggagggagggagggacaggtgcctggagcccccggaaccctgtttctggaaggccctagctcaggtggcttcagggcctcc

SEQ ID NO: 31394 - DNA, 1339 bp, Homo sapiens
  source 1..1339: mol_type = unassigned DNA
agaggcgtggggtaggctgcagggcacagctgggggcctctgtccccatctccggctgtgggaggtgtgtgcgcatccggcgtgatgacacccaggagtgcaggcacatctgcgcacggggccgaactgaagcgctgcggcatggcgcgcgcctgcctccaggccgtcaagtacctcatgttcgccttcaacctgctcttctggctgggaggctgtggcgtgctgggtgtcggcatctggctggccgccacacaggggagcttcgccacgctgtcctcttccttcccgtccctgtcggctgccaacttgctcatcatcaccggcgcctttgtcatggccatcggcttcgtgggctgcctgggtgccatcaaggagaacaagtgcctcctgctcactttcttcctgctgctgctgctggtgttcctgctggaggccaccatcgccatcctcttcttcgcctacacggacaagattgacaggtatgcccagcaagacctgaagaaaggcttgcacctgtacggcacgcagggcaacgtgggcctcaccaacgcctggagcatcatccagaccgacttccgctgctgtggcgtctccaactacactgactggttcgaggtgtacaacgccacgcgggtacctgactcctgctgcttggagttcagtgagagctgtgggctgcacgcccccggcacctggtggaaggcgccgtgctacgagacggtgaaggtgtggcttcaggagaacctgctggctgtgggcatctttgggctgtgcacggcgctggtgcagatcctgggcctgaccttcgccatgaccatgtactgccaagtggtcaaggcagacacctactgcgcgtaggccgcccaccgcccgcttctctgccaaaaggacgcccacggggagatggccgcacccacagctgcctttcccaccaccagcctcggtgctctgccccatgctgggaggagggagggagggacaggtgcctggagcccccggaaccctgtttctggaaggccctagctcaggtggcttcagggcctccggaccccccctgggaggggtggccacgtgctggctgcggaacccagggcaggggtgggaggggcctccagcactttttatatttacgtattctccaaagcagtgttcacacgggagccagcctgtggcccccagcctcctggaaaacaggttggcgctggaggagccgggtcttggcatcctggaggtggccccactggtcctggtgctccaggcggggccgtggacccctcacctacattccatagtgggcccgtggggctcctggtgcatcttaataaagtgtgagcagcaa

SEQ ID NO: 31395 - DNA, 1031 bp, Homo sapiens
  source 1..1031: mol_type = unassigned DNA
aggggccctgagtaacggtggcctggggtcagagccaggttcagctgcgaggctgctggtggctgtggagaactgaagcgctgcggcatggcgcgcgcctgcctccaggccgtcaagtacctcatgttcgccttcaacctgctcttctggctgggaggctgtggcgtgctgggtgtcggcatctggctggccgccacacaggggagcttcgccacgctgtcctcttccttcccgtccctgtcggctgccaacttgctcatcatcaccggcgcctttgtcatggccatcggcttcgtgggctgcctgggtgccatcaaggagaacaagtgcctcctgctcactttcttcctgctgctgctgctggtgttcctgctggaggccaccatcgccatcctcttcttcgcctacacggacaagattgacaggtatgcccagcaagacctgaagaaaggcttgcacctgtacggcacgcagggcaacgtgggcctcaccaacgcctggagcatcatccagaccgacttccgctgctgtggcgtctccaactacactgactggttcgaggtgtacaacgccacgcgggtacctgactcctgctgcttggagttcagtgagagctgtgggctgcacgcccccggcacctggtggaaggcgccgtgctacgagacggtgaaggtgtggcttcaggagaacctgctggctgtgggcatctttgggctgtgcacggcgctggtgcagatcctgggcctgaccttcgccatgaccatgtactgccaagtggtcaaggcagacacctactgcgcgtaggccgcccaccgcccgcttctctgccaaaaggacgcccacggggagatggccgcacccacagctgcctttcccaccaccagcctcggtgctctgccccatgctgggaggagggagggagggacaggtgcctggagcccccggaaccctgtttctggaaggccctagctcaggtggcttcagggcctccggaccccccctgggaggggtggccacgtgctggctgcgga

SEQ ID NO: 31396 - DNA, 834 bp, Homo sapiens
  source 1..834: mol_type = unassigned DNA
aggttcagctgcgaggctgctggtggctgtggagagcttggggcttccttggtcgcacccaccacctgcctgcccactggtcagccttcagggaccctgagcaccgcctggtctctttcctgtggccagcccagctgggaggctgtggcgtgctgggtgtcggcatctggctggccgccacacaggggagcttcgccacgctgtcctcttccttcccgtccctgtcggctgccaacttgctcatcatcaccggcgcctttgtcatggccatcggcttcgtgggctgcctgggtgccatcaaggagaacaagtgcctcctgctcactttcttcctgctgctgctgctggtgttcctgctggaggccaccatcgccatcctcttcttcgcctacacggacaagattgacaggtatgcccagcaagacctgaagaaaggcttgcacctgtacggcacgcagggcaacgtgggcctcaccaacgcctggagcatcatccagaccgacttccgctgctgtggcgtctccaactacactgactggttcgaggtgtacaacgccacgcgggtacctgactcctgctgcttggagttcagtgagagctgtgggctgcacgcccccggcacctggtggaaggcgccgtgctacgagacggtgaaggtgtggcttcaggagaacctgctggctgtgggcatctttgggctgtgcacggcgctggtgcagatcctgggcctgaccttcgccatgaccatgtactgccaagtggtcaaggcagacacctactgcgcgtaggccgcccaccgcccgcttctctgccaaaaggacgcccacggggaga

SEQ ID NO: 31397 - DNA, 860 bp, Homo sapiens
  source 1..860: mol_type = unassigned DNA
tcccgggtcccggctctgctggctgctcgccgtcccgagctcccgacgctcagacgcgcctctgagcacggggagaggggacccgggagggaggtcggggagggagtcgtggaagaggtgctttttgagctgaacctggaagaccccggcacaggggatccctgggcagactcccggaggctgcactggcaggaccccctgaaggcctcagctctggcttgccctggagctcagggcctacggacgacgagggacgaggagcccgtgtctctcggatggagtgcgggggggctggcaccagcacccttcttgctgtgcccctggggtggggagcttggggcttccttggtcgcacccaccacctgcctgcccactggtcagccttcagggaccctgagcaccgcctggtctctttcctgtggccagcccagctgggaggctgtggcgtgctgggtgtcggcatctggctggccgccacacaggggagcttcgccacgctgtcctcttccttcccgtccctgtcggctgccaacttgctcatcatcaccggcgcctttgtcatggccatcggcttcgtgggctgcctgggtgccatcaaggagaacaagtgcctcctgctcactttcttcctgctgctgctgctggtgttcctgctggaggccaccatcgccatcctcttcttcgcctacacggacaagattgacaggtatgcccagcaagacctgaagaaaggcttgcacctgtacggcacgcagggcaacgtgggcctcaccaacgcctggagcatcatccagaccgacttccgctgctgtggcgtctccaactacactgactggttcgaggtgtacaacgccacgcgg

SEQ ID NO: 31398 - DNA, 968 bp, Homo sapiens
  source 1..968: mol_type = unassigned DNA
cggggtcgggggcgcgggggccgcagcgcgcgggccgggcagatgtttgggttccgccgccggggtccgagcggatccgcgcgacccgctgccaccgcgggggccagagcgggagcaggagcggggccggagcaggcgccggccggcgggatggggcgttccggggcggcgggtgcggggcgctgagcggcggccccggcacacccgggcgcgatgcgccgctccagcacggacgagtccacgtaccggcgcagcccctctccggagggcaaggagccggacttcgcgcgcggcggccccttccggcgctacagcagcctatacgggcgcgcgggcggcggggacgccgggggctccttcttcggcctgcacgcgaaccccggccccaaggcggcccaggcgcgctacacgtcgcccaagggcaacaagtacgtggttttctacctggacctctccttcatcttcctcctagaactgaagcgctgcggcatggcgcgcgcctgcctccaggccgtcaagtacctcatgttcgccttcaacctgctcttctggctgggaggctgtggcgtgctgggtgtcggcatctggctggccgccacacaggggagcttcgccacgctgtcctcttccttcccgtccctgtcggctgccaacttgctcatcatcaccggcgcctttgtcatggccatcggcttcgtgggctgcctgggtgccatcaaggagaacaagtgcctcctgctcactttcttcctgctgctgctgctggtgttcctgctggaggccaccatcgccatcctcttcttcgcctacacggacaagattgacaggtatgcccagcaagacctgaagaaaggcttgcacctgtacggcacgcagggcaacgtgggcctcaccaacgcctggagcatcatccagaccgacttccgctgctgtggcgtctccaactacactgactggttcgaggtgta

SEQ ID NO: 31399 - DNA, 818 bp, Homo sapiens
  source 1..818: mol_type = unassigned DNA
cgggaatggggtcggggtgcgccctcccgggtcccggctctgctggctgctcgccgtcccgagctcccgacgctcagacgcgcctctgagcacggggagaggggacccgggagggaggtcggggagggagtcgtggaagaggtgctttttgagctgaacctggaagaccccggcacaggggatccctgggcagactcccggaggctgcactggcaggaccccctgaaggcctcagctctggcttgccctggagctcagggcctacggacgacgagggacgaggagcccgtgtctctcggatggagtgcgggggggctggcaccagcacccttcttgctgtgcccctggggtgggggtgaggaaatggggggtcggtgtgcagtgagaggcaaagaaggctccttggaggtgcgagggctccactctgcccatctttccttttgcagagcttggggcttccttggtcgcacccaccacctgcctgcccactggtcagccttcagggaccctgagcaccgcctggtctctttcctgtggccagcccagaactgaagcgctgcggcatggcgcgcgcctgcctccaggccgtcaagtacctcatgttcgccttcaacctgctcttctggctgggaggctgtggcgtgctgggtgtcggcatctggctggccgccacacaggggagcttcgccacgctgtcctcttccttcccgtccctgtcggctgccaacttgctcatcatcaccggcgcctttgtcatggccatcggcttcgtgggctgcctgggtgccatcaaggagaacaagtgcctcctgctcact

SEQ ID NO: 31400 - DNA, 3365 bp, Homo sapiens
  source 1..3365: mol_type = unassigned DNA
gcgaacgggcgggcgagcaagcgagcggcgtctccaccagcatctgccgcggccgcctttgcccgaagcccggggacgaaccgacggaccgaccgcctggcgcacggacgcgggcgctcgctttgtgttcggggctagcgtcggcgaggcttgagcttgcagcgcgcggcttccctgctttctcgcggccaccccggctccggcggcctcggcgcgcgaggggctggaggtgcgggagccgctctccgccggtcggtccccgcgcggctgagcccaggccgccagcgccgcggccccgtgcggtgtccctgagctcctgctccccgccgggctgctccgagcaacggtgcttcggagctccaaactcgggctgccggggcaagtgtcttcatgaacccagaggatgtccgggaagcactacaagggtcctgaagtcagttgttgcatcaaatacttcatatttggcttcaatgtcatattttggtttttgggaataacatttcttggaattggactgtgggcatggaatgaaaaaggagttctgtccaacatctcttccatcaccgatctcggcggctttgacccagtttggctcttccttgtggtgggaggagtgatgttcattttgggatttgcagggtgcattggagcgctacgggaaaacactttccttctcaagtttttttctgtgttcctgggaattattttcttcctggagctcactgccggagttctagcatttgttttcaaagactggatcaaagaccagctgtatttctttataaacaacaacatcagagcatatcgggatgacattgatttgcaaaacctcatagacttcacccaggaatattggcagtgctgtggggcttttggagctgatgattggaacctaaatatttacttcaattgcacagattccaatgcaagtcgagagcgatgtggcgttccattctcctgctgcactaaagatcccgcagaagatgtcatcaacactcagtgtggctatgatgccaggcaaaaaccagaagttgaccagcagattgtaatctacacgaaaggctgtgtgccccagtttgagaagtggttgcaggacaatttaaccatcgttgctggtattttcataggcattgcattgctgcagatatttgggatatgcctggcccagaatttggttagcgatatcgaagctgtcagggcgagctggtagaccccctgcaaccgctgctgcaagacactggacagacccagctttcgggaccctcccgcgtgccgaactgatcttcgagctgcatggacctaatcacagatgcagcctgcagtctcgcctaatggagctgccattaggggagtgtaaaactgggaaatgctgctcactgacagaattaaaaaaaaaaataaccagtatgaaagtcgttgcgccgtgaatctctactgtagccatgaatttatggacagttagatgcttaccaaaaaagaaaaaaagggagggtaggggacccagatgtacttgaatgtgcagaaaatacattcttgtcctcatcttccgtaattggagggctgggagaggcagctttgctcttcaccacaccttggacggaccaccttctttctgttccatggcctgaaggagtgcatctcctcaaagactcagcccctcacctgggagggcagtggtttgtgggcatccctccatgtacattttaggaaacacttgcaactctcatctgaagaagaaaacaactcatctttgggttcagattttgtgatggtattcagcaagtcacttgggcgagcacacttggtctatcctggaaagtctccttataagagaagttgtgtatttcatgtgcaccgagcaagggcattggaagacgtcatgaggctgtattttagcaggactgatcgtttttctaagtagacctgagctttgtttatcagtgaaattcaaggagaaaatgaggttaatgaagaggtatcagttaaatatccccttcttctcaccctgccaaaattagcagttggatttttggaaactctggaatattctgggtcattttgttttgtatgtttgttgtttttcgtcttccaaaggtgaaagctatgatacagttccacttaaattttagtgttttcttactcagctcaagcattaatttttgattaagtcttaatctgcatgacctgtgaatctgaatccatcatctccctttcctgccagcttttctacaaacattgaaatatgttatttggtcagcacttatttcctaggttcacagccttgggaggttgtggcatgtcctcccagtctggctgggaagagaccagctgtaccatccaaatgcttccctggtcttgatgatctcttccagagtcgatctgagtggccttttctgcaccctccccttctttctctttgaatggaattaaacccaatttggaaacaacattgacccagtcaaaagcttctaatggtttctttttcttcctccagttttagtttgcttttattaaaaaaagaaaatagtgcatggccatagctccttcagttctcttattgcagactaaccatcaggatggtatcaaagcacaaatactttggaggggaatgcgttgaactggggcaagtactctgtaacacaaagtgggaaaccacttcctggtgctgccgctcctgcccccactttaggtgggagggacgagttttgccctctagattttaatccagctggtgtccaccggatgttgccctcctggggagcagatatcagtctgtggaactctgggaaaaccacaggcacatttttcggtgcggacagatttgccagcacataactgggcagccagctagaatactttgtggaaattaagcgaggttttccatttcagccccatggtgcatggtggtggccgatgaatgtgtcagtctgctcagagaaaggacaaaaaggaaattattttcaaaactgtgttcactgtttgggtgtgtgtatggctctgcatgtgtgtgtttttgtctctgtataggtagaggtattcacatcttactccgactgtaaggttgtcttacttcatctctgcccccaccacagttgccattttgtaatgtccttccaacatggagaagacacgagctctctccagttggcatcatttgtcttttttgttgattgcctcattctccagtgaactccatctggccaattgattcagaatcaggcaagatccctgccctttggcacatccactgaaaggccaaacagcaagtccgagtgagttttaaatattaattaatcaccctttattttttacacttgagagtgattgtaataaaggctgtcattaataaacttggttctacctta

SEQ ID NO: 31401 - DNA, 1191 bp, Homo sapiens
  source 1..1191: mol_type = unassigned DNA
gttgccgcggctggtctgtgccatgctcagcgtgtatcttcttgcaccatctcgggctttgtgtaggatgcagatgccgtggtatatggtcctgtaattgcacgtaaataacgtttcctgcacgctctcctcttcagctggaaagcgctcccttttttgggaataacatttcttggaattggactgtgggcatggaatgaaaaaggagttctgtccaacatctcttccatcaccgatctcggcggctttgacccagtttggctcttccttgtggtgggaggagtgatgttcattttgggatttgcagggtgcattggagcgctacgggaaaacactttccttctcaagtttttttctgtgttcctgggaattattttcttcctggagctcactgccggagttctagcatttgttttcaaagactggatcaaagaccagctgtatttctttataaacaacaacatcagagcatatcgggatgacattgatttgcaaaacctcatagacttcacccaggaatattggcagtgctgtggggcttttggagctgatgattggaacctaaatatttacttcaattgcacagattccaatgcaagtcgagagcgatgtggcgttccattctcctgctgcactaaagatcccgcagaagatgtcatcaacactcagtgtggctatgatgccaggcaaaaaccagaagttgaccagcagattgtaatctacacgaaaggctgtgtgccccagtttgagaagtggttgcaggacaatttaaccatcgttgctggtattttcataggcattgcattgctgcagatatttgggatatgcctggcccagaatttggttagcgatatcgaagctgtcagggcgagctggtagaccccctgcaaccgctgctgcaagacactggacagacccagctttcgggaccctcccgcgtgccgaactgatcttcgagctgcatggacctaatcacagatgcagcctgcagtctcgcctaatggagctgccattaggggagtgtaaaactgggaaatgctgctcactgacagaattaaaaaaaaaaataaccagtatgaaagtcgttgcgccgtgaatctctactgtagccatgaatttatggacagttagatgcttaccaaaaaagaaaaaaagggagggtaggggacccagatgtacttgaatgtgcag

SEQ ID NO: 31402 - DNA, 1270 bp, Homo sapiens
  source 1..1270: mol_type = unassigned DNA
agtatggcatcgaggagaatggagaccaaacctgtgataacctgtctcaaaaccctcctcatcatctactccttcgtcttctggaaagaaaaggctgcaggattttgtggcagacaggatgtggctatggctttgatcactggggtgatcctgctggctgttggagtctggggcaaacttactctgggcacctatatctcccttattgccgagaactccacaaatgctccctatgtgctcatcggaactggcaccactattgttgtctttggcctgtttggatgctttgctacatgtcgtggtagcccatggatgctgaaactgtatgccatgtttctgtccctggtgttcctggctgagctcgtagctggcatttcagggtttgtgtttcgtcatgagatcaaggacaccttcctgaggacttacacggacgctatgcagacttacaatggcaatgatgagaggagccgggcagtggaccatgtgcagcgcagcctgagctgctgtggtgtgcagaactacaccaactggagcaccagcccctacttcctggagcatggcatcccccccagctgctgcatgaacgaaactgattgtaatccccaggatctacacaatctgactgtggccgccaccaaagttaaccagaagggttgttatgatctggtaactagtttcatggagactaacatgggaatcatcgctggagtggcgtttggaatcgcattctcccagttaattggcatgctgctggcctgctgtctgtcccggttcatcacggccaatcagtatgagatggtgtaaggagaagtctttcaagaatgacggaataagagacctgttttaaaaaggaactgcagcaatctttgaaagacttccaaagaatgttagagcacagtacataatacacttgccctgctccctctcccccttaccccacaacgtgcaactgacactcccacccagtctctgctccacctttcagcccacgtcacgtgtagtgtccattttgtgaagccctgttgtgccacagagtgtagccaggtccccctgcagctagtcctagtgaacctcaccccgaggccctgcatgggccagcccctccatctgtacttggtccaactgcaactcatcatcggtgactggttatcacaccatcgctggcccctttgggccctgcatgtagtgtgggaggctcctgttagctcctcactgtggtaaatgccacacacctttaagtagataagcagacgatagttatctgttcttt

SEQ ID NO: 31403 - DNA, 1909 bp, Homo sapiens
  source 1..1909: mol_type = unassigned DNA
gtaggagccccgcgcggtgcgcgctcacgcacgcgcacggcctcgcctgcgcgctcacgaggcctctcgcggcacgcgcccccgccccgcgccgccccgccccgccccgcctcttccccctcccgcgcgcccgcccgccgcctgccgccgccgccgccgccgccggagctctgtagtatggcatcgaggagaatggagaccaaacctgtgataacctgtctcaaaaccctcctcatcatctactccttcgtcttctggatcactggggtgatcctgctggctgttggagtctggggcaaacttactctgggcacctatatctcccttattgccgagaactccacaaatgctccctatgtgctcatcggaactggcaccactattgttgtctttggcctgtttggatgctttgctacatgtcgtggtagcccatggatgctgaaactgtatgccatgtttctgtccctggtgttcctggctgagctcgtagctggcatttcagggtttgtgtttcgtcatgagatcaaggacaccttcctgaggacttacacggacgctatgcagacttacaatggcaatgatgagaggagccgggcagtggaccatgtgcagcgcagcctgagctgctgtggtgtgcagaactacaccaactggagcaccagcccctacttcctggagcatggcatcccccccagctgctgcatgaacgaaactgattgtaatccccaggatctacacaatctgactgtggccgccaccaaagttaaccagaagggttgttatgatctggtaactagtttcatggagactaacatgggaatcatcgctggagtggcgtttggaatcgcattctcccagttaattggcatgctgctggcctgctgtctgtcccggttcatcacggccaatcagtatgagatggtgtaaggagaagtctttcaagaatgacggaataagagacctgttttaaaaaggaactgcagcaatctttgaaagacttccaaagaatgttagagcacagtacataatacacttgccctgctccctctcccccttaccccacaacgtgcaactgacactcccacccagtctctgctccacctttcagcccacgtcacgtgtagtgtccattttgtgaagccctgttgtgccacagagtgtagccaggtccccctgcagctagtcctagtgaacctcaccccgaggccctgcatgggccagcccctccatctgtacttggtccaactgcaactcatcatcggtgactggttatcacaccatcgctggcccctttgggccctgcatgtagtgtgggaggctcctgttagctcctcactgtggtaaatgccacacacctttaagtagataagcagacgatagttatctgttcttttgacttaatctcatttggtttgattttccctctactaaggctttcctaccttcttcaggctgcctaagacatgtaacgaaacacttcaataattgtccatgaggagaaaaaaagcatgtgtcatgcatgaaggaaactgaacttgaggtggcctccttgcttgttacatacctgggtatgtgtaggcagtttagtgcatctttgcctctcggttgaaacctgtataaccctgttacaaagctgtgttgttgcttcttgtgaaggccatgatattttgtttttccccaattaattgctattgtgttattttactacttctctctgtattttttcttgcattgacattatagacattgaggacctcatccaaacaatttaaaaatgagtgtgaagggggaacaagtcaaaatatttttaaaagatcttcaaaagtaatgcctctgtctagcatgccaacaagaatgcattgatattgtgaacatttgtgatatatgtattaataaatagagcaattac

SEQ ID NO: 31404 - DNA, 1210 bp, Homo sapiens
  source 1..1210: mol_type = unassigned DNA
gtagtatggcatcgaggagaatggagaccaaacctgtgataacctgtctcaaaaccctcctcatcatctactccttcgtcttctggccctatttttgctttgaaactggagcacagtgctgtatgaggtaccgagaatcagctagatggcaaaccggactgtttgcaatggtcaaggaagaagcagagatttattgaggatcaaaaatattcctaatgcacccggacatttccttatcgctggcgttggtggttcttcaagtcagggaaggtctatagaagaggagggaaaaacacacctaggaatcactggggtgatcctgctggctgttggagtctggggcaaacttactctgggcacctatatctcccttattgccgagaactccacaaatgctccctatgtgctcatcggaactggcaccactattgttgtctttggcctgtttggatgctttgctacatgtcgtggtagcccatggatgctgaaactgtatgccatgtttctgtccctggtgttcctggctgagctcgtagctggcatttcagggtttgtgtttcgtcatgagatcaaggacaccttcctgaggacttacacggacgctatgcagacttacaatggcaatgatgagaggagccgggcagtggaccatgtgcagcgcagcctgagctgctgtggtgtgcagaactacaccaactggagcaccagcccctacttcctggagcatggcatcccccccagctgctgcatgaacgaaactgattgtaatccccaggatctacacaatctgactgtggccgccaccaaagttaaccagaagggttgttatgatctggtaactagtttcatggagactaacatgggaatcatcgctggagtggcgtttggaatcgcattctcccagttaattggcatgctgctggcctgctgtctgtcccggttcatcacggccaatcagtatgagatggtgtaaggagaagtctttcaagaatgacggaataagagacctgttttaaaaaggaactgcagcaatctttgaaagacttccaaagaatgttagagcacagtacataatacacttgccctgctccctctcccccttaccccacaacgtgcaactgacactcccacccagtctctgctccacctttcagcccacgtcacgtgtagtgtccattttgtgaagccctgttgtgccacagagtgtagc

SEQ ID NO: 31405 - DNA, 1224 bp, Homo sapiens
  source 1..1224: mol_type = unassigned DNA
agtatggcatcgaggagaatggagaccaaacctgtgataacctgtctcaaaaccctcctcatcatctactccttcgtcttctggccttgcctactgaagagaataagaagctgggtttctcctcatttacataacaagtaatatggtatggaagatggaaccgaagatttgaggtcagaagacctaagttctatggcttttctacaacctagatgatcactggggtgatcctgctggctgttggagtctggggcaaacttactctgggcacctatatctcccttattgccgagaactccacaaatgctccctatgtgctcatcggaactggcaccactattgttgtctttggcctgtttggatgctttgctacatgtcgtggtagcccatggatgctgaaactgtatgccatgtttctgtccctggtgttcctggctgagctcgtagctggcatttcagggtttgtgtttcgtcatgagatcaaggacaccttcctgaggacttacacggacgctatgcagacttacaatggcaatgatgagaggagccgggcagtggaccatgtgcagcgcagcctgagctgctgtggtgtgcagaactacaccaactggagcaccagcccctacttcctggagcatggcatcccccccagctgctgcatgaacgaaactgattgtaatccccaggatctacacaatctgactgtggccgccaccaaagttaaccagaagggttgttatgatctggtaactagtttcatggagactaacatgggaatcatcgctggagtggcgtttggaatcgcattctcccagttaattggcatgctgctggcctgctgtctgtcccggttcatcacggccaatcagtatgagatggtgtaaggagaagtctttcaagaatgacggaataagagacctgttttaaaaaggaactgcagcaatctttgaaagacttccaaagaatgttagagcacagtacataatacacttgccctgctccctctcccccttaccccacaacgtgcaactgacactcccacccagtctctgctccacctttcagcccacgtcacgtgtagtgtccattttgtgaagccctgttgtgccacagagtgtagccaggtccccctgcagctagtcctagtgaacctcaccccgaggccctgcatgggccagcccctccatctgtacttggtccaactgcaactcatcatcggtgact

SEQ ID NO: 31406 - DNA, 1227 bp, Homo sapiens
  source 1..1227: mol_type = unassigned DNA
gtgccattctcttgcctgatccagtgccattcccttcacttgatatctgtttactttagaggaggcagtttttgagaaaggatcataaatatcctggcccagtgccccaggagctatgacaagcaaaggaacatacttgcctggagatagcctttgcgatatttaaatgtccgtggatacagaaatctctgcaggcaagttgctccagagcatattgcaggacaagcctgtaacgaatagttaaattcacggcatctggattcctaatccttttccgaaatggcaggtgtgagtgcctgtataaaatattctatgtttaccttcaacttcttgttctggctatgtggtatcttgatcctagcattagcaatatgggtacgagtaagcaatgactctcaagcaatttttggttctgaagatgtaggctctagctcctacgttgctgtggacatattgattgctgtaggtgccatcatcatgattctgggcttcctgggatgctgcggtgctataaaagaaagtcgctgcatgcttctgttgtttttcataggcttgcttctgatcctgctcctgcaggtggcgacaggtatcctaggagctgttttcaaatctaagtctgatcgcattgtgaatgaaactctctatgaaaacacaaagcttttgagcgccacaggggaaagtgaaaaacaattccaggaagccataattgtgtttcaagaagagtttaaatgctgcggtttggtcaatggagctgctgattggggaaataattttcaacactatcctgaattatgtgcctgtctagataagcagagaccatgccaaagctataatggaaaacaagtttacaaagagacctgtatttctttcataaaagacttcttggcaaaaaatttgattatagttattggaatatcatttggactggcagttattgagatactgggtttggtgttttctatggtcctgtattgccagatcgggaacaaatgaatctgtggatgcatcaacctatcgtcagtcaaacccctttaaaatgttgctttggctttgtaaatttaaatatgtaagtgctatataagtcaggagcagctgtctttttaaaatgtctcggctagctagaccacagatatcttctagacatattgaacacatttaagatttgagggatataagggaaaatgatatgaatgtgtatttttactcaaaataaaagtaactgtttac

SEQ ID NO: 31407 - DNA, 1516 bp, Homo sapiens
  source 1..1516: mol_type = unassigned DNA
gctttgtagtagagatagctgttcaggaggaggaaatgtgaattctgagagcgtgatcatttaggagagatttccattcctggaacgatatcactaccacatgcacgagtgcaattgaagggaaacctggtggggaaacagttttaacattctttcagaaaaagaatcactacctagtggaaaatgttgtgcaagcctcttcatgtttcttccctccagaaaacaactaaacagatggaagaactggttcacaaacatcccaactctctcctgccaaggtccagtgggcttgttgctccagacctcatgccttctggacccagacatctctgcaatctcggaactggaatacaccacttcttgtcaaggtactagcaagttgactatgaactgctgggagataagaccatctgatttatccgtgtacatacagcagctagcacaccgtggatacagaaatctctgcaggcaagttgctccagagcatattgcaggacaagcctgtaacgaatagttaaattcacggcatctggattcctaatccttttccgaaatggcaggtgtgagtgcctgtataaaatattctatgtttaccttcaacttcttgttctggctatgtggtatcttgatcctagcattagcaatatgggtacgagtaagcaatgactctcaagcaatttttggttctgaagatgtaggctctagctcctacgttgctgtggacatattgattgctgtaggtgccatcatcatgattctgggcttcctgggatgctgcggtgctataaaagaaagtcgctgcatgcttctgttgtttttcataggcttgcttctgatcctgctcctgcaggtggcgacaggtatcctaggagctgttttcaaatctaagtctgatcgcattgtgaatgaaactctctatgaaaacacaaagcttttgagcgccacaggggaaagtgaaaaacaattccaggaagccataattgtgtttcaagaagagtttaaatgctgcggtttggtcaatggagctgctgattggggaaataattttcaacactatcctgaattatgtgcctgtctagataagcagagaccatgccaaagctataatggaaaacaagtttacaaagagacctgtatttctttcataaaagacttcttggcaaaaaatttgattatagttattggaatatcatttggactggcagttattgagatactgggtttggtgttttctatggtcctgtattgccagatcgggaacaaatgaatctgtggatgcatcaacctatcgtcagtcaaacccctttaaaatgttgctttggctttgtaaatttaaatatgtaagtgctatataagtcaggagcagctgtctttttaaaatgtctcggctagctagaccacagatatcttctagacatattgaacacatttaagatttgagggatataagggaaaatgatatgaatgtgtatttttactcaaaataaaagtaactgtttacgttggtgcttttcta

SEQ ID NO: 31408 - DNA, 1168 bp, Homo sapiens
  source 1..1168: mol_type = unassigned DNA
gtgtgggttaatagcctttgcgatatttaaatgtgtgggttaatttttttatccagtttaataactttttattcctccctctacttctttgctttctctttctgctctgaagccgtggatacagaaatctctgcaggcaagttgctccagagcatattgcaggacaagcctgtaacgaatagttaaattcacggcatctggattcctaatccttttccgaaatggcaggtgtgagtgcctgtataaaatattctatgtttaccttcaacttcttgttctggctatgtggtatcttgatcctagcattagcaatatgggtacgagtaagcaatgactctcaagcaatttttggttctgaagatgtaggctctagctcctacgttgctgtggacatattgattgctgtaggtgccatcatcatgattctgggcttcctgggatgctgcggtgctataaaagaaagtcgctgcatgcttctgttgtttttcataggcttgcttctgatcctgctcctgcaggtggcgacaggtatcctaggagctgttttcaaatctaagtctgatcgcattgtgaatgaaactctctatgaaaacacaaagcttttgagcgccacaggggaaagtgaaaaacaattccaggaagccataattgtgtttcaagaagagtttaaatgctgcggtttggtcaatggagctgctgattggggaaataattttcaacactatcctgaattatgtgcctgtctagataagcagagaccatgccaaagctataatggaaaacaagtttacaaagagacctgtatttctttcataaaagacttcttggcaaaaaatttgattatagttattggaatatcatttggactggcagttattgagatactgggtttggtgttttctatggtcctgtattgccagatcgggaacaaatgaatctgtggatgcatcaacctatcgtcagtcaaacccctttaaaatgttgctttggctttgtaaatttaaatatgtaagtgctatataagtcaggagcagctgtctttttaaaatgtctcggctagctagaccacagatatcttctagacatattgaacacatttaagatttgagggatataagggaaaatgatatgaatgtgtatttttactcaaaataaaagtaactgttta

SEQ ID NO: 31409 - DNA, 4323 bp, Homo sapiens
  source 1..4323: mol_type = unassigned DNA
ctgtttccgctggcggcggcggcggcggcggtgccggagcgcgagcagagcggagacccccaggtcctgcgggcgcggaatatcctggaaccttcttttgtttgtcagcagccaaggtgtttccaggaagttcagagagaacagaatttaagaagtgcaacatggccaggggctgcctctgctgcttgaagtacatgatgttcctcttcaatttgatattctggctctgtggctgtgggctgctgggagtgggcatctggctctccgtgtcccaaggcaactttgccaccttctcccccagcttcccttcgttgtctgcagccaacctggtcattgccataggcaccattgtcatggtgacgggcttcctcggctgcctgggggccatcaaggaaaacaagtgcctcctcctcagctttttcatcgtcctgttggtcatcctcctagcagagctgatcttactcatcctcttctttgtctacatggacaaggtgaacgagaacgccaagaaggacctgaaggaaggcctgctgctgtaccacaccgagaacaacgtggggctgaagaacgcctggaacatcatccaggctgagatgcgatgctgtggtgtcactgactacacagactggtacccagtgctgggggagaacacggttcccgaccgctgctgcatggagaactcccagggctgcgggcgcaacgccaccacgcctttgtggagaacgggctgctatgaaaaggtgaagatgtggttcgatgacaataagcacgtgctgggcacggtggggatgtgcatcctcatcatgcagatcctgggcatggccttctccatgaccctcttccagcacatccaccggactggtaagaagtacgacgcatgagcgggctggccgggagtgcccaccccgccctgctgccctgtggagggaagaggattgagctttgtgtcacctgcctgcgctctccagatatgacccctgcacccaccccccacagcctgccctaccccacctaccctgcctcagcctcggacttctcagtgggtggagtgccagggaggaggaggcacacggagacctggggctcggggcccctggattcctgcatctgcatatgcgtatttgccaaagacgacagggtgggctggggtgcgctccggaggaacccccggcactgatgggcttctgcccctgcccttcctcacactgacactttgtccccacatggggtggggagcagagtgcccgccccgtggagataccgccccagcgggggctgcgacatccatggccaccatggggcacctggcggggcgggggtctgccggcctctgggcaaggcccctggagcatctcgcccaggctttttataccttacaatgtaacttttttattttattttactctatgattattcaggaatattatctctcagataagtttagggttagatttctgatttgtaactttttactgtgttgatttctttaatggtttgactttttttccctgagggtgagggatgggtgggaagagaggacatctgtccagtctcaatcaggacagaccaccgtgcgacacccaggaggctctcggatggggcgcgcctgcgccctcagaacgtgtgggaaggagggggcgtggacaggacacgggaccttgccaggcctggtgtctgaggacaggagcctgggagaggcgggtggagcgtgaagcaggctggaggtgcccctgcacgggaggtggcgtttgctaaccaatcgagctggaaatgccagggcaggggggccccacggtgctgtggcagagctagaggggtccttagacttttcactgatgagcagttgttggttttttctttctcccttcctcccgctctctgctggcacgcgaggcttccccttccaccccatgtgggtattcccacaacaggttctgcacaccccagttatttcacagacattcctgctagaaactgtcagacaaatacctctctagttcggatgctgctcactttcccccttgcttctggaaggggaagcagtccttaggttttgctgtgctgggacagtggcaggggacccacaggggtgaggacccacggtcctccccgccagccttgctcagctgtgggttgccctgctgggaaggagggaatcacgtccacctgggtcccaagatcttcgcctccttccctggggccacggacatcagcagtgggttgggtggcgattatatcatctgtgatcccaaggagaagaaatacagaaaacccaagagaggtcagactggctcttgttaccggagccacgggaagaaagcagccggagtcacgcacgtgcagagctgggcatgggagagaaacgggctggggagtgaggccaggagtgggattcagctgcagcagggcgccccctccaaactgcagctggtctggcttactgttttgccgttcaaaaaggtcgcgaatccgtgggactgagcacggggacctcacccgctagccagcgtctgctgcacttgatcaggtggggccttggtgggcggctgcctttcctatacagtttgtcttgtcaccctggtttcccactggggccaggtctcttctccagcctccacctgcctgtctgatccaagagctgagacacggccacccagcaccagtcactcctctgttcaccttaagtaacacacaaatcgggaacaggaggacagaaccgttggcattatcaggattcgtgttttgtgggggtgggagtggagagtagggtggtcttgtgagttgtgcagggtgaagaccgcttccctgagacaggggcagtggtgctgatggaatgtgggggaggcccacatttgagcaaagctgccctgcccttgtcccctggcctggcttcctggtaaggagtttcagccgcctccgcaggaacccccaaagtgcagattccggagcagacacatccgggcggagagactcagcagacaagtgctgcagttgcacggtgggacccggggcctcgtgcgttttttgctgtgggtggggtgggtgggttggtttatgcctatcaatgcaatttttaatttttgttaatatcaacagcaaaagcctagtgcattgggagatgtgcaacctccctgaaaatcttttctgtttctggagtacttcaggggtggcctctggccccagagcctttgccacagtgctcccaccagcccccacctcatccgtctgtttgcagagcctcatctacaggtccccacgctgccttctttactcactctgcgcttggccgttttgttatttggcttagtctacattgggcggaagtctgtgtgcacagagtgggtgttccttcgagccccttccactcagagggccacacccagcgatgccagtgaaggtggcacagcctctcttcagtttctcctgactgtgatctcactggggtagaattcccctgagagaattccctcactcacggctccctttgccagagtcagttcaatcaggtctgatgtgagcaatttacacacttgtctcagaaagtccctcagggtttgtagaggactgcaggggggcatccgctgcagactcagcctttctctgcagccatcctgcagtgggggtgagcgggcacaggctgagaactgctcttgggtggtggaagcaggtgtcacggtgcaagtctccccctgcacccctcccccagcttgagccgtgtcacccccctctccctccagcatgggcctgtgtctcaggctctctggaaggtggccctgccccggaccctcttgcaggtgtcctggtttgacttggaactagatggccatctttccaggctttggtggcccaagagcagtctgggtggatggaagtggctgtcccctcctctccagcccctgcccacccactggtggaggtgctaactagcagggacgtggcataggatgggagctgggcgtgaggtgcttggggtccattctttgtccctcagcttctcagagtccggccagcccttgtgttcccgtgccccacactttcctcctccccactgcagtgagtcaatagtccagggtggggcctggcctccctgccctgattggggactcaggaggtgaggcctggggggcttcctgccccctccttgcccacctgcctgcccccgggcagcacgggagggagagcagggtgagcacgcttgttggtttcagatgcactttctgcttgcattgccgtatctgtgcgttccttcatcctggtcctggctttatggaacaccatgtttttagcatgtttttaaataaaaacggataaagtgtcaaaagc

SEQ ID NO: 31410 - DNA, 4284 bp, Homo sapiens
  source 1..4284: mol_type = unassigned DNA
attcccgggcaggccccgccccctgtttccgctggcggcggcggcggcggcggtgccggagcgcgagcagagcggagacccccaggtcctgcgggcgcgaatttaagaagtgcaacatggccaggggctgcctctgctgcttgaagtacatgatgttcctcttcaatttgatattctggctctgtggctgtgggctgctgggagtgggcatctggctctccgtgtcccaaggcaactttgccaccttctcccccagcttcccttcgttgtctgcagccaacctggtcattgccataggcaccattgtcatggtgacgggcttcctcggctgcctgggggccatcaaggaaaacaagtgcctcctcctcagctttttcatcgtcctgttggtcatcctcctagcagagctgatcttactcatcctcttctttgtctacatggacaaggtgaacgagaacgccaagaaggacctgaaggaaggcctgctgctgtaccacaccgagaacaacgtggggctgaagaacgcctggaacatcatccaggctgagatgcgatgctgtggtgtcactgactacacagactggtacccagtgctgggggagaacacggttcccgaccgctgctgcatggagaactcccagggctgcgggcgcaacgccaccacgcctttgtggagaacgggctgctatgaaaaggtgaagatgtggttcgatgacaataagcacgtgctgggcacggtggggatgtgcatcctcatcatgcagatcctgggcatggccttctccatgaccctcttccagcacatccaccggactggtaagaagtacgacgcatgagcgggctggccgggagtgcccaccccgccctgctgccctgtggagggaagaggattgagctttgtgtcacctgcctgcgctctccagatatgacccctgcacccaccccccacagcctgccctaccccacctaccctgcctcagcctcggacttctcagtgggtggagtgccagggaggaggaggcacacggagacctggggctcggggcccctggattcctgcatctgcatatgcgtatttgccaaagacgacagggtgggctggggtgcgctccggaggaacccccggcactgatgggcttctgcccctgcccttcctcacactgacactttgtccccacatggggtggggagcagagtgcccgccccgtggagataccgccccagcgggggctgcgacatccatggccaccatggggcacctggcggggcgggggtctgccggcctctgggcaaggcccctggagcatctcgcccaggctttttataccttacaatgtaacttttttattttattttactctatgattattcaggaatattatctctcagataagtttagggttagatttctgatttgtaactttttactgtgttgatttctttaatggtttgactttttttccctgagggtgagggatgggtgggaagagaggacatctgtccagtctcaatcaggacagaccaccgtgcgacacccaggaggctctcggatggggcgcgcctgcgccctcagaacgtgtgggaaggagggggcgtggacaggacacgggaccttgccaggcctggtgtctgaggacaggagcctgggagaggcgggtggagcgtgaagcaggctggaggtgcccctgcacgggaggtggcgtttgctaaccaatcgagctggaaatgccagggcaggggggccccacggtgctgtggcagagctagaggggtccttagacttttcactgatgagcagttgttggttttttctttctcccttcctcccgctctctgctggcacgcgaggcttccccttccaccccatgtgggtattcccacaacaggttctgcacaccccagttatttcacagacattcctgctagaaactgtcagacaaatacctctctagttcggatgctgctcactttcccccttgcttctggaaggggaagcagtccttaggttttgctgtgctgggacagtggcaggggacccacaggggtgaggacccacggtcctccccgccagccttgctcagctgtgggttgccctgctgggaaggagggaatcacgtccacctgggtcccaagatcttcgcctccttccctggggccacggacatcagcagtgggttgggtggcgattatatcatctgtgatcccaaggagaagaaatacagaaaacccaagagaggtcagactggctcttgttaccggagccacgggaagaaagcagccggagtcacgcacgtgcagagctgggcatgggagagaaacgggctggggagtgaggccaggagtgggattcagctgcagcagggcgccccctccaaactgcagctggtctggcttactgttttgccgttcaaaaaggtcgcgaatccgtgggactgagcacggggacctcacccgctagccagcgtctgctgcacttgatcaggtggggccttggtgggcggctgcctttcctatacagtttgtcttgtcaccctggtttcccactggggccaggtctcttctccagcctccacctgcctgtctgatccaagagctgagacacggccacccagcaccagtcactcctctgttcaccttaagtaacacacaaatcgggaacaggaggacagaaccgttggcattatcaggattcgtgttttgtgggggtgggagtggagagtagggtggtcttgtgagttgtgcagggtgaagaccgcttccctgagacaggggcagtggtgctgatggaatgtgggggaggcccacatttgagcaaagctgccctgcccttgtcccctggcctggcttcctggtaaggagtttcagccgcctccgcaggaacccccaaagtgcagattccggagcagacacatccgggcggagagactcagcagacaagtgctgcagttgcacggtgggacccggggcctcgtgcgttttttgctgtgggtggggtgggtgggttggtttatgcctatcaatgcaatttttaatttttgttaatatcaacagcaaaagcctagtgcattgggagatgtgcaacctccctgaaaatcttttctgtttctggagtacttcaggggtggcctctggccccagagcctttgccacagtgctcccaccagcccccacctcatccgtctgtttgcagagcctcatctacaggtccccacgctgccttctttactcactctgcgcttggccgttttgttatttggcttagtctacattgggcggaagtctgtgtgcacagagtgggtgttccttcgagccccttccactcagagggccacacccagcgatgccagtgaaggtggcacagcctctcttcagtttctcctgactgtgatctcactggggtagaattcccctgagagaattccctcactcacggctccctttgccagagtcagttcaatcaggtctgatgtgagcaatttacacacttgtctcagaaagtccctcagggtttgtagaggactgcaggggggcatccgctgcagactcagcctttctctgcagccatcctgcagtgggggtgagcgggcacaggctgagaactgctcttgggtggtggaagcaggtgtcacggtgcaagtctccccctgcacccctcccccagcttgagccgtgtcacccccctctccctccagcatgggcctgtgtctcaggctctctggaaggtggccctgccccggaccctcttgcaggtgtcctggtttgacttggaactagatggccatctttccaggctttggtggcccaagagcagtctgggtggatggaagtggctgtcccctcctctccagcccctgcccacccactggtggaggtgctaactagcagggacgtggcataggatgggagctgggcgtgaggtgcttggggtccattctttgtccctcagcttctcagagtccggccagcccttgtgttcccgtgccccacactttcctcctccccactgcagtgagtcaatagtccagggtggggcctggcctccctgccctgattggggactcaggaggtgaggcctggggggcttcctgccccctccttgcccacctgcctgcccccgggcagcacgggagggagagcagggtgagcacgcttgttggtttcagatgcactttctgcttgcattgccgtatctgtgcgttccttcatcctggtcctggctttatggaacaccatgtttttagcatgtttttaaataaaaacggataaagtgtcaaaagcacagca

SEQ ID NO: 31411 - DNA, 1435 bp, Homo sapiens
  source 1..1435: mol_type = unassigned DNA
atcgacggaagtgcacctgactgagcggaagtaggagctctcagaggctaagaaggtggagaccggagaagctgtgaggttctttagcgtcacctccctcactgggcagcatgggggagaagtcagagaactgtggggttccagaggatctgttaaatggtttgaaggttacagatactcaggaagccgagtgtgctggccctccagttcctgatcccaaaaatcagcattcccagagtaagctgctcagggatgatgaggcccatctccaggaggaccagggagaagaggagtgttttcatgactgcagtgcctcatttgaggaggagccaggagcggacaaggttgagaacaaatctaatgaagatgtgaattcctctgaactagatgaagaatacctaatagaactggaaaaaaacatgtcggatgaagagaaacagaaaagaagagaagagagcactagactaaaggaggagggaaatgaacagtttaagaaaggagattatatagaagctgaaagttcttatagtcgagccctcgaaatgtgcccatcctgcttccaaaaggagaggtcgattctattttcaaatagagctgcagcaaggatgaaacaggacaagaaagaaatggccatcaatgactgcagcaaagcaattcaattaaaccccagctatatcagggcaatattgaggagagcagagttgtatgagaagacggacaagctagatgaagccctggaagactataaatctatattagaaaaagatccatcaatacatcaagcaagagaagcttgtatgagattacctaagcaaattgaagaacgtaatgaaagactaaaagaagagatgttaggtaaattaaaagatcttgggaacttggttctccgaccttttgggctctccacggaaaatttccagatcaaacaggattcctctaccggctcgtactccatcaatttcgttcaaaatccaaataataacagataacaaagataacaaaagctttacaagctgacttggaattgtgtgctgcttgctgttagctaggggaaaggccctgccaatgtttaacttttaaaagcatcttatctaaaagaaaggctatccagtagagcccagtgctcccttgtccctcttttatgatcagggtgaaatgtacttcctgatgtaatgaacctaatttgatttccattttaaggtggtgtctgtgcagctggtgtccccgattctggctgtcctatgtccaggaagaagcccatttgttgaggctgaccttcctgatcatacacacacacagcccagcaaaagcctctcctgaaccaaacaaacctgttggttgggagactgcccagacatgattgatgacgggttcccgcctgctgtcccctccctgatcacacagctaacgaggctgcctccagcatttcctgatt

SEQ ID NO: 31412 - DNA, 1432 bp, Homo sapiens
  source 1..1432: mol_type = unassigned DNA
atcgacggaagtgcacctgactgagcggaagtaggagctctcagaggctaagaaggtggagaccggagaagctgtgagctttagcgtcacctccctcactgggcagcatgggggagaagtcagagaactgtggggttccagaggatctgttaaatggtttgaaggttacagatactcaggaagccgagtgtgctggccctccagttcctgatcccaaaaatcagcattcccagagtaagctgctcagggatgatgaggcccatctccaggaggaccagggagaagaggagtgttttcatgactgcagtgcctcatttgaggaggagccaggagcggacaaggttgagaacaaatctaatgaagatgtgaattcctctgaactagatgaagaatacctaatagaactggaaaaaaacatgtcggatgaagagaaacagaaaagaagagaagagagcactagactaaaggaggagggaaatgaacagtttaagaaaggagattatatagaagctgaaagttcttatagtcgagccctcgaaatgtgcccatcctgcttccaaaaggagaggtcgattctattttcaaatagagctgcagcaaggatgaaacaggacaagaaagaaatggccatcaatgactgcagcaaagcaattcaattaaaccccagctatatcagggcaatattgaggagagcagagttgtatgagaagacggacaagctagatgaagccctggaagactataaatctatattagaaaaagatccatcaatacatcaagcaagagaagcttgtatgagattacctaagcaaattgaagaacgtaatgaaagactaaaagaagagatgttaggtaaattaaaagatcttgggaacttggttctccgaccttttgggctctccacggaaaatttccagatcaaacaggattcctctaccggctcgtactccatcaatttcgttcaaaatccaaataataacagataacaaagataacaaaagctttacaagctgacttggaattgtgtgctgcttgctgttagctaggggaaaggccctgccaatgtttaacttttaaaagcatcttatctaaaagaaaggctatccagtagagcccagtgctcccttgtccctcttttatgatcagggtgaaatgtacttcctgatgtaatgaacctaatttgatttccattttaaggtggtgtctgtgcagctggtgtccccgattctggctgtcctatgtccaggaagaagcccatttgttgaggctgaccttcctgatcatacacacacacagcccagcaaaagcctctcctgaaccaaacaaacctgttggttgggagactgcccagacatgattgatgacgggttcccgcctgctgtcccctccctgatcacacagctaacgaggctgcctccagcatttcctgatt

SEQ ID NO: 31413 - DNA, 2250 bp, Homo sapiens
  source 1..2250: mol_type = unassigned DNA
actgcgccatttcctgtccaaagctgggcgaatcagggattccggttcacaatggatgctgataaagagaaagatttgcagaaatttcttaaaaatgtggatgaaatctccaatttaattcaggagatgaattctgatgacccagttgtgcaacagaaagctgtcctggagacagaaaagagactactgcttatggaggaagaccaggaggaggatgaatgcaggaccaccttgaacaagactatgatcagtcctccacaaactgctatgaagagtgcagaagaaataaactcagaggccttcttggcatctgtggagaaggatgcaaaggaacgagccaagagaagaagggaaaacaaagtcttggcggatgccctaaaagaaaaagggaatgaagcatttgctgaaggcaattatgaaacagctatcctgcgctacagtgagggtttggagaagctgaaggacatgaaagtgctgtacaccaaccgagcccaggcttatatgaaacttgaggactatgagaaggcactggtggattgtgagtgggctctcaagtgtgatgaaaaatgcacaaaagcatattttcacatgggaaaagccaacctggccctgaagaactacagtgtgtctagagagtgttataagaagatcttagaaataaaccccaagctgcaaacccaggtgaaaggttacctgaatcaagtagatcttcaggaaaaagcagaccttcaagaaaaggaagcccacgaactgctggattcaggaaagaacacagccgtgaccaccaagaacctcctggagaccctttccaagcctgaccagatccccttgttctatgctggggggattgagatcctgactgaaatgataaatgagtgcacagaacaaactttattcagaatgcacaatggatttagtatcatcagtgacaacgaggtcataagaaggtgtttttccacagcaggaaatgatgcagttgaagaaatggtctgtgtgtctgttctcaagctctggcaagcagtgtgcagcaggaacgaggaaaaccagcgtgtgctagtgatacaccatgacagggccaggctgttggccgccctcttgtcctccaaggtcctggccatccggcagcagagctttgccctgctgctgcatctcgcccagactgagagcggacggagcctgatcatcaaccaccttgacctgaccagattattggaagcgctggtgtcatttcttgatttctcggataaggaggccaacactgctatgggactgttcacagacttggctctggaagaaagattccaagtctggttccaggccaaccttccaggtgttctccctgcactcacaggcgttctgaagacagatcccaaggtaagcagctcctcggctctgtgccagtgcattgccatcatgggaaacctcagtgctgagcccactacccgaagacacatggcggcctgtgaggaatttggggatggctgcttgagcctcctggccaggtgtgaggaggatgtggacctgttcagagaggttatctacacactcctgggactcatgatgaacctgtgtcttcaggctccctttgtctctgaggtttgggctgtggaggtgagcagaaggtgcctgtctttactaaacagccaggatggaggaatcctgacaagagctgctggtgttctgagccggaccctttcttcctctctgaaaattgttgaggaggccttgcgagcaggagtggtaaagaaaatgatgaaattcctgaagacaggaggtgagactgcatcacgttatgctataaagatactagctatctgcacgaatagttatcatgaagctcgggaagaagtaataagactggataaaaagttgagcgttatgatgaagctgctcagctcggaggatgaggttctggtgggcaacgctgccctctgccttggtaactgcatggaggtgcccaacgttgcgtcttccctgctaaagacggaccttttgcaggtcttgttaaagcttgcaggcagtgacacacagaagacggccgtgcaggtgaacgcaggcattgctctggggaagctgtgcacagctgagcccagagtgcctgccgagagcagtcatctccaatttggaagagagtctgctgcacctgaagctctgtctcctcgcaggtgggaagagatgtttcacatgctagtattctccctctccagtgtggatccacccccgccaccgccccaaacttgttacccctaa

SEQ ID NO: 31414 - DNA, 669 bp, Homo sapiens
  source 1..669: mol_type = unassigned DNA
ggtcactgcgccatttcctgtccaaagctgggcgaatcaggtccctaaatcgccggggttgatgttggctttggaagaactatttgcagagcgttttctgcactggaaggagggctggaagctttctggaagcattgccgcacgtaaatgagtgcctcttggcctaaaacagcagttggaatgaaagggatcaccctgctgttattcattgacataaacaaaactgtcataaaaataatcacttggctcttagttttagaaggctaataagcctgaccgttctgtttagtgctttattattattaatttcaccattatgctgcatcccttagggattccggttcacaatggatgctgataaagagaaagatttgcagaaatttcttaaaaatgtggatgaaatctccaatttaattcaggagatgaattctgatgacccagttgtgcaacagaaagctgtcctggagacagaaaagagactactgcttatggaggaagaccaggaggaggatgaatgcaggaccaccttgaacaagactatgatcagtcctccacaaactgctatgaagagtgcagaagaaataaactcagaggccttcttggcatctgtggagaaggatgcaaaggaacgagccaagagaagaagggaaaacaaagtcttggcggatg

SEQ ID NO: 31415 - DNA, 764 bp, Homo sapiens
  source 1..764: mol_type = unassigned DNA
ggtcactgcgccatttcctgtccaaagctgggcgaatcaggtccctaaatcgccggggttgatgttggctttggaagaactatttgcagagcgttttctgcactggaaggagggctggaagctttctggaagcattgccgcacggattccggttcacaatggatgctgataaagagaaagatttgcagaaatttcttaaaaatgtggatgaaatctccaatttaattcaggagatgaattctgatgacccagttgtgcaacagaaagctgtcctggagacagaaaagagactactgcttatggaggaagaccaggaggaggatgaatgcaggaccaccttgaacaagactatgatcagtcctccacaaactgctatgaagagtgcagaagaaataaactcagaggccttcttggcatctgtggagaaggatgcaaaggaacgagccaagagaagaagggaaaacaaagtcttggcggatgccctaaaagaaaaagggaatgaagcatttgctgaaggcaattatgaaacagctatcctgcgctacagtgagggtttggagaagctgaaggacatgaaagtgctgtacaccaaccgagcccaggcttatatgaaacttgaggactatgagaaggcactggtggattgtgagtgggctctcaagtgtgatgaaaaatgcacaaaagcatattttcacatgggaaaagccaacctggccctgaagaactacagtgtgtctagagagtgttataagaagatcttagaa

SEQ ID NO: 31416 - DNA, 830 bp, Homo sapiens
  source 1..830: mol_type = unassigned DNA
gtctggggcaggctccgcgcggggctcgggcacaggtccccgctgccgcagccctaccgagtgaagcactgagcgcggcgccgcttcgccatcacctggctctggccctctcaccctagcgtaggggggcactggccaggcagtgaggaccctgagatccatgccctgggagacagaggttgtctcctgtccatgcacccgcgcgcctgccttctaaccttcataccgttgggcagattaattcactggactaggcctctgttccgtgggagttgaaaagatttgacctggaagaaaccctagcgattattcaggattccggttcacaatggatgctgataaagagaaagatttgcagaaatttcttaaaaatgtggatgaaatctccaatttaattcaggagatgaattctgatgacccagttgtgcaacagaaagctgtcctggagacagaaaagagactactgcttatggaggaagaccaggaggaggatgaatgcaggaccaccttgaacaagactatgatcagtcctccacaaactgctatgaagagtgcagaagaaataaactcagaggccttcttggcatctgtggagaaggatgcaaaggaacgagccaagagaagaagggaaaacaaagtcttggcggatgccctaaaagaaaaagggaatgaagcatttgctgaaggcaattatgaaacagctatcctgcgctacagtgagggtttggagaagctgaaggacatgaaagtgctgtacaccaaccgagcccaggcttatatgaaacttgaggactatgagaaggcactggtggattgtgagtgggctctca

SEQ ID NO: 31417 - DNA, 2315 bp, Homo sapiens
  source 1..2315: mol_type = unassigned DNA
cttggtcccgccccgggcccctggctcctggccccgccccagcccaggcaggtcactgcgccatttcctgtccaaagctgggcgaatcagggattccggttcacaatggatgctgataaagagaaagatttgcagaaatttcttaaaaatgtggatgaaatctccaatttaattcaggagatgaattctgatgacccagttgtgcaacagaaagctgtcctggagacagaaaagagactactgcttatggaggaagaccaggaggaggatgaatgcaggaccaccttgaacaagactatgatcagtcctccacaaactgctatgaagagtgcagaagaaataaactcagaggccttcttggcatctgtggagaaggatgcaaaggaacgagccaagagaagaagggaaaacaaagtcttggcggatgccctaaaagaaaaagggaatgaagcatttgctgaaggcaattatgaaacagctatcctgcgctacagtgagggtttggagaagctgaaggacatgaaagtgctgtacaccaaccgagcccaggcttatatgaaacttgaggactatgagaaggcactggtggattgtgagtgggctctcaagtgtgatgaaaaatgcacaaaagcatattttcacatgggaaaagccaacctggccctgaagaactacagtgtgtctagagagtgttataagaagatcttagaaataaaccccaagctgcaaacccaggtgaaaggttacctgaatcaagtagatcttcaggaaaaagcagaccttcaagaaaaggaagcccacgaactgctggattcaggaaagaacacagccgtgaccaccaagaacctcctggagaccctttccaagcctgaccagatccccttgttctatgctggggggattgagatcctgactgaaatgataaatgagtgcacagaacaaactttattcagaatgcacaatggatttagtatcatcagtgacaacgaggtcataagaaggtgtttttccacagcaggaaatgatgcagttgaagaaatggtctgtgtgtctgttctcaagctctggcaagcagtgtgcagcaggaacgaggaaaaccagcgtgtgctagtgatacaccatgacagggccaggctgttggccgccctcttgtcctccaaggtcctggccatccggcagcagagctttgccctgctgctgcatctcgcccagactgagagcggacggagcctgatcatcaaccaccttgacctgaccagattattggaagcgctggtgtcatttcttgatttctcggataaggaggccaacactgctatgggactgttcacagacttggctctggaagaaagattccaagtctggttccaggccaaccttccaggtgttctccctgcactcacaggcgttctgaagacagatcccaaggtaagcagctcctcggctctgtgccagtgcattgccatcatgggaaacctcagtgctgagcccactacccgaagacacatggcggcctgtgaggaatttggggatggctgcttgagcctcctggccaggtgtgaggaggatgtggacctgttcagagaggttatctacacactcctgggactcatgatgaacctgtgtcttcaggctccctttgtctctgaggtttgggctgtggaggtgagcagaaggtgcctgtctttactaaacagccaggatggaggaatcctgacaagagctgctggtgttctgagccggaccctttcttcctctctgaaaattgttgaggaggccttgcgagcaggagtggtaaagaaaatgatgaaattcctgaagacaggaggtgagactgcatcacgttatgctataaagatactagctatctgcacgaatagttatcatgaagctcgggaagaagtaataagactggataaaaagttgagcgttatgatgaagctgctcagctcggaggatgaggttctggtgggcaacgctgccctctgccttggtaactgcatggaggtgcccaacgttgcgtcttccctgctaaagacggaccttttgcaggtcttgttaaagcttgcaggcagtgacacacagaagacggccgtgcaggtgaacgcaggcattgctctggggaagctgtgcacagctgagcccagatttgctgctcaactgagaaagcttcatggcctagaaattctcaactctacgatgaaatacatcagtgattcttgagagagacagggtttgtgtgcatttggggaacacacagatgcacaccgtgtgttgttcctatgctaataaagacctttgatgtatccacttca

SEQ ID NO: 31418 - DNA, 2788 bp, Homo sapiens
  source 1..2788: mol_type = unassigned DNA
gatgccccgcccgcgcccatggcgcagccacacacgacctcggtcccgtacttcgcgcgctctcctgcaccgccgccgccatctcgctcaggagctcctccacaaccgccggcaacactacggccatcgcgccgcaggacacgccctccacgaccggcggaccgccgcgacgctccagctgactgcgcctacctgtggaggatcctgaccccccgccggggcagggcgagacggagtgacgtcggggcgcgtcatcgcgcgtgcggacgcagggatgtcctgctcagtcgtcagggcccggccaatccggagggcgctcggcgcgtggtcgggggccaggagcgcgtctggcctgcagtgcgcagaggacgcggcgggagcatgttccggctcctgagctggagcctgggccgaggcttcctgcgggccgcggggcggcggtgccggggctgctccgcgcgcctgctcccggggctggcaggaggtccggggcccgaggtgcaggtgccgccatcccgagtcgcgccgcacggccggggcccaggcctgctgccgctgctggcagcgctcgcctggttctcgaggcccgctgcggcagaggaggaggagcagcagggagccgacggggccgctgccgaggacggggcggacgaggccgaggcagagatcatccagctgctgaagcgagccaagttgagcattatgaaagatgagccagaagaggctgagttaattttgcatgacgctcttcgtctcgcctatcagactgataacaagaaggccatcacttacacttatgatttgatggccaacttagcatttatacggggtcagcttgaaaatgctgaacaactttttaaagcaacaatgagttacctccttggagggggcatgaagcaggaggacaatgcaataattgaaatttccctaaagctggccagtatctatgctgcgcagaacagacaggaatttgctgttgctggctatgaattctgcatttcaactctagaggaaaaaattgaaagagaaaaggaattagcagaagacattatgtcagtggaagagaaagccaatacccacctcctcttgggcatgtgcttagacgcctgtgctcgctaccttctgttctccaagcagccgtcacaggcacaaaggatgtatgaaaaagctctgcagatttctgaagaaatacaaggagaaagacacccacagaccattgtgctgatgagtgacctggctactaccctggatgcacagggccgctttgatgaggcctatatttatatgcaaagggcatcagatctggcaagacagataaatcatcctgagctacacatggtactcagtaatctagctgcagttttgatgcacagagaacgatatacacaagcaaaagagatctaccaggaagcactgaagcaagcaaagctgaaaaaagatgaaatttctgtacaacacatcagggaagagttggctgagctgtcaaagaaaagtagacctttgacaaattctgtcaagctctaaatccatttttgtgtagggagaataatgtctagtaatgtggaagaatagctatcattcctgtctctgtggcacccgatcaatggcttaaatctgtcgtttttgatattcaggtttcctcaatttagccttagtgaaggaggggttgtacacactgccatttttgtattttaaaggaaaaatgactttcattcccaactgattatgacctttcaggatgtcgtcaagtgatgctttcagttgtaacacgtgacttggtgctgtccctgctggtctaagtagaactgtagattcatatgggctggtgttcctgtgcgctgtgggtgtggtgattcagcctggcatttctaccataagtttttggtctgctgatttgctgccctgtcttctcttactttactttatcaatacctggcaaactgaccagaattaccttcctcatggcaaagggggattatggtgaattgttgttcttatagtctgtttcatgaagcacaagtggaatttaatacataaaagagaaaaatatcttagtttgctaccagcatccagcatgaagttgtaaagtggggattaggcacgtgacagtatagcacccatttgaatttaaataaaagtgaaccatatttatctggttatataaaactaaaaatgggggtgtttatataaaactaaaaactaagaatgatgtaaccttttgtctgtgttatctgaacactctacttcctttgcagccttagtcacacaactgagtcatctcaagtactctttaaggacacacagcccaggctgttctgagtcagaataggcccctacaggtatattttaaaactcttcgtaattctaatgtgtactgctggtatagctgaactactgacctggatcttagtcctagcctttttgcttttgcaatttcagtatcttcatctctaaactagggaaacactgggattctttcttagctgtgggggaaggtatttggttagatgactttgaatgaatagactgctgtgctgaaagagctttatcacactgtctcaaagtatgtaaagatacataggtggatgctcttactgcagcagtcatgaatacatttttagccatttacctaaggaaaaagacagtttttctaggtaccatgaaggaagattgaccctgttggtatgcctgtgggggtgggatgtgagtgggactgataaactgatacttttggttcgtatgtacatactggaagaatcttcataataaatgagactacacaacaata

SEQ ID NO: 31419 - DNA, 1662 bp, Homo sapiens
  source 1..1662: mol_type = unassigned DNA
cgcagggatgtcctgctcagtcgtcagggcccggccaatccggagggcgctcggcgcgtggtcgggggccaggagcgcgtctggcctgcagtgcgcagaggacgcggcgggagcatgttccggctcctgagctggagcctgggccgaggcttcctgcgggccgcggggcggcggtgccggggctgctccgcgcgcctgctcccggggctggcaggaggtccggggcccgaggtgcaggtgccgccatcccgagtcgcgccgcacggccggggcccaggcctgctgccgctgctggcagcgctcgcctggttctcgaggcccgctgcggcagaggaggaggagcagcagggagccgacggggccgctgccgaggacggggcggacgaggccgaggcagagatcatccagctgctgaagcgagccaagttgagcattatgaaagatgagccagaagaggctgagttaattttgcatgacgctcttcgtctcgcctatcagactgataacaagaaggccatcacttacacttatgatttgatggccaacttagcatttatacggggtcagcttgaaaatgctgaacaactttttaaagcaacaatgagttacctccttggagggggcatgaagcaggaggacaatgcaataattgaaatttccctaaagctggccagtatctatgctgcgcagaacagacaggaatttgctgttgctggctatgaattctgcatttcaactctagaggaaaaaattgaaagagaaaaggaattagcagaagacattatgtcagtggaagagaaagccaatacccacctcctcttgggcatgtgcttagacgcctgtgctcgctaccttctgttctccaagcagccgtcacaggcacaaaggatgtatgaaaaagctctgcagatttctgaagaaatacaaggagaaagacacccacagaccattgtgctgatgagtgacctggctactaccctggatgcacagggccgctttgatgaggcctatatttatatgcaaagggcatcagatctggcaagacagataaatcatcctgagctacacatggtactcagtaatctagctgcagttttgatgcacagagaacgatatacacaagcaaaagagatctaccaggaagcactgaagcaagcaaagctgaaaaaagatgaaatttctgtacaacacatcagggaagagttggctgagctgtcaaagaaaagtagacctttgacaaattctgtcaagctctaaatccatttttgtgtagggagaataatgtctagtaatgtggaagaatagctatcattcctgtctctgtggcacccgatcaatggcttaaatctgtcgtttttgatattcaggtttcctcaatttagccttagtgaaggaggggttgtacacactgccatttttgtattttaaaggaaaaatgactttcattcccaactgattatgacctttcaggatgtcgtcaagtgatgctttcagttgtaacacgtgacttggtgctgtccctgctggtctaagtagaactgtagattcatatgggctggtgttcctgtgcgctgtgggtgtgtgggactgataaactgatacttttggttcgtatgtacatactggaagaatcttcataataaatgagactacacaacaata

SEQ ID NO: 31420 - DNA, 2784 bp, Homo sapiens
  source 1..2784: mol_type = unassigned DNA
gatgccccgcccgcgcccatggcgcagccacacacgacctcggtcccgtacttcgcgcgctctcctgcaccgccgccgccatctcgctcaggagctcctccacaaccgccggcaacactacggccatcgcgccgcaggacacgccctccacgaccggcggaccgccgcgacgctccagctgactgcgcctacctgtggaggatcctgaccccccgccggggcagggcgagacggagtgacgtcggggcgcgtcatcgcgcgtgcggacgcagggatgtcctgctcagtcgtcagggcccggccaatccggagggcgctcggcgcgtggtcgggggccaggagcgcgtctggcctgcagtgcgcagaggacgcggcgggagcatgttccggctcctgagctggagcctgggccgaggcttcctgcgggccgcggggcggcggtgccggggctgctccgcgcgcctgctcccggggctggcaggaggtccggggcccgaggtgcaggtgccgccatcccgagtcgcgccgcacggccggggcccaggcctgctgccgctgctggcagcgctcgcctggttctcgaggcccgctgcggcagaggaggaggagcagcagggagccgacggggccgctgccgaggacggggcggacgaggccgaggcagagatcatccagctgctgaagcgagccaagttgagcattatgaaagatgagccagaagaggctgagttaattttgcatgacgctcttcgtctcgcctatcagactgataacaagaaggccatcacttacacttatgatttgatggccaacttagcatttatacggggtcagcttgaaaatgctgaacaactttttaaagcaacaatgagttacctccttggagggggcatgaagcaggaggacaatgcaataattgaaatttccctaaagctggccagtatctatgctgcgcagaacagacaggaatttgctgttgctggctatgaattctgcatttcaactctagaggaaaaaattgaaagagaaaaggaattagcagaagacattatgtcagtggaagagaaagccaatacccacctcctcttgggcatgtgcttagacgcctgtgctcgctaccttctgttctccaagcagccgtcacaggcacaaaggatgtatgaaaaagctctgcagatttctgaagaaatacaaggagaaagacacccacagaccattgtgctgatgagtgacctggctactaccctggatgcacagggccgctttgatgaggcctatatttatatgcaaagggcatcagatctggcaagacagataaatcatcctgagctacacatggtactcagtaatctagctgcagttttgatgcacagagaacgatatacacaagcaaaagagatctaccaggaagcactgaagcaagcaaagctgaaaaaagatgaaatttctgtacaacacatcagggaagagttggctgagctgtcaaagaaaagtagacctttgacaaattctgtcaagctctaaatccatttttgtgtagggagaataatgtctagtaatgtggaagaatagctatcattcctgtctctgtggcacccgatcaatggcttaaatctgtcgtttttgatattcaggtttcctcaatttagccttagtgaaggaggggttgtacacactgccatttttgtattttaaaggaaaaatgactttcattcccaactgattatgacctttcaggatgtcgtcaagtgatgctttcagttgtaacacgtgacttggtgctgtccctgctggtctaagtagaactgtagattcatatgggctggtgttcctgtgcgctgtgggtgtggtgattcagcctggcatttctaccataagtttttggtctgctgatttgctgccctgtcttctcttactttactttatcaatacctggcaaactgaccagaattaccttcctcatggcaaagggggattatggtgaattgttgttcttatagtctgtttcatgaagcacaagtggaatttaatacataaaagagaaaaatatcttagtttgctaccagcatccagcatgaagttgtaaagtggggattaggcacgtgacagtatagcacccatttgaatttaaataaaagtgaaccatatttatctggttatataaaactaaaaatgggggtgtttatataaaactaaaaactaagaatgatgtaaccttttgtctgtgttatctgaacactctacttcctttgcagccttagtcacacaactgagtcatctcaagtactctttaaggacacacagcccaggctgttctgagtcagaataggcccctacaggtatattttaaaactcttcgtaattctaatgtgtactgctggtatagctgaactactgacctggatcttagtcctagcctttttgcttttgcaatttcagtatcttcatctctaaactagggaaacactgggattctttcttagctgtgggggaaggtatttggttagatgactttgaatgaatagactgctgtgctgaaagagctttatcacactgtctcaaagtatgtaaagatacataggtggatgctcttactgcagcagtcatgaatacatttttagccatttacctaaggaaaaagacagtttttctaggtaccatgaaggaagattgaccctgttggtatgcctgtgggggtgggatgtgagtgggactgataaactgatacttttggttcgtatgtacatactggaagaatcttcataataaatgagactacacaac

SEQ ID NO: 31421 - DNA, 2591 bp, Homo sapiens
  source 1..2591: mol_type = unassigned DNA
gccaggagcgcgtctggcctgcagtgcgcagaggacgcggcgggagcatgttccggctcctgagctggagcctgggccgaggcttcctgcgggccgcggggcggcggtgccggggctgctccgcgcgcctgctcccggggctggcaggaggtccggggcccgaggtgcaggtgccgccatcccgagtcgcgccgcacggccggggcccaggcctgctgccgctgctggcagcgctcgcctggttctcgaggcccgctgcggcagaggaggaggagcagcagggagccgacggggccgctgccgaggacggggcggacgaggccgaggcagagatcatccagctgctgaagcgagccaaggtgaggcggctccgggccctgcgcccggccgagcgcggtagcctttgtgagcggggtcttggcgttgctgcgcattactctctccgcctcgccgaagagtggatggaggctccgcgggtaaaattgccgagaatgagttgagcattatgaaagatgagccagaagaggctgagttaattttgcatgacgctcttcgtctcgcctatcagactgataacaagaaggccatcacttacacttatgatttgatggccaacttagcatttatacggggtcagcttgaaaatgctgaacaactttttaaagcaacaatgagttacctccttggagggggcatgaagcaggaggacaatgcaataattgaaatttccctaaagctggccagtatctatgctgcgcagaacagacaggaatttgctgttgctggctatgaattctgcatttcaactctagaggaaaaaattgaaagagaaaaggaattagcagaagacattatgtcagtggaagagaaagccaatacccacctcctcttgggcatgtgcttagacgcctgtgctcgctaccttctgttctccaagcagccgtcacaggcacaaaggatgtatgaaaaagctctgcagatttctgaagaaatacaaggagaaagacacccacagaccattgtgctgatgagtgacctggctactaccctggatgcacagggccgctttgatgaggcctatatttatatgcaaagggcatcagatctggcaagacagataaatcatcctgagctacacatggtactcagtaatctagctgcagttttgatgcacagagaacgatatacacaagcaaaagagatctaccaggaagcactgaagcaagcaaagctgaaaaaagatgaaatttctgtacaacacatcagggaagagttggctgagctgtcaaagaaaagtagacctttgacaaattctgtcaagctctaaatccatttttgtgtagggagaataatgtctagtaatgtggaagaatagctatcattcctgtctctgtggcacccgatcaatggcttaaatctgtcgtttttgatattcaggtttcctcaatttagccttagtgaaggaggggttgtacacactgccatttttgtattttaaaggaaaaatgactttcattcccaactgattatgacctttcaggatgtcgtcaagtgatgctttcagttgtaacacgtgacttggtgctgtccctgctggtctaagtagaactgtagattcatatgggctggtgttcctgtgcgctgtgggtgtggtgattcagcctggcatttctaccataagtttttggtctgctgatttgctgccctgtcttctcttactttactttatcaatacctggcaaactgaccagaattaccttcctcatggcaaagggggattatggtgaattgttgttcttatagtctgtttcatgaagcacaagtggaatttaatacataaaagagaaaaatatcttagtttgctaccagcatccagcatgaagttgtaaagtggggattaggcacgtgacagtatagcacccatttgaatttaaataaaagtgaaccatatttatctggttatataaaactaaaaatgggggtgtttatataaaactaaaaactaagaatgatgtaaccttttgtctgtgttatctgaacactctacttcctttgcagccttagtcacacaactgagtcatctcaagtactctttaaggacacacagcccaggctgttctgagtcagaataggcccctacaggtatattttaaaactcttcgtaattctaatgtgtactgctggtatagctgaactactgacctggatcttagtcctagcctttttgcttttgcaatttcagtatcttcatctctaaactagggaaacactgggattctttcttagctgtgggggaaggtatttggttagatgactttgaatgaatagactgctgtgctgaaagagctttatcacactgtctcaaagtatgtaaagatacataggtggatgctcttactgcagcagtcatgaatacatttttagccatttacctaaggaaaaagacagtttttctaggtaccatgaaggaagattgaccctgttggtatgcctgtgggggtgggatgtgagtgggactgataaactgatacttttggttcgtatgtacatactggaagaatcttcataataaatgagactacacaacaata

SEQ ID NO: 31422 - DNA, 5482 bp, Homo sapiens
  source 1..5482: mol_type = unassigned DNA
gcggcgcgaccccgcccctcccgctggggcccggggcgctagagcgctccgggaggctaggggagctgaattctgcgtcttcctttaggctgcggcgagacaatccccagagccccgcggcccggcctcggggcagccatggactcgcaggaattgaagactttgattaattactattgtcaagagagatatttccatcatgtattactggttgccagtgaaggaattaagaggtatggaagtgatccagtcttcaggttttatcatgcctatggcacattaatggaaggtaaaactcaagaagctcttcgagaatttgaggctattaaaaataaacaagatgtatcactttgttctctacttgcactgatatatgcccataaaatgagtcctaatccagatagagaagctattctggaatcagatgccagagtgaaggaacaacgtaaaggagctggagagaaagccttataccatgcaggcttatttttatggcacattggtcgccatgataaagcaagggaatatattgacagaatgatcaaaatatcagatggtagtaaacagggacacgttttgaaagcatggcttgatattacaagaggaaaagagccttacactaaaaaagcactgaagtattttgaagagggactccaagatgggaatgatacttttgctctgctgggtaaggcacaatgccttgagatgcgccagaattattcaggtgccctggagactgtgaaccagataatcgtgaattttccgagcttccttcctgcttttgttaagaaaatgaaattacaactagccttgcaggattgggaccagacagttgagacagcacaaaggttgctgctccaagatagccaaaatgtggaagcactgagaatgcaggcactctactatgtgtgtagagagggggatatagagaaggcttccaccaagctggaaaacttgggaaatacattggatgccatggaaccacagaatgctcaacttttctataacattacactcgccttcagcagaacttgtggacgtagtcaacttattcttcaaaaaattcaaacgttacttgagagagcttttagtttaaaccctcagcaatcagaatttgctacagaacttggataccaaatgattttacaaggaagagttaaagaggcactgaagtggtataagaccgccatgacacttgatgagactagtgtgtctgccctagttggatttatccaatgtcagttgatagaagggcaattacaggatgcagatcagcagctagaatttttaaatgaaatccagcaatccattggaaaatctgcggaattaatctatttacatgcagttcttgccatgaagaaaaataaacgacaagaagaagttattaatttgttaaatgatgtcctggacactcacttttcacaattagaaggtttgcctcttggcatacagtattttgaaaagctaaatcctgatttcttgttagaaattgttatggagtatctgagcttctgtccaatgcagcctgcaagtcctgggcaacctctttgtccacttctcaggcgttgcatctcagtcctggagactgtagtaagaactgttccaggtcttctgcaaacagtcttcctaatagcaaaagtgaaatatttgtcaggtgatattgaagcagctttcaataaccttcagcactgcttagaacacaatccctcttatgctgatgctcatctgctgctagctcaggtttacttgtctcaagaaaaagtcaaattgtgttctcagtctcttgaactttgtctgagctatgattttaaggtgagagactatcctttataccatttgataaaagctcagtcacaaaagaaaatgggagaaatagcagacgcaattaaaacactgcatatggcaatgagtttaccaggaatgaaaagaattggagcttccacaaaatcaaaagacagaaaaactgaagttgatacaagccatcgtttatcgatctttcttgaattgatagacgttcaccgcttaaatggagagcagcatgaggcaaccaaagttttacaagatgccatccatgaattttctggaacatctgaagaagtgcgggttaccattgctaatgcagaccttgctctagcccaaggagatattgaacgggctttaagcatccttcagaatgttacagccgaacagccttattttatagaggccagagaaaaaatggcagatatttatctgaagcacagaaaagataaaatgttatatatcacttgttttagagaaattgctgaaagaatggctaaccctcggtcttttcttctccttggtgatgcatacatgaatattctagagcctgaagaagccatagtagcatatgagcaagcattaaatcagaacccgaaagatggaacattggcaagcaaaatgggcaaagcacttatcaaaactcataactactcaatggcaatcacttactatgaagctgctctgaaaactggacaaaagaattatctttgctatgacctggctgagctcttattaaaattgaaatggtatgacaaagcagaaaaagttcttcagcatgctctggctcatgaacctgtaaatgaactgtcagctctcatggaggatggacgttgtcaagttcttctagcaaaagtttatagtaaaatggaaaaacttggtgatgcgatcactgcattacaacaggctcgagaattacaagctcgggtactaaaacgtgttcagatggaacagccagatgcagttcctgcacagaaacatttagcagctgaaatttgtgcagagattgcaaaacattctgttgctcagcgagactatgaaaaagcaattaagttttatagagaggctctggttcactgcgaaacagataataagattatgttggaactggcacgattatacctggcacaagatgaccctgattcctgcctgcggcagtgtgctctactgcttcagagtgaccaggataacgaagctgctaccatgatgatggctgatctcatgttcagaaaacaagactatgaacaagcagtgtttcatttacagcagcttttagaacgtaagccagataattatatgacattatctcgtttgattgatctcctaagaagatgtggaaaactcgaggatgtcccaagatttttctcaatggctgagaaacgtaactccagagcaaaattggaaccaggatttcagtattgtaaaggactgtatctttggtacactggagaaccaaatgatgcccttcgacattttaataaagctcggaaagatcgtgactggggccaaaatgccctttataatatgatagagatctgtttgaatccagataatgaaactgttggaggtgaagtatttgaaaacctggatggagacctgggtaattcaactgagaagcaagaatctgtgcaactggcagtaagaacagcagaaaaacttcttaaggaactaaaacctcagactgttcagggtcacgtacagcttcgcataatggaaaactattgcttaatggctaccaaacagaaatctaatgttgaacaagcattaaataccttcactgaaatagcagcatctgagaaggagcatatcccagcgctcttgggaatggcaacggcttatatgatcttgaaacagactccacgagccagaaaccagctgaagcgtattgcgaaaatgaattggaatgctattgatgctgaagagtttgagaagagttggctgctacttgctgatatttacattcaatcagcaaaatatgacatggcagaagacctgttaaaacggtgcctgcgtcataatagatcttgctgcaaagcttatgaatatatgggatacattatggaaaaagagcaagcatatacagatgctgccttgaactatgagatggcatggaaatatagcaatcggacaaatccggcagtaggatacaaactggcatttaattacttaaaagcaaaaagatatgtggattcaattgacatatgtcaccaggttcttgaagcacatccaacttatccaaaaatcagaaaggatatacttgataaggcccgtgcgtctttaagaccttgaaaataattttaacttaggtgttggtttaacaggaaatgaaagaaatctaactttcagttcttcctgttcaaaacaggtttgagctcagtgctttgttattagaagtatacccttttttctccagcagaggttgctgctgtacatcaagagaagtactatgtgaaattggtgtttcctaatggagttgaatgagagctggtctatttgactctgttttgattgggtacagatttggtgactctgtggtaaagactataattatttctataaagaatattttgttaaaatctaggtaattaaataccctgtatcttttctaaggaatattatttcaggaaatatatttaaaatgcattgttctcttttaaagtgtttttgttatattcttttatttatttatttatttttaaagacagagccttgatctgccgcccaggctggagtgcagtggcacgatcttggctcactgcaacctccgcctcctgggtttacgcgattctcctgcttcagcctcccgagtagctgggactaaaggcatgtgccatcacacccggctaattttttgtatttttagtagagatgggatttcaccgtgttagccaggaggggcttgatctcttgaccttgtgatccacctgcctcggcctcccaaagtgctgggattacaggcatgagccaccgcacccagcctgtttttgttgtattctgtgttgtttcaaaaattggaataaatctccctgtaaataactcatgaaaaagacaatatatatattttaaatatatattttaataaaggttttataaatagatgatttatattcctcttggaactcaaaagatgtggtaagttttgcaaatcagggtaagctccccctgcattctgtaatgttaatgggtggtggtatagtacagaaaatgtaactttcattgaaaaatcttttttagaaaagggtagagtgtgtgtttccctttcctttcttgagctcattcttcctgctttcaaggccattgtggtcttaagaaataatcaggtcctgaaacctcaatttaaataggtcccttattagggatatttaaccttagcctagaagacttggtctgcaggtataatttcagacactgtaacatttgatggtaaagggtgaccaaatacttttggtcagcagggagtcacaaagcacaccatgtgaaggcaacggtttacccagctctgtttaacagcaccctggcatagaagctttcactctcttacactaaatttaacctaatctaaacttaatccttagcattatttttaatttctcatctacatctttttcaattttccttaaaattgtagtaaacacagtcctcaattttatttgcatttacaataaacagtatttataagtca

SEQ ID NO: 31423 - DNA, 1589 bp, Homo sapiens
  source 1..1589: mol_type = unassigned DNA
taaaggactgtatctttggtacactggagaaccaaatgatgcccttcgacattttaataaagctcggaaagatcgtgactggggccaaaatgccctttataatatgatagagatctgtttgaatccagataatgaaactgttggaggtgaagtatttgaaaacctggatggagacctgggtaattcaactgagaagcaagaatctgtgcaactggcagtaagaacagcagaaaaacttcttaaggaactaaaacctcagactgttcagggtcacgtacagcttcgcataatggaaaactattgcttaatggctaccaaacagaaatctaatgttgaacaagcattaaataccttcactgaaatagcagcatctgagaaggagcatatcccagcgctcttgggaatggcaacggcttatatgatcttgaaacagactccacgagccagaaaccagctgaagcgtattgcgaaaatgaattggaatgctattgatgctgaagagtttgagaagagttggctgctacttgctgatatttacattcaatcagcaaaatatgacatggcagaagacctgttaaaacggtgcctgcgtcataatagatcttgctgcaaagcttatgaatatatgggatacattatggaaaaagagcaagcatatacagatgctgccttgaactatgagatggcatggaaatatagcaatcggacaaatccggcagtaggatacaaactggcatttaattacttaaaagcaaaaagatatgtggattcaattgacatatgtcaccaggttcttgaagcacatccaacttatccaaaaatcagaaaggatatacttgataaggcccgtgcgtctttaagaccttgaaaataattttaacttaggtgttggtttaacaggaaatgaaagaaatctaactttcagttcttcctgttcaaaacaggatttgattgccttatgtgacaagcccaagatctgtgacagttggagctcaaactaggcagtcttgattccagactgctctgaactagtatttgaaggaactaatgaacatgacatgttaaatgaaagtttggggacgtacactcaggatggaagcagggggacacaacagaaatgaaagaattttctgtagatctgggatctggacacctgccccccgtcatgaataaatgccatcccttcccacgccaaccatatcgatgatatagtggcaggaaggagagtaagggactctggagcttaaacagaccatcacatgggaaggcagtaaacaagatgctaactgatggagtgaaatccccaggagatgcagaaggcaagtgcagctaactgaggcctcaggggcaggagatgcccatcaggatgagagctatgtctttctccagtgatgactctgcttctatgaggtcaccagcagtagaaccatatcttgctggcatacacttgggatggccccgcctcctggacttccatctgtcatcaggagaacataaccatctggagtcagtacagatcatcaatccttccacatatacaagttcattttaaatttttaaaaatataatacaactgagaagtcttcatt

SEQ ID NO: 31424 - DNA, 9084 bp, Homo sapiens
  source 1..9084: mol_type = unassigned DNA
ctgaactagttgccagtgatcttgaaacgtgacagtaaccaagagataaataggtgacaatgacaggaaaattagatgtagtaaaagagagtgtttgagagcagaagctatggcaactaaagactggatttgaatccttcctagcttggtgacatgagcaaattacttgatttaagtgagcattttcccatctgtacagtggagataacgataattgtgcctgctaagaagaattgctgtgaagattagtgaaataatgcatgtaaaacatttggtacagtatgtgacacatagtacaaatagtttgctaggaagattgttattattcttcacttgtgatattgtgaagttttcatacagcaaattggacatcatgagatggattgattaaataaatagatttgaacttcaaggactggtagtgttcttgctttggaaagaagaaacttggtttatcctaataatagtaggataataatggtgaagtgataggtacaagtaatagtgtttatgatgcgctggtgatgataggaaaagaaagccattatatgggcaagagctagaagtaataaaatggtgcatttttcagtgatgtttggcctatgtagctattctctgataactataaaaatccttattattgaagattcttcaggaaaaaaaacccttagtctgaaactttaccaccaatcccccttgccccccattgaaatacgtatttttaaaacatggcttttgataatgtgagggttttttcctttttgcgatttagcagtgctgattgtgtattgcagtagttgtgagagcattagaagcagcagtcgataggaggatggaaggtctggatgccgccttggggagttaggagattggcagacttaccctgtaccactctagccctactcctttgcccaagacagaaacacactgagatggataggagaatatgagcagttgataggaaagttctcagtggagtcaggatttaggttaggccaggagattgagaatataacagtttgtgtatgatgaaatggcatatttcacagaatgcagtaaaagcaggtagggtacaagtgcagcaacaggaagatgtcttttcttcattcagcaaacacttatttgagagcttaccatgtgctaggcacatacaaagataaataagatgcccttgatgatcctctatttaaaggagacatgtaaacaggttaacttagagtagagatggtgaatatgtgaacctgaggaaaggaagaaatagattaaattatctggagagagaggaaaagtcagcagaatggggacgagaatctttcggagctcagtgttctgataggagttatttccttgggcataggttccaagtatttttctaatataccatagaagccaggaaaactttcttctgttatctcaaatgatttaattactgacttgagtttgtgttgtctccttagacttgtgcaccatggacaattttgctgagggagatttcactgtggcggattatgccttgttagaagattgccctcacgtggatgattgtgtctttgctgctgaatttatgagcaatgattatgttcgtgtgactcagctttactgtgatggggtgggtgtgcaatataaagattatatccaaagtgagaggaatttggaatttgacatctgcagtatatggtgtagtaaaccaatttctgtcctgcaagattattgcgatgccattaaaataaacatcttctggccacttctgtttcaacatcaaaacagttccgtaatatcacgattgcatccctgtgtggacgccaacaattcacgtgcttctgagataaatttgaagaaactacaacatcttgagttgatggaagatattgtggatttggcaaagaaagttgctaatgattcattccttattggaggcttattgagaattggttgtaaaatagaaaataaaatcttggcaatggaagaagctctgaattggataaaatatgcaggcgatgtaacaattctaactaaattaggatcaattgacaattgttggcctatgttaagtattttctttactgaatacaagtaccacataactaaaattgtaatggaagactgcaatttgcttgaagaacttaaaactcaaagttgtatggattgtatagaggaaggagaactaatgaaaatgaaaggaaatgaagagttttccaaagaaagatttgatatagctattatctattacaccagagccattgaatatagacctgaaaactaccttctttatggtaaccgagctctttgttttcttcgtactggacagtttagaaatgcactcggtgatggaaagagagccactattctgaagaacacttggccaaagggtcattatcgttattgtgatgctctttctatgctgggggaatatgactgggccctgcaagcaaacataaaagctcaaaaactctgtaaaaatgaccctgagggaatcaaggatctaattcagcagcatgtaaagttacaaaaacaaatagaagacctacaaggtcgaacagcaaataaggatccaattaaagccttttatgaaaacagggcctacacacctaggagtttatcagcacctatatttactacttcacttaactttgtggagaaggaaagagatttcagaaaaattaatcacgaaatggccaacggtggtaatcagaatctaaaggtggcggatgaggcgttgaaggtagatgattgtgactgtcatcctgaattttcaccaccatcaagtcagcctccaaaacataaaggaaaacaaaaatctcgaaacaatgaatcagaaaagttcagttctagttcaccattgactttaccagcagatttgaagaacatcttggagaaacagttttctaaatcttccagagctgcacaccaggattttgctaatataatgaaaatgctgagaagcttaattcaagatggctatatggccttattggagcagcgttgccgcagcgctgcacaggcctttacagagttgctgaacggtttagatcctcaaaaaataaagcaattgaacctggccatgattaactatgttttggtcgtctatggacttgccatttctctccttggaataggacagcctgaggaattatctgaagccgaaaaccagtttaagaggattattgaacactaccccagtgagggccttgattgcttggcctactgtggaattggaaaagtatatttgaaaaaaaacagatttctagaagctctcaatcactttgagaaagcaagaaccttgatttatcgtcttcctggagtgttaacttggcccacgagtaatgtgattattgaagagtctcagccacaaaaaataaagatgctgttagagaaatttgttgaagaatgcaagttccctccagtgccagatgccatttgttgctatcagaagtgccatggatattctaagatccagatatacataactgatccagactttaagggttttatacgcatcagctgttgccagtactgtaaaatagaatttcacatgaattgctggaagaagttaaaaactacaacctttaatgataaaattgacaaggattttctacaaggaatatgtcttacccctgactgtgaaggtgtcatttctaagattatcatcttcagcagtggtggtgaagttaaatgtgaatttgaacacaaggtcataaaagaaaaggttcctccaagacctattctgaaacagaaatgttctagcctagagaaactaagactgaaagaagacaaaaaattgaagagaaagatccaaaaaaaagaagcaaaaaagttagcacaagaaagaatggaggaggacttaagagaaagtaatccacccaaaaatgaagagcagaaagaaactgtagacaatgttcagcgttgtcagttccttgatgacagaattctacagtgtataaagcagtatgctgacaagattaaatccggcatacagaatacagccatgcttctcaaagaattgctttcttggaaagttttgagcacagaagactatacaacctgtttttctagcagaaattttctaaatgaagcagtggactatgttattcgccacttgattcaagaaaataacagagtaaagacaagaatatttctgcatgttttgagtgagcttaaagaagtggagcccaaattagccgcctggatccaaaaacttaatagctttggcttagatgccacaggaactttcttttctcgttatggagcatctcttaaactgcttgattttagtatcatgactttcctctggaatgagaaatatggtcacaaactagactctatagaaggaaagcaacttgattatttctctgagccagcatcattgaaggaagcccgttgtttaatatggctgctagaagaacacagagacaagttcccagcattgcatagtgctttagatgaattctttgatataatggacagccgctgtactgtgttaaggaaacaagatagtggtgaagcaccgtttagttcaaccaaggtgaaaaacaaaagcaagaaaaagaagccaaaggattcaaagcctatgttagttgggtctggaacaacttcagtaacttcaaataatgagatcatcacttcaagtgaagaccatagcaatcgaaattcagattctgcaggcccatttgcagtgcctgaccatcttcggcaagatgtagaagaattcgaagctctctatgaccaacacagtaacgaatatgttgtccgcaataagaagctatgggacatgaacccaaaacaaaaatgttcaactctatatgattacttctctcagtttttggaggaacatggtcccttggacatgagtaacaagatgttctctgcagaatatgagtttttcccagaagaaactcgacagatactagaaaaagcaggaggtttaaaaccttttctcttgggatgccctcgttttgttgtgattgacaactgtattgcactgaagaaggttgcatcacggctcaagaaaaaaaggaagaagaaaaacattaaaacaaaagtagaagaaatttcaaaagcaggggagtatgtacgagttaaactacaactgaatccagctgctagggaatttaaaccagatgtaaagtctaaaccagtgtcagattcatcttcagcaccagcttttgaaaatgtgaaacccaaacctgtgtctgcaaattctcccaagccagcttgtgaagatgtgaaggccaaaccagtatccgacaattcttctagacaagtttctgaggatgggcaacccaaaggggtctcttctaattctcctaaaccaggctctgaggatgcaaattacaagcgagtctcctgtaattcccccaaaccggttcttgaggatgtgaaaccaacttattgggctcaatcccatttggtcacaggatactgtacgtatcttcctttccagagatttgatatcacccagacaccgccagcatacataaacgtgttaccaggtttgccccagtacaccagcatatatacacccttggccagcctttctcctgaatatcagctaccaagatcagtaccagtggtgccgtcttttgtagccaatgacagagcagataaaaatgctgctgcctattttgagggtcatcatttgaatgctgagaatgttgctggtcaccagattgcctctgaaacacagatccttgagggctctttgggaatatctgtaaagtcacactgcagcacaggtgatgctcatacagtcctgagtgagtctaacagaaatgatgagcactgtggaaattctaacaacaaatgtgaagtaattccagaaagcaccagtgcagtaacaaacattccacacgtgcagatggttgccatacaggtatcttggaacataatacaccaagaagtcaatactgagccatataatccttttgaggaacgacaaggggaaatttcacggattgaaaaggagcaccaagtattacaagaccaacttcaagaagtgtatgaaaattatgagcagataaaacttaagggcttagaagagaccagggacctggaagagaagttgaaaaggcacttagaagaaaacaagatctcaaagacggaattagattggttccttcaagatttggaaagagaaattaaaaaatggcaacaggaaaaaaaagaaatccaagaaagactaaaatcactgaagaagaaaattaaaaaggtttcaaatgccagtgaaatgtatacccagaaaaatgatggaaaggaaaaggaacatgaattacatctggatcagtcccttgaaatcagcaacacacttacaaatgagaaaatgaaaatagaagagtatataaagaaagggaaagaggattatgaagagagtcatcagagagctgtggctgcagaggtatccgtacttgaaaactggaaggagagtgaagtgtataagctacagatcatggagtcacaagcagaagcctttctgaagaagctggggctgattagccgtgatcctgcagcatatcctgacatggagtctgatatacgttcatgggaattgtttctttctaatgttacaaaagaaattgagaaagcaaagtctcagtttgaagaacaaattaaggcaattaaaaatggttctcggctcagtgaactttctaaagtgcagatttctgagctttcatttcctgcctgtaacacggttcatcccgagttactccctgagtcttcaggcgacgatggccaagggcttgtgacttctgcaagcgacgtgactggaaaccacgcagcacttcacagggatcctagtgtgttctctgctggtgattccccaggggaggctccttctgcgctgttgccagggccaccccctggtcagcctgaagccactcagctgacagggccaaaacgggctggccaggcagctctgtcagaacgaagccctgtggctgatcggaagcagcctgttcctccaggacgtgctgcgcgttcaagccagtctccaaaaaagccgttcaatagtattattgagcacctgtcagtggtattcccatgttacaacagcactgagcttgctggttttattaaaaaagtgcgaagcaaaaacaagaactcactctcaggattgagtattgatgaaattgtccaaagagtgacagaacacattctagatgaacagaaaaagaaaaagccaaacccaggaaaggacaagaggacttatgagcccagctctgccacccccgtgaccaggtcctcccagggctcaccctcggtggttgttgcaccatcacccaaaaccaaggggcagaaagcagaagatgtccctgtgaggattgcactgggtgcaagttcctgtgaaatatgccacgaggtgttcaaatcaaaaaacgtgcgtgtgctcaaatgtgggcacaagtatcacaaagggtgctttaagcagtggcttaaagggcagagcgcttgcccggcctgccagggtcgtgatctcctgacagaagagtcaccttctggaagaggctggcccagtcagaatcaggagctgccttcctgctcttctaggtagtcacacttcactaaagtgtcatccaccagtgtgttgaatccgaagaatgacaattttctaccactggtgtaaaaaacaaacatttgaagacccttgtgcattgtgtgtcacaaagctaaatacatggaaatcgttaatatcgctgatattaagtaatttccccactctgagtgaatactttgatgattgccaacagtggctaataaaatgacggctaccacactcatgggtcactggggctgcgcagggctctttgaggtgggtggcttcttttggaaagtactatgaacgtctcgaagcagtattctagtgataagaattcttaacatagccaagcgccccacgtttgttccccacgtttgttccccttttctgtttgaaaaacctgttctggtagctccacaagagagatgatactgactttttaaattttttacaagagtctgtattcctgatatgcctatatttttcctcaaagattctgcattttaaggatgggcataagcaaactatattttaataatttatagttaatgttaaaatattggctgatttagaccaaaagattcaaatctcctctttgtgaaatcccatctgcatttgattttttattattttatgttcccccgttagattgttttaagtgtttgcttttcatcttttatagatgtaatctgattttcaaaaatcattaacactttttaattagtatcgactaagactttttccccctggaatcgaggctgtgtgtccgtcatcccagcccccggttggagcctgctctttgaactccgctgccttccttagcagcttctgtcctcttctgtgagtcagtcagcgagtgcttgggatccgcatccagccgtgctgagcacacaacaggctgtgtgtggaaatggccaccaccattctccttccccaccccaccacaaaaagagaagctgtgtctttagacaaccctgaggtatctgtgttacaatcgttctgtgtttgatatttgtgtaaagtatgcatgcagtcttgtactgtgacctaagaacaaaactgtaactgcattagaaaccatgaaaaaattagatattgttttgtgacttttagacagtggtaaatatagaaccatgaattctggtcacattccatttctctccaacatgaaggatcaaaaaatgtttttcaatgtgttctttgttccactggaaacttagagtcatgagtttatgagctgatttggtcaccttcctctgcctttgttcactgtgagttctgatgtcttagtgacttagttcttagaagctcacgccttagtttgaaacagattctccacggtggtccccaaaacactgtctgcatatccataagaattgagcgctatgggtgttaacgtgcatgaggatcagtttgcagcagcaagtacaaaaggagaagaggaacatccgttgaatgagtgtgttttgtacataacttcagatacttgtgaacatgccttatatttgtccaacaactgtcagaataaagaacattctaaaatgagaagttca

SEQ ID NO: 31425 - DNA, 7712 bp, Homo sapiens
  source 1..7712: mol_type = unassigned DNA
gtcggctgacgtggagggccggaggtggcggcggcggcggcggcggctgctgctgctgctgcccgcgtccgaggctcgcgggcggcgggcccggacttgtgcaccatggacaattttgctgagggagatttcactgtggcggattatgccttgttagaagattgccctcacgtggatgattgtgtctttgctgctgaatttatgagcaatgattatgttcgtgtgactcagctttactgtgatggggtgggtgtgcaatataaagattatatccaaagtgagaggaatttggaatttgacatctgcagtatatggtgtagtaaaccaatttctgtcctgcaagattattgcgatgccattaaaataaacatcttctggccacttctgtttcaacatcaaaacagttccgtaatatcacgattgcatccctgtgtggacgccaacaattcacgtgcttctgagataaatttgaagaaactacaacatcttgagttgatggaagatattgtggatttggcaaagaaagttgctaatgattcattccttattggaggcttattgagaattggttgtaaaatagaaaataaaatcttggcaatggaagaagctctgaattggataaaatatgcaggcgatgtaacaattctaactaaattaggatcaattgacaattgttggcctatgttaagtattttctttactgaatacaagtaccacataactaaaattgtaatggaagactgcaatttgcttgaagaacttaaaactcaaagttgtatggattgtatagaggaaggagaactaatgaaaatgaaaggaaatgaagagttttccaaagaaagatttgatatagctattatctattacaccagagccattgaatatagacctgaaaactaccttctttatggtaaccgagctctttgttttcttcgtactggacagtttagaaatgcactcggtgatggaaagagagccactattctgaagaacacttggccaaagggtcattatcgttattgtgatgctctttctatgctgggggaatatgactgggccctgcaagcaaacataaaagctcaaaaactctgtaaaaatgaccctgagggaatcaaggatctaattcagcagcatgtaaagttacaaaaacaaatagaagacctacaaggtcgaacagcaaataaggatccaattaaagccttttatgaaaacagggcctacacacctaggagtttatcagcacctatatttactacttcacttaactttgtggagaaggaaagagatttcagaaaaattaatcacgaaatggccaacggtggtaatcagaatctaaaggtggcggatgaggcgttgaaggtagatgattgtgactgtcatcctgaattttcaccaccatcaagtcagcctccaaaacataaaggaaaacaaaaatctcgaaacaatgaatcagaaaagttcagttctagttcaccattgactttaccagcagatttgaagaacatcttggagaaacagttttctaaatcttccagagctgcacaccaggattttgctaatataatgaaaatgctgagaagcttaattcaagatggctatatggccttattggagcagcgttgccgcagcgctgcacaggcctttacagagttgctgaacggtttagatcctcaaaaaataaagcaattgaacctggccatgattaactatgttttggtcgtctatggacttgccatttctctccttggaataggacagcctgaggaattatctgaagccgaaaaccagtttaagaggattattgaacactaccccagtgagggccttgattgcttggcctactgtggaattggaaaagtatatttgaaaaaaaacagatttctagaagctctcaatcactttgagaaagcaagaaccttgatttatcgtcttcctggagtgttaacttggcccacgagtaatgtgattattgaagagtctcagccacaaaaaataaagatgctgttagagaaatttgttgaagaatgcaagttccctccagtgccagatgccatttgttgctatcagaagtgccatggatattctaagatccagatatacataactgatccagactttaagggttttatacgcatcagctgttgccagtactgtaaaatagaatttcacatgaattgctggaagaagttaaaaactacaacctttaatgataaaattgacaaggattttctacaaggaatatgtcttacccctgactgtgaaggtgtcatttctaagattatcatcttcagcagtggtggtgaagttaaatgtgaatttgaacacaaggtcataaaagaaaaggttcctccaagacctattctgaaacagaaatgttctagcctagagaaactaagactgaaagaagacaaaaaattgaagagaaagatccaaaaaaaagaagcaaaaaagttagcacaagaaagaatggaggaggacttaagagaaagtaatccacccaaaaatgaagagcagaaagaaactgtagacaatgttcagcgttgtcagttccttgatgacagaattctacagtgtataaagcagtatgctgacaagattaaatccggcatacagaatacagccatgcttctcaaagaattgctttcttggaaagttttgagcacagaagactatacaacctgtttttctagcagaaattttctaaatgaagcagtggactatgttattcgccacttgattcaagaaaataacagagtaaagacaagaatatttctgcatgttttgagtgagcttaaagaagtggagcccaaattagccgcctggatccaaaaacttaatagctttggcttagatgccacaggaactttcttttctcgttatggagcatctcttaaactgcttgattttagtatcatgactttcctctggaatgagaaatatggtcacaaactagactctatagaaggaaagcaacttgattatttctctgagccagcatcattgaaggaagcccgttgtttaatatggctgctagaagaacacagagacaagttcccagcattgcatagtgctttagatgaattctttgatataatggacagccgctgtactgtgttaaggaaacaagatagtggtgaagcaccgtttagttcaaccaaggtgaaaaacaaaagcaagaaaaagaagccaaaggattcaaagcctatgttagttgggtctggaacaacttcagtaacttcaaataatgagatcatcacttcaagtgaagaccatagcaatcgaaattcagattctgcaggcccatttgcagtgcctgaccatcttcggcaagatgtagaagaattcgaagctctctatgaccaacacagtaacgaatatgttgtccgcaataagaagctatgggacatgaacccaaaacaaaaatgttcaactctatatgattacttctctcagtttttggaggaacatggtcccttggacatgagtaacaagatgttctctgcagaatatgagtttttcccagaagaaactcgacagatactagaaaaagcaggaggtttaaaaccttttctcttgggatgccctcgttttgttgtgattgacaactgtattgcactgaagaaggttgcatcacggctcaagaaaaaaaggaagaagaaaaacattaaaacaaaagtagaagaaatttcaaaagcaggggagtatgtacgagttaaactacaactgaatccagctgctagggaatttaaaccagatgtaaagtctaaaccagtgtcagattcatcttcagcaccagcttttgaaaatgtgaaacccaaacctgtgtctgcaaattctcccaagccagcttgtgaagatgtgaaggccaaaccagtatccgacaattcttctagacaagtttctgaggatgggcaacccaaaggggtctcttctaattctcctaaaccaggctctgaggatgcaaattacaagcgagtctcctgtaattcccccaaaccggttcttgaggatgtgaaaccaacttattgggctcaatcccatttggtcacaggatactgtacgtatcttcctttccagagatttgatatcacccagacaccgccagcatacataaacgtgttaccaggtttgccccagtacaccagcatatatacacccttggccagcctttctcctgaatatcagctaccaagatcagtaccagtggtgccgtcttttgtagccaatgacagagcagataaaaatgctgctgcctattttgagggtcatcatttgaatgctgagaatgttgctggtcaccagattgcctctgaaacacagatccttgagggctctttgggaatatctgtaaagtcacactgcagcacaggtgatgctcatacagtcctgagtgagtctaacagaaatgatgagcactgtggaaattctaacaacaaatgtgaagtaattccagaaagcaccagtgcagtaacaaacattccacacgtgcagatggttgccatacaggtatcttggaacataatacaccaagaagtcaatactgagccatataatccttttgaggaacgacaaggggaaatttcacggattgaaaaggagcaccaagtattacaagaccaacttcaagaagtgtatgaaaattatgagcagataaaacttaagggcttagaagagaccagggacctggaagagaagttgaaaaggcacttagaagaaaacaagatctcaaagacggaattagattggttccttcaagatttggaaagagaaattaaaaaatggcaacaggaaaaaaaagaaatccaagaaagactaaaatcactgaagaagaaaattaaaaaggtttcaaatgccagtgaaatgtatacccagaaaaatgatggaaaggaaaaggaacatgaattacatctggatcagtcccttgaaatcagcaacacacttacaaatgagaaaatgaaaatagaagagtatataaagaaagggaaagaggattatgaagagagtcatcagagagctgtggctgcagaggtatccgtacttgaaaactggaaggagagtgaagtgtataagctacagatcatggagtcacaagcagaagcctttctgaagaagctggggctgattagccgtgatcctgcagcatatcctgacatggagtctgatatacgttcatgggaattgtttctttctaatgttacaaaagaaattgagaaagcaaagtctcagtttgaagaacaaattaaggcaattaaaaatggttctcggctcagtgaactttctaaagtgcagatttctgagctttcatttcctgcctgtaacacggttcatcccgagttactccctgagtcttcaggcgacgatggccaagggcttgtgacttctgcaagcgacgtgactggaaaccacgcagcacttcacagggatcctagtgtgttctctgctggtgattccccaggggaggctccttctgcgctgttgccagggccaccccctggtcagcctgaagccactcagctgacagggccaaaacgggctggccaggcagctctgtcagaacgaagccctgtggctgatcggaagcagcctgttcctccaggacgtgctgcgcgttcaagccagtctccaaaaaagccgttcaatagtattattgagcacctgtcagtggtattcccatgttacaacagcactgagcttgctggttttattaaaaaagtgcgaagcaaaaacaagaactcactctcaggattgagtattgatgaaattgtccaaagagtgacagaacacattctagatgaacagaaaaagaaaaagccaaacccaggaaaggacaagaggacttatgagcccagctctgccacccccgtgaccaggtcctcccagggctcaccctcggtggttgttgcaccatcacccaaaaccaaggggcagaaagcagaagatgtccctgtgaggattgcactgggtgcaagttcctgtgaaatatgccacgaggtgttcaaatcaaaaaacgtgcgtgtgctcaaatgtgggcacaagtatcacaaagggtgctttaagcagtggcttaaagggcagagcgcttgcccggcctgccagggtcgtgatctcctgacagaagagtcaccttctggaagaggctggcccagtcagaatcaggagctgccttcctgctcttctaggtagtcacacttcactaaagtgtcatccaccagtgtgttgaatccgaagaatgacaattttctaccactggtgtaaaaaacaaacatttgaagacccttgtgcattgtgtgtcacaaagctaaatacatggaaatcgttaatatcgctgatattaagtaatttccccactctgagtgaatactttgatgattgccaacagtggctaataaaatgacggctaccacactcatgggtcactggggctgcgcagggctctttgaggtgggtggcttcttttggaaagtactatgaacgtctcgaagcagtattctagtgataagaattcttaacatagccaagcgccccacgtttgttccccacgtttgttccccttttctgtttgaaaaacctgttctggtagctccacaagagagatgatactgactttttaaattttttacaagagtctgtattcctgatatgcctatatttttcctcaaagattctgcattttaaggatgggcataagcaaactatattttaataatttatagttaatgttaaaatattggctgatttagaccaaaagattcaaatctcctctttgtgaaatcccatctgcatttgattttttattattttatgttcccccgttagattgttttaagtgtttgcttttcatcttttatagatgtaatctgattttcaaaaatcattaacactttttaattagtatcgactaagactttttccccctggaatcgaggctgtgtgtccgtcatcccagcccccggttggagcctgctctttgaactccgctgccttccttagcagcttctgtcctcttctgtgagtcagtcagcgagtgcttgggatccgcatccagccgtgctgagcacacaacaggctgtgtgtggaaatggccaccaccattctccttccccaccccaccacaaaaagagaagctgtgtctttagacaaccctgaggtatctgtgttacaatcgttctgtgtttgatatttgtgtaaagtatgcatgcagtcttgtactgtgacctaagaacaaaactgtaactgcattagaaaccatgaaaaaattagatattgttttgtgacttttagacagtggtaaatatagaaccatgaattctggtcacattccatttctctccaacatgaaggatcaaaaaatgtttttcaatgtgttctttgttccactggaaacttagagtcatgagtttatgagctgatttggtcaccttcctctgcctttgttcactgtgagttctgatgtcttagtgacttagttcttagaagctcacgccttagtttgaaacagattctccacggtggtccccaaaacactgtctgcatatccataagaattgagcgctatgggtgttaacgtgcatgaggatcagtttgcagcagcaagtacaaaaggagaagaggaacatccgttgaatgagtgtgttttgtacataacttcagatacttgtgaacatgccttatatttgtccaacaactgtcagaataaagaacattctaaaatg

SEQ ID NO: 31426 - DNA, 10363 bp, Homo sapiens
  source 1..10363: mol_type = unassigned DNA
tgtattctttaaatattatgtctcattagtctcttctctcctgctggaactttaactggatatatatatacactaaactgtttccagatcacttattctttatctttcatattttttatctctttgtttctctttaccagaatttacagtgctggataatttcataaggcatatattttagttcaccaattttctcttcaactgtgcctaatatcctctgtaacccatcctgtctcttttttttcttttaacaattgcatttttaattactttttttttttttttttaagatggagtctctctctgtcgcccaggctggagtgcagaggcgcgatctcagctcactgcaagctccgcctcccgggttcacgccattctcctgcctcagcctcccgagtagctgggactacaggcgcccgccaccacgcccggctaatttttttgtatttttagtagagacggggtttcaccgtgttacccaggatggtctcgatctcctgacctcgtcatctgctcacgttggcctcccagagtgctgggattacaggcatgagccaccatgcccggccgcatttttaatttctaaaagttctgcctggttcttttttgatatgtccagtcattcttcatgttctcatgttatatgctgatttttgtgactctatagctattctgtagactatatcagacattcccaatgtctgatatccttgaggagggggatgtctaaatttattgcttttttgtttttttttctgttgtctctcctcaatgtagctgtcacctcatgtgtttggtgatcattgattatgaacttctgtttgatctttgtggtgatcttgagagtctaatttgaggatgcttgctttctgaaagcatttctatcagctttgtctgggagccagaaagtttagctggcatcacttttgagttcctacattttgcttctggcccagggctcagtgtcctgatcctattactgctcttggcaccactacttgtagcactaaactgtagccaggtttaatttctagctcaaggtttgttgcttttgcgtggagagggtgccttcacatgttcccctatttctatgagctcagcaaaaacatccaaaaagtgtttttttttttaatctaggatatacctttttcctcccaacagtacattcccccagagtgtatagttgaccataactgatgggatcagaagctctttattttaatatttaattttagtagtatatttttgtttgattgtattataaaaaattttatggtaccaagcaagctttcttggtgataccaacatttccattaaaactagtttacatctaagttaagatttgagttatcctaaagaaaagtattaagtaaatagcagtacagatggcaaatggattgcacaatatatcctctggatccatagtgaccctgcagagataaacctgtgatggtcaaacaatgtgaaaactgctgtcagagacatgggcagggtgctcttgtttacagagaagaggtgcaaaaatcaacttgatggtagtgggaagatcaggaaatgcttcctgaaattgagtattaagaactaatagacattaggtggttgcagaataagttttgtttaggaaggacaagcagttgggtatgactggcttctaggttgtgtgttgtggagtgactggggataaaagcaggagcaagatcacaaaaggtcttctatgcttatattagggaagttggactttattctcaagctgaagggaagctgttgcatggttttaagcagtaaagtgatatgatcagagttttagaggatgccaagattgaaggcaagtctgaccagttaggagactgcttgttaaattagttcagaggagaaacagtgaaggcagtggcactgggcatgaagaagtatatgtgtgctaattttagatttcttagggaagcagaaatgacaagagttagtggtccattggacagaaatattgaaggagactggggagtctaggttgactcccagggtttaggtttgggcagtaaaatgacatgtagaacaattaactgataaacagcatacagaaagaggaaagaacttcatttcatatgtttgtttttgaggaaaagatgtttgtttttgaacttcctgattcagaggggcttgtgggacatcttggttaagatcctgtagtagttctagtagggtctagaagtcaagagatacaaccccgcctggaaggatttgggagtcttcagcatttggaattttggaagccattgtttactgcagtgcatatgagataatttaaactggtacatagataaacacttgaaaaaattttaatagataggaatttaatgtgtatgagaaacataacttgcacatctaacctttgataatcatggacattatcacttaggccaagtgagctcaataaaagggaaatattaactaaaaatatatgtgatacatggaaatggcaaaaatcacggtgaagctatgcaaacgatgcaagttcagaaagtgctgtgttaagtcatgggtgtggtggataaattcacccaaggagagagtaagagtgagaagaaaagagagttgacattgggtggcggggaatggagaagaagaacccatgaaggaaactgaggaagagcagccagacgaataggaggaaaaccaggagaagatggtctttggagtccaaatgaagagttctgaggaggaagtggtccacagcgtcaaacttgtgcaccatggacaattttgctgagggagatttcactgtggcggattatgccttgttagaagattgccctcacgtggatgattgtgtctttgctgctgaatttatgagcaatgattatgttcgtgtgactcagctttactgtgatggggtgggtgtgcaatataaagattatatccaaagtgagaggaatttggaatttgacatctgcagtatatggtgtagtaaaccaatttctgtcctgcaagattattgcgatgccattaaaataaacatcttctggccacttctgtttcaacatcaaaacagttccgtaatatcacgattgcatccctgtgtggacgccaacaattcacgtgcttctgagataaatttgaagaaactacaacatcttgagttgatggaagatattgtggatttggcaaagaaagttgctaatgattcattccttattggaggcttattgagaattggttgtaaaatagaaaataaaatcttggcaatggaagaagctctgaattggataaaatatgcaggcgatgtaacaattctaactaaattaggatcaattgacaattgttggcctatgttaagtattttctttactgaatacaagtaccacataactaaaattgtaatggaagactgcaatttgcttgaagaacttaaaactcaaagttgtatggattgtatagaggaaggagaactaatgaaaatgaaaggaaatgaagagttttccaaagaaagatttgatatagctattatctattacaccagagccattgaatatagacctgaaaactaccttctttatggtaaccgagctctttgttttcttcgtactggacagtttagaaatgcactcggtgatggaaagagagccactattctgaagaacacttggccaaagggtcattatcgttattgtgatgctctttctatgctgggggaatatgactgggccctgcaagcaaacataaaagctcaaaaactctgtaaaaatgaccctgagggaatcaaggatctaattcagcagcatgtaaagttacaaaaacaaatagaagacctacaaggtcgaacagcaaataaggatccaattaaagccttttatgaaaacagggcctacacacctaggagtttatcagcacctatatttactacttcacttaactttgtggagaaggaaagagatttcagaaaaattaatcacgaaatggccaacggtggtaatcagaatctaaaggtggcggatgaggcgttgaaggtagatgattgtgactgtcatcctgaattttcaccaccatcaagtcagcctccaaaacataaaggaaaacaaaaatctcgaaacaatgaatcagaaaagttcagttctagttcaccattgactttaccagcagatttgaagaacatcttggagaaacagttttctaaatcttccagagctgcacaccaggattttgctaatataatgaaaatgctgagaagcttaattcaagatggctatatggccttattggagcagcgttgccgcagcgctgcacaggcctttacagagttgctgaacggtttagatcctcaaaaaataaagcaattgaacctggccatgattaactatgttttggtcgtctatggacttgccatttctctccttggaataggacagcctgaggaattatctgaagccgaaaaccagtttaagaggattattgaacactaccccagtgagggccttgattgcttggcctactgtggaattggaaaagtatatttgaaaaaaaacagatttctagaagctctcaatcactttgagaaagcaagaaccttgatttatcgtcttcctggagtgttaacttggcccacgagtaatgtgattattgaagagtctcagccacaaaaaataaagatgctgttagagaaatttgttgaagaatgcaagttccctccagtgccagatgccatttgttgctatcagaagtgccatggatattctaagatccagatatacataactgatccagactttaagggttttatacgcatcagctgttgccagtactgtaaaatagaatttcacatgaattgctggaagaagttaaaaactacaacctttaatgataaaattgacaaggattttctacaaggaatatgtcttacccctgactgtgaaggtgtcatttctaagattatcatcttcagcagtggtggtgaagttaaatgtgaatttgaacacaaggtcataaaagaaaaggttcctccaagacctattctgaaacagaaatgttctagcctagagaaactaagactgaaagaagacaaaaaattgaagagaaagatccaaaaaaaagaagcaaaaaagttagcacaagaaagaatggaggaggacttaagagaaagtaatccacccaaaaatgaagagcagaaagaaactgtagacaatgttcagcgttgtcagttccttgatgacagaattctacagtgtataaagcagtatgctgacaagattaaatccggcatacagaatacagccatgcttctcaaagaattgctttcttggaaagttttgagcacagaagactatacaacctgtttttctagcagaaattttctaaatgaagcagtggactatgttattcgccacttgattcaagaaaataacagagtaaagacaagaatatttctgcatgttttgagtgagcttaaagaagtggagcccaaattagccgcctggatccaaaaacttaatagctttggcttagatgccacaggaactttcttttctcgttatggagcatctcttaaactgcttgattttagtatcatgactttcctctggaatgagaaatatggtcacaaactagactctatagaaggaaagcaacttgattatttctctgagccagcatcattgaaggaagcccgttgtttaatatggctgctagaagaacacagagacaagttcccagcattgcatagtgctttagatgaattctttgatataatggacagccgctgtactgtgttaaggaaacaagatagtggtgaagcaccgtttagttcaaccaaggtgaaaaacaaaagcaagaaaaagaagccaaaggattcaaagcctatgttagttgggtctggaacaacttcagtaacttcaaataatgagatcatcacttcaagtgaagaccatagcaatcgaaattcagattctgcaggcccatttgcagtgcctgaccatcttcggcaagatgtagaagaattcgaagctctctatgaccaacacagtaacgaatatgttgtccgcaataagaagctatgggacatgaacccaaaacaaaaatgttcaactctatatgattacttctctcagtttttggaggaacatggtcccttggacatgagtaacaagatgttctctgcagaatatgagtttttcccagaagaaactcgacagatactagaaaaagcaggaggtttaaaaccttttctcttgggatgccctcgttttgttgtgattgacaactgtattgcactgaagaaggttgcatcacggctcaagaaaaaaaggaagaagaaaaacattaaaacaaaagtagaagaaatttcaaaagcaggggagtatgtacgagttaaactacaactgaatccagctgctagggaatttaaaccagatgtaaagtctaaaccagtgtcagattcatcttcagcaccagcttttgaaaatgtgaaacccaaacctgtgtctgcaaattctcccaagccagcttgtgaagatgtgaaggccaaaccagtatccgacaattcttctagacaagtttctgaggatgggcaacccaaaggggtctcttctaattctcctaaaccaggctctgaggatgcaaattacaagcgagtctcctgtaattcccccaaaccggttcttgaggatgtgaaaccaacttattgggctcaatcccatttggtcacaggatactgtacgtatcttcctttccagagatttgatatcacccagacaccgccagcatacataaacgtgttaccaggtttgccccagtacaccagcatatatacacccttggccagcctttctcctgaatatcagctaccaagatcagtaccagtggtgccgtcttttgtagccaatgacagagcagataaaaatgctgctgcctattttgagggtcatcatttgaatgctgagaatgttgctggtcaccagattgcctctgaaacacagatccttgagggctctttgggaatatctgtaaagtcacactgcagcacaggtgatgctcatacagtcctgagtgagtctaacagaaatgatgagcactgtggaaattctaacaacaaatgtgaagtaattccagaaagcaccagtgcagtaacaaacattccacacgtgcagatggttgccatacaggtatcttggaacataatacaccaagaagtcaatactgagccatataatccttttgaggaacgacaaggggaaatttcacggattgaaaaggagcaccaagtattacaagaccaacttcaagaagtgtatgaaaattatgagcagataaaacttaagggcttagaagagaccagggacctggaagagaagttgaaaaggcacttagaagaaaacaagatctcaaagacggaattagattggttccttcaagatttggaaagagaaattaaaaaatggcaacaggaaaaaaaagaaatccaagaaagactaaaatcactgaagaagaaaattaaaaaggtttcaaatgccagtgaaatgtatacccagaaaaatgatggaaaggaaaaggaacatgaattacatctggatcagtcccttgaaatcagcaacacacttacaaatgagaaaatgaaaatagaagagtatataaagaaagggaaagaggattatgaagagagtcatcagagagctgtggctgcagaggtatccgtacttgaaaactggaaggagagtgaagtgtataagctacagatcatggagtcacaagcagaagcctttctgaagaagctggggctgattagccgtgatcctgcagcatatcctgacatggagtctgatatacgttcatgggaattgtttctttctaatgttacaaaagaaattgagaaagcaaagtctcagtttgaagaacaaattaaggcaattaaaaatggttctcggctcagtgaactttctaaagtgcagatttctgagctttcatttcctgcctgtaacacggttcatcccgagttactccctgagtcttcaggcgacgatggccaagggcttgtgacttctgcaagcgacgtgactggaaaccacgcagcacttcacagggatcctagtgtgttctctgctggtgattccccaggggaggctccttctgcgctgttgccagggccaccccctggtcagcctgaagccactcagctgacagggccaaaacgggctggccaggcagctctgtcagaacgaagccctgtggctgatcggaagcagcctgttcctccaggacgtgctgcgcgttcaagccagtctccaaaaaagccgttcaatagtattattgagcacctgtcagtggtattcccatgttacaacagcactgagcttgctggttttattaaaaaagtgcgaagcaaaaacaagaactcactctcaggattgagtattgatgaaattgtccaaagagtgacagaacacattctagatgaacagaaaaagaaaaagccaaacccaggaaaggacaagaggacttatgagcccagctctgccacccccgtgaccaggtcctcccagggctcaccctcggtggttgttgcaccatcacccaaaaccaaggggcagaaagcagaagatgtccctgtgaggattgcactgggtgcaagttcctgtgaaatatgccacgaggtgttcaaatcaaaaaacgtgcgtgtgctcaaatgtgggcacaagtatcacaaagggtgctttaagcagtggcttaaagggcagagcgcttgcccggcctgccagggtcgtgatctcctgacagaagagtcaccttctggaagaggctggcccagtcagaatcaggagctgccttcctgctcttctaggtagtcacacttcactaaagtgtcatccaccagtgtgttgaatccgaagaatgacaattttctaccactggtgtaaaaaacaaacatttgaagacccttgtgcattgtgtgtcacaaagctaaatacatggaaatcgttaatatcgctgatattaagtaatttccccactctgagtgaatactttgatgattgccaacagtggctaataaaatgacggctaccacactcatgggtcactggggctgcgcagggctctttgaggtgggtggcttcttttggaaagtactatgaacgtctcgaagcagtattctagtgataagaattcttaacatagccaagcgccccacgtttgttccccacgtttgttccccttttctgtttgaaaaacctgttctggtagctccacaagagagatgatactgactttttaaattttttacaagagtctgtattcctgatatgcctatatttttcctcaaagattctgcattttaaggatgggcataagcaaactatattttaataatttatagttaatgttaaaatattggctgatttagaccaaaagattcaaatctcctctttgtgaaatcccatctgcatttgattttttattattttatgttcccccgttagattgttttaagtgtttgcttttcatcttttatagatgtaatctgattttcaaaaatcattaacactttttaattagtatcgactaagactttttccccctggaatcgaggctgtgtgtccgtcatcccagcccccggttggagcctgctctttgaactccgctgccttccttagcagcttctgtcctcttctgtgagtcagtcagcgagtgcttgggatccgcatccagccgtgctgagcacacaacaggctgtgtgtggaaatggccaccaccattctccttccccaccccaccacaaaaagagaagctgtgtctttagacaaccctgaggtatctgtgttacaatcgttctgtgtttgatatttgtgtaaagtatgcatgcagtcttgtactgtgacctaagaacaaaactgtaactgcattagaaaccatgaaaaaattagatattgttttgtgacttttagacagtggtaaatatagaaccatgaattctggtcacattccatttctctccaacatgaaggatcaaaaaatgtttttcaatgtgttctttgttccactggaaacttagagtcatgagtttatgagctgatttggtcaccttcctctgcctttgttcactgtgagttctgatgtcttagtgacttagttcttagaagctcacgccttagtttgaaacagattctccacggtggtccccaaaacactgtctgcatatccataagaattgagcgctatgggtgttaacgtgcatgaggatcagtttgcagcagcaagtacaaaaggagaagaggaacatccgttgaatgagtgtgttttgtacataacttcagatacttgtgaacatgccttatatttgtccaacaactgtcagaataaagaacattctaaaatgagaagttca

SEQ ID NO: 31427 - DNA, 3771 bp, Homo sapiens
  source 1..3771: mol_type = unassigned DNA
gccacccgctccctcccgccgtcggctgacgtggagggccggaggtggcggcggcggcggcggcggctgctgctgctgctgcccgcgtccgaggctcgcgggcggcgggcccgggtgagtgcacacccggcgcgctgccgggctcccggatgtgtcaccttgtcccgctgcagccgagatgccgggggagcggggccttccacaccccctccgtgggtgtgtgacttgtgcaccatggacaattttgctgagggagatttcactgtggcggattatgccttgttagaagattgccctcacgtggatgattgtgtctttgctgctgaatttatgagcaatgattatgttcgtgtgactcagctttactgtgatggggtgggtgtgcaatataaagattatatccaaagtgagaggaatttggaatttgacatctgcagtatatggtgtagtaaaccaatttctgtcctgcaagattattgcgatgccattaaaataaacatcttctggccacttctgtttcaacatcaaaacagttccgtaatatcacgattgcatccctgtgtggacgccaacaattcacgtgcttctgagataaatttgaagaaactacaacatcttgagttgatggaagatattgtggatttggcaaagaaagttgctaatgattcattccttattggaggcttattgagaattggttgtaaaatagaaaataaaatcttggcaatggaagaagctctgaattggataaaatatgcaggcgatgtaacaattctaactaaattaggatcaattgacaattgttggcctatgttaagtattttctttactgaatacaagtaccacataactaaaattgtaatggaagactgcaatttgcttgaagaacttaaaactcaaagttgtatggattgtatagaggaaggagaactaatgaaaatgaaaggaaatgaagagttttccaaagaaagatttgatatagctattatctattacaccagagccattgaatatagacctgaaaactaccttctttatggtaaccgagctctttgttttcttcgtactggacagtttagaaatgcactcggtgatggaaagagagccactattctgaagaacacttggccaaagggtcattatcgttattgtgatgctctttctatgctgggggaatatgactgggccctgcaagcaaacataaaagctcaaaaactctgtaaaaatgaccctgagggaatcaaggatctaattcagcagcatgtaaagttacaaaaacaaatagaagacctacaaggtcgaacagcaaataaggatccaattaaagccttttatgaaaacagggcctacacacctaggagtttatcagcacctatatttactacttcacttaactttgtggagaaggaaagagatttcagaaaaattaatcacgaaatggccaacggtggtaatcagaatctaaaggtggcggatgaggcgttgaaggtagatgattgtgactgtcatcctgaattttcaccaccatcaagtcagcctccaaaacataaaggaaaacaaaaatctcgaaacaatgaatcagaaaagttcagttctagttcaccattgactttaccagcagatttgaagaacatcttggagaaacagttttctaaatcttccagagctgcacaccaggattttgctaatataatgaaaatgctgagaagcttaattcaagatggctatatggccttattggagcagcgttgccgcagcgctgcacaggcctttacagagttgctgaacggtttagatcctcaaaaaataaagcaattgaacctggccatgattaactatgttttggtcgtctatggacttgccatttctctccttggaataggacagcctgaggaattatctgaagccgaaaaccagtttaagaggattattgaacactaccccagtgagggccttgattgcttggcctactgtggaattggaaaagtatatttgaaaaaaaacagatttctagaagctctcaatcactttgagaaagcaagaaccttgatttatcgtcttcctggagtgttaacttggcccacgagtaatgtgattattgaagagtctcagccacaaaaaataaagatgctgttagagaaatttgttgaagaatgcaagttccctccagtgccagatgccatttgttgctatcagaagtgccatggatattctaagatccagatatacataactgatccagactttaagggttttatacgcatcagctgttgccagtactgtaaaatagaatttcacatgaattgctggaagaagttaaaaactacaacctttaatgataaaattgacaaggattttctacaaggaatatgtcttacccctgactgtgaaggtgtcatttctaagattatcatcttcagcagtggtggtgaagttaaatgtgaatttgaacacaaggtcataaaagaaaaggttcctccaagacctattctgaaacagaaatgttctagcctagagaaactaagactgaaagaagacaaaaaattgaagagaaagatccaaaaaaaagaagcaaaaaagttagcacaagaaagaatggaggaggacttaagagaaagtaatccacccaaaaatgaagagcagaaagaaactgtagacaatgttcagcgttgtcagttccttgatgacagaattctacagtgtataaagcagtatgctgacaagattaaatccggcatacagaatacagccatgcttctcaaagaattgctttcttggaaagttttgagcacagaagactatacaacctgtttttctagcagaaattttctaaatgaagcagtggactatgttattcgccacttgattcaagaaaataacagagtaaagacaagaatatttctgcatgttttgagtgagcttaaagaagtggagcccaaattagccgcctggatccaaaaacttaatagctttggcttagatgccacaggaactttcttttctcgttatggagcatctcttaaactgcttgattttagtatcatgactttcctctggaatgagaaatatggtcacaaactagactctatagaaggaaagcaacttgattatttctctgagccagcatcattgaaggaagcccgttgtttaatatggctgctagaagaacacagagacaagttcccagcattgcatagtgctttagatgaattctttgatataatggacagccgctgtactgtgttaaggaaacaagatagtggtgaagcaccgtttagttcaaccaaggtgaaaaacaaaagcaagaaaaagaagccaaaggattcaaagcctatgttagttgggtctggaacaacttcagtaacttcaaataatgagatcatcacttcaagtgaagaccatagcaatcgaaattcagattctgcaggcccatttgcagtgcctgaccatcttcggcaagatgtagaagaattcgaagctctctatgaccaacacagtaacgaatatgttgtccgcaataagaagctatgggacatgaacccaaaacaaaaatgttcaactctatatgattacttctctcagtttttggaggaacatggtcccttggacatgagtaacaagatgttctctgcagaatatgagtttttcccagaagaaactcgacagatactagaaaaagcaggaggtttaaaaccttttctcttgggatgccctcgttttgttgtgattgacaactgtattgcactgaagaaggttgcatcacggctcaag

SEQ ID NO: 31428 - DNA, 2451 bp, Homo sapiens
  source 1..2451: mol_type = unassigned DNA
cgccgtcggctgacgtggagggccggaggtggcggcggcggcggcggcggctgctgctgctgctgcccgcgtccgaggctcgcgggcggcgggcccggacttgtgcaccatggacaattttgctgagggagatttcactgtggcggattatgccttgttagaagattgccctcacgtggatgattgtgtctttgctgctgaatttatgagcaatgattatgttcgtgtgactcagctttactgtgatggggtgggtgtgcaatataaagattatatccaaagtgagaggaatttggaatttgacatctgcagtatatggtgtagtaaaccaatttctgtcctgcaagattattgcgatgccattaaaataaacatcttctggccacttctgtttcaacatcaaaacagttccgtaatatcacgattgcatccctgtgtggacgccaacaattcacgtgcttctgagataaatttgaagaaactacaacatcttgagttgatggaagatattgtggatttggcaaagaaagttgctaatgattcattccttattggaggcttattgagaattggttgtaaaatagaaaataaaatcttggcaatggaagaagctctgaattggataaaatatgcaggcgatgtaacaattctaactaaattaggatcaattgacaattgttggcctatgttaagtattttctttactgaatacaagtaccacataactaaaattgtaatggaagactgcaatttgcttgaagaacttaaaactcaaagttgtatggattgtatagaggaaggagaactaatgaaaatgaaaggaaatgaagagttttccaaagaaagatttgatatagctattatctattacaccagagccattgaatatagacctgaaaactaccttctttatggtaaccgagctctttgttttcttcgtactggacagtttagaaatgcactcggtgatggaaagagagccactattctgaagaacacttggccaaagggtcattatcgttattgtgatgctctttctatgctgggggaatatgactgggccctgcaagcaaacataaaagctcaaaaactctgtaaaaatgaccctgagggaatcaaggatctaattcagcagcatgtaaagttacaaaaacaaatagaagacctacaaggtcgaacagcaaataaggatccaattaaagccttttatgaaaacagggcctacacacctaggagtttatcagcacctatatttactacttcacttaactttgtggagaaggaaagagatttcagaaaaattaatcacgaaatggccaacggtggtaatcagaatctaaaggtggcggatgaggcgttgaaggtagatgattgtgactgtcatcctgaattttcaccaccatcaagtcagcctccaaaacataaaggaaaacaaaaatctcgaaacaatgaatcagaaaagttcagttctagttcaccattgactttaccagcagatttgaagaacatcttggagaaacagttttctaaatcttccagagctgcacaccaggattttgctaatataatgaaaatgctgagaagcttaattcaagatggctatatggccttattggagcagcgttgccgcagcgctgcacaggcctttacagagttgctgaacggtttagatcctcaaaaaataaagcaattgaacctggccatgattaactatgttttggtcgtctatggacttgccatttctctccttggaataggacagcctgaggaattatctgaagccgaaaaccagtttaagaggattattgaacactaccccagtgagggccttgattgcttggcctactgtggaattggaaaagtatatttgaaaaaaaacagatttctagaagctctcaatcactttgagaaagcaagaaccttgatttatcgtcttcctggagtgttaacttggcccacgagtaatgtgattattgaagagtctcagccacaaaaaataaagatgctgttagagaaatttgttgaagaatgcaagttccctccagtgccagatgccatttgttgctatcagaagtgccatggatattctaagatccagatatacataactgatccagactttaagggttttatacgcatcagctgttgccagtactgtaaaatagaatttcacatgaattgctggaagaagttaaaaactacaacctttaatgataaaattgacaaggattttctacaaggaatatgtcttacccctgactgtgaaggtgtcatttctaagattatcatcttcagcagtggtggtgaagttaaatgtgaatttgaacacaaggtcataaaagaaaaggttcctccaagacctattctgaaacagaaatgttctagcctagagaaactaagactgaaagaagacaaaaaattgaagagaaagatccaaaaaaaagaagcaaa

SEQ ID NO: 31429 - DNA, 2025 bp, Homo sapiens
  source 1..2025: mol_type = unassigned DNA
gtggagggccggaggtggcggcggcggcggcggcggctgctgctgctgctgcccgcgtccgaggctcgcgggcggcgggcccggaaatgcactcggtgatggaaagagagccactattctgaagaacacttggccaaagggtcattatcgttattgtgatgctctttctatgctgggggaatatgactgggccctgcaagcaaacataaaagctcaaaaactctgtaaaaatgaccctgagggaatcaaggatctaattcagcagcatgtaaagttacaaaaacaaatagaagacctacaaggtcgaacagcaaataaggatccaattaaagccttttatgaaaacagggcctacacacctaggagtttatcagcacctatatttactacttcacttaactttgtggagaaggaaagagatttcagaaaaattaatcacgaaatggccaacggtggtaatcagaatctaaaggtggcggatgaggcgttgaaggtagatgattgtgactgtcatcctgaattttcaccaccatcaagtcagcctccaaaacataaaggaaaacaaaaatctcgaaacaatgaatcagaaaagttcagttctagttcaccattgactttaccagcagatttgaagaacatcttggagaaacagttttctaaatcttccagagctgcacaccaggattttgctaatataatgaaaatgctgagaagcttaattcaagatggctatatggccttattggagcagcgttgccgcagcgctgcacaggcctttacagagttgctgaacggtttagatcctcaaaaaataaagcaattgaacctggccatgattaactatgttttggtcgtctatggacttgccatttctctccttggaataggacagcctgaggaattatctgaagccgaaaaccagtttaagaggattattgaacactaccccagtgagggccttgattgcttggcctactgtggaattggaaaagtatatttgaaaaaaaacagatttctagaagctctcaatcactttgagaaagcaagaaccttgatttatcgtcttcctggagtgttaacttggcccacgagtaatgtgattattgaagagtctcagccacaaaaaataaagatgctgttagagaaatttgttgaagaatgcaagttccctccagtgccagatgccatttgttgctatcagaagtgccatggatattctaagatccagatatacataactgatccagactttaagggttttatacgcatcagctgttgccagtactgtaaaatagaatttcacatgaattgctggaagaagttaaaaactacaacctttaatgataaaattgacaaggattttctacaaggaatatgtcttacccctgactgtgaaggtgtcatttctaagattatcatcttcagcagtggtggtgaagttaaatgtgaatttgaacacaaggtcataaaagaaaaggttcctccaagacctattctgaaacagaaatgttctagcctagagaaactaagactgaaagaagacaaaaaattgaagagaaagatccaaaaaaaagaagcaaaaaagttagcacaagaaagaatggaggaggacttaagagaaagtaatccacccaaaaatgaagagcagaaagaaactgtagacaatgttcagcgttgtcagttccttgatgacagaattctacagtgtataaagcagtatgctgacaagattaaatccggcatacagaatacagccatgcttctcaaagaattgctttcttggaaagttttgagcacagaagactatacaacctgtttttctagcagaaattttctaaatgaagcagtggactatgttattcgccacttgattcaagaaaataacagagtaaagacaagaatatttctgcatgttttgagtgagcttaaagaagtggagcccaaattagccgcctggatccaaaaacttaatagctttggtatgtccctttatattccagagcaataaactttaatacgaagggg

SEQ ID NO: 31430 - DNA, 3053 bp, Homo sapiens
  source 1..3053: mol_type = unassigned DNA
aagtggcccggccagcggcgcggcgtccggggaggaaatggatgctgtgctggcctgccggctccgggggcggggaaatcgagtagctgcactcaggccccgcccgagacccggagggagcgccgggccgtccccttttgccctcctttgcgctgggctgagcccagagccgagagcaggagtcggctctgagttccctgcttggtttttgggtggcagcagccagaggaggaatatggcgctcttaggcagccgagcggagctggaagcggacgaggacgttttcgaagatgccttggaaaccatctcaatggctaaggagagtatgtaccatgccttgggctacagtaccattgtggtgttgcaggctgtcctgaccttcgagcaacaggacatccagaacggcatttctgccatgaaggacgctttacaaacctgccaaaaatacaggaaaaaatacacagttgtagaatctttctcaagtcttctttctagaggatccctggagcaactgagtgaagaggaaatgcatgctgaaatctgttatgccgagtgtctcctacagaaagctgcactcacgtttgtgcaggatgaaaatatgatcaacttcatcaaaggtggactcaaaattagaacaagttaccaaatatataaagaatgtctttctatcctgcatgaaattcagaagaacaaacttcagcaggaattcttctatgagtttgaagggggtgtcaagcttggcagtggggcctttaatttgatgctgtcccttttaccagcaaggattatcagactactagaatttattggattttctgggaatagggagttgggcctcctgcagttacgtgaaggtgcttcaggaaggagcatgaggtctgcactgtgctgcttaaccatcttagcttttcatacttacatctccctaatacttggtacaggagaagtgaatgttgcggaagcagagcgtctcctggcacccttcctccagcagtttccaaatggctcactcgtgttgttttatcatgcccgaatagagttgctgaaagggaatcttgaagaggcacaagaagtatttcaaaaatgcatttcagttcaagaagaatggaaacagtttcaccatctctgctactgggagctaatgtggattaatgttttccaacaaaactggatgcaggcatattactattcagatctgctttgcaaagagagtaaatggtccaaggcaacttatgtgttcttgaaagcagcaattttgagtatgcttccagaggaggatgtagtagcaacgaatgagaatgtggtaactttattcagacaggtggacagcttgaagcagagaattgccgggaaatctatccctactgagaagtttgctgtgaggaaggctcggcgttactccgcctccttacctgcacctgtgaagctcatcttacctgccctggaaatgatgtatgtctggaatggtttttcaatagtgagcaaaagaaaagacctttctgaaaatctgttagtaactgttgaaaaagctgaggcagctttacaaagtcaaaattttaacagcttctctgtggatgatgagtgcttagtgaagttacttaaaggatgttgcctcaagaacttacagcggcccttgcaagctgaactatgttacaatcatgttgtggaaagtgaaaagctactgaagtatgaccactacctagtgccgttcactctatttgaattggcatctttgtataaaagccagggggaaattgacaaggccataaagttcctagaaactgcaaggaacaactacaaagattactccctggagtccagactacacttcagaattcaggcagctcttcacctctggagaaaaccttcctcagattgatcagaacttgaaggatggaatttttcctcaattagcatcggcatctgctatagattcaaccttatattaaagtggaaaaatgatcttgtgaataagagacaaaaaaacagtttttttggtcaatattttctatcatctgagagatttactgttggtctacataattttttttcctatggaatggcattctatattatctagaaaattcttatattttgcctcccccaaaagaatttcatattatttgaattagggggcgaagaagtcttttgaaagacttgcagatgcaatagtctaattagattatttatttttttaatgtgaaaattaatattgtttagcaaatagcttacaagttgagccaattttggatttgttgggtagttaaacttcagagatattttgttgcctgtatttaaatttcagaagataaataaatatcattgcatttaaaatagcttaacagtgaccttcagaagacttctgaaaaagacagtctgagaacatgaacacggatcgatataatgtacttcatgggttgaagagacctttctctataaaggatgatgcagtattcagttagtggttttttactcttcatttgattaaaggtggtgacgttttggagagactgattttgaatgtacttaagtctattataataacaaaattcaaaacccctgtgtatctaaagggaaggaagtgtcatattttaggaatttttcttaaccttagcaatgagagcctaaaatacatacatggattatttttcttctaggaagtaaatttcctgctgctttaaatgatatgtaaaatatcaataatttttacacttaagatgttggtaagacctagttttctaatctctctagcactgtgatgtctccttgtagataatctggaccttgcttagtcctttagttgggaaacagaatcagggcatagagcagaagagagcttgacactccatatggtcctggttctgctacccattagcgattagtgaggagacctttagggagtccactgtgccctgtgtgtcaccacattttcttctgtgaaatcaagattaaagaacagatgactttcaaggtctttttcagttttataactgtgagtctatgtattaggtatttattttcaacaaatgactttaaaatgtcgaatgcaaacc

SEQ ID NO: 31431 - DNA, 3260 bp, Homo sapiens
  source 1..3260: mol_type = unassigned DNA
aagtggcccggccagcggcgcggcgtccggggaggaaatggatgctgtgctggcctgccggctccgggggcggggaaatcgagtagctgcactcaggccccgcccgagacccggagggagcgccgggccgtccccttttgccctcctttgcgctgggctgagcccagagccgagagcaggagtcggctctgagttccctgcttggtttttgggtggcagcagccagaggaggaatatggcgctcttaggcagccgagcggagctggaagcggacgaggacgttttcgaagatgccttggaaaccatctcaatatcttctcactcagatatggcaacaagcagccttcactttgcatcatgtgatacacaacaggcgcccagacagcgcggagcgtctactgtcagcagttcatcatcaaccaaggtggatctcaagagtggcctcgaagaatgtgctgtggcattgaacttatttctaagcaacaaatttacagacgccttagaattgcttcgcccctgggctaaggagagtatgtaccatgccttgggctacagtaccattgtggtgttgcaggctgtcctgaccttcgagcaacaggacatccagaacggcatttctgccatgaaggacgctttacaaacctgccaaaaatacaggaaaaaatacacagttgtagaatctttctcaagtcttctttctagaggatccctggagcaactgagtgaagaggaaatgcatgctgaaatctgttatgccgagtgtctcctacagaaagctgcactcacgtttgtgcaggatgaaaatatgatcaacttcatcaaaggtggactcaaaattagaacaagttaccaaatatataaagaatgtctttctatcctgcatgaaattcagaagaacaaacttcagcaggaattcttctatgagtttgaagggggtgtcaagcttggcagtggggcctttaatttgatgctgtcccttttaccagcaaggattatcagactactagaatttattggattttctgggaatagggagttgggcctcctgcagttacgtgaaggtgcttcaggaaggagcatgaggtctgcactgtgctgcttaaccatcttagcttttcatacttacatctccctaatacttggtacaggagaagtgaatgttgcggaagcagagcgtctcctggcacccttcctccagcagtttccaaatggctcactcgtgttgttttatcatgcccgaatagagttgctgaaagggaatcttgaagaggcacaagaagtatttcaaaaatgcatttcagttcaagaagaatggaaacagtttcaccatctctgctactgggagctaatgtggattaatgttttccaacaaaactggatgcaggcatattactattcagatctgctttgcaaagagagtaaatggtccaaggcaacttatgtgttcttgaaagcagcaattttgagtatgcttccagaggaggatgtagtagcaacgaatgagaatgtggtaactttattcagacaggtggacagcttgaagcagagaattgccgggaaatctatccctactgagaagtttgctgtgaggaaggctcggcgttactccgcctccttacctgcacctgtgaagctcatcttacctgccctggaaatgatgtatgtctggaatggtttttcaatagtgagcaaaagaaaagacctttctgaaaatctgttagtaactgttgaaaaagctgaggcagctttacaaagtcaaaattttaacagcttctctgtggatgatgagtgcttagtgaagttacttaaaggatgttgcctcaagaacttacagcggcccttgcaagctgaactatgttacaatcatgttgtggaaagtgaaaagctactgaagtatgaccactacctagtgccgttcactctatttgaattggcatctttgtataaaagccagggggaaattgacaaggccataaagttcctagaaactgcaaggaacaactacaaagattactccctggagtccagactacacttcagaattcaggcagctcttcacctctggagaaaaccttcctcagattgatcagaacttgaaggatggaatttttcctcaattagcatcggcatctgctatagattcaaccttatattaaagtggaaaaatgatcttgtgaataagagacaaaaaaacagtttttttggtcaatattttctatcatctgagagatttactgttggtctacataattttttttcctatggaatggcattctatattatctagaaaattcttatattttgcctcccccaaaagaatttcatattatttgaattagggggcgaagaagtcttttgaaagacttgcagatgcaatagtctaattagattatttatttttttaatgtgaaaattaatattgtttagcaaatagcttacaagttgagccaattttggatttgttgggtagttaaacttcagagatattttgttgcctgtatttaaatttcagaagataaataaatatcattgcatttaaaatagcttaacagtgaccttcagaagacttctgaaaaagacagtctgagaacatgaacacggatcgatataatgtacttcatgggttgaagagacctttctctataaaggatgatgcagtattcagttagtggttttttactcttcatttgattaaaggtggtgacgttttggagagactgattttgaatgtacttaagtctattataataacaaaattcaaaacccctgtgtatctaaagggaaggaagtgtcatattttaggaatttttcttaaccttagcaatgagagcctaaaatacatacatggattatttttcttctaggaagtaaatttcctgctgctttaaatgatatgtaaaatatcaataatttttacacttaagatgttggtaagacctagttttctaatctctctagcactgtgatgtctccttgtagataatctggaccttgcttagtcctttagttgggaaacagaatcagggcatagagcagaagagagcttgacactccatatggtcctggttctgctacccattagcgattagtgaggagacctttagggagtccactgtgccctgtgtgtcaccacattttcttctgtgaaatcaagattaaagaacagatgactttcaaggtctttttcagttttataactgtgagtctatgtattaggtatttattttcaacaaatgactttaaaatgtcgaatgcaaacc

SEQ ID NO: 31432 - DNA, 3221 bp, Homo sapiens
  source 1..3221: mol_type = unassigned DNA
aagtggcccggccagcggcgcggcgtccggggaggaaatggatgctgtgctggcctgccggctccgggggcggggaaatcgagtagctgcactcaggccccgcccgagacccggagggagcgccgggccgtccccttttgccctcctttgcgctgggctgagcccagagccgagagcaggagtcggctctgagttccctgcttggtttttgggtggcagcagccagaggaggaatatggcgctcttaggcagccgagcggagctggaagcggacgaggacgttttcgaagatgccttggaaaccatctcaatatcttctcactcagatatggcaacaagcagccttcactttgcatcatgtgatacacaacaggcgcccagacagcgcggagcgtctactgtcagcagttcatcatcaaccaaggtggatctcaagagtggcctcgaagaatgtgctgtggcattgaacttatttctaagcaacaaatttacagacgccttagaattgcttcgcccctgggctaaggagagtatgtaccatgccttgggctacagtaccattgtggtgttgcaggctgtcctgaccttcgagcaacaggacatccagaacggcatttctgccatgaaggacgctttacaaacctgccaaaaatacaggaaaaaatacacagttgtagaatctttctcaagtcttctttctagaggatccctggagcaactgagtgaagaggaaatgcatgctgaaatctgttatgccgagtgtctcctacagaaagctgcactcacgtttgtgcaggatgaaaatatgatcaacttcatcaaaggtggactcaaaattagaacaagttaccaaatatataaagaatgtctttctatcctgcatgaaattcagaagaacaaacttcagcaggaattcttctatgagtttgaagggggtgtcaagcttggcagtggggcctttaatttgatgctgtcccttttaccagcaaggattatcagactactagaatttattggattttctgggaatagggagttgggcctcctgcagttacgtgaaggtgcttcaggaaggagcatgaggtctgcactgtgctgcttaaccatcttagcttttcatacttacatctccctaatacttggtacaggagaagtgaatgttgcggaagcagagcgtctcctggcacccttcctccagcagtttccaaatgtacgctcagtatttcaaagtgcacaagaagtatttcaaaaatgcatttcagttcaagaagaatggaaacagtttcaccatctctgctactgggagctaatgtggattaatgttttccaacaaaactggatgcaggcatattactattcagatctgctttgcaaagagagtaaatggtccaaggcaacttatgtgttcttgaaagcagcaattttgagtatgcttccagaggaggatgtagtagcaacgaatgagaatgtggtaactttattcagacaggtggacagcttgaagcagagaattgccgggaaatctatccctactgagaagtttgctgtgaggaaggctcggcgttactccgcctccttacctgcacctgtgaagctcatcttacctgccctggaaatgatgtatgtctggaatggtttttcaatagtgagcaaaagaaaagacctttctgaaaatctgttagtaactgttgaaaaagctgaggcagctttacaaagtcaaaattttaacagcttctctgtggatgatgagtgcttagtgaagttacttaaaggatgttgcctcaagaacttacagcggcccttgcaagctgaactatgttacaatcatgttgtggaaagtgaaaagctactgaagtatgaccactacctagtgccgttcactctatttgaattggcatctttgtataaaagccagggggaaattgacaaggccataaagttcctagaaactgcaaggaacaactacaaagattactccctggagtccagactacacttcagaattcaggcagctcttcacctctggagaaaaccttcctcagattgatcagaacttgaaggatggaatttttcctcaattagcatcggcatctgctatagattcaaccttatattaaagtggaaaaatgatcttgtgaataagagacaaaaaaacagtttttttggtcaatattttctatcatctgagagatttactgttggtctacataattttttttcctatggaatggcattctatattatctagaaaattcttatattttgcctcccccaaaagaatttcatattatttgaattagggggcgaagaagtcttttgaaagacttgcagatgcaatagtctaattagattatttatttttttaatgtgaaaattaatattgtttagcaaatagcttacaagttgagccaattttggatttgttgggtagttaaacttcagagatattttgttgcctgtatttaaatttcagaagataaataaatatcattgcatttaaaatagcttaacagtgaccttcagaagacttctgaaaaagacagtctgagaacatgaacacggatcgatataatgtacttcatgggttgaagagacctttctctataaaggatgatgcagtattcagttagtggttttttactcttcatttgattaaaggtggtgacgttttggagagactgattttgaatgtacttaagtctattataataacaaaattcaaaacccctgtgtatctaaagggaaggaagtgtcatattttaggaatttttcttaaccttagcaatgagagcctaaaatacatacatggattatttttcttctaggaagtaaatttcctgctgctttaaatgatatgtaaaatatcaataatttttacacttaagatgttggtaagacctagttttctaatctctctagcactgtgatgtctccttgtagataatctggaccttgcttagtcctttagttgggaaacagaatcagggcatagagcagaagagagcttgacactccatatggtcctggttctgctacccattagcgattagtgaggagacctttagggagtccactgtgccctgtgtgtcaccacattttcttctgtgaaatcaagattaaagaacagatgactttcaaggtctttttcagttttataactgtgagtctatgtattaggtatttattttcaacaaatgactttaaaatgtcgaatgcaaacc

SEQ ID NO: 31433 - DNA, 2542 bp, Homo sapiens
  source 1..2542: mol_type = unassigned DNA
aagtggcccggccagcggcgcggcgtccggggaggaaatggatgctgtgctggcctgccggctccgggggcggggaaatcgagtagctgcactcaggccccgcccgagacccggagggagcgccgggccgtccccttttgccctcctttgcgctgggctgagcccagagccgagagcaggagtcggctctgagttccctgcttggtttttgggtggcagcagccagaggaggaatatggcgctcttaggcagccgagcggagctggaagcggacgaggacgttttcgaagatgccttggaaaccatctcaatatcttctcactcagatatggcaacaagcagccttcactttgcatcatgtgatacacaacaggcgcccagacagcgcggagcgtctactgtcagcagttcatcatcaaccaaggtggatctcaagagtggcctcgaagaatgtgctgtggcattgaacttatttctaagcaacaaatttacagacgccttagaattgcttcgcccctgggctaaggagagtatgtaccatgccttgggctacagtaccattgtggtgttgcaggctgtcctgaccttcgagcaacaggacatccagaacggcatttctgccatgaaggacgctttacaaacctgccaaaaatacaggaaaaaatacacagttgtagaatctttctcaagtcttctttctagaggatccctggagcaactgagtgaagaggaaatgcatgctgaaatctgttatgccgagtgtctcctacagaaagctgcactcacgtttgtgcaggatgaaaatatgatcaacttcatcaaaggtggactcaaaattagaacaagttaccaaatatataaagaatgtctttctatcctgcatgaaattcagaagaacaaacttcagcaggaattcttctatgagtttgaagggggtgtcaagcttggcagtggggcctttaatttgatgctgtcccttttaccagcaaggattatcagactactagaatttattggattttctgggaatagggagttgggcctcctgcagttacgtgaaggtgcttcaggaaggagcatgaggtctgcactgtgctgcttaaccatcttagcttttcatacttacatctccctaatacttggtacaggagaagtgaatgttgcggaagcagagcgtctcctggcacccttcctccagcagtttccaaatggctcactcgtgttgttttatcatgcccgaatagagttgctgaaagggaatcttgaagaggcacaagaagtatttcaaaaatgcatttcagttcaagaagaatggaaacagtttcaccatctctgctactgggagctaatgtggattaatgttttccaacaaaactggatgcaggcatattactattcagatctgctttgcaaagagagtaaatggtccaaggcaacttatgtgttcttgaaagcagcaattttgagtatgcttccagaggaggatgtagtagcaacgaatgagaatgtggtaactttattcagacaggtggacagcttgaagcagagaattgccgggaaatctatccctactgagaagtttgctgtgaggaaggctcggcgttactccgcctccttacctgcacctgtgaagctcatcttacctgccctggaaatgatgtatgtctggaatggtttttcaatagtgagcaaaagaaaagacctttctgaaaatctgttagtaactgttgaaaaagctgaggcagctttacaaagtcaaaattttaacagcttctctgtggatgatgagtgcttagtgaagttacttaaaggatgttgcctcaagaacttacagcggcccttgcaagctgaactatgttacaatcatgttgtggaaagtgaaaagctactgaagtatgaccactacctagtgccgttcactctatttgaattggcatctttgtataaaagccagggggaaattgacaaggccataaagttcctagaaactgcaaggaacaactacaaagattactccctggagtccagactacacttcagaattcaggcagctcttcacctctggagaaaaccttcctcagattgatcagaacttgaaggatggaatttttcctcaattagcatcggcatctgctatagattcaaccttatattaaagtggaaaaatgatcttgtgaataagagacaaaaaaacagtttttttggtcaatattttctatcatctgagagatttactgttggtctacataattttttttcctatggaatggcattctatattatctagaaaattcttatattttgcctcccccaaaagaatttcatattatttgaattagggggcgaagaagtcttttgaaagacttgcagatgcaatagtctaattagattatttatttttttaatgtgaaaattaatattgtttagcaaatagcttacaagttgagccaattttggatttgttgggtagttaaacttcagagatattttgttgcctgtatttaaatttcagaagataaataaatatcattgcatttaaaat

SEQ ID NO: 31434 - DNA, 927 bp, Homo sapiens
  source 1..927: mol_type = unassigned DNA
gcgctgggctgagcccagagccgagagcaggagtcggctctgagttccctgcttggtttttgggtggcagcagccagaggaggaatatggcgctcttaggcagccgagcggagctggaagcggacgaggacgttttcgaagatgccttggaaaccatctcaatatcttctcactcagatatggcaacaagcagccttcactttgcatcatgtgatacacaacaggcgcccagacagcgcggagcgtctactgtcagcagttcatcatcaaccaaggtggatctcaagagtggcctcgaagaatgtgctgtggcattgaacttatttctaagcaacaaatttacagacgccttagaattgcttcgcccctgggctaaggagagtatgtaccatgccttgggctacagtaccattgtggtgttgcaggctgtcctgaccttcgagcaacaggacatccagaacggcatttctgccatgaaggacgctttacaaacctgccaaaaatacaggaaaaaatacacagttgtagaatctttctcaagtcttctttctagaggatccctggagcaactgagtgaagaggaaatgcatgctgaaatctgttatgccgagtgtctcctacagaaagctgcactcacgtttgtgcagagaatgtctttctatcctgcatgaaattcagaagaacaaacttcagcaggaattcttctatgagtttgaagggggtgtcaagcttggcagtggggcctttaatttgatgctgtcccttttaccagcaaggattatcagactactagaatttattggattttctgggaatagggagttgggcctcctgcagttacgtgaaggtgcttcaggaaggagcatgaggtctgcactgtgctgcttaaccatcttagcttttcatacttacatctccctaatactt

SEQ ID NO: 31435 - DNA, 2395 bp, Homo sapiens
  source 1..2395: mol_type = unassigned DNA
aggattgagggaagggaacccgcgccgccggaaggagccgctcgcttcacggcgctgggacccgggctggaaggcagggcatcagctatggaacaacctgggcaggatcccacctcagacgacgtcatggactcgttcctggaaaagttccagagccagccttaccgtggcggctttcatgaggaccagtgggagaaggaatttgaaaaggtccccctatttatgtcgagagcgccatcagaaattgatcccagggagaatcctgacttggcttgtctccagtcaattatttttgatgaggagcgttctccagaagaacaggccaagacctataaagatgagggcaatgattactttaaagaaaaagactacaagaaagctgtaatttcatacactgaaggcttaaagaagaaatgtgcagatcctgatttgaatgctgtcctttataccaaccgggcagcagcacagtactatctgggcaattttcgttctgctctcaatgatgtgacagctgccagaaagctaaaaccctgccacctcaaagcaataataagaggtgccttatgccatctggaactgaaacactttgccgaggccgtgaactggtgtgatgagggactgcaaatagatgccaaagagaagaagcttctggaaatgagggctaaagcagacaagctgaagcgaattgaacagagggatgtgaggaaagccaacttgaaagaaaagaaggagaggaatcagaatgaggctttactccaggccatcaaggctaggaatatcaggctctcagaagctgcctgtgaggatgaagattcagcctcagaaggtctaggtgagcttttcctggatggactcagcactgagaacccccatggagccaggctgagtctagatggccagggcaggctgagctggcctgtgctctttctgtacccagagtatgcccagtcggacttcatctctgcttttcatgaggactccaggtttattgatcatctaatggtgatgtttggtgaaacaccctcttgggacctagagcaaaaatattgccctgataatttggaggtctactttgaggatgaggacagggcagaactataccgggtgcctgccaagagcaccttgctacaggttctacagcaccagaggtactttgtaaaagccctgacaccagcatttttggtctgtgtaggatcctctcctttttgcaagaattttctccgggggagaaaggtgtaccagatacgatgactaagccagggcccctggatctcctcccttaccctcctctgctgggaacctagcacacctgaatcagctggacatactgctggagtccagtgctttctttccgtcaccctggggatagtccttcctggcatcgtggtgggggaggagcctctggcttccctaaactgcagcctctctggctggtcttcactttcctcagttgatataaaactctgggtcttggccatgatgtccttggactccatcgctaaagggaccatctgctgcagttaccacagcaactgacctgagcggcaccctggtctgtggagatggactcaggatccagtgacatgattctgaacttttgtggagtttgacaccttagagaagctacccctcaaactgcacatctacacacaaacaaacaatgcataggattccaaggctttaaagctgagagaccctggcctcaagttatttcatgcgcacagagggaagccatgtggggttgctgaagatgccttgaggtgaaatgggggcaggaaagccacatcttgctctgcatttataaagaccgtacaaactcagatccttggtacccctaaaaagattgccaattttcttcatctttgccatatggaggactgtgacagactttggacagtggcctcttgagttcctctgcagttttgacatttaggattttgtgtcttttaaactggaaaatcttctagcatgttgggttgttacagagtatatttttgtctgcagctgtttgttgccccattcctaagaggagtttatccatcctgacttgtagctgtgtgacttcttgcagtgcccccaccccatccccccgggagagtgtacttccctgctcccaatgcagagggatatgcacaggcatgagctgtcctgcgtctgacagaagcctgaagagtcatgtgtggttggcctgtgctcttccctctgctgtgagaacacatttcccacagaggagccgttccatggagccgagctacagcagctggcctgcagccactgagtgtcacagcaatgagagagcaatgtttgctgtagtaagcagtgagatttaggggttggttgttactatagcagagctaatacatgagtaaactgaagccagctgctgtccttaaaa

SEQ ID NO: 31436 - DNA, 2418 bp, Homo sapiens
  source 1..2418: mol_type = unassigned DNA
tggctgcgaagggcgcgcacggctcctacctgaaggtggagagcgagctggagcgctgccgcgccgagggccactgggaccgcatgccggagctggtccggcagctgcagacgctgagcatgcccggcggcggaggtaacaggcgaggcagcccgagcgcagcgttcacctttccggacaccgatgactttgggaaattgctgctggctgaggccctcctggagcagtgtttgaaggagaaccatgccaaaataaaagactccatgcctttgctggagaagaatgagccgaagatgagcgaagccaaaaattatctaagcagtatccttaaccatgggaggctctcgccacagtacatgtgtgaggccatgctgatcctgggcaaactgcattacgtggagggctcataccgagatgccatcagcatgtacgcacgggccgggattgatgacatgtccatggagaacaagcccctgtatcagatgcggctgctgtcggaggcttttgtcatcaaaggcctctctctggaacgcctacccaactccatcgcctcccgcttccgcctgacagagagggaggaggaagtgatcacctgttttgagagggcctcctggatcgctcaggtgttcctgcaggaattggagaagaccacaaataacagcacgtcgaggcatctgaaaggctgtcacccgcttgactatgagctcacctacttcctggaagctgccctccagagcgcctatgtgaaaaacctgaagaaggggaacatcgtgaagggcatgagagagctccgggaggtgctgcggactgtggagaccaaagcaactcagaacttcaaagtgcctctactgccccaaggacaacatcgaggaagccctcctgctcctcctcatcagcgaatccatggcaactcgagatgtggtgctgagccgggtgccggagcaggaggaggaccggacagtgagcttgcagaatgccgcagccatctatgacctcctgagcatcacgttgggcagaaggggacagtacgtcatgctctcggagtgcctggagcgagccatgaagtttgcgtttggagaatttcacctttggtaccaggtggccctctccatggtggcttgtgggaagtcagcctacgctgtgtccctgctgcgggagtgtgtgaagttgcggccctcggaccccaccgtgcccctgatggccgcgaaggtctgcatcgggtcccttcgctggctagaggaagcagagcactttgccatgatggtgatcagcctcggagaggaagccggggagttcctccccaagggctacctggctctgggtctcacctatagcctgcaggccaccgacgccaccctgaagtccaagcaagatgaattgcaccggaaggcactgcagacgctggagagggctcagcagctggcgcccagtgacccccaggtcatcctctatgtctcgctgcagctggccctcgtccgacagatctccagtgccatggagcagctgcaggaggccctgaaggtacgcaaggatgatgcccacgccctccacctgctggcactgctcttctctgcccagaagcaccaccagcatgccctggatgttgtcaacatggccatcaccgagcaccctgagaacttcaacctgatgttcaccaaggtgaagctggagcaggtgctgaaaggcccagaggaagccctcgtgacctgcagacaagtgctgaggctgtggcagaccctgtacagcttctcccagctgggaggcctagaaaaggatggcagcttcggtgagggcctcaccatgaagaagcagagtggcatgcacctgactttgcctgatgcccatgatgcagactctggctcccggcgggcttcgtccatcgccgcctcccggctggaggaggccatgtcagagctgactatgccctcttcggtcctgaagcagggccccatgcagctgtggaccacgctggaacagatctggctgcaggctgctgagctgttcatggagcagcagcacctcaaggaagcaggtttctgcatccaggaggcggcgggcctcttccccacttctcactcagtactctatatgcggggccggctggctgaggtgaagggcaacctggaggaggccaagcagctgtacaaggaggcgctcacggtgaacccagatggcgtgcgcatcatgcatagcctgggtctgatgctgagtcggctgggccacaagagcttggcccagaaggtgcttcgtgatgccgtggagaggcagagtacgtgccacgaggcgtggcagggcctgggcgaggtgctgcaggcccagggccagaacgaggctgccgttgactgcttcctcaccgcccttgagctggaggccagcagccctgtactgcccttctccatcatccccagagagctctga

SEQ ID NO: 31437 - DNA, 5157 bp, Homo sapiens
  source 1..5157: mol_type = unassigned DNA
ggccaggggcgggtccgcagctggcggcgccggggcccggggcggaggctgtggcagcagctgcagcggcggcggcggcggcagcgccaggagctgctacagcagaggcggaggttgctcctgtacgcgtacgggccgctcggccggagccgcagcccggaggcgccgggcggtgcgctgggagctgctggtgctgctgctgctgctgctgcccaccctccgccgcccgggcccccgctgccgcccgggccccggctgccgtctgcgcccccgtcgaccccgcccgcgagtgcgccccagccaggacgccgcccccggccgggtctccacttcttggccgcaccttccatgacagcgcccgcgagaagatggctgcgaagggcgcgcacggctcctacctgaaggtggagagcgagctggagcgctgccgcgccgagggccactgggaccgcatgccggagctggtccggcagctgcagacgctgagcatgcccggcggcggaggtaacaggcgaggcagcccgagcgcagcgttcacctttccggacaccgatgactttgggaaattgctgctggctgaggccctcctggagcagtgtttgaaggagaaccatgccaaaataaaagactccatgcctttgctggagaagaatgagccgaagatgagcgaagccaaaaattatctaagcagtatccttaaccatgggaggctctcgccacagtacatgtgtgaggccatgctgatcctgggcaaactgcattacgtggagggctcataccgagatgccatcagcatgtacgcacgggccgggattgatgacatgtccatggagaacaagcccctgtatcagatgcggctgctgtcggaggcttttgtcatcaaaggcctctctctggaacgcctacccaactccatcgcctcccgcttccgcctgacagagagggaggaggaagtgatcacctgttttgagagggcctcctggatcgctcaggtgttcctgcaggaattggagaagaccacaaataacagcacgtcgaggcatctgaaaggctgtcacccgcttgactatgagctcacctacttcctggaagctgccctccagagcgcctatgtgaaaaacctgaagaaggggaacatcgtgaagggcatgagagagctccgggaggtgctgcggactgtggagaccaaagcaactcagaacttcaaagtgatggcggccaagcacctggcgggggtcctgctgcactccctgagtgaggagtgctactggagccccctgtcccaccctctgcctgagttcatgggcaaggaggagagttctttcgccactcaggccctgcggaaacctcacctctatgaaggagacaacctctactgccccaaggacaacatcgaggaagccctcctgctcctcctcatcagcgaatccatggcaactcgagatgtggtgctgagccgggtgccggagcaggaggaggaccggacagtgagcttgcagaatgccgcagccatctatgacctcctgagcatcacgttgggcagaaggggacagtacgtcatgctctcggagtgcctggagcgagccatgaagtttgcgtttggagaatttcacctttggtaccaggtggccctctccatggtggcttgtgggaagtcagcctacgctgtgtccctgctgcgggagtgtgtgaagttgcggccctcggaccccaccgtgcccctgatggccgcgaaggtctgcatcgggtcccttcgctggctagaggaagcagagcactttgccatgatggtgatcagcctcggagaggaagccggggagttcctccccaagggctacctggctctgggtctcacctatagcctgcaggccaccgacgccaccctgaagtccaagcaagatgaattgcaccggaaggcactgcagacgctggagagggctcagcagctggcgcccagtgacccccaggtcatcctctatgtctcgctgcagctggccctcgtccgacagatctccagtgccatggagcagctgcaggaggccctgaaggtacgcaaggatgatgcccacgccctccacctgctggcactgctcttctctgcccagaagcaccaccagcatgccctggatgttgtcaacatggccatcaccgagcaccctgagaacttcaacctgatgttcaccaaggtgaagctggagcaggtgctgaaaggcccagaggaagccctcgtgacctgcagacaagtgctgaggctgtggcagaccctgtacagcttctcccagctgggaggcctagaaaaggatggcagcttcggtgagggcctcaccatgaagaagcagagtggcatgcacctgactttgcctgatgcccatgatgcagactctggctcccggcgggcttcgtccatcgccgcctcccggctggaggaggccatgtcagagctgactatgccctcttcggtcctgaagcagggccccatgcagctgtggaccacgctggaacagatctggctgcaggctgctgagctgttcatggagcagcagcacctcaaggaagcaggtttctgcatccaggaggcggcgggcctcttccccacttctcactcagtactctatatgcggggccggctggctgaggtgaagggcaacctggaggaggccaagcagctgtacaaggaggcgctcacggtgaacccagatggcgtgcgcatcatgcatagcctgggtctgatgctgagtcggctgggccacaagagcttggcccagaaggtgcttcgtgatgccgtggagaggcagagtacgtgccacgaggcgtggcagggcctgggcgaggtgctgcaggcccagggccagaacgaggctgccgttgactgcttcctcaccgcccttgagctggaggccagcagccctgtactgcccttctccatcatccccagagagctctgacgacgctgcagccgcagggagggaggggctggccagagggagaggcagcagggaacgtgggtcagggtggggcaacagtggcatcaggtgcggggcctcagggaaatacatctttagtgaacgcctctgcagctgcagccctcgttctcttggctgggccaagagggccttcctggatttctttgttggtgccttgggaaacagtctgacttgaaccctaagtgcctttggagagttttgtggtgaccagacttgctccccaagagctgggcagcggggagcctcacagctgtccttcaccctcacccatgcctctggcttggagtctgggtggggggttctcactccccactctcagcacagtacagacttctggatctctctcaggtcttgcccagggcggtcacaatgtgaagaaactgcgggcaagtgggaagactatgagatttctgggttcccttctcagacttggagttagtagatgattcctgcattgcccctgcttgccctctgagaccagctgggccccaccttgctctttccccctgctaccaagtgcctttggggtctgaccaggggtactgagcaccggccctaacacttccatctccacccaccccatctccctggcgatgtgctccagcccaagcagcctccgtaggctttagatcctgtggttgctagatccagtcctttctaataccctgagtcaacacattactcctgcaggtcttaggctacaatgcaggtcccttgagggccaccaacatggaggtaggcagtttctaggactgtccccagtacatctcaccacccacagccctttttttgccttgattcgagcctcaccctggccttttggcttcccctgcctgagagagacctgaggaggggacagagcccagcccctctcctgtggctgagcaggcctctgtgtccatgacacctgtcttccgggcctgggggctgtgggtgtatgtcctccctactggcttccccggcccctgctgcatgatgctcttggaactcttctccaaggagtcagtcccccaggcctatcaggggatccttttgtatctgcactttgggttttagtttcaaagctccatcaggtacagcttgcatttcaggatgtgtggaaagctcgggtgagggctgccctggttcatcatagctccaccttcctcggaaggagtgggctgttggagaccccccatccatggcacactagctcagcactgcatttcccgagatgattcccaagacagctggtgcctcctggctttcctgtgccaggccaaggggcaccacagaggaccctggatcctttgcctcttcttggttgaaggatctctatgtatgtgtgtatataaatatagttttttatctatatatataaaatagagatctattttttttctggaattctgttagaaaagtaaagaaaaagcaaatgctgttggtttatctcagggtgcccaaagtggttatagtcaatttttggtactaggaaaggcacccaatgcatttcctgacttttaagcatttccttgttggaagcagcagagggccaggccaagttgctgacagtgactttgcaggttgaataaagaaacccttggaggggaagcaggcttgtctgaagcagcatgtatattcactgggcatgtagctcccacaccagccttgagccaggccctggacaggaggggctgttgcaggatgagggaggccagagaaggcatcgaagccaagacctgggcccacctggggagggatgtgggaaaggaaggatgggagggaggaccctctgggaaaatgtggatttgagctggtgagagtgttgctaaggctgggctaaagcctggagagggtaggaggaggcaagaggggtccaggcagggctgatcctggcctctgacctgtccagggcgacccctgaagcccctgctgcctctgggcattgctgggagaggccaaggcaggactcacgtctgaacagagatcccctcgggcattgctgatgggccaccttcagctgcagggaagaagcctaggagaggaggcatgggagggacctgggccttgttcagattggccacctctgctgagaagtccataccagtacacccctaataagttatgccacataccaacgtactgtggatattataacctgcattaaaacaactctaaagaacgctgctcattt

SEQ ID NO: 31438 - DNA, 4270 bp, Homo sapiens
  source 1..4270: mol_type = unassigned DNA
aagaaaaaaataaatttttttaaaaaacctcattctctttcgcttagaaaaaagagggaggaggaagtgatcacctgttttgagagggcctcctggatcgctcaggtgttcctgcaggaattggagaagaccacaaataacagcacgtcgaggcatctgaaaggctgtcacccgcttgactatgagctcacctacttcctggaagctgccctccagagcgcctatgtgaaaaacctgaagaaggggaacatcgtgaagggcatgagagagctccgggaggtgctgcggactgtggagaccaaagcaactcagaacttcaaagtgatggcggccaagcacctggcgggggtcctgctgcactccctgagtgaggagtgctactggagccccctgtcccaccctctgcctgagttcatgggcaaggaggagagttctttcgccactcaggccctgcggaaacctcacctctatgaaggagacaacctctactgccccaaggacaacatcgaggaagccctcctgctcctcctcatcagcgaatccatggcaactcgagatgtggtgctgagccgggtgccggagcaggaggaggaccggacagtgagcttgcagaatgccgcagccatctatgacctcctgagcatcacgttgggcagaaggggacagtacgtcatgctctcggagtgcctggagcgagccatgaagtttgcgtttggagaatttcacctttggtaccaggtggccctctccatggtggcttgtgggaagtcagcctacgctgtgtccctgctgcgggagtgtgtgaagttgcggccctcggaccccaccgtgcccctgatggccgcgaaggtctgcatcgggtcccttcgctggctagaggaagcagagcactttgccatgatggtgatcagcctcggagaggaagccggggagttcctccccaagggctacctggctctgggtctcacctatagcctgcaggccaccgacgccaccctgaagtccaagcaagatgaattgcaccggaaggcactgcagacgctggagagggctcagcagctggcgcccagtgacccccaggtcatcctctatgtctcgctgcagctggccctcgtccgacagatctccagtgccatggagcagctgcaggaggccctgaaggtacgcaaggatgatgcccacgccctccacctgctggcactgctcttctctgcccagaagcaccaccagcatgccctggatgttgtcaacatggccatcaccgagcaccctgagaacttcaacctgatgttcaccaaggtgaagctggagcaggtgctgaaaggcccagaggaagccctcgtgacctgcagacaagtgctgaggctgtggcagaccctgtacagcttctcccagctgggaggcctagaaaaggatggcagcttcggtgagggcctcaccatgaagaagcagagtggcatgcacctgactttgcctgatgcccatgatgcagactctggctcccggcgggcttcgtccatcgccgcctcccggctggaggaggccatgtcagagctgactatgccctcttcggtcctgaagcagggccccatgcagctgtggaccacgctggaacagatctggctgcaggctgctgagctgttcatggagcagcagcacctcaaggaagcaggtttctgcatccaggaggcggcgggcctcttccccacttctcactcagtactctatatgcggggccggctggctgaggtgaagggcaacctggaggaggccaagcagctgtacaaggaggcgctcacggtgaacccagatggcgtgcgcatcatgcatagcctgggtctgatgctgagtcggctgggccacaagagcttggcccagaaggtgcttcgtgatgccgtggagaggcagagtacgtgccacgaggcgtggcagggcctgggcgaggtgctgcaggcccagggccagaacgaggctgccgttgactgcttcctcaccgcccttgagctggaggccagcagccctgtactgcccttctccatcatccccagagagctctgacgacgctgcagccgcagggagggaggggctggccagagggagaggcagcagggaacgtgggtcagggtggggcaacagtggcatcaggtgcggggcctcagggaaatacatctttagtgaacgcctctgcagctgcagccctcgttctcttggctgggccaagagggccttcctggatttctttgttggtgccttgggaaacagtctgacttgaaccctaagtgcctttggagagttttgtggtgaccagacttgctccccaagagctgggcagcggggagcctcacagctgtccttcaccctcacccatgcctctggcttggagtctgggtggggggttctcactccccactctcagcacagtacagacttctggatctctctcaggtcttgcccagggcggtcacaatgtgaagaaactgcgggcaagtgggaagactatgagatttctgggttcccttctcagacttggagttagtagatgattcctgcattgcccctgcttgccctctgagaccagctgggccccaccttgctctttccccctgctaccaagtgcctttggggtctgaccaggggtactgagcaccggccctaacacttccatctccacccaccccatctccctggcgatgtgctccagcccaagcagcctccgtaggctttagatcctgtggttgctagatccagtcctttctaataccctgagtcaacacattactcctgcaggtcttaggctacaatgcaggtcccttgagggccaccaacatggaggtaggcagtttctaggactgtccccagtacatctcaccacccacagccctttttttgccttgattcgagcctcaccctggccttttggcttcccctgcctgagagagacctgaggaggggacagagcccagcccctctcctgtggctgagcaggcctctgtgtccatgacacctgtcttccgggcctgggggctgtgggtgtatgtcctccctactggcttccccggcccctgctgcatgatgctcttggaactcttctccaaggagtcagtcccccaggcctatcaggggatccttttgtatctgcactttgggttttagtttcaaagctccatcaggtacagcttgcatttcaggatgtgtggaaagctcgggtgagggctgccctggttcatcatagctccaccttcctcggaaggagtgggctgttggagaccccccatccatggcacactagctcagcactgcatttcccgagatgattcccaagacagctggtgcctcctggctttcctgtgccaggccaaggggcaccacagaggaccctggatcctttgcctcttcttggttgaaggatctctatgtatgtgtgtatataaatatagttttttatctatatatataaaatagagatctattttttttctggaattctgttagaaaagtaaagaaaaagcaaatgctgttggtttatctcagggtgcccaaagtggttatagtcaatttttggtactaggaaaggcacccaatgcatttcctgacttttaagcatttccttgttggaagcagcagagggccaggccaagttgctgacagtgactttgcaggttgaataaagaaacccttggaggggaagcaggcttgtctgaagcagcatgtatattcactgggcatgtagctcccacaccagccttgagccaggccctggacaggaggggctgttgcaggatgagggaggccagagaaggcatcgaagccaagacctgggcccacctggggagggatgtgggaaaggaaggatgggagggaggaccctctgggaaaatgtggatttgagctggtgagagtgttgctaaggctgggctaaagcctggagagggtaggaggaggcaagaggggtccaggcagggctgatcctggcctctgacctgtccagggcgacccctgaagcccctgctgcctctgggcattgctgggagaggccaaggcaggactcacgtctgaacagagatcccctcgggcattgctgatgggccaccttcagctgcagggaagaagcctaggagaggaggcatgggagggacctgggccttgttcagattggccacctctgctgagaagtccataccagtacacccctaataagttatgccacataccaacgtactgtggatattataacctgcattaaaacaactctaaagaacgctgctcattt

SEQ ID NO: 31439 - DNA, 697 bp, Homo sapiens
  source 1..697: mol_type = unassigned DNA
ggttgctcctgtacgcgtacgggccgctcggccggagccgcagcccggaggcgccgggcggtgcgctgggagctgctggtgctgctgctgctgctgctgcccaccctccgccgcccgggcccccgctgccgcccgggccccggctgccgtctgcgcccccgtcgaccccgcccgcgagtgcgccccagccaggacgccgcccccggccgggtctccacttcttggccgcaccttccatgacagcgcccgcgagaagatggctgcgaagggcgcgcacggctcctacctgaaggtggagagcgagctggagcgctgccgcgccgagggccactgggaccgcatgccggagctggtccggcagctgcagacgctgagcatgcccggcggcggaggtaacaggcgaggcagcccgagcgcagcgttcacctttccggacaccgatgactttgggaaattgctgctggctgaggccctcctggagcagtgtttgaaggagaaccatgccaaaataaaagactccatgcctttgctggagaagaatgagccgaagatgagcgaagccaaaaattatctaagcagtatccttaaccatgggaggctctcgggtctcgctgtgttactcaggctggtctccaactcctgggctcaagcgatcctcctacttcagcctcccgaagcgttgggattacaggagtga

SEQ ID NO: 31440 - DNA, 2226 bp, Homo sapiens
  source 1..2226: mol_type = unassigned DNA
acgcccacctctctcctggagcgctgggccttcgctggccgcaccggcagccatgagctcggagatggagccgctgctcctggcctggagctattttaggcgcaggaagttccagctctgcgccgatctatgcacgcagatgctggagaagtccccttatgaccaggcagcttggatcttaaaagcaagagcgctaacagaaatggtatacatagatgaaattgatgtagatcaggaaggaattgcagaaatgatgctggatgaaaatgctatagctcaagttccacgccctggaacgtctttgaaactccctggaactaatcagacaggagggcctagccaggccgttaggccaatcacacaagctggaagacccattacaggtttcctcaggcccagcacgcagagtggaaggccaggcactatggaacaggctatcagaacacccagaaccgcctacacagcccgccctatcaccagctcctccggaagatttgtcaggctgggaacggcttccatgcttacaagtcctgatggaccatttataaatttatctaggctgaatttaacaaagtattcccagaaacctaagttggcaaaggctttgtttgagtatatctttcatcatgaaaatgatgttaagactattcatcttgaagatgtagttctacatcttggaatttacccattcttattgaggaataaaaatcacattgaaaaaaatgctttggatctggctgccctctccacagaacattctcagtacaaggactggtggtggaaagtacagattggaaaatgttactacaggttgggaatgtatcgtgaagcagaaaaacagtttaaatcagccctgaagcagcaggaaatggtagatacatttctgtacttggcaaaagtttatgtctcattggatcaacctgtgactgctttaaatcttttcaaacaaggcttagataagtttccaggagaagtaaccctgctctgtggaattgcaagaatctatgaggaaatgaacaatatgtcatcagcagcagaatattacaaagaagttttgaaacaagacaatactcatgtggaagccatcgcatgcattggaagcaaccacttctattctgatcagccagaaatagctctccggttttacaggcggctgctgcagatgggcatttataacggccagctttttaacaatctggggctgtgttgcttctatgcccagcagtatgatatgactctgacctcatttgaacgtgccctttctttggctgaaaatgaagaagaggcagctgatgtctggtacaacttgggacatgtagctgtgggaataggagatacaaatttggcccatcagtgcttcaggctggctctggtcaacaacaacaaccacgccgaggcctacaacaacctggctgtgctggagatgcggaagggccacgttgaacaggcaagggcactattacaaactgcatcatcattagcaccccatatgtatgaaccgcattttaattttgcaacaatctctgataagattggagatctgcagagaagctatgttgctgcgcagaagtctgaagcagcatttccagaccatgtggacacacaacatttaattaaacaattaaggcagcattttgctatgctctgattgttccttagaccacatatgttcttatgaagcagcattatgcaaggggaaaaaagcactatgtctgtgtatgtatgtatatagtgtaatacgtatattttaacaaacctgtccttgatattagttaaggtgacacataagggtgacacagaatgtgtaatgcaaatttcatagtaatagtaactttataaaataatattataaaatacaggatttaaacctttctaaatagatcctgaaactgtctctcacattatatagtagatgtttgtttataatgtttacaaaacattttggtgaatttcctcaatgttttataaatgtacattttttaagtccttaagctgactcttagccatcatgtagcttaaggagtctgaaatctgccattaaaactgcacctttaagccaggtgtggtagcatgtgcctatagtcccagctacttgggaggtggaggtgggaggattataaatagagactttccttaagactttaaaaatgtatttaaaactattttttattaaatactttgtgatttcctattaagctttaaaataaatcattgtgtaaaacacca

SEQ ID NO: 31441 - DNA, 2180 bp, Homo sapiens
  source 1..2180: mol_type = unassigned DNA
aggacctcgagaaacagcggacaatttcaggatttaggactttaggtcttgatgggtggatggcgcgctgcgggcacctctcggacaaggccccagccgtcgcgggttgccgggcagagtcggacgccgccagctcttcactccacgcccacctctctcctggagcgctgggccttcgctggccgcaccggcagccatgagctcggagatggagccgctgctcctggcctggagctattttaggcgcaggaagttccagctctgcgccgatctatgcacgcagatgctggagaagtccccttatgaccagaaaattagctgggcgtggtggcacgtgcctgtaatcccagctacttgggaggctgaggcaggagaattgcttgaacccaggaagcggaggttgcagcaagccgagatcacgccattgtactccagcttgggcaacaagagcaaaactccatctcaaaaagcagcttggatcttaaaagcaagagcgctaacagaaatggtatacatagatgaaattgatgtagatcaggaaggaattgcagaaatgatgctggatgaaaatgctatagctcaagttccacgccctggaacgtctttgaaactccctggaactaatcagacaggagggcctagccaggccgccaatcacacaagctggaagacccattacaggtttcctcaggcccagcacgcagagtggaaggccaggcactatggaacaggctatcagaacacccagaaccgcctacacagcccgccctatcaccagctcctccggaagatttgtcaggctgggaacggcttccatgcttacaagtcctgatggaccatttataaatttatctaggctgaatttaacaaagtattcccagaaacctaagttggcaaaggctttgtttgagtatatctttcatcatgaaaatgatgttaagactgctttggatctggctgccctctccacagaacattctcagtacaaggactggtggtggaaagtacagattggaaaataggaaatgaacaatatgtcatcagcagcagaatattacaaagaagttttgaaacaagacaatactcatgtggaagccatcgcatgcattggaagcaaccacttctattctgatcagccagaaatagctctccggttttacaggcggctgctgcagatgggcatttataacggccagctttttaacaatctggggctgtgttgcttctatgcccagcagtatgatatgactctgacctcatttgaacgtgccctttctttggctgaaaatgaagaagaggcagctgatgtctggtacaacttgggacatgtagctgtgggaataggagatacaaatttggcccatcagtgcttcaggctggctctggtcaacaacaacaaccacgccgaggcctacaacaacctggctgtgctggagatgcggaagggccacgttgaacaggcaagggcactattacaaactgcatcatcattagcaccccatatgtatgaaccgcattttaattttgcaacaatctctgataagattggagatctgcagagaagctatgttgctgcgcagaagtctgaagcagcatttccagaccatgtggacacacaacatttaattaaacaattaaggcagcattttgctatgctctgattgttccttagaccacatatgttcttatgaagcagcattatgcaaggggaaaaaagcactatgtctgtgtatgtatgtatatagtgtaatacgtatattttaacaaacctgtccttgatattagttaaggtgacacataagggtgacacagaatgtgtaatgcaaatttcatagtaatagtaactttataaaataatattataaaatacaggatttaaacctttctaaatagatcctgaaactgtctctcacattatatagtagatgtttgtttataatgtttacaaaacattttggtgaatttcctcaatgttttataaatgtacattttttaagtccttaagctgactcttagccatcatgtagcttaaggagtctgaaatctgccattaaaactgcacctttaagccaggtgtggtagcatgtgcctatagtcccagctacttgggaggtggaggtgggaggattataaatagagactttccttaagactttaaaaatgtatttaaaactattttt

SEQ ID NO: 31442 - DNA, 2183 bp, Homo sapiens
  source 1..2183: mol_type = unassigned DNA
ggcagagtcggacgccgccagctcttcactccacgcccacctctctcctggagcgctgggccttcgctggccgcaccggcagccatgagctcggagatggagccgctgctcctggcctggagctattttaggcgcaggaagttccagctctgcgccgatctatgcacgcagatgctggagaagtccccttatgaccaggcagcttggatcttaaaagcaagagcgctaacagaaatggtatacatagatgaaattgatgtagatcaggaaggaattgcagaaatgatgctggatgaaaatgctatagctcaagttccacgccctggaacgtctttgaaactccctggaactaatcagacaggagggcctagccaggccgttaggccaatcacacaagctggaagacccattacaggtttcctcaggcccagcacgcagagtggaaggccaggcactatggaacaggctatcagaacacccagaaccgcctacacagcccgccctatcaccagctcctccggaagatttgtcaggctgggaacggcttccatgcttacaagtcctgatggaccatttataaatttatctaggctgaatttaacaaagtattcccagaaacctaagttggcaaaggctttgtttgagtatatctttcatcatgaaaatgatgttaagactgctttggatctggctgccctctccacagaacattctcagtacaaggactggtggtggaaagtacagattggaaaatgttactacaggttgggaatgtatcgtgaagcagaaaaacagtttaaatcagccctgaagcagcaggaaatggtagatacatttctgtacttggcaaaagtttatgtctcattggatcaacctgtgactgctttaaatcttttcaaacaaggcttagataagtttccaggagaagtaaccctgctctgtggaattgcaagaatctatgaggaaatgaacaatatgtcatcagcagcagaatattacaaagaagttttgaaacaagacaatactcatgtggaagccatcgcatgcattggaagcaaccacttctattctgatcagccagaaatagctctccggttttacaggcggctgctgcagatgggcatttataacggccagctttttaacaatctggggctgtgttgcttctatgcccagcagtatgatatgactctgacctcatttgaacgtgccctttctttggctgaaaatgaagaagaggcagctgatgtctggtacaacttgggacatgtagctgtgggaataggagatacaaatttggcccatcagtgcttcaggctggctctggtcaacaacaacaaccacgccgaggcctacaacaacctggctgtgctggagatgcggaagggccacgttgaacaggcaagggcactattacaaactgcatcatcattagcaccccatatgtatgaaccgcattttaattttgcaacaatctctgataagattggagatctgcagagaagctatgttgctgcgcagaagtctgaagcagcatttccagaccatgtggacacacaacatttaattaaacaattaaggcagcattttgctatgctctgattgttccttagaccacatatgttcttatgaagcagcattatgcaaggggaaaaaagcactatgtctgtgtatgtatgtatatagtgtaatacgtatattttaacaaacctgtccttgatattagttaaggtgacacataagggtgacacagaatgtgtaatgcaaatttcatagtaatagtaactttataaaataatattataaaatacaggatttaaacctttctaaatagatcctgaaactgtctctcacattatatagtagatgtttgtttataatgtttacaaaacattttggtgaatttcctcaatgttttataaatgtacattttttaagtccttaagctgactcttagccatcatgtagcttaaggagtctgaaatctgccattaaaactgcacctttaagccaggtgtggtagcatgtgcctatagtcccagctacttgggaggtggaggtgggaggattataaatagagactttccttaagactttaaaaatgtatttaaaactattttttattaaatactttgtgatttcctattaagctttaaaataaatcattgtgtaaaacaccatca

SEQ ID NO: 31443 - DNA, 2058 bp, Homo sapiens
  source 1..2058: mol_type = unassigned DNA
acgcccacctctctcctggagcgctgggccttcgctggccgcaccggcagccatgagctcggagatggagccgctgctcctggcctggagctattttaggcgcaggaagttccagctctgcgccgatctatgcacgcagatgctggagaagtccccttatgaccaggcagcttggatcttaaaagcaagagcgctaacagaaatggtatacatagatgaaattgatgtagatcaggaaggaattgcagaaatgatgctggatgaaaatgctatagctcaagttccacgccctggaacgtctttgaaactccctggaactaatcagacaggagggcctagccaggccgttaggccaatcacacaagctggaagacccattacaggtttcctcaggcccagcacgcagagtggaaggccaggcactatggaacaggctatcagaacacccagaaccgcctacacagcccgccctatcaccagctcctccggaagatttgtcaggctgggaacggctttgtttgagtatatctttcatcatgaaaatgatgttaagactgctttggatctggctgccctctccacagaacattctcagtacaaggactggtggtggaaagtacagattggaaaatgttactacaggttgggaatgtatcgtgaagcagaaaaacagtttaaatcagccctgaagcagcaggaaatggtagatacatttctgtacttggcaaaagtttatgtctcattggatcaacctgtgactgctttaaatcttttcaaacaaggcttagataagtttccaggagaagtaaccctgctctgtggaattgcaagaatctatgaggaaatgaacaatatgtcatcagcagcagaatattacaaagaagttttgaaacaagacaatactcatgtggaagccatcgcatgcattggaagcaaccacttctattctgatcagccagaaatagctctccggttttacaggcggctgctgcagatgggcatttataacggccagctttttaacaatctggggctgtgttgcttctatgcccagcagtatgatatgactctgacctcatttgaacgtgccctttctttggctgaaaatgaagaagaggcagctgatgtctggtacaacttgggacatgtagctgtgggaataggagatacaaatttggcccatcagtgcttcaggctggctctggtcaacaacaacaaccacgccgaggcctacaacaacctggctgtgctggagatgcggaagggccacgttgaacaggcaagggcactattacaaactgcatcatcattagcaccccatatgtatgaaccgcattttaattttgcaacaatctctgataagattggagatctgcagagaagctatgttgctgcgcagaagtctgaagcagcatttccagaccatgtggacacacaacatttaattaaacaattaaggcagcattttgctatgctctgattgttccttagaccacatatgttcttatgaagcagcattatgcaaggggaaaaaagcactatgtctgtgtatgtatgtatatagtgtaatacgtatattttaacaaacctgtccttgatattagttaaggtgacacataagggtgacacagaatgtgtaatgcaaatttcatagtaatagtaactttataaaataatattataaaatacaggatttaaacctttctaaatagatcctgaaactgtctctcacattatatagtagatgtttgtttataatgtttacaaaacattttggtgaatttcctcaatgttttataaatgtacattttttaagtccttaagctgactcttagccatcatgtagcttaaggagtctgaaatctgccattaaaactgcacctttaagccaggtgtggtagcatgtgcctatagtcccagctacttgggaggtggaggtgggaggattataaatagagactttccttaagactttaaaaatgtatttaaaactattttttattaaatactttgtgatttcctattaagctttaaaataaatcattgtgtaaaacacca

SEQ ID NO: 31444 - DNA, 1342 bp, Homo sapiens
  source 1..1342: mol_type = unassigned DNA
ccacctctctcctggagcgctgggccttcgctggccgcaccggcagccatgagctcggagatggagccgctgctcctggcctggagctattttaggcgcaggaagttccagctctgcgccgatctatgcacgcagatgctggagaagtccccttatgaccaggaaatgaacaatatgtcatcagcagcagaatattacaaagaagttttgaaacaagacaatactcatgtggaagccatcgcatgcattggaagcaaccacttctattctgatcagccagaaatagctctccggttttacaggcggctgctgcagatgggcatttataacggccagctttttaacaatctggggctgtgttgcttctatgcccagcagtatgatatgactctgacctcatttgaacgtgccctttctttggctgaaaatgaagaagaggcagctgatgtctggtacaacttgggacatgtagctgtgggaataggagatacaaatttggcccatcagtgcttcaggctggctctggtcaacaacaacaaccacgccgaggcctacaacaacctggctgtgctggagatgcggaagggccacgttgaacaggcaagggcactattacaaactgcatcatcattagcaccccatatgtatgaaccgcattttaattttgcaacaatctctgataagattggagatctgcagagaagctatgttgctgcgcagaagtctgaagcagcatttccagaccatgtggacacacaacatttaattaaacaattaaggcagcattttgctatgctctgattgttccttagaccacatatgttcttatgaagcagcattatgcaaggggaaaaaagcactatgtctgtgtatgtatgtatatagtgtaatacgtatattttaacaaacctgtccttgatattagttaaggtgacacataagggtgacacagaatgtgtaatgcaaatttcatagtaatagtaactttataaaataatattataaaatacaggatttaaacctttctaaatagatcctgaaactgtctctcacattatatagtagatgtttgtttataatgtttacaaaacattttggtgaatttcctcaatgttttataaatgtacattttttaagtccttaagctgactcttagccatcatgtagcttaaggagtctgaaatctgccattaaaactgcacctttaagccaggtgtggtagcatgtgcctatagtcccagctacttgggaggtggaggtgggaggattataaatagagactttccttaagactttaaaaatgtatttaaaactattttttattaaatactttgtgatttcc

SEQ ID NO: 31445 - DNA, 1531 bp, Homo sapiens
  source 1..1531: mol_type = unassigned DNA
atgattttgagttatgaagtaatattacacgctttggatctggctgccctctccacagaacattctcagtacaaggactggtggtggaaagtacagattggaaaatgttactacaggttgggaatgtatcgtgaagcagaaaaacagtttaaatcagccctgaagcagcaggaaatggtagatacatttctgtacttggcaaaagtttatgtctcattggatcaacctgtgactgctttaaatcttttcaaacaaggcttagataagtttccaggagaagtaaccctgctctgtggaattgcaagaatctatgaggaaatgaacaatatgtcatcagcagcagaatattacaaagaagttttgaaacaagacaatactcatgtggaagccatcgcatgcattggaagcaaccacttctattctgatcagccagaaatagctctccggttttacaggcggctgctgcagatgggcatttataacggccagctttttaacaatctggggctgtgttgcttctatgcccagcagtatgatatgactctgacctcatttgaacgtgccctttctttggctgaaaatgaagaagaggcagctgatgtctggtacaacttgggacatgtagctgtgggaataggagatacaaatttggcccatcagtgcttcaggctggctctggtcaacaacaacaaccacgccgaggcctacaacaacctggctgtgctggagatgcggaagggccacgttgaacaggcaagggcactattacaaactgcatcatcattagcaccccatatgtatgaaccgcattttaattttgcaacaatctctgataagattggagatctgcagagaagctatgttgctgcgcagaagtctgaagcagcatttccagaccatgtggacacacaacatttaattaaacaattaaggcagcattttgctatgctctgattgttccttagaccacatatgttcttatgaagcagcattatgcaaggggaaaaaagcactatgtctgtgtatgtatgtatatagtgtaatacgtatattttaacaaacctgtccttgatattagttaaggtgacacataagggtgacacagaatgtgtaatgcaaatttcatagtaatagtaactttataaaataatattataaaatacaggatttaaacctttctaaatagatcctgaaactgtctctcacattatatagtagatgtttgtttataatgtttacaaaacattttggtgaatttcctcaatgttttataaatgtacattttttaagtccttaagctgactcttagccatcatgtagcttaaggagtctgaaatctgccattaaaactgcacctttaagccaggtgtggtagcatgtgcctatagtcccagctacttgggaggtggaggtgggaggattataaatagagactttccttaagactttaaaaatgtatttaaaactattttttattaaatactttgtgatttcctattaagctttaaaataaatcattgtgtaaaacacc

SEQ ID NO: 31446 - DNA, 2171 bp, Homo sapiens
  source 1..2171: mol_type = unassigned DNA
acctctctcctggagcgctgggccttcgctggccgcaccggcagccatgagctcggagatggagccgctgctcctggcctggagctattttaggcgcaggaagttccagctctgcgccgatctatgcacgcagatgctggagaagtccccttatgaccaggaaccagatcctgaattgccagtgcatcaggcagcttggatcttaaaagcaagagcgctaacagaaatggtatacatagatgaaattgatgtagatcaggaaggaattgcagaaatgatgctggatgaaaatgctatagctcaagttccacgccctggaacgtctttgaaactccctggaactaatcagacaggagggcctagccaggccgttaggccaatcacacaagctggaagacccattacaggtttcctcaggcccagcacgcagagtggaaggccaggcactatggaacaggctatcagaacacccagaaccgcctacacagcccgccctatcaccagctcctccggaagatttgtcaggctgggaacggcttccatgcttacaagtcctgatggaccatttataaatttatctaggctgaatttaacaaagtattcccagaaacctaagttggcaaaggctttgtttgagtatatctttcatcatgaaaatgatgttaagactgctttggatctggctgccctctccacagaacattctcagtacaaggactggtggtggaaagtacagattggaaaatgttactacaggttgggaatgtatcgtgaagcagaaaaacagtttaaatcagccctgaagcagcaggaaatggtagatacatttctgtacttggcaaaagtttatgtctcattggatcaacctgtgactgctttaaatcttttcaaacaaggcttagataagtttccaggagaagtaaccctgctctgtggaattgcaagaatctatgaggaaatgaacaatatgtcatcagcagcagaatattacaaagaagttttgaaacaagacaatactcatgtggaagccatcgcatgcattggaagcaaccacttctattctgatcagccagaaatagctctccggttttacaggcggctgctgcagatgggcatttataacggccagctttttaacaatctggggctgtgttgcttctatgcccagcagtatgatatgactctgacctcatttgaacgtgccctttctttggctgaaaatgaagaagaggcagctgatgtctggtacaacttgggacatgtagctgtgggaataggagatacaaatttggcccatcagtgcttcaggctggctctggtcaacaacaacaaccacgccgaggcctacaacaacctggctgtgctggagatgcggaagggccacgttgaacaggcaagggcactattacaaactgcatcatcattagcaccccatatgtatgaaccgcattttaattttgcaacaatctctgataagattggagatctgcagagaagctatgttgctgcgcagaagtctgaagcagcatttccagaccatgtggacacacaacatttaattaaacaattaaggcagcattttgctatgctctgattgttccttagaccacatatgttcttatgaagcagcattatgcaaggggaaaaaagcactatgtctgtgtatgtatgtatatagtgtaatacgtatattttaacaaacctgtccttgatattagttaaggtgacacataagggtgacacagaatgtgtaatgcaaatttcatagtaatagtaactttataaaataatattataaaatacaggatttaaacctttctaaatagatcctgaaactgtctctcacattatatagtagatgtttgtttataatgtttacaaaacattttggtgaatttcctcaatgttttataaatgtacattttttaagtccttaagctgactcttagccatcatgtagcttaaggagtctgaaatctgccattaaaactgcacctttaagccaggtgtggtagcatgtgcctatagtcccagctacttgggaggtggaggtgggaggattataaatagagactttccttaagactttaaaaatgtatttaaaactattttttattaaatactttgtgatttcctattaagctttaaaataaatcattgtgtaaaacacc

SEQ ID NO: 31447 - DNA, 2139 bp, Homo sapiens
  source 1..2139: mol_type = unassigned DNA
gacgccgccagctcttcactccacgcccacctctctcctggagcgctgggccttcgctggccgcaccggcagccatgagctcggagatggagccgctgctcctggcctggagctattttaggcgcaggaagttccagctctgcgccgatctatgcacgcagatgctggagaagtccccttatgaccaggcagcttggatcttaaaagcaagagcgctaacagaaatggtatacatagatgaaattgatgtagatcaggaaggaattgcagaaatgatgctggatgaaaatgctatagctcaagttccacgccctggaacgtctttgaaactccctggaactaatcagacaggagggcctagccaggccgttaggccaatcacacaagctggaagacccattacaggtttcctcaggcccagcacgcagagtggaaggccaggcactatggaacaggctatcagaacacccagaaccgcctacacagcccgccctatcaccagctcctccggaagatttgtcaggctgggaacggctttgtttgagtatatctttcatcatgaaaatgatgttaagactcaaaatccttttcttcaagtgaaatcttatcgagaccctaatacgtaaaacagacaaaaggctttggatctggctgccctctccacagaacattctcagtacaaggactggtggtggaaagtacagattggaaaatgttactacaggttgggaatgtatcgtgaagcagaaaaacagtttaaatcagccctgaagcagcaggaaatggtagatacatttctgtacttggcaaaagtttatgtctcattggatcaacctgtgactgctttaaatcttttcaaacaaggcttagataagtttccaggagaagtaaccctgctctgtggaattgcaagaatctatgaggaaatgaacaatatgtcatcagcagcagaatattacaaagaagttttgaaacaagacaatactcatgtggaagccatcgcatgcattggaagcaaccacttctattctgatcagccagaaatagctctccggttttacaggcggctgctgcagatgggcatttataacggccagctttttaacaatctggggctgtgttgcttctatgcccagcagtatgatatgactctgacctcatttgaacgtgccctttctttggctgaaaatgaagaagaggcagctgatgtctggtacaacttgggacatgtagctgtgggaataggagatacaaatttggcccatcagtgcttcaggctggctctggtcaacaacaacaaccacgccgaggcctacaacaacctggctgtgctggagatgcggaagggccacgttgaacaggcaagggcactattacaaactgcatcatcattagcaccccatatgtatgaaccgcattttaattttgcaacaatctctgataagattggagatctgcagagaagctatgttgctgcgcagaagtctgaagcagcatttccagaccatgtggacacacaacatttaattaaacaattaaggcagcattttgctatgctctgattgttccttagaccacatatgttcttatgaagcagcattatgcaaggggaaaaaagcactatgtctgtgtatgtatgtatatagtgtaatacgtatattttaacaaacctgtccttgatattagttaaggtgacacataagggtgacacagaatgtgtaatgcaaatttcatagtaatagtaactttataaaataatattataaaatacaggatttaaacctttctaaatagatcctgaaactgtctctcacattatatagtagatgtttgtttataatgtttacaaaacattttggtgaatttcctcaatgttttataaatgtacattttttaagtccttaagctgactcttagccatcatgtagcttaaggagtctgaaatctgccattaaaactgcacctttaagccaggtgtggtagcatgtgcctatagtcccagctacttgggaggtggaggtgggaggattataaatagagactttccttaagactttaaaaatgtatttaaaactattttttattaaatactttgtgatttcctattaagctttaaaataaatcattgtgtaaaacacc

SEQ ID NO: 31448 - DNA, 2665 bp, Homo sapiens
  source 1..2665: mol_type = unassigned DNA
agcccagtaacaagatggatggggcagagaaggagccaacacagtcattttggtttggaattacaggctaatagattcattcatttcctgaagctgctgttggatctctcttcccctcccccaaggaggggactggctgtcggggctggatgcccagggagtgggcagtcccagggaaaatgagagtctaagccaggagaccttcgcagacttgaggggtccttccctggggcctgaagggggcagagtgcacgcaggccagggcctggactgatagtgccaggatgatgggtcatttgttctgggcagaccttttctgccttctcattagcctcaaaggagctgccaggaagcagctgtcattcagctcagaggcccagggtctgcctgtactgcacacagccctttccctcatctccctggtccagagcgggacaggcagctccttgagcatcactagtcctgggacccaccccagcagctggaggagcagctgagccgccttcagcgtgagaagaatgagatccagaaccggctggaggaagatcaggaagacatgaacgaattgatgaagaagcacaaggctgccgtggctcaggcttcccgggacctggctcagataaatgatctccaagctcagctagaagaagccaacaaagagaagcaggagctgcaggagaagctacaagccctccagagccaggtggagttcctggagcagtccatggtggacaagtccctggtgagcaggcaggaagctaagatacgggagctggagacacgcctggagtttgaaaggacgcaagtgaaacggctggagagcctggctagccgtctcaaggaaaacatggagaagctgactgaggagcgggatcagcgcattgcagccgagaaccgggagaaggaacagaacaagcggctacagaggcagctccgggacaccaaggaggagatgggcgagcttgccaggaaggaggccgaggcgagccgcaagaagcacgaactggagatggatctagaaagcctggaggctgctaaccagagcctgcaggctgacctaaagttggcattcaagcgcatcggggacctgcaggctgccattgaggatgagatggagagtgatgagaatgaggacctcatcaacagtgagggagactctgatgtggactcggagctggaggaccgtgttgacggggtcaagtcctggttgtcaaaaaacaagggaccttccaaggcagcttctgatgatggcagcttaaagagttccagccccaccagctactggaagtcccttgcccctgatcggtcagatgatgagcacgaccctctcgacaacacctccagaccgcgatactcccacagttatctgagtgacagcgacacagaggccaagctgacggagactaacgcatagcccaggggagtggttggcagccctctcaccccagggcctgtggctgcctgggcacctctcccaggaagtggtggggcaccggtctcccccacccgactgctgatctgcatgggaaacaccctgaccttcttctgtcaggggcactttccaggctatgggtgtctgatgtctccacgtggaagaggtgggggaaagaggagtttctgaagagaactttttgctcctctgtctcaaaatgccagactcttggcttctaccctgtgtcaccgtgggcagtggcaggtggcctggcactgcatggagccagcacgttgacctccctctcagctccctgctcagggacggtggacaggttgcctactgggacactctaggttgctgggtccatggggaggattgggggaggagaagcagtgccttccctctcgtgtggggtgggggctctctcttcttggtgcctgctgtctttctactttttaatttaaatacccaacctctccatcacagctgcatccctgagagtgggagggggctgtagtggtagctggggctcccaagaacgactcgggaatgtcatctccatcttcacccttcagagagcagtcctttctctgtgcagctggagacgctggtgaggagagccgggtccaggttcttaagaatgaggtgcggaggggctctccggtgctgctgggctgggttgagcaagcctacgcagacaagtgtgtgtgtggaccatccgcacctccagcccccaccccaccctctttgtctcagcgtgttatgtgcaatgacctatttaaggtaaacccattccaactacagcagttcagggctgatccaagcactgcctccctcctgctctgtccaggtggtctggaccataaactcaacttgagagggaaggcttggggttgaggacttgtgatcagaaaaactgaagatggaagttttggccggtgctcattagacatgagtcctcactctgtgtcctgagcccgtgtcattcttccaacctccctgcccccacacacttatcccagacacaacaccatgtggtctggaggtcccagcccccaccctaaaaaggttatccctgagaactccaccagacttgggagcccaagtgcagtgcctggtgctgctcccatctgccgccccccttctctcctgcaattggtttgtactcactgggctgtgctctcccctgtttacccgatgtatggaaataaaggcccttttcctcctggc

SEQ ID NO: 31449 - DNA, 345 bp, Homo sapiens
  source 1..345: mol_type = unassigned DNA
atgtcatctccatcttcacccttcagagagcagtcctttctctgtgcagctggagacgctggtgaggagagccgggtccaggttcttaagaatgaggtgcggaggggctctccggtgctgctgggctgggttgagcaagcctacgcagacaagtgtgtgtgtggaccatccgcacctccagcccccaccccaccctctttgtctcagcgtgttatgtgcaatgacctatttaaggtaaacccattccaactacagcagttcagggctgatccaagcactgcctccctcctgctctgtccaggtggtctggaccataaactcaacttgagagggaaggcttggggt

SEQ ID NO: 31450 - DNA, 3237 bp, Homo sapiens
  source 1..3237: mol_type = unassigned DNA
ctctagccgccccactcgctgctctgcggggaggcgggcgctcccgcaggggttcctccaagatggcggcgcagaggaggagcttgctgcagagtgagcagcagccaagctggacagatgacctgcctctctgccacctctctggggttggctcagcctccaaccgcagctactctgctgatggcaagggcactgagagccacccgccagaggacagctggctcaagttcaggagtgagaacaactgcttcctgtatggggtcttcaacggctatgatggcaaccgagtgaccaacttcgtggcccagcggctgtccgcagagctcctgctgggccagctgaatgccgagcacgccgaggccgatgtgcggcgtgtgctgctgcaggccttcgatgtggtggagaggagcttcctggagtccattgacgacgccttggctgagaaggcaagcctccagtcgcaattgccagagggagtccctcagcaccagctgcctcctcagtatcagaagatccttgagagactcaagacgttagagagggaaatttcgggaggggccatggccgttgtggcggtccttctcaacaacaagctctacgtcgccaatgtcggtacaaaccgtgcacttttatgcaaatcgacagtggatgggttgcaggtgacacagctgaacgtggaccacaccacagagaacgaggatgagctcttccgtctttcgcagctgggcttggatgctggaaagatcaagcaggtggggatcatctgtgggcaggagagcacccggcggatcggggattacaaggttaaatatggctacacggacattgaccttctcagcgctgccaagtccaaaccaatcatcgcagagccagaaatccatggggcacagccgctggatggggtgacgggcttcttggtgctgatgtcggaggggttgtacaaggccctagaggcagcccatgggcctgggcaggccaaccaggagattgctgcgatgattgacactgagtttgccaagcagacctccctggacgcagtggcccaggccgtcgtggaccgggtgaagcgcatccacagcgacaccttcgccagtggtggggagcgtgccaggttctgcccccggcacgaggacatgaccctgctagtgaggaactttggctacccgctgggcgaaatgagccagcccacaccgagcccagccccagctgcaggaggacgagtgtaccctgtgtctgtgccatactccagcgcccagagcaccagcaagaccagcgtgaccctctcccttgtcatgccctcccagggccagatggtcaacggggctcacagtgcttccaccctggacgaagccacccccaccctcaccaaccaaagcccgaccttaaccctgcagtccaccaacacgcacacgcagagcagcagctccagctctgacggaggcctcttccgctcccggcccgcccactcgctcccgcctggcgaggacggtcgtgttgagccctatgtggactttgctgagttttaccgcctctggagcgtggaccatggcgagcagagcgtggtgacagcaccgtagggcagccggagaatgcagcccaagcagggcctggcatggggcaggacagggtccagccttttcctaacatctgcctgtgccacaacggccagcaggtgccccatcctctgcccacagcagactctgtcccatggctctccgggcagtagagtgtgtgagtgcagactggacctgtggttcataccttgtcaccacccgggaagctgaaggccacttcctcccagatggcctcagccaggaccatcgccctttctcagagcagagggccaggtatagaaaccgcagtgggcctgcaagccgcccgagcctccccagcagcctcctacagagcaggaagaggcgccctgtgaaccctgagtgttgcaggcccagcagaccctgctgtcccaagcccacccctcctcccaccatcacctccctcacctcgggacagtagccctccacttctccagcctctcagccctgtgctcctgcatccagagtggaacccaggctggtgtccgcatctgtccctgggccccacccctggacctgccttggttgtgtcatctgttgtaaacgttcaggaggaccagggcagcatctggggcctgggatggccacagaaggggcaggccaggtggaaaggagccagggggaagtggtctaagagacctggaactgccagaggatggcggcctgggcttccccagagccaggcgtgcgggagaggtgaggactggccccggtgggctgaggcaggggccgctgtcgtcaggcctgagccagggtgagctggtgcctgccttgcattttccttctggtgctgtgaagaccataggctggcaggcagctgagatgaactgtctttaccactgatgaggggcctctgccggctgagggtagcaagcaggggttgtgagtcaggctgggggacttgtttgaaagaaagaggagtggaaaatggttccaggagggaagaggttctttgagacacagtaccctgggaggcataggagaagggtcgggccagcccagcccagggcctgagttagactatttcccacatgttctctgccttcagtggggagggggtgccaccagggctgtcggccaggattgccactcctgtttcagaggaagcaggccgagagacttgcaccttggccaagccacacaatcagtggggcagccagagctcagacctgagccattttgtcagtatccaggaccccccggattctccacgccctccccatctcccagtctccctgccccccatgccccagaccggcccaccagggactagccgctgtcgcacagcctctggggtgcttggtctctgcgaagtcaaaggcctgacagctctgtggcctgggaatccattttcctgcggcagagcagggcctggtgtggaaccagggagctgtgggaagccacagcagaaatggaagaaaaacaggtctcagcccagggtcctcgctcactccctcactccccactttgaagccatctctgttctgcaggtgagaggatttaaagtcagtcacaaaggcttgggaacaaaaggaattctcttccaagaatgcctctgtggtgctgtttggtctctagaaacagggtcacttttttaatgtagtaaagaagtaataaatggtggcattacacattgtgatattaa

SEQ ID NO: 31451 - DNA, 1660 bp, Homo sapiens
  source 1..1660: mol_type = unassigned DNA
ccgcaggggttcctccaagatggcggcgcagaggaggagcttgctgcagagtgagcagcagccaagctggacagatgacctgcctctctgccacctctctggggttggctcagcctccaaccgcagctactctgctgatggcaagggcactgagagccacccgccagaggacagctggctcaagttcaggagtgagaacaactgcttcctgtatggggtcttcaacggctatgatggcaaccgagtgaccaacttcgtggcccagcggctgtccgcagagctcctgctgggccagctgaatgccgagcacgccgaggccgatgtgcggcgtgtgctgctgcaggccttcgatgtggtggagaggagcttcctggagtccattgacgacgccttggctgagaaggcaagcctccagtcgcaattgccagagggagtccctcagcaccagctgcctcctcagtatcagaagatccttgagagactcaagacgttagagagggaaatttcgggaggggccatggccgttgtggcggtccttctcaacaacaagctctacgtcgccaatgtcggtacaaaccgtgcacttttatgcaaatcgacagtggatgggttgcaggtgacacagctgaacgtggaccacaccacagagaacgaggatgagctcttccgtctttcgcagctgggcttggatgctggaaagatcaagcaggtggggatcatctgtgggcaggagagcacccggcggatcggggattacaaggttaaatatggctacacggacattgaccttctcagcgctgccaagtccaaaccaatcatcgcagagccagaaatccatggggcacagccgctggatggggtgacgggcttcttggtgctgatgtcggaggggttgtacaaggccctagaggcagcccatgggcctgggcaggccaaccaggagattgctgcgatgattgacactgagtttgccaagcagacctccctggacgcagtggcccaggccgtcgtggaccgggtgaagcgcatccacagcgacaccttcgccagtggtggggagcgtgccaggttctgcccccggcacgaggacatgaccctgctagtgaggaactttggctacccgctgggcgaaatgagccagcccacaccgagcccagccccagctgcaggaggacgagtgtaccctgtgtctgtgccatactccagcgcccagagcaccagcaagaccagcgtgaccctctcccttgtcatgccctcccagggccagatggtcaacggggctcacagtgcttccaccctggacgaagccacccccaccctcaccaaagacccttccaggcctgcaagcgatttgacagccatccctcagtgccaactaaacctcctgggcagcctgaccccagggtaggaaggaagcgcctacaccaaggggccctctgggagctgagatcatcctggggttttgtcgcctggtctgacttgtgcactgggatcttctcgtgccaggccaggccccgccccctccccgggactgggcagaccccctccctcatgcatctgtgtccactgaggcttccctcacctagaatggcccatccttcaggacccagctcactctcatcttctttccagggacttatcccccaaggctgtcctctgt

SEQ ID NO: 31452 - DNA, 4058 bp, Homo sapiens
  source 1..4058: mol_type = unassigned DNA
gaaaatgcttggacagaagagatgagtactatttccactaaggcctagaattgcctactgtacaaatagtcctgatcaggcaatatacgaatggcccaaggaagccaccaaattgattttcaggttttacatgacctgcgacaaaaattccctgaagtacctgaagttgttgtatccaggtgcatgttacagaataataataacctggatgcctgctgtgctgttctctctcaggagagtacaagatatctttatggtgaaggagacttgaatttttcagatgattctggaatttctggtctacgcaatcacatgacttctctcaacttggacttgcaatcacagaacatttaccaccatggaagagaaggaagtaggatgaatggaagtaggactctaacgcacagcattagtgatggacaacttcaaggtggccagtccaatagtgaactatttcagcaggagccacagacagcaccagctcaagttcctcaaggctttaatgtttttggaatgtccagttcctctggtgcttcaaattcagcaccacatcttggatttcacttaggcagcaaaggaacatctagcctttctcaacaaactcccagatttaatcccattatggtaactttagccccaaatatccagactggtcgtaatactcctacatctttgcacatacatggtgtacctccacctgtacttaacagtccacagggaaattctatctatattaggccttacattacaactcctggtggtacaactcgacagacacaacagcattctggctgggtatctcagtttaatcccatgaaccctcagcaagtttatcagccttcacagcctggtccctggactacttgtcctgcatctaatcctctgtcacatacctcatctcaacagccaaatcagcaaggccaccagacctctcatgtctacatgccaatcagttcacctactacttcacaaccaccaaccattcattcatctggtagctcacagtcttctgcccatagccaatataacattcagaatatttcaacaggacctcgaaaaaaccagattgaaatcaaacttgaacccccacaaagaaataattcttcaaaactgcgttcttctggacctcgaacctccagcacttcctcttcagtcaatagccagaccttaaacagaaatcagcccactgtttacatagctgccagccccccaaatacggatgagctgatgtcccgtagtcaacctaaggtctatatttcagcgaatgctgccacaggagatgaacaggtcatgcggaatcagcccacactcttcatatccacaaactctggagcatctgctgcctccaggaacatgtctgggcaagtgagcatgggtcctgcctttattcatcaccatcctcccaaaagtcgagcaataggcaataactctgcaacctctcctcgagtggtagtcactcagcccaatacgaaatacactttcaaaattacagtctctcccaataagccccctgcagtttcaccaggggtggtgtcccctacctttgaacttacaaatcttcttaatcatcctgatcattatgtagaaaccgagaatattcagcacctcacggaccctacattagcacatgtggatagaataagtgaaacacggaaactgagtatgggatctgatgatgctgcctacacacaagctcttttggtacaccagaaggccagaatggaacgacttcaaagagaacttgagattcaaaagaaaaagctggataaattaaaatctgaggttaatgaaatggaaaataatctaactcgaaggcgcctgaaaagatcaaattctatatcccagataccttcccttgaagaaatgcagcagctgagaagttgtaatagacaactccagattgacattgactgcttaaccaaagaaattgatctttttcaagcccgaggaccacattttaaccccagcgctattcataacttttatgacaatattggatttgtaggtcctgtgccaccaaaacccaaagatcaaaggtccatcatcaaaacaccaaagactcaagacacagaagatgatgagggagctcagtggaattgtaccgcctgtacttttttgaaccatccagccttaattcgctgtgaacagtgtgagatgccaaggcatttctgagccaaatggccctgtatcttctctaaaaccacatctaaagttcaagaaactagtctgtcatcgggaaaaagtttcactgctacataggattttgtcaaattgaaggtgtgacaagatggtgttctgctaatgttaaatgtcagcccacagagctaataatacctcagtataatgtcatgagcagttgaaattcatcacatgaaaagtaatctgctgaaagacttggttgcccactgcctaactgtgtacagtgttaccagtgtcccattatggataattctcaatatgttaacacctaggtgttcccaatacctttttcccctcatgtcactactgaattttgacaggaggaaggaatagaatgatagcttgttttatttgtaaagctttcagtgaaacactacatacacgaagaaaaggaacaaggtttaactatttaagaaccatttgctgccgcatagtgccattggatagggaagaacttcagaaatctgtggtactcttggccttgtctttgtcttccctgaacgtgtctccactctgtgaagccagcatctaggggctaaagatgcaaaggaaagcagcatgcattgtctgtacaaatgtgcagcgaaataccccaaagcttttcctactgtacagatctctcgagtctgctttaagtgatttcttttcttcttgattattttcttatatttctatatgtatagtgtaatagccttttgttaactaattttcttttttccttttagtaattaagcacgatcatgtccctttttaagccttacctgagaggaacaatgccttaaaataaaaaagcattaatgagatgaaagtatgcacagaataactttcctctacttattctgtactttgccctcatgagttccaatgttgtgtgaagacaggcagatgctgcacagtgaattgcagatgatattacagaagtgatgtctgtaggtcacattaaatactgacttgagcagtgggtgacacaacacagtgtttgtcttccacagggaagcttaaaacaaaagatatttttaacccactgacagaacaacaaggttaagcttcatctgcttggtgtcccacagaacttgcacaagcagttgttattgggaaagtacagtctcaaaaccagcaacagcagcagtacctacagccctttttttggagagaagtttaaatgctttactgttggggcagtccatttctaatcctgacttggtgacagtatcatgtgtatttataaaacaaggctagccatatttaggacaactgaagaaaagctggaaaaaaaaacaagcaaacttgaacactgaagcaacctcaagcatctctttattttgatgatatatttttgtaaggaaaatattcagatgatcaggaatgtatataactgaaatcaagaaaaagaacagtatgcatttaaaaagacagaattatgaaattatatgagtgcttagaatggggctaagggaagtgctgaaatagagcaaaggatggaagataatatagactaccacccactgtaaatgtttgcaagtggctgtgttttaaatgggattattacagttgatctctatgaatgtcagagccctaactttcaggctttgcattttgtatatgggaagaaatatgacaatcctaggtaattaaaccatagacccaaagcccttacgtttgatgcaatttatttttaaaataggccttgtttttcagcttcatctgcagttctatgtgaagattgataaatcagtttttacttgttttattaataaaacgtaatttggatatcttgagttgatggttttgtgatttagctgggtaaactatctttgtaacagataagttatttataaaaattaaaaaacttatattct

SEQ ID NO: 31453 - DNA, 4553 bp, Homo sapiens
  source 1..4553: mol_type = unassigned DNA
gaaaagttttaggcagctaggaatgtggagatgtgggtagtggtggctgccaagcacaggaaaatgatcatgctgaactgtacaaaggagattgtctctgaaccttttcataggttctgacactctatatatgtcatcttatttaaaaccctctgtattaaaatgataaggatttggagacattgaaattatatagaatttaaatgtatgcatgttcatatgtttttgcctctggctcatatttccagaatacttaacagtattttaacattttgtttcttatgattctggtcctaaaaaatcaaggacgctgcttactcagaaagctaaaaaacctgagctccagacccagttcctggacctgccctggaaaagaagtatcccgtagagatgagctcactgcagttacttaattaacaatttgtaagctgcaaaaatggcaatgggccaaccaagaacagctacaatttgaatttttctatttccagaaaatgcttggacagaagagatgagtactatttccactaaggcctagaattgcctactgtacaaatagtcctgatcaggcaatatacgaatggcccaaggaagccaccaaattgattttcaggttttacatgacctgcgacaaaaattccctgaagtacctgaagttgttgtatccaggtgcatgttacagaataataataacctggatgcctgctgtgctgttctctctcaggagagtacaagatatctttatggtgaaggagacttgaatttttcagatgattctggaatttctggtctacgcaatcacatgacttctctcaacttggacttgcaatcacagaacatttaccaccatggaagagaaggaagtaggatgaatggaagtaggactctaacgcacagcattagtgatggacaacttcaaggtggccagtccaatagtgaactatttcagcaggagccacagacagcaccagctcaagttcctcaaggctttaatgtttttggaatgtccagttcctctggtgcttcaaattcagcaccacatcttggatttcacttaggcagcaaaggaacatctagcctttctcaacaaactcccagatttaatcccattatggtaactttagccccaaatatccagactggtcgtaatactcctacatctttgcacatacatggtgtacctccacctgtacttaacagtccacagggaaattctatctatattaggccttacattacaactcctggtggtacaactcgacagacacaacagcattctggctgggtatctcagtttaatcccatgaaccctcagcaagtttatcagccttcacagcctggtccctggactacttgtcctgcatctaatcctctgtcacatacctcatctcaacagccaaatcagcaaggccaccagacctctcatgtctacatgccaatcagttcacctactacttcacaaccaccaaccattcattcatctggtagctcacagtcttctgcccatagccaatataacattcagaatatttcaacaggacctcgaaaaaaccagattgaaatcaaacttgaacccccacaaagaaataattcttcaaaactgcgttcttctggacctcgaacctccagcacttcctcttcagtcaatagccagaccttaaacagaaatcagcccactgtttacatagctgccagccccccaaatacggatgagctgatgtcccgtagtcaacctaaggtctatatttcagcgaatgctgccacaggagatgaacaggtcatgcggaatcagcccacactcttcatatccacaaactctggagcatctgctgcctccaggaacatgtctgggcaagtgagcatgggtcctgcctttattcatcaccatcctcccaaaagtcgagcaataggcaataactctgcaacctctcctcgagtggtagtcactcagcccaatacgaaatacactttcaaaattacagtctctcccaataagccccctgcagtttcaccaggggtggtgtcccctacctttgaacttacaaatcttcttaatcatcctgatcattatgtagaaaccgagaatattcagcacctcacggaccctacattagcacatgtggatagaataagtgaaacacggaaactgagtatgggatctgatgatgctgcctacacacaagctcttttggtacaccagaaggccagaatggaacgacttcaaagagaacttgagattcaaaagaaaaagctggataaattaaaatctgaggttaatgaaatggaaaataatctaactcgaaggcgcctgaaaagatcaaattctatatcccagataccttcccttgaagaaatgcagcagctgagaagttgtaatagacaactccagattgacattgactgcttaaccaaagaaattgatctttttcaagcccgaggaccacattttaaccccagcgctattcataacttttatgacaatattggatttgtaggtcctgtgccaccaaaacccaaagatcaaaggtccatcatcaaaacaccaaagactcaagacacagaagatgatgagggagctcagtggaattgtaccgcctgtacttttttgaaccatccagccttaattcgctgtgaacagtgtgagatgccaaggcatttctgagccaaatggccctgtatcttctctaaaaccacatctaaagttcaagaaactagtctgtcatcgggaaaaagtttcactgctacataggattttgtcaaattgaaggtgtgacaagatggtgttctgctaatgttaaatgtcagcccacagagctaataatacctcagtataatgtcatgagcagttgaaattcatcacatgaaaagtaatctgctgaaagacttggttgcccactgcctaactgtgtacagtgttaccagtgtcccattatggataattctcaatatgttaacacctaggtgttcccaatacctttttcccctcatgtcactactgaattttgacaggaggaaggaatagaatgatagcttgttttatttgtaaagctttcagtgaaacactacatacacgaagaaaaggaacaaggtttaactatttaagaaccatttgctgccgcatagtgccattggatagggaagaacttcagaaatctgtggtactcttggccttgtctttgtcttccctgaacgtgtctccactctgtgaagccagcatctaggggctaaagatgcaaaggaaagcagcatgcattgtctgtacaaatgtgcagcgaaataccccaaagcttttcctactgtacagatctctcgagtctgctttaagtgatttcttttcttcttgattattttcttatatttctatatgtatagtgtaatagccttttgttaactaattttcttttttccttttagtaattaagcacgatcatgtccctttttaagccttacctgagaggaacaatgccttaaaataaaaaagcattaatgagatgaaagtatgcacagaataactttcctctacttattctgtactttgccctcatgagttccaatgttgtgtgaagacaggcagatgctgcacagtgaattgcagatgatattacagaagtgatgtctgtaggtcacattaaatactgacttgagcagtgggtgacacaacacagtgtttgtcttccacagggaagcttaaaacaaaagatatttttaacccactgacagaacaacaaggttaagcttcatctgcttggtgtcccacagaacttgcacaagcagttgttattgggaaagtacagtctcaaaaccagcaacagcagcagtacctacagccctttttttggagagaagtttaaatgctttactgttggggcagtccatttctaatcctgacttggtgacagtatcatgtgtatttataaaacaaggctagccatatttaggacaactgaagaaaagctggaaaaaaaaacaagcaaacttgaacactgaagcaacctcaagcatctctttattttgatgatatatttttgtaaggaaaatattcagatgatcaggaatgtatataactgaaatcaagaaaaagaacagtatgcatttaaaaagacagaattatgaaattatatgagtgcttagaatggggctaagggaagtgctgaaatagagcaaaggatggaagataatatagactaccacccactgtaaatgtttgcaagtggctgtgttttaaatgggattattacagttgatctctatgaatgtcagagccctaactttcaggctttgcattttgtatatgggaagaaatatgacaatcctaggtaattaaaccatagacccaaagcccttacgtttgatgcaatttatttttaaaataggccttgtttttcagcttcatctgcagttctatgtgaagattgataaatcagtttttacttgttttattaataaaacgtaatttggatatcttgagttgatggttttgtgatttagctgggtaaactatctttgtaacagataagttatttataaaaattaaaaaacttatattctaatgtgga

SEQ ID NO: 31454 - DNA, 1789 bp, Homo sapiens
  source 1..1789: mol_type = unassigned DNA
ggaggcgacggtggagacggctgccctagtgggagaggcggcggcggcggcggccgaggaggaggagggggaagcggcggcggcaaaggaaaatgcttggacagaagagatgagtactatttccactaaggcctagaattgcctactgtacaaatagtcctgatcaggcaatatacgaatggcccaaggaagccaccaaattgattttcaggttttacatgacctgcgacaaaaattccctgaagtacctgaagttgttgtatccaggtgcatgttacagaataataataacctggatgcctgctgtgctgttctctctcaggagagtacaagatatctttatggtgaaggagacttgaatttttcagatgattctggaatttctggtctacgcaatcacatgacttctctcaacttggacttgcaatcacagaacatttaccaccatggaagagaaggaagtaggatgaatggaagtaggactctaacgcacagcattagtgatggacaacttcaaggtggccagtccaatagtgaactatttcagcaggagccacagacagcaccagctcaagttcctcaaggctttaatgtttttggaatgtccagttcctctggtgcttcaaattcagcaccacatcttggatttcacttaggcagcaaaggaacatctagcctttctcaacaaactcccagatttaatcccattatggtaactttagccccaaatatccagactggtcgtaatactcctacatctttgcacatacatggtgtacctccacctgtacttaacagtccacagggaaattctatctatattaggccttacattacaactcctggtggtacaactcgacagacacaacagcattctggctgggtatctcagtttaatcccatgaaccctcagcaagtttatcagccttcacagcctggtccctggactacttgtcctgcatctaatcctctgtcacatacctcatctcaacagccaaatcagcaaggccaccagacctctcatgtctacatgccaatcagttcacctactacttcacaaccaccaaccattcattcatctggtagctcacagtcttctgcccatagccaatataacattcagaatatttcaacaggacctcgaaaaaaccagattgaaatcaaacttgaacccccacaaagaaataattcttcaaaactgcgttcttctggacctcgaacctccagcacttcctcttcagtcaatagccagaccttaaacagaaatcagcccactgtttacatagctgccagccccccaaatacggatgagctgatgtcccgtagtcaacctaaggtctatatttcagcgaatgctgccacaggagatgaacaggtcatgcggaatcagcccacactcttcatatccacaaactctggagcatctgctgcctccaggaacatgtctgggcaagtgagcatgggtcctgcctttattcatcaccatcctcccaaaagtcgagcaataggcaataactctgcaacctctcctcgagtggtagtcactcagcccaatacgaaatacactttcaaaattacagtctctcccaataagccccctgcagtttcaccaggggtggtgtcccctacctttgaacttacaaatcttcttaatcatcctgatcattatgtagaaaccgagaatattcagcacctcacggaccctacattagcacatgtggatagaataagtgaaacacggaaactgagtatgggatctgatgatgctgcctacacacaagatatttga

SEQ ID NO: 31455 - DNA, 2336 bp, Homo sapiens
  source 1..2336: mol_type = unassigned DNA
agtgaggtgaactccttcagggccacaggctgtaaagatctaaacaccatctgatccagtttcaatatgactgcctggatgaagaaggatttgagactaagtttattcctccaaagcaaaccaactgagaatgcagaataataataacctggatgcctgctgtgctgttctctctcaggagagtacaagatatctttatggtgaaggagacttgaatttttcagatgattctggaatttctggtctacgcaatcacatgacttctctcaacttggacttgcaatcacagaacatttaccaccatggaagagaaggaagtaggatgaatggaagtaggactctaacgcacagcattagtgatggacaacttcaaggtggccagtccaatagtgaactatttcagcaggagccacagacagcaccagctcaagttcctcaaggctttaatgtttttggaatgtccagttcctctggtgcttcaaattcagcaccacatcttggatttcacttaggcagcaaaggaacatctagcctttctcaacaaactcccagatttaatcccattatggtaactttagccccaaatatccagactggtcgtaatactcctacatctttgcacatacatggtgtacctccacctgtacttaacagtccacagggaaattctatctatattaggccttacattacaactcctggtggtacaactcgacagacacaacagcattctggctgggtatctcagtttaatcccatgaaccctcagcaagtttatcagccttcacagcctggtccctggactacttgtcctgcatctaatcctctgtcacatacctcatctcaacagccaaatcagcaaggccaccagacctctcatgtctacatgccaatcagttcacctactacttcacaaccaccaaccattcattcatctggtagctcacagtcttctgcccatagccaatataacattcagaatatttcaacaggacctcgaaaaaaccagattgaaatcaaacttgaacccccacaaagaaataattcttcaaaactgcgttcttctggacctcgaacctccagcacttcctcttcagtcaatagccagaccttaaacagaaatcagcccactgtttacatagctgccagccccccaaatacggatgagctgatgtcccgtagtcaacctaaggtctatatttcagcgaatgctgccacaggagatgaacaggtcatgcggaatcagcccacactcttcatatccacaaactctggagcatctgctgcctccaggaacatgtctgggcaagtgagcatgggtcctgcctttattcatcaccatcctcccaaaagtcgagcaataggcaataactctgcaacctctcctcgagtggtagtcactcagcccaatacgaaatacactttcaaaattacagtctctcccaataagccccctgcagtttcaccaggggtggtgtcccctacctttgaacttacaaatcttcttaatcatcctgatcattatgtagaaaccgagaatattcagcacctcacggaccctacattagcacatgtggatagaataagtgaaacacggaaactgagtatgggatctgatgatgctgcctacacacaagctcttttggtacaccagaaggccagaatggaacgacttcaaagagaacttgagattcaaaagaaaaagctggataaattaaaatctgaggttaatgaaatggaaaataatctaactcgaaggcgcctgaaaagatcaaattctatatcccagataccttcccttgaagaaatgcagcagctgagaagttgtaatagacaactccagattgacattgactgcttaaccaaagaaattgatctttttcaagcccgaggaccacattttaaccccagcgctattcataacttttatgacaatattggatttgtaggtcctgtgccaccaaaacccaaagatcaaaggtccatcatcaaaacaccaaagactcaagacacagaagatgatgagggagctcagtggaattgtaccgcctgtacttttttgaaccatccagccttaattcgctgtgaacagtgtgagatgccaaggcatttctgagccaaatggccctgtatcttctctaaaaccacatctaaagttcaagaaactagtctgtcatcgggaaaaagtttcactgctacataggattttgtcaaattgaaggtgtgacaagatggtgttctgctaatgttaaatgtcagcccacagagctaataatacctcagtataatgtcatgagcagttgaaattcatcacatgaaaagtaatctgctgaaag

SEQ ID NO: 31456 - DNA, 4380 bp, Homo sapiens
  source 1..4380: mol_type = unassigned DNA
atcgagcgcctaggagagccccgggtgggggagggcgcaaggggctcgggagggcccctccctgcgtcggcgcccctgacccgcccccaggcatgtgtgaggtgggggcgggggaggaaaaatctccttttggctctagtttactctagtttctcttctgctttcaaggctccagacccagttcctggacctgccctggaaaagaagtatcccgtagagatgagctcactgcagttacttaattaacaatttgtaagctgcaaaaatggcaatgggccaaccaagaacagctacaatttgaatttttctatttccagaaaatgcttggacagaagagatgagtactatttccactaaggcctagaattgcctactgtacaaatagtcctgatcaggcaatatacgaatggcccaaggaagccaccaaattgattttcaggttttacatgacctgcgacaaaaattccctgaagtacctgaagttgttgtatccaggtgcatgttacagaataataataacctggatgcctgctgtgctgttctctctcaggagagtacaagatatctttatggtgaaggagacttgaatttttcagatgattctggaatttctggtctacgcaatcacatgacttctctcaacttggacttgcaatcacagaacatttaccaccatggaagagaaggaagtaggatgaatggaagtaggactctaacgcacagcattagtgatggacaacttcaaggtggccagtccaatagtgaactatttcagcaggagccacagacagcaccagctcaagttcctcaaggctttaatgtttttggaatgtccagttcctctggtgcttcaaattcagcaccacatcttggatttcacttaggcagcaaaggaacatctagcctttctcaacaaactcccagatttaatcccattatggtaactttagccccaaatatccagactggtcgtaatactcctacatctttgcacatacatggtgtacctccacctgtacttaacagtccacagggaaattctatctatattaggccttacattacaactcctggtggtacaactcgacagacacaacagcattctggctgggtatctcagtttaatcccatgaaccctcagcaagtttatcagccttcacagcctggtccctggactacttgtcctgcatctaatcctctgtcacatacctcatctcaacagccaaatcagcaaggccaccagacctctcatgtctacatgccaatcagttcacctactacttcacaaccaccaaccattcattcatctggtagctcacagtcttctgcccatagccaatataacattcagaatatttcaacaggacctcgaaaaaaccagattgaaatcaaacttgaacccccacaaagaaataattcttcaaaactgcgttcttctggacctcgaacctccagcacttcctcttcagtcaatagccagaccttaaacagaaatcagcccactgtttacatagctgccagccccccaaatacggatgagctgatgtcccgtagtcaacctaaggtctatatttcagcgaatgctgccacaggagatgaacaggtcatgcggaatcagcccacactcttcatatccacaaactctggagcatctgctgcctccaggaacatgtctgggcaagtgagcatgggtcctgcctttattcatcaccatcctcccaaaagtcgagcaataggcaataactctgcaacctctcctcgagtggtagtcactcagcccaatacgaaatacactttcaaaattacagtctctcccaataagccccctgcagtttcaccaggggtggtgtcccctacctttgaacttacaaatcttcttaatcatcctgatcattatgtagaaaccgagaatattcagcacctcacggaccctacattagcacatgtggatagaataagtgaaacacggaaactgagtatgggatctgatgatgctgcctacacacaagctcttttggtacaccagaaggccagaatggaacgacttcaaagagaacttgagattcaaaagaaaaagctggataaattaaaatctgaggttaatgaaatggaaaataatctaactcgaaggcgcctgaaaagatcaaattctatatcccagataccttcccttgaagaaatgcagcagctgagaagttgtaatagacaactccagattgacattgactgcttaaccaaagaaattgatctttttcaagcccgaggaccacattttaaccccagcgctattcataacttttatgacaatattggatttgtaggtcctgtgccaccaaaacccaaagatcaaaggtccatcatcaaaacaccaaagactcaagacacagaagatgatgagggagctcagtggaattgtaccgcctgtacttttttgaaccatccagccttaattcgctgtgaacagtgtgagatgccaaggcatttctgagccaaatggccctgtatcttctctaaaaccacatctaaagttcaagaaactagtctgtcatcgggaaaaagtttcactgctacataggattttgtcaaattgaaggtgtgacaagatggtgttctgctaatgttaaatgtcagcccacagagctaataatacctcagtataatgtcatgagcagttgaaattcatcacatgaaaagtaatctgctgaaagacttggttgcccactgcctaactgtgtacagtgttaccagtgtcccattatggataattctcaatatgttaacacctaggtgttcccaatacctttttcccctcatgtcactactgaattttgacaggaggaaggaatagaatgatagcttgttttatttgtaaagctttcagtgaaacactacatacacgaagaaaaggaacaaggtttaactatttaagaaccatttgctgccgcatagtgccattggatagggaagaacttcagaaatctgtggtactcttggccttgtctttgtcttccctgaacgtgtctccactctgtgaagccagcatctaggggctaaagatgcaaaggaaagcagcatgcattgtctgtacaaatgtgcagcgaaataccccaaagcttttcctactgtacagatctctcgagtctgctttaagtgatttcttttcttcttgattattttcttatatttctatatgtatagtgtaatagccttttgttaactaattttcttttttccttttagtaattaagcacgatcatgtccctttttaagccttacctgagaggaacaatgccttaaaataaaaaagcattaatgagatgaaagtatgcacagaataactttcctctacttattctgtactttgccctcatgagttccaatgttgtgtgaagacaggcagatgctgcacagtgaattgcagatgatattacagaagtgatgtctgtaggtcacattaaatactgacttgagcagtgggtgacacaacacagtgtttgtcttccacagggaagcttaaaacaaaagatatttttaacccactgacagaacaacaaggttaagcttcatctgcttggtgtcccacagaacttgcacaagcagttgttattgggaaagtacagtctcaaaaccagcaacagcagcagtacctacagccctttttttggagagaagtttaaatgctttactgttggggcagtccatttctaatcctgacttggtgacagtatcatgtgtatttataaaacaaggctagccatatttaggacaactgaagaaaagctggaaaaaaaaacaagcaaacttgaacactgaagcaacctcaagcatctctttattttgatgatatatttttgtaaggaaaatattcagatgatcaggaatgtatataactgaaatcaagaaaaagaacagtatgcatttaaaaagacagaattatgaaattatatgagtgcttagaatggggctaagggaagtgctgaaatagagcaaaggatggaagataatatagactaccacccactgtaaatgtttgcaagtggctgtgttttaaatgggattattacagttgatctctatgaatgtcagagccctaactttcaggctttgcattttgtatatgggaagaaatatgacaatcctaggtaattaaaccatagacccaaagcccttacgtttgatgcaatttatttttaaaataggccttgtttttcagcttcatctgcagttctatgtgaagattgataaatcagtttttacttgttttattaataaaacgtaatttggatatcttgagttgatggttttgtgatttagctgggtaaactatctttgtaacagataagttatttataaaaattaaaaaacttatattctaatgtg

SEQ ID NO: 31457 - DNA, 3613 bp, Homo sapiens
  source 1..3613: mol_type = unassigned DNA
gtgctttccagccgcgagctgtcaggccgagtgtcaggccgggcaggtacgcggcgcgcgcccccggcgccccccgctccccgccgggacgccccgcgccgagccggaggccgcgtggacccgaaagccgctgggaaaagtttacccaaggtccagcctagcccctaggcaccatgtcggacagtgatctaggtgaggacgaaggcctcctctccctggcgggcaaaaggaagcgcagggggaacctgcccaaggagtcggtgaagatcctccgggactggctgtacttgcaccgctacaacgcctacccctcagagcaggagaagctgagcctttctggacagaccaacctgtcagtgctgcaaatatgtaactggttcatcaatgcccggcggcggcttctcccagacatgcttcggaaggatggcaaagaccctaatcagtttaccatttcccgccgcgggggtaaggcctcagatgtggccctcccccgtggcagcagcccctcagtgctggctgtgtctgtcccagcccccaccaatgtgctctccctgtctgtgtgctccatgccgcttcactcaggccagggggaaaagccagcagcccctttcccacgtggggagctggagtctcccaagcccctggtgacccctggtagcacacttactctgctgaccagggctgaggctggaagccccacaggtggactcttcaacacgccaccacccacacccccagagcaggacaaagaggacttcagcagcttccagctgctggtggaggtggcgctacagagggctgctgagatggagcttcagaagcagcaggacccatcactcccattactgcacactcccatccctttagtctctgaaaatccccagtaggcatctgccaagaagggtgctgaaggctccagccagctgtcctgggtttccgttttggttccctttcatacagagggttttctatggatcactgccaaacattgggatcatctcctctgtccagaggtcttcaacaggaagatgccagctggcaccactgcactgtgatgggggccctctcctctgctgactctgccgtttctccaggcctccgctcagtgatgagaccaagagatcggagacaagcatggtgctgctgcttctgctgcttctccagaaaatccctgggacacctttgttccagcctggtttcctgggctgggctcaggaaagctgccaaattcagtcctatgttgggtccaagctgcccctgtgctgtttctgtcaagccaggtgtggacattccaagttcatatgcgtgaacaaaagaaaagaggaacccagtggatgtaacagaaccgactccagttgaatgtttagatttttgctaaactgttttctttttcccttttttgctgtggtttgcattcacggcagtagttagcccaggtgtggggaacgagagtgcactgcatgatagcgttctggtgagctgggaaggacccaccactgccactgaggattgttttggaagaaaggaatatttttatcttggggaccagctaagtctctgcagtagtgtgaaattccaaatggttgttttatcattggtttggtttaccaaaaaaaaggcagggaaaaaaaaaaaaaacaaccgtatgagcgcattggcttgtctgccgcaggcacagaagggtagaaagccacagcagggggcagtccagcagactctgactcaactttctaggcacctagcagagaaagataagatcaaaaggtgtttggtttttcttttaatttttattgtagtttttttgggtgggtgggggaagtaaactagactgaagcgatggattttttttttcttttttttctttagtgtttttccctttgttcttgaacacttttgccctgcagcctcagttttgaattcttttagcaacttggattagaggggcccatatgtcagaagctcccagcacctcctacttgggagaaaagtgagccatctgctggtcaggaagtcctccagagaggcagcttttcccacaatggtggcaggaaactttggggaaagcaggaatggtgtccactgctgcggaggaactgccttcagagaaggtggggctggaaaagggttagaagcctcctagctgggattgtctttgtttcacctttctttaaattagaattacagaagcccctgcccagtgaacagataacgattggtcttatgctcctccctttcccccattttttcttttgctgttttgttttttgttttttgtttgtttgtttgtttttttgagacagagtcatgctctgtcacccgggctggagtgcagtggtgcgatctcagctcactgtaacctccgcctcccgggttcaagcaattatttgcctcagcctcccgagtagctgggattataggcacccgccaccatgtctggcttttagtagagacggggtttcaccatcttggccaggctggtcttggaactcctgacctcgtgagccaccacgcccagcctcttttgctgtttcattgctgacagtgttcaacaatatgccccatctttatatatcctaagaaacactaatcctaggttattgctagccaaaatatttttgtcctgagtagtgtcactgggccaaaagatagatcaggacgacagcctttagttttcctgaaatcaccaggtcaggcacaaggagaaaaggttcctggatactgactaacttgggtgggtggatctagccaggagaaagacagtaacatgtgttctgtactttctgggaagatccctgaagccatcacagaggctccccaacttctgagtcgcccatctgttgctgtgggagtgtgaacggatcgctgaaggagagggagctttgctctctctaggtgggcaagtttcctgggctctctgtgttgcctccctctggcttcttcctcccgtgccctctccccgtgtgccccagggggatcagggatcctcaccctcctgaggcccagtggggaagaatgaacatggcttcatccaggttaactgatgctgccatttgcccagcctcttccatcccagccctgtcagtgagcccaggtctggtgcaactgctgcaggatgcctgtagtagggaactctggaagtgtattgggctgaggtgggattttccctccccacagtgcactgagcaatggagggtggtgagggagccatgctgctgaattctggttggcatttccccattatgtaaaatggggtgttgggtagggcagactctgcttgggtttggttgtaagataaacctggaggagaagcacagttgtcccattgaattatttgagcaaaaactactgtaaataacttttttgtcttttgtcaaataaaatttttttttgtttttttaagcagaaacagggttcttgattgatccaccagggctcagggcccaggcttgaagacaaagcagtcactggcttcttattttgctttacatcttttactctccctctagtagccagctgtgagttctgtgcacgctgtacccccattccctttcaccagctccattctgtatcccattcaactcagggtaaagggggcatttgcatctcacattgg

SEQ ID NO: 31458 - DNA, 3432 bp, Homo sapiens
  source 1..3432: mol_type = unassigned DNA
gcggggggtgggcgcagctcgtcgcgctccgcacaaagtttgttttctccctccgggcgggtgggggagggcgcagagggcgcggggggaggagaggggatctgacgtcaggccgcgaggtgctttccagccgcgagctgtcaggccgagtgtcaggccgggcaggtttacccaaggtccagcctagcccctaggcaccatgtcggacagtgatctaggtgaggacgaaggcctcctctccctggcgggcaaaaggaagcgcagggggaacctgcccaaggagtcggtgaagatcctccgggactggctgtacttgcaccgctacaacgcctacccctcagagcaggagaagctgagcctttctggacagaccaacctgtcagtgctgcaaatatgtaactggttcatcaatgcccggcggcggcttctcccagacatgcttcggaaggatggcaaagaccctaatcagtttaccatttcccgccgcgggggtaaggcctcagatgtggccctcccccgtggcagcagcccctcagtgctggctgtgtctgtcccagcccccaccaatgtgctctccctgtctgtgtgctccatgccgcttcactcaggccagggggaaaagccagcagcccctttcccacgtggggagctggagtctcccaagcccctggtgacccctggtagcacacttactctgctgaccagggctgaggctggaagccccacaggtggactcttcaacacgccaccacccacacccccagagcaggacaaagaggacttcagcagcttccagctgctggtggaggtggcgctacagagggctgctgagatggagcttcagaagcagcaggacccatcactcccattactgcacactcccatccctttagtctctgaaaatccccagtaggcatctgccaagaagggtgctgaaggctccagccagctgtcctgggtttccgttttggttccctttcatacagagggttttctatggatcactgccaaacattgggatcatctcctctgtccagaggtcttcaacaggaagatgccagctggcaccactgcactgtgatgggggccctctcctctgctgactctgccgtttctccaggcctccgctcagtgatgagaccaagagatcggagacaagcatggtgctgctgcttctgctgcttctccagaaaatccctgggacacctttgttccagcctggtttcctgggctgggctcaggaaagctgccaaattcagtcctatgttgggtccaagctgcccctgtgctgtttctgtcaagccaggtgtggacattccaagttcatatgcgtgaacaaaagaaaagaggaacccagtggatgtaacagaaccgactccagttgaatgtttagatttttgctaaactgttttctttttcccttttttgctgtggtttgcattcacggcagtagttagcccaggtgtggggaacgagagtgcactgcatgatagcgttctggtgagctgggaaggacccaccactgccactgaggattgttttggaagaaaggaatatttttatcttggggaccagctaagtctctgcagtagtgtgaaattccaaatggttgttttatcattggtttggtttaccaaaaaaaaggcagggaaaaaaaaaaaaaacaaccgtatgagcgcattggcttgtctgccgcaggcacagaagggtagaaagccacagcagggggcagtccagcagactctgactcaactttctaggcacctagcagagaaagataagatcaaaaggtgtttggtttttcttttaatttttattgtagtttttttgggtgggtgggggaagtaaactagactgaagcgatggattttttttttcttttttttctttagtgtttttccctttgttcttgaacacttttgccctgcagcctcagttttgaattcttttagcaacttggattagaggggcccatatgtcagaagctcccagcacctcctacttgggagaaaagtgagccatctgctggtcaggaagtcctccagagaggcagcttttcccacaatggtggcaggaaactttggggaaagcaggaatggtgtccactgctgcggaggaactgccttcagagaaggtggggctggaaaagggttagaagcctcctagctgggattgtctttgtttcacctttctttaaattagaattacagaagcccctgcccagtgaacagataacgattggtcttatgctcctccctttcccccattttttcttttgctgttttgttttttgttttttgtttgtttgtttgtttttttgagacagagtcatgctctgtcacccgggctggagtgcagtggtgcgatctcagctcactgtaacctccgcctcccgggttcaagcaattatttgcctcagcctcccgagtagctgggattataggcacccgccaccatgtctggcttttagtagagacggggtttcaccatcttggccaggctggtcttggaactcctgacctcgtgagccaccacgcccagcctcttttgctgtttcattgctgacagtgttcaacaatatgccccatctttatatatcctaagaaacactaatcctaggttattgctagccaaaatatttttgtcctgagtagtgtcactgggccaaaagatagatcaggacgacagcctttagttttcctgaaatcaccaggtcaggcacaaggagaaaaggttcctggatactgactaacttgggtgggtggatctagccaggagaaagacagtaacatgtgttctgtactttctgggaagatccctgaagccatcacagaggctccccaacttctgagtcgcccatctgttgctgtgggagtgtgaacggatcgctgaaggagagggagctttgctctctctaggtgggcaagtttcctgggctctctgtgttgcctccctctggcttcttcctcccgtgccctctccccgtgtgccccagggggatcagggatcctcaccctcctgaggcccagtggggaagaatgaacatggcttcatccaggttaactgatgctgccatttgcccagcctcttccatcccagccctgtcagtgagcccaggtctggtgcaactgctgcaggatgcctgtagtagggaactctggaagtgtattgggctgaggtgggattttccctccccacagtgcactgagcaatggagggtggtgagggagccatgctgctgaattctggttggcatttccccattatgtaaaatggggtgttgggtagggcagactctgcttgggtttggttgtaagataaacctggaggagaagcacagttgtcccattgaattatttgagcaaaaactactgtaaataacttttttgtcttttgtcaaataaaatttttttttgtttttttaagcagaaa

SEQ ID NO: 31459 - DNA, 638 bp, Homo sapiens
  source 1..638: mol_type = unassigned DNA
cccgcgccccgaagagtcggccagccccgaactgccggagtaggggtgggaaccaaactttttcctgccccgggacagacacgtttacccaaggtccagcctagcccctaggcaccatgtcggacagtgatctaggtgaggacgaaggcctcctctccctggcgggcaaaaggaagcgcagggggaacctgcccaaggagtcggtgaagatcctccgggactggctgtacttgcaccgctacaacgcctacccctcagagcaggagaagctgagcctttctggacagaccaacctgtcagtgctgcaaatatgtaactggttcatcaatgcccggcggcggcttctcccagacatgcttcggaaggatggcaaagaccctaatcagtttaccatttcccgccgcgggggtaaggcctcagatgtggccctcccccgtggcagcagcccctcagtgctggctgtgtctgtcccagcccccaccaatgtgctctccctgtctgtgtgctccatgccgcttcactcaggccagggggaaaagccagcagcccctttcccacgtggggagctggagtctcccaagcccctggtgacccctggtagcacacttactctgctgaccagggctgaggctggaagc

SEQ ID NO: 31460 - DNA, 923 bp, Homo sapiens
  source 1..923: mol_type = unassigned DNA
ggatggcgggcccgcgcgggagctggtgcgcggagtcggcccggggtgtggggactgtggggtgcaagcgccccgagcgccggacgattcctcgccgacccaggagccatgtgctccgactcggtctgggccgcgggggaggttgcgcgctttgtctgaactgctgggaatgcgggcgtttacccaaggtccagcctagcccctaggcaccatgtcggacagtgatctaggtgaggacgaaggcctcctctccctggcgggcaaaaggaagcgcagggggaacctgcccaaggagtcggtgaagatcctccgggactggctgtacttgcaccgctacaacgcctacccctcagagcaggagaagctgagcctttctggacagaccaacctgtcagtgctgcaaatatgtaactggttcatcaatgcccggcggcggcttctcccagacatgcttcggaaggatggcaaagaccctaatcagtttaccatttcccgccgcgggggtaaggcctcagatgtggccctcccccgtggcagcagcccctcagtgctggctgtgtctgtcccagcccccaccaatgtgctctccctgtctgtgtgctccatgccgcttcactcaggccagggggaaaagccagcagcccctttcccacgtggggagctggagtctcccaagcccctggtgacccctggtagcacacttactctgctgaccagggctgaggctggaagccccacaggtggactcttcaacacgccaccacccacacccccagagcaggacaaagaggacttcagcagcttccagctgctggtggaggtggcgctacagagggctgctgagatggagcttcagaagcagcaggacccatcactcccattactgcacactcccatccctttagtctctgaaaatccccagt

SEQ ID NO: 31461 - DNA, 1008 bp, Homo sapiens
  source 1..1008: mol_type = unassigned DNA
aagaaaggatgtgacgtcactgagataaccagctcggctgttagcaactctgttagcaacgctgtttgtctttctcggaaacaacagtaacgataagcctcttggaatatggaggccgctgcggacggcccggctgagacccaaagcccggtggaaaaagacagcccggcgaagacccaaagcccagcccaagacacctcaatcatgtcgagaaataacgcagatacaggcagagttcttgccttaccagagcacaagaagaagcgcaagggaaacttgccagccgagtccgttaagatcctccgcgactggatgtataagcatcggtttaaggcctacccttcagaagaagagaagcaaatgctgtcagagaagaccaatttgtctttgttgcagatttctaactggtttatcaatgctcgcagacgcattctcccggatatgcttcaacagcgtagaaacgaccccatcattggccacaaaacgggcaaagatgcccatgccacccacctgcagagcaccgaggcgtctgtgccggccaagtcagggcccagtggtccagacaatgtacaaagcctgcccctgtggcccttgccaaagggccagatgtcaagagagaagcaaccagatccggagtcggcccctagccagaagctcaccggaatagcccagccgaagaaaaaggtcaaggtttctgtcacatccccgtcttctccagaacttgtgtctccagaggagcacgccgacttcagcagcttcctgctgctagtcgatgcagcagtacaaagggctgccgagctggagctagagaagaagcaagagcctaatccatgattgatgatgttccaaaaacccaagtagtcagtcccttatgtactgtggtaaacctgtttatgttcaccccaacttatttgtatgcttatcttttatagaggcatctttctttctagtggttttatgagaaccaatcttaattattgggactaaattctgtcagatatttcagtg

SEQ ID NO: 31462 - DNA, 856 bp, Homo sapiens
  source 1..856: mol_type = unassigned DNA
tcggaaacaacaggtgagaattccccttacagacctgcccatgctttctaaagtggctctcccaaacctacctttgtcctaactcagttgtctgtgattctcaatatagtaacgataagcctcttggaatatggaggccgctgcggacggcccggctgagacccaaagcccggtggaaaaagacagcccggcgaagacccaaagcccagcccaagacacctcaatcatgtcgagaaataacgcagatacaggcagagttcttgccttaccagagcacaagaagaagcgcaagggaaacttgccagccgagtccgttaagatcctccgcgactggatgtataagcatcggtttaaggcctacccttcagaagaagagaagcaaatgctgtcagagaagaccaatttgtctttgttgcagatttctaactggtttatcaatgctcgcagacgcattctcccggatatgcttcaacagcgtagaaacgaccccatcattggccacaaaacgggcaaagatgcccatgccacccacctgcagagcaccgaggcgtctgtgccggccaagtcagggcccagtggtccagacaatgtacaaagcctgcccctgtggcccttgccaaagggccagatgtcaagagagaagcaaccagatccggagtcggcccctagccagaagctcaccggaatagcccagccgaagaaaaaggtcaaggtttctgtcacatccccgtcttctccagaacttgtgtctccagaggagcacgccgacttcagcagcttcctgctgctagtcgatgcagcagtacaaagggctgccgagctggagctagagaagaagcaagagcctaatccatga

SEQ ID NO: 31463 - DNA, 905 bp, Homo sapiens
  source 1..905: mol_type = unassigned DNA
aagaaaggatgtgacgtcactgagataaccagctcggctgttagcaactctgttagcaaagctgtttgtctttctcggaaacaacagtaacgataagcctctttgaatatggaggccgctgcagacggcccggctgagacccaaagcccggtggaaaaagacagcccggcgaagacccaaagcccagcccaagacacctcaatcatgtcgagaaataacgcagatacaggcagagttcttgccttaccagagcacaagaagaagcgcaagggaaacttgccagccgagtccgttaagatcctccgcgactggatgtataagcatcggtttaaggcctacccttcagaagaagagaagcaaatgctgtcagagaagaccaatttgtctttgttgcggatttctaactggtttatcaatgctcgcagacgcattctcccggatatgcttcaacagcgtagaaacgaccccatcattggccacaaaacgggcaaagatgcccatgccacccacctgcagagcaccgaggcgtctgtgccggccaagtcagggccagtggtccagacaatgtacaaagcctgcccctgtggcccttgccaaagggccagatgtcaagagagaagcaaccagatccggagtcggcccctagccagaagctcaccggaatagcccagccaaagaaaaaggtcaagatttctatcacttccccgtcttctccagaacttgtgtctccagaggagtacgccgacttcagcagcttcctgctgctagtcgatgcagcagtacaaacggctgccgagctggagctagagaagaagcaagagcctaatccatgattgatgatgttccaaaaacccaagtagtcagtcccttgtgtactgtggtaaacctgtttatgttcaccccaa

SEQ ID NO: 31464 - DNA, 855 bp, Homo sapiens
  source 1..855: mol_type = unassigned DNA
tcggaaacaacaggtgagaattccccttacagacctgcccatgctttctaaagtggctctcccaaacctacctttgtcctaactcagttgtctgtgattctcaatatagtaacgataagcctctttgaatatggaggccgctgcagacggcccggctgagacccaaagcccggtggaaaaagacagcccggcgaagacccaaagcccagcccaagacacctcaatcatgtcgagaaataacgcagatacaggcagagttcttgccttaccagagcacaagaagaagcgcaagggaaacttgccagccgagtccgttaagatcctccgcgactggatgtataagcatcggtttaaggcctacccttcagaagaagagaagcaaatgctgtcagagaagaccaatttgtctttgttgcggatttctaactggtttatcaatgctcgcagacgcattctcccggatatgcttcaacagcgtagaaacgaccccatcattggccacaaaacgggcaaagatgcccatgccacccacctgcagagcaccgaggcgtctgtgccggccaagtcagggccagtggtccagacaatgtacaaagcctgcccctgtggcccttgccaaagggccagatgtcaagagagaagcaaccagatccggagtcggcccctagccagaagctcaccggaatagcccagccaaagaaaaaggtcaagatttctatcacttccccgtcttctccagaacttgtgtctccagaggagtacgccgacttcagcagcttcctgctgctagtcgatgcagcagtacaaacggctgccgagctggagctagagaagaagcaagagcctaatccatga

SEQ ID NO: 31465 - DNA, 2272 bp, Homo sapiens
  source 1..2272: mol_type = unassigned DNA
gtccccgcctcgcgcatgcgccgcgctcgctcgcgggagggcatggcgggggccgtgccgggcgccatcatggacgaggactactacgggagcgcggccgagtggggcgacgaggctgacggcggccagcaggaggatgattctggagaaggagaggatgatgcggaggttcagcaagaatgcctgcataaattttccacccgggattatatcatggaaccctccatcttcaacactctgaagaggtattttcaggcaggagggtctccagagaatgttatccagctcttatctgaaaactacaccgctgtggcccagactgtgaacctgctggccgagtggctcattcagacaggtgttgagccagtgcaggttcaggaaactgtggaaaatcacttgaagagtttgctgatcaaacattttgacccccgcaaagcagattctatttttactgaagaaggagagaccccagcgtggctggaacagatgattgcacataccacgtggcgggaccttttttataaactggctgaagcccatccagactgtttgatgctgaacttcaccgttaagcttatttctgacgcagggtaccagggggagatcaccagtgtgtccacagcatgccagcagctagaagtgttctcgagagtgctccggacctctctagctacaattttagatggaggagaagaaaaccttgaaaaaaatctccctgagtttgccaagatggtgtgccacggggagcacacgtacctgtttgcccaggccatgatgtccgtgctggcccaggaggagcaggggggctccgctgtgcgcaggatcgcccaggaagtgcagcgctttgcccaggagaaaggtcatgacgccagtcagatcacactagccttgggcacagctgcctcctaccccagggcctgccaggctctcggggccatgctgtccaaaggagccctgaaccctgctgacatcaccgtcctgttcaagatgttcacaagcatggaccctcctccggttgaacttatccgcgttccagccttcctggacctgttcatgcagtcactctttaaaccaggggctcggatcaaccaggaccacaagcacaaatacatccacatcttggcgtacgcagcaagcgtggttgagacctggaagaagaacaagcgagtgagcatcaataaagatgagctgaagtcaacgtcaaaagctgtcgaaaccgttcacaatttgtgttgcaacgagaacaaaggggcctctgaactagtggcagaattgagcacactttatcagtgtattaggtttccagtggtagcaatgggtgtgctgaagtgggtggattggactgtatcagaaccaaggtactttcagctgcagactgaccatacccctgtccacctggcgttgctggatgagatcagcacctgccaccagctcctgcacccccaggtcctgcagctgcttgttaagctttttgagactgagcactcccagctggacgtgatggagcagcttgagttgaagaagacactgctggacaggatggttcacctgctgagtcgaggttatgtacttcctgttgtcagttacatccgaaagtgtctggagaagctggacactgacatttcactcattcgctattttgtcactgaggtgctggacgtcattgctcctccttatacctctgacttcgtgcaacttttcctccccatcctggagaatgacagcatcgcaggtaccatcaaaacggaaggcgagcatgaccctgtgacggagtttatagctcactgcaaatctaacttcatcatggtgaactaatttagagcatcctccagagctgaagcagaacattccagaacccgttgtggaaaaaccctttcaagaagctgttttaagaggctcgggcagcgtcttgaaaatgggcaccgctgggaggaggtggatgacttctttacaaaggaaaatggtagcagcttcagtgagaaactgcccttacaaacagtcccttctctgctgtcaatccaatactgctcccaaatcctgttttcagtgttcatttccctcaaggcaggcgctgggctcccacgacccctcaggacagatctggccgtcagccgcgggccgctgggaactccactcggggaactcctttccaagctgacctcagttttctcacaagaacccagttagctgatgttttattgtaattgtcttaatttgctaagaacaagtaataagtaaatttttaaaaagcctttctgctgggttggattaa

SEQ ID NO: 31466 - DNA, 2137 bp, Homo sapiens
  source 1..2137: mol_type = unassigned DNA
gggagggcatggcgggggccgtgccgggcgccatcatggacgaggactactacgggagcgcggccgagtggggcgacgaggctgacggcggccagcaggaggatgattctggagaaggagaggatgatgcggaggttcagcaagaatgcctgcataaattttccacccgggattatatcatggaaccctccatcttcaacactctgaagaggtattttcaggcaggagggtctccagagaatgttatccagctcttatctgaaaactacaccgctgtggcccagactgtgaacctgctggccgagtggctcattcagacaggtgttgagccagtgcaggttcaggaaactgtggaaaatcacttgaagagtttgctgatcaaacattttgacccccgcaaagcagattctatttttactgaagaaggagagaccccagcgtggctggaacagatgattgcacataccacgtggcgggaccttttttataaactggctgaagcccatccagactgtttgatgctgaacttcaccgttaagcttatttctgacgcagggtaccagggggagatcaccagtgtgtccacagcatgccagcagctagaagtgttctcgagagtgctccggacctctctagctacaattttagatggaggagaagaaaaccttgaaaaaaatctccctgagtttgccaagatggtgtgccacggggagcacacgtacctgtttgcccaggccatgatgtccgtgctggcccaggaggagcaggggggctccgctgtgcgcaggatcgcccaggaagtgcagcgctttgcccaggagaaaggtcatgacgccagtcagatcacactagccttgggcacagctgcctcctaccccagggcctgccaggctctcggggccatgctgtccaaaggagccctgaaccctgctgacatcaccgtcctgttcaagatgttcacaagcatggaccctcctccggttgaacttatccgcgttccagccttcctggacctgttcatgcagtcactctttaaaccaggggctcggatcaaccaggaccacaagcacaaatacatccacatcttggcgtacgcagcaagcgtggttgagacctggaagaagaacaagcgagtgagcatcaataaagatgagctgaagtcaacgtcaaaagctgtcgaaaccgttcacaatttgtgttgcaacgagaacaaaggggcctctgaactagtggcagaattgagcacactttatcagtgtattaggtttccagtggtagcaatgggtgtgctgaagtgggtggattggactgtatcagaaccaaggtactttcagctgcagactgaccatacccctgtccacctggcgttgctggatgagatcagcacctgccaccagctcctgcacccccaggtcctgcagctgcttgttaagctttttgagactgagcactcccagctggacgtgatggagcagcttgagttgaagaagacactgctggacaggatggttcacctgctgagtcgaggttatgtacttcctgttgtcagttacatccgaaagtgtctggagaagctggacactgacatttcactcattcgctattttgtcactgaggtgctggacgtcattgctcctccttatacctctgacttcgtgcaacttttcctccccatcctggagaatgacagcatcgcaggtaccatcaaaacggaaggcgagcatgaccctgtgacggagtttatagctcactgcaaatctaacttcatcatggtgaactaatttagagcatcctccagagctgaagcagaacattccagaacccgttgtggaaaaaccctttcaagaagctgttttaagaggctcgggcagcgtcttgaaaatgggcaccgctgggaggaggtggatgacttctttacaaaggaaaatggcaggcgctgggctcccacgacccctcaggacagatctggccgtcagccgcgggccgctgggaactccactcggggaactcctttccaagctgacctcagttttctcacaagaacccagttagctgatgttttattgtaattgtcttaatttgctaagaacaagtaataagtaaatttttaaaaagcctttctgctgggttggattaa

SEQ ID NO: 31467 - DNA, 2399 bp, Homo sapiens
  source 1..2399: mol_type = unassigned DNA
accatggaaacgaccatttccggtctggacctctcccgaatcgatagagccacacagtcgttgcagcttctagttgtattcgtgagagcccagtgcgtcaccacttcctcgttctattttcccagcctcataaaaacagagcgggagtattgggaggaggataagctggggaagaggctggccacactggttgctataaccaccaccacttccggtccgttcctctttacggcccacctcagcgctgcccgcgcgaaatttgtatccctctgcttgtgtccactggctcctggggagcagcgcagggaggaggaggaggaagatatcaaagagccctcccattgggggccccagatcgccacttccggtgaccagaggtagggaaggaaacaatcccgacccggagtggacaggtgaggaggggaggacttgcctcgccgaggccgctgcgaggagcgtgcccaagggcgaaggtccagggaacccggctcccgcgcaccgaagacggccgccatgccggcccgttgtgtggccgcccactgcggcaacaccaccaagtctgggaagtcgctgttccgctttcccaaggaccgggccgtgcggctgctctgggaccgcttcgtgcggggttgccgcgccgactggtacggaggcaatgaccgctcggtcatctgctctgaccactttgccccagcctgttttgacgtctcttcggttatccagaagaacctgcgcttctcccagcgcctgaggctggtggcaggcgccgtgcccaccctgcaccgggtgcccgccccggcacctaagaggggagaggagggagaccaagcaggccgcctggacacgcgaggagagctccaggcagccaggcattctgaggctgccccaggtccagtctcctgtacacgcccccgagctgggaagcaggctgcagcttcacagattacgtgtgaaaatgaacttgtgcaaacccaaccccatgctgataatccatctaatactgtcacttcagtacctactcactgtgaagaaggcccagtgcataaaagtacacaaatttctttgaaaaggccccgtcaccgtagtgtgggtattcaagccaaagtgaaagcgtttggaaaaagactgtgtaatgcaactactcagacagaggaattgtggtctagaacttcctctctctttgacatttactccagtgattcagaaacagatacagactgggatatcaagagtgaacagagtgatttgtcttatatggctgtacaggtgaaagaagaaacatgttaaaaactcaacatcaaatgctctgatgtgctatagattttcaaatctttactcacataattatctctttgctattgtaaatctttcacttcaagataatttgacagttgagtatcagcataatttgtttagctctaaggcaaaagtttgcttgcttgccaacacaatgaagataatacctacccacaaacatccctattctctactttcacctttttttttcttttaatccttttggtagaaatcaggttacaaagcaaaaccacaatatcagcaacacttcctaatcaaaattaagcattgaatatttgtttaagcttagttcagaagcaacgctcctacaggacttgacatttgctagttagaatatccctactcttctaaataatttgaaagtatagagcagtaacacagtaacagtgagcacagccaagcctgacactactaaatgatttggtagtgaagccaggacatctacccttgactattttttatgttatttatttattagtttgtccatttgtaacatgtatagatctgtcctgtgagcatttctgatgaatctatggttcttacagaaatttttcaaaggaatcaatttagagatagagttttcatatacttacattaacttattaatgaaatctgtttgcatcagtgcttactgcgacacattaattagcttgattaatttagattagaatcattaacatcatgaaaaataaaagtactacatttctaacgtattcccattgcaggtgttaggtattttttctgtcaacacctctcttttgaattctacatttgagaaataagcatggaaatattagctgccccgtctgccattcaccaggaaaaatttctatggcaattttgtaccatgaagtaaactgttacaatagtttctgagaagcatactataactctgatcttccattgagaataacaaaaataaatatcaattttacacctcatatgtcttcttagttctgaatgattagaagaacttgcatgtatttttatcctagaaggtttaaataatacatcaaagttattttcttccaaatgtaattttatgtctgctttaaggaaaataaaataaaatattaatagga

SEQ ID NO: 31468 - DNA, 785 bp, Homo sapiens
  source 1..785: mol_type = unassigned DNA
gagccaggtgcaaacatttcccgtcaattggcagaaaacaaccttgaggaaccttgacgagtgtccggagtttagaaaacttagggatggagccccccaagatgaacccagtggtggagccactgtcctggatgctgggcacctggctgtcggacccacctggagccgggacctaccccacactgcagcccttccagtacctggaggaggttcacatctcccacgtgggccagcccatgctgaacttctcgttcaactccttccacccggacacgcgcaagccgatgcacagagagtgtggcttcattcgcctcaagcccgacaccaacaaggtggcctttgtcagcgcccagaacacaggcgtggtggaagtggaggagggcgaggtgaacgggcaggagctgtgcatcgcatcccactccatcgccaggatctccttcgccaaggagccccacgtagagcagatcacccggaagttcaggctgaattctgaaggcaaacttgagcagacggtctccatggcaaccacgacacagccaatgactcagcatcttcacgtcacctacaagaaggtgaccccgtaaacctagagcttctggagccctcgggagggcctggctactgtgcctcaacggttcggctcctcaacagacagtccctgcggcagaagtgggtgtggccgtgagcctctgcaggctcaagagtgttgtccagatgtttctgtactggcatagaaaaaccaaataaaaggcctttatttttatggctgaggattttgaatatta

SEQ ID NO: 31469 - DNA, 2367 bp, Homo sapiens
  source 1..2367: mol_type = unassigned DNA
ggtggcgcttcctcctcttagaggacccaggagcagttgtcgaggcggcagaggcgagctctgtccccgtccgagcagccatcttgcggtacggacgtgctcggcgcgcccatgtcgcggtacggacttgccccgccggggcgactcccccgcccgtctgcccgcctgccgacggacgctgcgaggggcctgcggcgccccgctggtccgaagacgcccgaacccgcggctggcgaggacgcgggcgggggctggggcgggggcgggcccgctgcgggcgcctgcgcctccatcttgccgtacggcgcggacgccgcgggccggcccacgtcccgagccgtgtcgccgccgcgctccctccctcggggcggtccgcgggcgggcgggcggctagggccggggcctggctgcgcggctgggccaaggcccgcgatggtgatctgctgtgcggccgtgaactgctccaaccggcagggaaagggcgagaagcgcgccgtctccttccacaggttccccctaaaggactcaaaacgtctaatccaatggttaaaagctgttcagagggataactggactcccactaagtattcatttctctgtagtgagcatttcaccaaagacagcttctccaagaggctggaggaccagcatcgcctgctgaagcccacggccgtgccatccatcttccacctgaccgagaagaagaggggggctggaggccatggccgcacccggagaaaagatgccagcaaggccacagggggtgtgaggggacactcgagtgccgccaccagcagaggagctgcaggttggtcaccgtcctcgagtggaaacccgatggccaagccagagtcccgcaggttgaagcaagctgctctgcaaggtgaagccacacccagggcggcccaggaggccgccagccaggagcaggcccagcaagctctggaacggactccaggagatggactggccaccatggtggcaggcagtcagggaaaagcagaagcgtctgccacagatgctggcgatgagagcgccacttcctccatcgaagggggcgtgacagataagagtggcatttctatggatgactttacgcccccaggatctggggcgtgcaaatttatcggctcacttcattcgtacagtttctcctctaagcacacccgagaaaggccatctgtcccccgagagcccattgaccgcaagaggctgaagaaagatgtggaaccaagctgcagtgggagcagcctgggacccgacaagggcctggcccagagccctcccagctcatcacttaccgcgacaccgcagaagccttcccagagcccctctgcccctcctgccgacgtcaccccaaagccagccacggaagccgtgcagagcgagcacagcgacgccagccccatgtccatcaacgaggtcatcctgtcggcgtcaggggcctgcaagctcatcgactcactgcactcctactgcttctcctcccggcagaacaagagccaggtgtgctgcctgcgggagcaggtggagaagaagaacggcgagctgaagagcctgcggcagagggtcagccgctccgacagccaggtgcggaagctacaggagaagctggatgagctgaggagagtgagcgtcccctatccaagtagcctgctgtcgcccagccgcgagccccccaagatgaacccagtggtggagccactgtcctggatgctgggcacctggctgtcggacccacctggagccgggacctaccccacactgcagcccttccagtacctggaggaggttcacatctcccacgtgggccagcccatgctgaacttctcgttcaactccttccacccggacacgcgcaagccgatgcacagagagtgtggcttcattcgcctcaagcccgacaccaacaaggtggcctttgtcagcgcccagaacacaggcgtggtggaagtggaggagggcgaggtgaacgggcaggagctgtgcatcgcatcccactccatcgccaggatctccttcgccaaggagccccacgtagagcagatcacccggaagttcaggctgaattctgaaggcaaacttgagcagacggtctccatggcaaccacgacacagccaatgactcagcatcttcacgtcacctacaagaaggtgaccccgtaaacctagagcttctggagccctcgggagggcctggctactgtgcctcaacggttcggctcctcaacagacagtccctgcggcagaagtgggtgtggccgtgagcctctgcaggctcaagagtgttgtccagatgtttctgtactggcatagaaaaaccaaataaaaggcctttatttttatggctgaggattttgaatatta

SEQ ID NO: 31470 - DNA, 969 bp, Homo sapiens
  source 1..969: mol_type = unassigned DNA
gtggaaccaagctgcagtgggagcagcctgggacccgacaagggcctggcccagagccctcccagctcatcacttaccgcgacaccgcagaagccttcccagagcccctctgcccctcctgccgacgtcaccccaaagccagccacggaagccgtgcagagcgagcacagcgacgccagccccatgtccatcaacgaggtcatcctgtcggcgtcaggggcctgcaagctcatcgactcactgcactcctactgcttctcctcccggcagaacaagagccaggtgtgctgcctgcgggagcaggtggagaagaagaacggcgagctgaagagcctgcggcagagggtcagccgctccgacagccaggtgcggaagctacaggagaagctggatgagctgaggagagtgagcgtcccctatccaagtagcctgctgtcgcccagccgcgagccccccaagatgaacccagtggtggagccactgtcctggatgctgggcacctggctgtcggacccacctggagccgggacctaccccacactgcagcccttccagtacctggaggaggttcacatctcccacgtgggccagcccatgctgaacttctcgttcaactccttccacccggacacgcgcaagccgatgcacagagagtgtggcttcattcgcctcaagcccggaagttcaggctgaattctgaaggcaaacttgagcagacggtctccatggcaaccacgacacagccaatgactcagcatcttcacgtcacctacaagaaggtgaccccgtaaacctagagcttctggagccctcgggagggcctggctactgtgcctcaacggttcggctcctcaacagacagtccctgcggcagaagtgggtgtggccgtgagcctctgcaggctcaagagtgttgtccagatgtttctgtactggcatagaaaaaccaaataaaaggcctttattttt

SEQ ID NO: 31471 - DNA, 1568 bp, Homo sapiens
  source 1..1568: mol_type = unassigned DNA
gtgaggccttggacctgtggcctttgggcttgggtgtctcctgtccgctctgccagtgagtcctcagctctccgtacgtggcccgtcgcccgcggcaagacggagggaaggcgctagttcagtttagctagcaatgcccttcttgcgcgaggactgctggctggtggcgaggcccaggagcctgtttgggtgttaacagttaaaacagtaaagtttgcgcgggcttctgtggttttcagtcttttccccacttcacgtgatctcatttcattgaacaacattaaccaccatttaagatacgtgaaacctgcgaagtggaaaggtgcacgcaaagttaatttacaccccccgcgagatttcctctacatgacaaagaaagactggaaaagtggttaaagaatatgaagcgagattcatgggttcccagtaaataccagtttctatgtagtgaccattttactcctgactctcttgacatcagatggggtattcgatatttaaaacaaactgcagttccaacaatattttctttgcctgaagacaatcagggaaaagacccttctaaaaaaaaatcccagaagaaaaacttggaagatgagaaagaagtatgcccaaaagccaagtcagaagaatcatttgtattaaatgagacaaagaaaaatatagttaacacagatgtgccccatcaacatccagaattacttcattcatcttccttggtaaagccaccagctcccaaaacaggaagtatacaaaataacatgttaactcttaatctagttaaacaacatactgggaaaccagaatctaccttggaaacatcagttaaccaagatacaggtagaggtggttttcacacatgttttgagaatctaaattctacaactattactttgacaacttcaaattcagaaagtattcatcaatctttggaaactcaagaagttcttgaagtaactaccagtcatcttgctaatccaaactttacaagtaattccatggaaataaagtcagcacaggaaaatccattcttattcagcacaattaatcaaacagttgaagaattaaacacaaataaagaatctgttattgccatttttgtacctgctgaaaattctaaaccctcagttaattcttttatatctgcacaaaaagaaaccacggaaatggaagacacagacattgaagactccttgtataaggatgtagactatgggacagaagttttacaaatcgaacattcttactgcagacaagatataaataaggaacatctttggcagaaagtctctaagctacattcaaagataactcttctagagttaaaagagcaacaaactctaggtagattgaagtctttggaagctcttataaggcagctaaagcaggaaaactggctatctgaagaaaacgtcaagattatagaaaaccattttacaacatatgaagtcactatgatatagaataactaggttttaaaactatggctgttaaataagctttttccagccaaaccaaactacatgtaaagtgaactgtttcctgtataaagttctcatcttaatgaa

SEQ ID NO: 31472 - DNA, 3018 bp, Homo sapiens
  source 1..3018: mol_type = unassigned DNA
ggcggaagtgagtcgacagacgaggcggctttcccggcagaatgctagcgcaggcgcaggggctcgagaggcctggacctgtggcgcatcctcagtgaggagggccgccctgcatccgtcgccggccccggtctccaggggcctcacccgagtcatgccccgctattgcgcagcgatttgttgtaagaaccgccggggacgaaacaataaagaccggaagctgagtttttatccatttcctctacatgacaaagaaagactggaaaagtggttaaagaatatgaagcgagattcatgggttcccagtaaataccagtttctatgtagtgaccattttactcctgactctcttgacatcagatggggtattcgatatttaaaacaaactgcagttccaacaatattttctttgcctgaagacaatcagggaaaagacccttctaaaaaaaaatcccagaagaaaaacttggaagatgagaaagaagtatgcccaaaagccaagtcagaagaatcatttgtattaaatgagacaaagaaaaatatagttaacacagatgtgccccatcaacatccagaattacttcattcatcttccttggtaaagccaccagctcccaaaacaggaagtatacaaaataacatgttaactcttaatctagttaaacaacatactgggaaaccagaatctaccttggaaacatcagttaaccaagatacaggtagaggtggttttcacacatgttttgagaatctaaattctacaactattactttgacaacttcaaattcagaaagtattcatcaatctttggaaactcaagaagttcttgaagtaactaccagtcatcttgctaatccaaactttacaagtaattccatggaaataaagtcagcacaggaaaatccattcttattcagcacaattaatcaaacagttgaagaattaaacacaaataaagaatctgttattgccatttttgtacctgctgaaaattctaaaccctcagttaattcttttatatctgcacaaaaagaaaccacggaaatggaagacacagacattgaagactccttgtataaggatgtagactatgggacagaagttttacaaatcgaacattcttactgcagacaagatataaataaggaacatctttggcagaaagtctctaagctacattcaaagataactcttctagagttaaaagagcaacaaactctaggtagattgaagtctttggaagctcttataaggcagctaaagcaggaaaactggctatctgaagaaaacgtcaagattatagaaaaccattttacaacatatgaagtcactatgatatagaataactaggttttaaaactatggctgttaaataagctttttccagccaaaccaaactacatgtaaagtgaactgtttcctgtataaagttctcatcttaatgaacctatgagagtgttgtaaagttatgaactgtatcctattcttgtaatacttatttaagaaaaaccagagagttgggctggagagaaaagcagttttattacttgataattttccaaattaaaatttagcacatagaaggattcagttataacatgagaaaacaaagaagtgttcaaagagcacagactagaagtcaggttcaggaatcagtcctggttctaccactggcatatgacttgggcaagttacttatgattgtgcctcagtccctaatttgtaaaataagcacttactggatttgtaattggttatttatagtcccttccctttttattaagataattctattagaacacattttctgtaagataatatatacgtaatactagaagttggctagaatttgatgatattaaccatgtattattttcagtatttattgaattctgtggtctttgaccttttggctatagttacatattacagttatattatctgtaatagaaaggaagataaacttttttttttttttttttttttttttttttgagatggagtctcactctgtaacccaggctggagtgcagtggcctgatcttggctcactgcagcctctgcctcccgggttcaagtgattcttctgcctcagcttcccgagtagctgggattataggcacacaccaccacatccagcttatttttgtatttttagtagaaacggggtttcaccatgttggccgggctggcctcgaactcctgaccccaggtgatccacctaccttggcctcccaaagtgctgggattacaggcgtgagccaccgcgcctggccaagatagaacttttataattttattccagttgaactaaactaaggaaccacccattagcccagttcttaggagaggtacttcaaacttgaaagaatatgtatttcggtaacttatatgtggctaaccatcaaatacatagtcatctaagctaaactttctgtatttatacagttaaacttataaaccaaaaattttaatgaggttaattttaaatatattttagaaattacagtttgtatctgtttcttagtaggtgtggcctttaaaatatgtgcttattcattgttaaattccagaataatagagtaatacttaatactgtacattcccacttacgtatattttattaaaatttataagcaagaaattatacataagtggtcatgatcttagggagacaaagaatttctcttagaaaagagaagtaatggtaatgtaaataaaaatactgtttatattcacatgattttaagaaaactgtaaaagcaaagattttgtagtaatgacacaaatgtaacaaatagatgttttcttaaaattggcagtcagtataattatgtttctgcctatgatgttgaggaagttgtatcagtctgattcttagttttttcatctgttaagtagaacgtactattacttaccttaaagagtggctttgagaattttgtaaggaacaaacatgtttttggttctggaatataggaggtgctcaataaaagttgactctgactggcaaataa

SEQ ID NO: 31473 - DNA, 3549 bp, Homo sapiens
  source 1..3549: mol_type = unassigned DNA
agacgcagtctccgtcgttgacgttagtcgcagtcttcgctgctaacgttttgttatgagttgctaaaatggtgaaatgctgctccgccattggatgtgcttctcgctgcttgccaaattcgaagttaaaaggactgacatttcacgtattccccacagatgaaaacatcaaaaggaaatgggtattagcaatgaaaagacttgatgtgaatgcagccggcatttgggagcctaaaaaaggagatgtgttgtgttcgaggcactttaagaagacagattttgacagaagtgctccaaatattaaactgaaacctggagtcataccttctatctttgattctccatatcacctacaggggaaaagagaaaaacttcattgtagaaaaaacttcaccctcaaaaccgttccagccactaactacaatcaccatcttgttggtgcttcctcatgtattgaagaattccaatcccagttcatttttgaacatagctacagtgtaatggacagtccaaagaaacttaagcataaattagatcatgtgatcggcgagctagaggatacaaaggaaagtctacggaatgttttagaccgagaaaaacgttttcagaaatcattgaggaagacaatcagggaattaaaggatgaatgtctgatcagccaagaaacagcaaatagactggacactttctgttgggactgttgtcaggagagcatagaacaggactatatttcatgaaataatttcatgttacgttccacctaaaattgtcattggtacaaatttttataaaatctcatttaccatcactaaataatatccatcatttaaagtgctgctttggattctctggagcattatgcattatagttgttatccaaagacttttttgaaaatatgcagaaatttgtggtaattatgtatttgtgtcttgtgacaattatgttttatagacctacactagtgccaggtcactattgtaagatgttaaaatctcaagaaaatttcacagagctaaagaaatgatgtcaaattagtcacattaagctatagtagaaggaattggacacttctccagatatttggcttcaaaggagtacctttacttacatgtgctttatggtaagtacattgaattttactttaaatgcattttactacaaagcacaattcatttgtaatgcatatccatcttggattcaatccaaggtgctttagctatcagtagtaccaaaggatctttttacaaggcttcctgtggtattgactctgagaataacacatagtgaagatctgtgggcttttaaaattgttcacagccaatttaagaagacccctcatgaagtctcagttttcagtacagtacatcattcctcctcactaggagcactttgatgtaaaccagaatagctttaaaaagacaaaaaggatcgtagatctgatttttaaatggttggttgctctgacagatctgaacactttgcttcatgactatttcgtcataaaggtatatgtttaaaatctgaatggcagtactagctctatacttttaatactgctttgtattttatatgtaaagtagtattgctgacattttaaaaaaatacaaaatacaaaagaaaccattagaaattaataactgtggctcttccagttgaaataggaattggagagaaaggattagaatattttaattaggggagtagattattgtccaaaggcttttatttagagaaacgggtaattaaaacagcagctttagaatagcttcttactgaatatgcaaaagaataattccttgttatttcctaattgatccaagtctcataaatttagcttttgtcataattccttaccgaaaacaactgaaattgagagtcataaatactgtgggttagaataaaaaccatttgccaaagcaacactctacttagaagcacatgtacatacatggacctcattcagaagtccatgttgtagcagttagaatttgagtatcagccatttcattgtagtaacaaaaattgaattgcattttgtgctcagttgtttattgtaattttatttttgttacattaatattagttaagatatggtcacttgaattttttgtatttaagaattttctgttttaatgcatgttatacttttatgtaggattccaaaccttccctctaaatgggatttaacccacatctgcgagatcagcgttatgctaagaggaaatcactgaggccatatctttttacaatctgaaaaaaaagtagtaaaaaggtagttaaaaaaaaaaaaggccgggtggtggctcatacctgtaatcctagcactttgggaggccaaggcaggcagatcacttgaggtcaggggttcaaaaccagcctggccaagatggtgaaaccccatctctgctaaaaatacaaaaaaaaattagccgggcatggtggcacgtgcctgtaatcccagctacttgggagactgaggcaggagaattgcttgaacccgggaggcggagattgcagtgagccaagatcacgccgttgcactccagcctgagcaacagagcaagactccatctcaaaaaaacaaaactactttcattaattacccattatttattttagttacttaattttgagttcataaatggccaccctaatggaaagtttgggtatgatcttaggttttatggagatgttttcaatagagattatttttccctcaccctatttgtgaatatataaattaaagtaagacaatggagtaagtaagagggtagatccaaacacagtatgtctaaattctagcactctactggctgcttagaatacaccaaacctggaagacctttccaagagtaaaatcccagtctgccactatcaaaattgccacagtcacttttactacttgtgttcatagtagactcagcacttctttttcactggacctagtataactgagaaataaataactgtgtgcaaaatattggtatcattaaggacccagagctgcccattttctctttgttctaatagggaagcaattactgatagaaatgtgagattaaaaatagggtcctccctgctgctccaaacaaatgcctaaacacagtatgtatctcagtcctctgttcccagagattccaccctagcccaggaaagaactggcctgtgtaaagcaaaacccaagtcatccccctccagaaatttctctggcagccaagcctgaccctaagggttccactttgctttaaaagctaggagtggcctctagagccaggaacacattaatacaacagttcaacctcagcaccaagtcaggtacgaagcgcttgatacgtggaatttttctctatatcaagtttaaatttctggaaatagactttggttgctaatgacaattacagttataccatagtctgtaatttgagaaaaggtgaaatgtatttaatatatatttagttttaataaaaagataaaattattacagaaataattgagagagagaaaatctattataatttatttgaaaaataaaacattttatccagtaa

SEQ ID NO: 31474 - DNA, 543 bp, Homo sapiens
  source 1..543: mol_type = unassigned DNA
atagtgctcgcagccccgctgacctcgctcttgaccgctggcgccatcttcccgggccgtcgccgccatctcctccacctcccctcacattccaccgatccttcccccaggataaaaaccacgcccagagaagctgcgcctctctagcacacccctcccagccccagcggccactagcgacaatatggctcctaagcacgtgacccggggcagacggatttccggttcccggggctacgaggcggaagcgaaggcagacgcagtctccgtcgttgacgttagtcgcagtcttcgctgctaacgtcaccagctaaaccgtgaggacaaaaagtaaggaaaaatagacacactccaccatgacctcatggaactaacaagactggtggaggaggaagacattaataagagcaatcactgcaataaatttttgttatgagttgctaaaatggtgaaatgctgctccgccattggatgtgcttctcgctgcttgccaaattcgaagttaaaaggactgacatttcacgtattccccacagatgaaaa

SEQ ID NO: 31475 - DNA, 313 bp, Homo sapiens
  source 1..313: mol_type = unassigned DNA
cagagaccactgtgcaagcctaatcacttcccaagaagggttttgctttaaagttttgttatgagttgctaaaatggtgaaatgctgctccgccattggatgtgcttctcgctgcttgccaaattcgaagttaaaaggactgacatttcacgtattccccacagatgaaaacatcaaaaggaaatgggtattagcaatgaaaagacttgatgtgaatgcagccggcatttgggagcctaaaaaaggagatgtgttgtgttcgaggcactttaagaagacagattttgacagaagtgctccaaatattaaactg

SEQ ID NO: 31476 - DNA, 1161 bp, Homo sapiens
  source 1..1161: mol_type = unassigned DNA
ggtaataactcttaggttgcctgttttcccccaatcgctacccgcccaaatctcagggcgtagttcggcgcgaggttggcggcagcggcgcggagacgctggttggccccagaggaaaggacgctcactgggcgcatcgttacctgtgacgggtcctccctctctccctccggtggcggggagcctggagaaaggggcggagctcggcccgggccctgggctcagcgggtcccgcgcgctgctcttggacgccagggtgctcgctggcacctcgaagtgcttcttgcttcctccctttcccgtttacttgctgttctttcaaaatatgtactgacattcactattgccagtcaccagctaaaccgtgaggacaaaaagtaaggaaaaatagacacactccaccatgacctcatggaactaacaagactggtggaggaggaagacattaataagagcaatcactgcaataaatttttgttatgagttgctaaaatggtgaaatgctgctccgccattggatgtgcttctcgctgcttgccaaattcgaagttaaaaggactgacatttcacgtattccccacagatgaaaacatcaaaaggaaatgggtattagcaatgaaaagacttgatgtgaatgcagccggcatttgggagcctaaaaaaggagatgtgttgtgttcgaggcactttaagaagacagattttgacagaagtgctccaaatattaaactgaaacctggagtcataccttctatctttgattctccatatcacctacaggggaaaagagaaaaacttcattgtagaaaaaacttcaccctcaaaaccgttccagccactaactacaatcaccatcttgttggtgcttcctcatgtattgaagaattccaatcccagttcatttttgaacatagctacagtgtaatggacagtccaaagaaacttaagcataaattagatcatgtgatcggcgagctagaggatacaaaggaaagtctacggaatgttttagaccgagaaaaacgttttcagaaatcattgaggaagacaatcagggaattaaaggatgaatgtctgatcagccaagaaacagcaaatagactggacactttctgttgggactgttgtcaggagagcatagaacaggactatatttcatga

SEQ ID NO: 31477 - DNA, 1825 bp, Homo sapiens
  source 1..1825: mol_type = unassigned DNA
cacagccagtgtactggatgcctgattaagcgtcatggggtctttcatccagactgcgttttcattattcgctgaaacatacaggttttaatttttacgaggctaaggccacggccgcctcacctcggtttttgccgccacctagaggaactatgtgcgccccaacggttgcccggatgtaggcgtagggtggagccgtaagagattgactagccagttgatttggttggcgcaggctcagaaacgccgtgacgccgcccttccccccaacacgtgatgaaagtcggggtgacgaagggccggctttgcgcaggtgcacagtactcgctatggcccattcgtcacgtgacgagggcgggactgtggcactgtggaggggcgcctagtaggcaggcgctctcagctctctccccggtacgtgacgagactccacggacgtcacgtgaggcaggcggcgagcgcgggtggggcggggttaggcggcgctccgcgagaaccaaagtgcagccgctgacccggcaaaactcagcgggggctggatagccatgcccaagtactgcagggcgccgaactgctccaacactgcgggccgcctgggtgcagacaaccgccctgtgagcttctacaagttcccactgaaggatggtccccggctgcaggcctggctgcagcacatgggctgtgagcactgggtgcccagctgccaccagcacttgtgcagcgagcacttcacaccctcctgcttccagtggcgctggggtgtgcgctacctgcggcctgatgcagtgccctccatcttctcccggggaccacctgccaagagtcagcggaggacccgaagcacccagaagccagtctcgccgccgcctcccctacagaagaatacacccctgccccagagccctgccatcccagtctctggcccagtgcgcctagtggtgctgggccccacatcggggagccccaagactgtggccaccatgctcctgacccccctggcccctgcgccaactcctgagcggtcacaacctgaagtccctgcccaacaggcccagaccgggctgggcccagtgctgggagcactgcaacgccgggtgcggaggctgcaacggtgccaggagcggcaccaggcgcagctgcaggccctggaacggctggcacagcagctacacggggagagcctgctggcacgggcacgccggggtctgcagcgcctgacaacagcccagacccttggacctgaggaatcccaaaccttcaccatcatctgtggagggcctgacatagccatggtccttgcccaggaccctgcacctgccacagtggatgccaagccggagctcctggacactcggatccccagtgcataaggatcaagacagacaatgtcgagggacaaaagatagaagatggaggaggaaagacattatacgtgggcttggcccagccccaccgcccacgcctgggtagtagcagtgcctccctcaagggcctgggttctaccaccccactcctagggatctcttgaaccttaggggtgacctgggcccaagtctctcatcagcccccaatcccctgggtaccaggcttctgccacccccggctcagatctttgcaaatcagtacgacagcctcagagcagagcaagggttgtttgggagaatcatacctggttctaaggagtcccacgctttttgccaagcctggtactgagttcatgataccatggtggacacagctgagaaaatccctgccctcatggtgctcattctacttgagtagacgatgaactagtaaacaaataaacaagaacactgcagacatg

SEQ ID NO: 31478 - DNA, 1674 bp, Homo sapiens
  source 1..1674: mol_type = unassigned DNA
atgcctgattaagcgtcatggggtctttcatccagactgcgttttcattattcgctgaaacatacaggttttaatttttacgaggctaaggccacggccgcctcacctcggtttttgccgccacctagaggaactatgtgcgccccaacggttggccggctttgcgcaggtgcacagtactcgctatggcccattcgtcacgtgacgagggcgggactgtggcactgtggaggggcgcctagtaggcaggcgctctcagctctctccccggtacgtgacgagactccacggacgtcacgtgaggcaggcggcgagcgcgggtggggcggggttaggcggcgctccgcgagaaccaaagtgcagccgctgacccggcaaaactcagcgggggctggatagccatgcccaagtactgcagggcgccgaactgctccaacactgcgggccgcctgggtgcagacaaccgccctgtgagcttctacaagttcccactgaaggatggtccccggctgcaggcctggctgcagcacatgggctgtgagcactgggtgcccagctgccaccagcacttgtgcagcgagcacttcacaccctcctgcttccagtggcgctggggtgtgcgctacctgcggcctgatgcagtgccctccatcttctcccggggaccacctgccaagagtcagcggaggacccgaagcacccagaagccagtctcgccgccgcctcccctacagaagaatacacccctgccccagagccctgccatcccagtctctggcccagtgcgcctagtggtgctgggccccacatcggggagccccaagactgtggccaccatgctcctgacccccctggcccctgcgccaactcctgagcggtcacaacctgaagtccctgcccaacaggcccagaccgggctgggcccagtgctgggagcactgcaacgccgggtgcggaggctgcaacggtgccaggagcggcaccaggcgcagctgcaggccctggaacggctggcacagcagctacacggggagagcctgctggcacgggcacgccggggtctgcagcgcctgacaacagcccagacccttggacctgaggaatcccaaaccttcaccatcatctgtggagggcctgacatagccatggtccttgcccaggaccctgcacctgccacagtggatgccaagccggagctcctggacactcggatccccagtgcataaggatcaagacagacaatgtcgagggacaaaagatagaagatggaggaggaaagacattatacgtgggcttggcccagccccaccgcccacgcctgggtagtagcagtgcctccctcaagggcctgggttctaccaccccactcctagggatctcttgaaccttaggggtgacctgggcccaagtctctcatcagcccccaatcccctgggtaccaggcttctgccacccccggctcagatctttgcaaatcagtacgacagcctcagagcagagcaagggttgtttgggagaatcatacctggttctaaggagtcccacgctttttgccaagcctggtactgagttcatgataccatggtggacacagctgagaaaatccctgccctcatggtgctcattctacttgagtagacgatgaactagtaaacaaataaacaagaacactgc

SEQ ID NO: 31479 - DNA, 971 bp, Homo sapiens
  source 1..971: mol_type = unassigned DNA
aaagtgcagccgctgacccggcaaaactcagcgggggctggatagccatgcccaagtactgcagggcgccgaactgctccaacactgcgggccgcctgggtgcagacaaccgccctgtgagcttctacaaagtcagcggaggacccgaagcacccagaagccagtctcgccgccgcctcccctacagaagaatacacccctgccccagagccctgccatcccagtctctggcccagtgcgcctagtggtgctgggccccacatcggggagccccaagactgtggccaccatgctcctgacccccctggcccctgcgccaactcctgagcggtcacaacctgaagtccctgcccaacaggcccagaccgggctgggcccagtgctgggagcactgcaacgccgggtgcggaggctgcaacggtgccaggagcggcaccaggcgcagctgcaggccctggaacggctggcacagcagctacacggggagagcctgctggcacgggcacgccggggtctgcagcgcctgacaacagcccagacccttggacctgaggaatcccaaaccttcaccatcatctgtggagggcctgacatagccatggtccttgcccaggaccctgcacctgccacagtggatgccaagccggagctcctggacactcggatccccagtgcataaggatcaagacagacaatgtcgagggacaaaagatagaagatggaggaggaaagacattatacgtgggcttggcccagccccaccgcccacgcctgggtagtagcagtgcctccctcaagggcctgggttctaccaccccactcctagggatctcttgaaccttaggggtgacctgggcccaagtctctcatcagcccccaatcccctgggtaccaggcttctgccacccccggctcagatctttgcaaatcagtacgacagcctcagagcagagcaagggttgtttgggaga

SEQ ID NO: 31480 - DNA, 3808 bp, Homo sapiens
  source 1..3808: mol_type = unassigned DNA
gattcatgctgtcgcgggaaccccgaaggtggggccccacgtaacaagaagatgacccgaagttgctccgcagtgggctgcagcacccgtgacaccgtgctcagccgggagcgcggcctctccttccaccaatttccaactgataccatacagcgctcaaaatggatcagggctgttaatcgtgtggaccccagaagcaaaaagatttggattccaggaccaggtgctatactgtgttccaaacattttcaagaaagtgactttgagtcatatggcataagaagaaagctgaaaaaaggagctgtgccttctgtttctctatacaagattcctcaaggtgtacatcttaaaggtaaagcaagacaaaaaatcctaaaacaacctcttccagacaattctcaagaagttgctactgaggaccataactatagtttaaagacacctttgacgataggtgcagagaaactggctgaggtgcaacaaatgttacaagtgtccaaaaaaagacttatctccgtaaagaactacaggatgatcaagaagagaaagggtttacgattaattgatgcacttgtagaagagaaactactttctgaagaaacagagtgtctgctacgagctcaattttcagattttaagtgggagttatataattggagagaaacagatgagtactccgcagaaatgaaacaatttgcatgtacactctacttgtgcagtagcaaagtctatgattatgtaagaaagattcttaagctgcctcattcttccatcctcagaacgtggttatccaaatgccaacccagtccaggtttcaacagcaacattttttcttttcttcaacgaagagtagagaatggagatcagctctatcaatactgttcattgttaataaaaagtatgcctctcaagcaacagcttcagtgggatcctagcagtcacagtttgcaggggtttatggactttggtcttggaaaacttgatgctgatgaaacgccacttgcttcagaaactgttttgttaatggcagtgggtatttttggccattggagaacacctcttggttatttttttgtaaacagagcatctggatatttgcaggctcagctgcttcgtctgactattggtaaactgagtgacataggaatcacagttctggctgttacatctgatgccacagcacatagtgttcagatggcaaaagcattggggatacatattgatggagacgacatgaaatgtacatttcagcatccttcatcttctagtcaacagattgcatacttctttgactcttgccacttgctaagattaataagaaatgcatttcagaattttcaaagcattcagtttattaatggtatagcacattggcagcacctcgtggagttagtagcactggaggaacaggaattatcaaatatggaaagaataccaagtacacttgcaaatttgaaaaatcatgtactgaaagtgaatagtgccacccaactctttagtgagagtgtagccagtgcattagaatatttgttatccttagacctgccaccttttcaaaactgtattggtaccatccattttttacgtttaattaacaatctgtttgacatctttaatagtaggaactgttatggaaagggacttaaagggcctctgttgcctgaaacttacagtaaaataaaccacgtgttaattgaagccaagactatttttgttacattatctgacactagcaataatcaaataattaaaggtaagcaaaaactaggattcctgggatttttgctcaatgctgagagcttaaaatggctctaccaaaattatgttttcccaaaggtcatgccttttccttatcttctgacttacaaattcagtcatgatcatctggaattatttctaaagatgcttaggcaggtattagtaacaagttctagccctacctgcatggcattccagaaagcttactataatttggagaccagatacaaatttcaagatgaagtttttctaagcaaagtaagcatctttgacatttcaattgctcgaaggaaagacttggcgctttggacagttcaacgtcagtatggtgtcagcgttacaaagactgtctttcacgaagagggtatttgtcaagactggtctcattgttcactaagtgaggcattactagacctgtcagatcataggcgaaatctcatctgttatgctggttatgttgcaaacaagttatcagctcttttaacttgtgaggactgcatcactgcactgtatgcatcggatctcaaagcctctaaaattgggtcactattatttgttaaaaagaagaatggtttgcattttccttcagaaagtctgtgtcgggtcataaatatttgtgagcgagttgtaagaacccattcaagaatggcaatttttgaactagtttctaaacaaagggaattgtatcttcaacagaaaatattatgtgagctttctgggcatattaatctttttgtagatgtgaataagcatctctttgatggagaagtgtgtgccatcaatcactttgtcaagttgctaaaggatataataatctgtttcttaaatatcagagctaaaaatgttgcacagaatcctttaaaacatcattcagagagaactgatatgaaaactttatcaaggaaacactggtcatctgtacaggattataaatgttcaagttttgctaataccagtagtaaattcaggcatttgctaagtaacgatggatatccattcaaatgagagacctaaaatatattaacattttaattaagaatacttgatcaacattttttgaagttcaatttaccatattttataaattgcgcattctgcacagtggacaagtttgcaattctgacttattaaaatttcaaattctgcatatcacaaaatctccttatacttttggtatggcttgcagcatttatgagttttccaaaatatagaaagcagtaggtcagtaggagcaaactagccaacaggtactgtctttgaatttactactgtaagactaagcagtgttactggacacagttttaacttgttcaatctgcttcaaaaacaagaaaaacaacaactatgagttatcaaaatattgactccatttatgactagactacatttctgaaagatctttggtttatgattcttaagaatattgacaatacctataaaactttgaagataacttttacttaaatatgaaaattatagtttgaaaattaggctcaagcaaatatcaaatactgcaaaaatccccttgtcccaggataccctaaaatagaagtgcttaaactttgtcaggcagaaggtaaagtacatgagccatgagattcttccttgtgctgcagccacgctggggagtgcaatctggaaagaacatacctaatgtgtttttcaccatccattatctctgaactttgaaatattacttttgaataataggctggacacttagtttgacttgaaagagctcaatgctcatcggaaaacagggagaaacctaatctgaagatggaagcatactaaggacaattttctccactcacatccacatttgaaaagagggacagaaaaacataggtaactctactttcacaaatgaggatagtttaacggatagaagaaacaagcacattattcacctgtgttgtaaaacatctactcttttttgtcactgaataagtgttcccaaagtacagttaatcctaatatgaaaacttagaattgtaaaagattaatgataacgtaaaagtatattgattaaaattccccttacaaagta

SEQ ID NO: 31481 - DNA, 3627 bp, Homo sapiens
  source 1..3627: mol_type = unassigned DNA
attcatgctgtcgcgggaaccccgaaggtggggccccacgtaacaagaagatgacccgaagttgctccgcagtgggctgcagcacccgtgacaccgtgctcagccgggagcgcggcctctccttccaccaatttccaactgataccatacagcgctcaaaatggatcagggctgttaatcgtgtggaccccagaagcaaaaagatttggattccaggaccaggtgctatactgtgttccaaacattttcaagaaagtgactttgagtcatatggcataagaagaaagctgaaaaaaggagctgtgccttctgtttctctatacaagattcctcaaggtgtacatcttaaaggtaaagcaagacaaaaaatcctaaaacaacctcttccagacaattctcaagaagttgctactgaggaccataactatagtttaaagacacctttgacgataggtgcagagaaactggctgaggtgcaacaaatgttacaagtgtccaaaaaaagacttatctccgtaaagaactacaggatgatcaagaagagaaagggtttacgattaattgatgcacttgtagaagagaaactactttctgaagaaacagagtgtctgctacgagctcaattttcagattttaagtgggagttatataattggagagaaacagatgagtactccgcagaaatgaaacaatttgcatgtacactctacttgtgcagtagcaaagtctatgattatgtaagaaagattcttaagctgcctcattcttccatcctcagaacgtggttatccaaatgccaacccagtccaggtttcaacagcaacattttttcttttcttcaacgaagagtagagaatggagatcagctctatcaatactgttcattgttaataaaaagtatgcctctcaagcaacagcttcagtgggatcctagcagtcacagtttgcaggggtttatggactttggtcttggaaaacttgatgctgatgaaacgccacttgcttcagaaactgttttgttaatggcagtgggtatttttggccattggagaacacctcttggttatttttttgtaaacagagcatctggatatttgcaggctcagctgcttcgtctgactattggtaaactgagtgacataggaatcacagttctggctgttacatctgatgccacagcacatagtgttcagatggcaaaagcattggggatacatattgatggagacgacatgaaatgtacatttcagcatccttcatcttctagtcaacagattgcatacttctttgactcttgccacttgctaagattaataagaaatgcatttcagaattttcaaagcattcagtttattaatggtatagcacattggcagcacctcgtggagttagtagcactggaggaacaggaattatcaaatatggaaagaataccaagtacacttgcaaatttgaaaaatcatgtactgaaagtgaatagtgccacccaactctttagtgagagtgtagccagtgcattagaatatttgttatccttagacctgccaccttttcaaaactgtattggtaccatccattttttacgtttaattaacaatctgtttgacatctttaatagtaggaactgttatggaaagggacttaaagggcctctgttgcctgaaacttacagtaaaataaaccacgtgttaattgaagccaagactatttttgttacattatctgacactagcaataatcaaataattaaaggtaagcaaaaactaggattcctgggatttttgctcaatgctgagagcttaaaatggctctaccaaaattatgttttcccaaaggtcatgccttttccttatcttctgacttacaaattcagtcatgatcatctggaattatttctaaagatgcttaggcaggtattagtaacaagttctagccctacctgcatggcattccagaaagcttactataatttggagaccagatacaaatttcaagatgaagtttttctaagcaaagtaagcatctttgacatttcaattgctcgaaggaaagacttggcgctttggacagttcaacgtcagtatggtgtcagcgttacaaagactgtctttcacgaagagggtatttgtcaagactggtctcattgttcactaagtgaggcattactagacctgtcagatcataggcgaaatctcatctgttatgctggttatgttgcaaacaagttatcagctcttttaacttgtgaggactgcatcactgcactgtatgcatcggatctcaaagcctctaaaattgggtcactattatttgttaaaaagaagaatggtttgcattttccttcagaaagtctgtgtcgggtcataaatatttgtgagcgagttgtaagaacccattcaagaatggcaatttttgaactagtttctaaacaaagggaattgtatcttcaacagaaaatattatgtgagctttctgggcatattaatctttttgtagatgtgaataagcatctctttgatggagaagtgtgtgccatcaatcactttgtcaagttgctaaaggatataataatctgtttcttaaatatcagagctaaaaatgttgcacagaatcctttaaaacatcattcagagagaactgatatgaaaactttatcaaggaaacactggtcatctgtacaggattataaatgttcaagttttgctaataccagtagtaaattcaggcatttgctaagtaacgatggatatccattcaaatgagagacctaaaatatattaacattttaattaagaatacttgatcaacattttttgaagttcaatttaccatattttataaattgcgcattctgcacagtggacaagtttgcaattctgacttattaaaatttcaaattctgcatatcacaaaatctccttatacttttggtatggcttgcagcatttatgagttttccaaaatatagaaagcagtaggtcagtaggagcaaactagccaacaggtactgtctttgaatttactactgtaagactaagcagtgttactggacacagttttaacttgttcaatctgcttcaaaaacaagaaaaacaacaactatgagttatcaaaatattgactccatttatgactagactacatttctgaaagatctttggtttatgattcttaagaatattgacaatacctataaaactttgaagataacttttacttaaatatgaaaattatagtttgaaaattaggctcaagcaaatatcaaatactgcaaaaatccccttgtcccaggataccctaaaatagaagtatattttgatgtttgtttattctacctcaaacagaggcttaagttttgaagtgtaaccagtttatacttcattttatacaaaacttattgctgagaagtctgaatattgtgctttttgttgtttgtaaatagaattgaatttaaatacaccaggataaatcttatttaaaggaagcctgtttgaaaatcaccaactttaacttattgcttatataaatccaagctctgtacctgatctttatgtaaagcaagattcatatgtgtagtatctaatgccctttggtgttacatttgactaaaatacaaatgtctgtatt

SEQ ID NO: 31482 - DNA, 2161 bp, Homo sapiens
  source 1..2161: mol_type = unassigned DNA
gaagctgcctccgccatcttggagatgggagacgggcgatggctgtggtccttctgctaatgcaaacaacaaaacgggcacactagtcacccccgagggaggccaccatcactgtaactgttggccaaagctacaaaagaagcgagggaatccaaccgagcgcagcgacactgagaacagcttcccctgccttctgcggcggcagaagtgaagtgcctgaggaccggaaggatggtgcagtcctgctccgcctacggctgcaagaaccgctacgacaaggacaagcccgtttctttccacaagtttcctcttactcgacccagtctttgtaaagaatgggaggcagctgtcagaagaaaaaactttaaacccaccaagtatagcagtatttgttcagagcactttactccagactgctttaagagagagtgcaacaacaagttactgaaagagaatgctgtgcccacaatatttctttgtactgagccacatgacaagaaagaagatcttctggagccacaggaacagcttcccccacctcctttaccgcctcctgtttcccaggttgatgctgctattggattactaatgccgcctcttcagacccctgttaatctctcagttttctgtgaccacaactatactgtggaggatacaatgcaccagcggaaaaggattcatcagctagaacagcaagttgaaaaactcagaaagaagctcaagaccgcacagcagcgatgcagaaggcaagaacggcagcttgaaaaattaaaggaggttgttcacttccagaaagagaaagacgacgtatcagaaagaggttatgtgattctaccaaatgactactttgaaatagttgaagtaccagcataaaaaaatgaaatgtgtattgatttctaatggggcaataccacatatcctcctctagcctgtaaaggagtttcatttaaaaaaataacatttgattacttatataaaaacagttcagaatatttttttaaaaaaaattctatatatactgtaaaattataaatttttttgtttgtaatttcaggttttttacattttaacaaaatattttaaaagttataaactaacctcagacctctaatgtaagttggtttcaagattggggattttggggtttttttttagtatttatagaaataatgtaaaaataaaaagtaaagagaatgagaacagtgtggtaaaagggtgatttcagtttaaaacttaaaattagtactgttttattgagagaatttagttatattttaaatcagaagtatgggtcagatcatgggacataacttcttagaatatatatatacatatgtacatattctcatatgtaaagtcacaaggttcatttatctttctgaatcagttatcaaagataaattggcaagtcagtacttaagaaaaaagatttgattatcatcacagcagaaaaaagtcattgcatatctgatcaataacttcagattctaagagtggattttttttttttacatgggctcctattttttcccctactgtcttgcattataaaattagaagtgtattttcagtggaagaaacatttttcaataaataaagtaaggcattgtcatcaatgaagtaattaaaactgggacctgatctatgatacgcttttttctttcattacaccctagctgaaggacatccagttccccagctgtagttatgtatctgccttcaagtctctgacaaatgtgctgtgttagtagagtttgatttgtatcatatgataatcttgcacttgactgagttgggacaaggcttcacataaaaaattatttcttcacttttaacacaagttagaaattatatcccatttagttaagtgcgtgatttatattcagaacaacctactatgtagcgtttattttactgaatgtggagatttaaacactgaggtttctgttcaaactgtgagttctgttctttgtgagaaattttacatatattggaagtgaaaatatgttctgagtaaacaaatattgctatgggagttatctttttagatttagaataactgttccaatgataattattacttttatatttcaaagtacactaagatcgttgaagagcaatagaacctttaagacagtattaaaggtgtgaaacaatggca

SEQ ID NO: 31483 - DNA, 1943 bp, Homo sapiens
  source 1..1943: mol_type = unassigned DNA
ggagatgggagacgggcgatggctgtggtccttctgctaatgcaaacaacaaaacgggcacactagtcacccccgagggaggccaccatcactgtaactgttggccaaagctacaaaagaagcgagggaatccaaccgagcgcagcgacactgagaacagcttcccctgccttctgcggcggcagaagtgaagtgcctgaggaccggaaggatggtgcagtcctgctccgcctacggctgcaagaaccgctacgacaaggacaagcccgtttctttccacaaaaagaagatcttctggagccacaggaacagcttcccccacctcctttaccgcctcctgtttcccaggttgatgctgctattggattactaatgccgcctcttcagacccctgttaatctctcagttttctgtgaccacaactatactgtggaggatacaatgcaccagcggaaaaggattcatcagctagaacagcaagttgaaaaactcagaaagaagctcaagaccgcacagcagcgatgcagaaggcaagaacggcagcttgaaaaattaaaggaggttgttcacttccagaaagagaaagacgacgtatcagaaagaggttatgtgattctaccaaatgactactttgaaatagttgaagtaccagcataaaaaaatgaaatgtgtattgatttctaatggggcaataccacatatcctcctctagcctgtaaaggagtttcatttaaaaaaataacatttgattacttatataaaaacagttcagaatatttttttaaaaaaaattctatatatactgtaaaattataaatttttttgtttgtaatttcaggttttttacattttaacaaaatattttaaaagttataaactaacctcagacctctaatgtaagttggtttcaagattggggattttggggtttttttttagtatttatagaaataatgtaaaaataaaaagtaaagagaatgagaacagtgtggtaaaagggtgatttcagtttaaaacttaaaattagtactgttttattgagagaatttagttatattttaaatcagaagtatgggtcagatcatgggacataacttcttagaatatatatatacatatgtacatattctcatatgtaaagtcacaaggttcatttatctttctgaatcagttatcaaagataaattggcaagtcagtacttaagaaaaaagatttgattatcatcacagcagaaaaaagtcattgcatatctgatcaataacttcagattctaagagtggattttttttttttacatgggctcctattttttcccctactgtcttgcattataaaattagaagtgtattttcagtggaagaaacatttttcaataaataaagtaaggcattgtcatcaatgaagtaattaaaactgggacctgatctatgatacgcttttttctttcattacaccctagctgaaggacatccagttccccagctgtagttatgtatctgccttcaagtctctgacaaatgtgctgtgttagtagagtttgatttgtatcatatgataatcttgcacttgactgagttgggacaaggcttcacataaaaaattatttcttcacttttaacacaagttagaaattatatcccatttagttaagtgcgtgatttatattcagaacaacctactatgtagcgtttattttactgaatgtggagatttaaacactgaggtttctgttcaaactgtgagttctgttctttgtgagaaattttacatatattggaagtgaaaatatgttctgagtaaacaaatattgctatgggagttatctttttagatttagaataactgttccaatgataattattacttttatatttcaaagtacactaagatcgttgaagagcaatagaacctttaagacagtattaaaggtgtgaaacaatgg

SEQ ID NO: 31484 - DNA, 5719 bp, Homo sapiens
  source 1..5719: mol_type = unassigned DNA
atacagctcttccgaggtggagagggctctcgccagctctgactgctgctgaacccggatcctgctcctcctcccagaggaggtctgcaccccggcttgcctcctcgctcacccactcctcgcccccgactccagcgactcccaccccggtaaggcctgcctcgaaagcggaaacggtccaaggcgaggtggctccgctcccagaaagacggccggggactgctttcggacagtgagctcgaaggcatccgtacagaaggcggatgagaccggaacggttctttgggtcggtagctgctgggtcccctgaggtggccccgctcagacgcgtgccgcgagcgtgagaaattcctcagctgctgctgagaagaggacgatgacgaggaagagccaccgcctccgccagatccaccgccccgggccgagtgaggaggccttcgccgcggatagggtaacagcccgccgccgctgctgctgctgctgctccgactccgtatctggctgttattatcgtcgtcactgatttccccatcttcaagctccccttcttccttcggcgagaggccactggaggccggggccggagtatctgcggtcgccatccggggagcagcgccttccacacaaccttagccctccgtccggggatccgcccgacaattgcctcgtttcccttctttcctaacggactgggtcggtgcggtcttaccctactcggacaccaagcggcctctgctccccaacttccccgcaccccagcaccccagctctctctcgccggaccgtcgcaacccagttccctttcctagcgcccccttgctcctcagcgatcggggttcttccgcctcgcgagaaagggactctggtagcggctgtacccgaaacgtcacttcctgcgacacgcaggaaacaaaggctcccagttcacgcgataataagaccaactcgatactcactaggatttgtagtctttcgtctttcttcgggtttactcttccggtcctagggtcacacccaccgcagggtctggcttggtacagttgggtgcatgcagaagtaggtggagctgctgttgcagccttgagagagttttattgtaaaactcttgtaatttatagtaatcggaggggaaaacacctcttccttttaattgctctgaggaccgctgccaaagaaacgcagtagatccgctccctcttgggggcggggagaaagaacgggttgtgtccgccatgttggtgaagtcaagcgaaggcgactagagctccaggagggccagttctgtgggctctagtcggccatattaataaagagaaagggaaggctgaccgtccttcgcctccgcccccacatacacaccccttcttcccactccgctctcacgactaagctctcacgattaaggcacgcctgcctcgattgtccagcctctgccagaagaaagcttagcagccagcgcctcagtagagacctaagggcgctgaatgagtgggaaagggaaatgccgaccaattgcgctgcggcgggctgtgccactacctacaacaagcacattaacatcagcttccacaggtttcctttggatcctaaaagaagaaaagaatgggttcgcctggttaggcgcaaaaattttgtgccaggaaaacacacttttctttgttcaaagcactttgaagcctcctgttttgacctaacaggacaaactcgacgacttaaaatggatgctgttccaaccatttttgatttttgtacccatataaagtctatgaaactcaagtcaaggaatcttttgaagaaaaacaacagttgttctccagctggaccatctaatttaaaatcaaacattagtagtcagcaagtactacttgaacacagctatgcctttaggaatcctatggaggcaaaaaagaggatcattaaactggaaaaagaaatagcaagcttaagaagaaaaatgaaaacttgcctacaaaaggaacgcagagcaactcgaagatggatcaaagccacgtgtttggtaaagaatttagaagcaaatagtgtattacctaaaggtacatcagaacacatgttaccaactgccttaagcagtcttcctttggaagattttaagatccttgaacaagatcaacaagataaaacactgctaagtctaaatctaaaacagaccaagagtaccttcatttaaatttagcttgcacagagcttgatgcctatccttcattcttttcagaagtaaagataattatggcacttatgccaaaattcattatttaataaagttttacttgaagtaacattactgaatttgtgaagacttgattacaaaagaataaaaaacttcatatggaaattttatttgaaaatgagtggaagtgccttacattagaattacggacttaaaaattttgctaataaattgtgtgtttgaaaggtgttttttgtttttgtctttttaaactactgttaaaagaacagcttatgataagtaatatgtttaacttagagaagaattttttcctgtaccaaagttggcatattgcattctaaataagatgctaaataagagttaaccaacattcaacatgaccttaaaactgctgggttttgtattaattaaattataattggcactgtgatttgaaaaatttatagaaaaaaaggtacagggcaagtttttaaattaaaactttctatattttgttttaccagtaaaagtgagcttatcatggcctctctcataagaatgattttaaaataggttgtaaaatattttgaaaatatttgaatgtgaagtaccattgagtcatccaaactaggtaaggcctcaagtactttaaactagtaaaatctagtagctgataatattcacctaagtaagtgttgtaaaataattcagagttcaggacctagcttagataaatgtatactactctttttctcataataaaaatcttacatttccaacttcaaaattggtgcttccatatttgttgataaccaaaactcctaaggttttttgttttctttttaactactttccaaatgcatactatacctcagaaatagtgtatcaatatagtgggctttttttttcctcttcataaacccacagtaaaatttaatcacaggaaactacttatatcttcacactttgtattgataacttaaaatggcatcagtttatcttagacatcagcttgctttttatctccttttttagtgagtgaaatagagcaactagcatgcctgtgttcccagctacttgggaggctaaggtgggaagatcaattgaacctaggaggttgaggctatagtgagctgtgattgcacgactgcactccagcctgggcaatggagtgagactcctgtctctaaaacagcaacaacaaaaataaagcaaccatagtgcataagggaaattaaatgttccctatagaaatatgtgtatgtctgtgatagtggtatgcaaatgctaattattttataaaataaaagttcagaactattcttatcattgccacttgaacaattaaagggtttgctttatttcactaatgtttaataggaaccctttgcttcaaacagctttgttgaaatcatgtaaaaatttgttaatagagaatcaagttatttaactcaacttatttaattcaagcttgtgatactaacatacaaaggtagcataaaccaagtcataaattgctgtaatctttcctgtaaagtaatagctacttcatgatttttttaaaaatttcatttttttgctatttaggattgcatttgcttggctcctagtaacaattcttttacagtattagcactctctttactaaggaatgcctcccaaggaaatgcaaaggtaggaaaagtctcttagaatgcccatgaggtatttaaaacagatatttatgaaaatctttttgtgaatgttataaatcttgctagttattttatctttatcttaagtattagatgtagttccttggaattgtcattacatatttatttttttctagtatggtttcaaataactttttgccaacatataatcatcatcaaacattcactgaccatatctattttataactcaaaataagttggacaaataatcattttaataaaaactattttttccaagtataaccactgtcatgtggttcacccttcaccccagatacaaaacacttatttgtgtagcccagttcccatctacagtaataccttgaaaccttaataaattttaaaaatcataaaaataaaatattgtaaaatacaacaaattttggacaaggttacttcatcttcattcattattacctgacagtattaaactactactcaataattttagagtaaacttttctgtgttttctccgtgattttcattgtgctgtcctgacaacatgctccaaactctttgcatcaaattgttttattaacatacatttgtctaccttaaaactagctttattcacagagaaaaacctaaaaggagtctattaaaatgctgctttcagtttgatagttttttttttaatcactctgaccataaactaactgaaattataatggattttttttcctctcccggtcacaacacagatcttctgttcatttgttctctgtctactgggcaccaacctctacaaagaaccagccaaaggctaggtacttgatataaaaaggaatattacattattttctgccctcaagttgctctatctcctgaaagaaacaagtaatatttataatacaatatgataaatgctacaaaagaaatagctgtaaagtcctttggtaaatgctgttgaattggaattcagtaagaactataaactgtagacctttttataatcaaatgcttttgtcttgaaacaaaacagattcctccttatattgacttagcaaaggaggtacaaggacattggcatttgacctgaattatggtgttttattgaatgagctataagacaacatttttaccctttaaaatgaacactgaacaaatgtgttaatggtatctttgttaaaaggaaaacatagctataaataaaatactacatcgaaatccagcactggagttcatttgaaatttgatattttgtgtaaaataacaaacctattaacacagatttttaaaataactcagaatcgtataaagcactttggtacttatttgttctcttttcccttacattctgtgtggtaggtggtattatctctgatttacacatgaagacatccttgttaatgcaatttatttattcattcgggcatttactgtgtgccaacttgcaaaaggaatagaaatgtctgtgatctagatagttctagattgaacatagattttctgccaacaaatcctctctgctgttcacattatcctttgtttaacgtatgaaccaggttactaaaataggataaatcatgtgtcttaaaatatgaaaatagtaaagtctttgaggtcacttgatcttctctaagtagactttataatattgtgttttatctcatttctcaatattagaatacgggtagattttaattttgctataatataggaaatggttcatctttgtaccaaaatattgcattcttctgatatttagacagttggaaactttctaaaattgaggattttgtagtgtatactaaataattgcatattcaaaaaaatgtattctgagtatggtgatattaaacatttttccccaa

SEQ ID NO: 31485 - DNA, 1366 bp, Homo sapiens
  source 1..1366: mol_type = unassigned DNA
ttccagttgtccaagcctgtgagtggctatgcgtcctggttgggtgctcaaagcaaggaggtgaaaggcgaccagcattggcgaatggggtccctcccctctccgcaggccccgccgccgccgccatctttgttgggggcagccaggcctggctcgagatgccgaagtcgtgcgcggcccggcagtgctgcaaccgctacagcagccgcaggaagcagctcaccttccaccggtttccgttcagccgcccggagctgctgaaggaatgggtgctgaacatcggccggggcaacttcaagcccaagcagcacacggtcatctgctccgagcacttccggccagagtgcttcagcgcctttggaaaccgcaagaacctaaagcacaatgccgtgcccacggtgttcgcctttcaggaccccacacagcaggtgagggagaacacagaccctgccagtgagagaggaaatgccagctcttctcagaaagaaaaggtcctccctgaggcgggggccggagaggacagtcctgggagaaacatggacactgcacttgaagagcttcagttgcccccaaatgccgaaggccacgtaaaacaggtctcgccacggaggccgcaagcaacagaggctgttggccggccgactggccctgcaggcctgagaaggacccccaacaagcagccatctgatcacagctatgcccttttggacttagattccctgaagaaaaaactcttcctcactctgaaggaaaatgaaaagctccggaagcgcttgcaggcccagaggctggtgatgcgaaggatgtccagccgcctccgtgcttgcaaagggcaccagggactccaggccagacttgggccagagcagcagagctgagccccacaggctccggacgcagaggtggcagtggcaccagggccggcagagctttggagctctggctgtggacatttttgtctgctgtggacactgagaaagttggccatgaggcctgcttggccggggatcgagacagtagccaagctccccggcgagagccccaatgccgtctgggggacgtttagaggcgtggcactaggagtgcacatctgtgagcatgacaagcttatcctcccatggtaacagaagtccaggctgaggctgattctggacgctgtcctttcagcacacgcagagcaaagatcgttggaagccccagtgtgggagatgctcctcagggaggaagccatgtgagggggctggctctgtggcgggtgagtggtcccctcctccatcagcctggacagccgctcggggttctaaggagtgactcctgtcccggcctggtgtgagtgggcagtgtaataaagtgtctttctatacgg

SEQ ID NO: 31486 - DNA, 1046 bp, Homo sapiens
  source 1..1046: mol_type = unassigned DNA
ccgccatctttgttgggggcagccaggcctggctcgagatgccgaagtcgtgcgcggcccggcagtgctgcaaccgctacagcagccgcaggaagcagctcaccttccaccggtttccgttcagccgcccggagctgctgaaggaatgggtgctgaacatcggccggggcaacttcaagcccaagcagcacacggtcatctgctccgagcacttccggccagagtgcttcagcgcctttggaaaccgcaagaacctaaagcacaatgccgtgcccacggtgttcgcctttcaggaccccacacaggtgagggagaacacagaccctgccagtgagagaggaaatgccagctcttctcagaaagaaaaggtcctccctgaggcgggggccggagaggacagtcctgggagaaacatggacactgcacttgaagagcttcagttgcccccaaatgccgaaggccacgtaaaacaggtctcgccacggaggccgcaagcaacagaggctgttggccggccgactggccctgcaggcctgagaaggacccccaacaagcagccatctgatcacagctatgcccttttggacttagattccctgaagaaaaaactcttcctcactctgaaggaaaatgaaaagctccggaagcgcttgcaggcccagaggctggtgatgcgaaggatgtccagccgcctccgtgcttgcaaagggcaccagggactccaggccagacttgggccagagcagcagagctgagccccacaggctccggacgcagaggtggcagtggcaccagggccggcagagctttggagctctggctgtggacatttttgtctgctgtggacactgagaaagttggccatgaggcctgcttggccggggatcgagacagtagccaagctccccggcgagagccccaatgccgtctgggggacgtttagaggcgtggcactaggagtgcacatctgtgagcatgacaagcttatcctcccatggtaacagaagtccaggctgaggctgattctggacgctgtcctttcagca

SEQ ID NO: 31487 - DNA, 2053 bp, Homo sapiens
  source 1..2053: mol_type = unassigned DNA
gttgggggcagccaggcctggctcgagatgccgaagtcgtgcgcggcccggcagtgctgcaaccgctacagcagccgcaggaagcagctcaccttccaccggtttccgttcagccgcccggagctgctgaaggaatgggtgctgaacatcggccggggcaacttcaagcccaagcagcacacggtcatctgctccgagcacttccggccagagtgcttcagcgcctttggaaaccgcaagaacctaaagcacaatgccgtgcccacggtgttcgcctttcaggaccccacacagcaggtgagggagaacacagaccctgccagtgagagaggaaatgccagctcttctcagaaagaaaagacttcaccctgccgttcccaggtcctccctgaggcgggggccggagaggacagtcctgggagaaacatggacactgcacttgaagagcttcagttgcccccaaatgccgaaggccacgtaaaacaggcaatgttgtttaatgtagaaaatggaaccccagcttcacgtgaagccttgtggttgagtgaggagtgaaggatggggaggaggcctctggggaaggggttccctccctcctgaagatgaacacacaatacacggaagagcgccagcctctgctttcaggaaaggtttattgtggtgagtgccttctgtacagtcgactgcaaatgaaacgcagaggatgggtgcccagaagcacctgcggcagaggcgcacgggaagcccggggcccaggctcatgcaacacgacgctcaccgcggctcgggccgtggggccgtcagagaaacctttttaaaaaatggagatgaatgttacagaattggacaacccgaactgcttttcaaaaccagaggaaggaggttcttagccgttactcagataccagtgctggggagggaggcctgacttcagcaacagctgtgggtgggctggaggccggcgcagcttggggccccccgcgccagctgtctcagccaccacctgtgcggcgcttgctccgaggggtcagcaagagcaactgatggctgccacttccaggccccgagagacaggcctcacgtaactttactgcagccgaggtccaggccgtggagggggtcctagctccgctgcattctgcatcccaagtgggcacgtggaggaagggtctgaaggaaggctccggagcacaggccctggtgttcctgtgaggacgctggacctgcaggagcggggagctgcagtgccacctgctgggtaccacgggccgggcctggggtccacgcctttgggttgggtgtgtctgatgtcttgccaagcgcctggtcctgtcctcttgagctgcccttgcccagcactgcactctggaggtgggtggtgcaggcggtggagggacacaggccagctcaagcccgctggtggcagggcgttttcccaccgggatacgggaagccacctgtgtcagggctaggccctgggatcgggagttacactaccctgtcccaagccgagggggccggtggaatgacttgagcagctctgggagtggggaaaaaagacgactaatttccaaacccgtttgttctcagataaaaagcagttttataaacccgcaatctgctccagattcaagcagtaatatttcagcaagaggaggtggtcatgggaagccagcacagcagaggctccctgaccgggaggcctgcctgcttttcaggttgtttcccatgttcagcgtggactgcagaagtggctcacgctcctgtggtgagggcagggtgctccacagacacctccagacccagccaagaactacagggcggcgggctgcggtcagcacgtgtgctcgggacacagcggagtcagggccagagcccttccctccaggaactgatccttgggaaaacagccatgggccaggctgcagtctggttcccagtggggctgcctcagtcctacccccagcaccctcaaaagctggggtgtctgcatgtcccttcacataattgataatggtaccaccttctataataataatataaaataaaaaca

SEQ ID NO: 31488 - DNA, 2439 bp, Homo sapiens
  source 1..2439: mol_type = unassigned DNA
aaggctcctcagccgagcgccgagcggtcgatcgccgtagctcccgcagcctgcgatctccagtctgtggctcctaccagccattgtaggccaataatccgttatggagcatgcctttaccccgttggagcccctgctttccactgggaatttgaagtactgccttgtaattcttaatcagcctttggacaactattttcgtcatctttggaacaaagctcttttaagagcctgtgccgatggaggtgccaaccgcttatatgatatcaccgaaggagagagagaaagctttttgcctgaattcatcaatggagactttgattctattaggcctgaagtcagagaatactatgctactaagggatgtgagctcatttcaactcctgatcaagaccacactgactttactaagtgccttaaaatgctccaaaagaagatagaagaaaaagacttaaaggttgatgtgatcgtgacactgggaggccttgctgggcgttttgaccagattatggcatctgtgaataccttgttccaagcgactcacatcactccttttccaattataataatccaagaggaatcgctgatctacctgctccaaccaggaaagcacaggttgcatgtagacactggaatggagggtgattggtgtggccttattcctgttggacagccttgtatgcaggttacaaccacaggcctcaagtggaacctcacaaatgatgtgcttgcttttggaacattggtcagtacttccaatacctacgacgggtctggtgttgtgactgtggaaactgaccacccactcctctggaccatggccatcaaaagctaacctgttgactggcatccataagtgtgcctctgccttatctcatttctcaacagttcattgctcaacaagaacgattcacctgggtttgcaagaatctaaacctctctaggggaagcccactgggtttaaagatgttagtgtttagataatacaggtaacattataaatgacagatctcaattttatagtagtgggaaagatacatgctaagaaagcaaataagctctattatattcggttggaacctaatgggaatcattccactatacaattcagtactgattattcttcttacattattaatcattccatttatcctagaaaattgtttttaatttgaatcagagaaaactgttgaggttcctcttggagtctagaacatccttaaatgtctaacaacaagggctacctctgagtaccttttagtattagttttctgtatatgatatatattatcttatactgaaaaaaaattcctttcagattggggtgttagaagtgcaccaggtcactctgaccttattactgtctttggtattgtcttaaataaatcaagaatcattgacctaattgttaaatttaaaaataggtagttagcaataggtggaaagagaaatgatgtgaaagataaatgatgattcgtggagccctactcacacattaacccccaaattcaaaagtaagaatgcaaaagtctagagggggtaacagtctgcatcatcatcacaacctaaatggagaaagctgtgcagaggaaacttaagcataaaaattgaattcgtttctgacataccttagactgaaaaactgttggttcatccagaagtgtattcatattaccagaaaatgagtttgtctatggggatacatgaacttcatatactaaggagcctaactccaaagcctgcgttctcatcccagtctgatattcacctaagtttccggacccttttccttagctgtaaaatggaagcggttggactgatggtgtctgaggttctttcccacactgaaattctaaatattgacacttagcagtcatagggctgataatacacacagttactgacttagcctaaacaacctggtgcatcgaaatgtattcacctttcttttgtaaagagaccatcttctatcttctttccacctttctctgttttatgaaaccaactgttgacatacaaaccatgattgaaggagaacctgtccaacatgttttatgtacacaaatccctatgttgctataagaaaagtgaaagtaactgttttcttcttggtgctatgacagtgtgagactcaggttgtctgtagagaatgaaaggagcagtggcccgcgtgattgtggcatttaaggagcagtggcccatgtgactgtggcattttcggcacttttcattactttctgcttgaccggaagttgaggcttagctatgtttccatcttcagtttctgaagactagttatatattccttactagaaatatattcataatatataaaagaaatatatctgtgattttaaaattttgctaccaaagaatgcatgttctgtgtgccctgaaaatgttaccagtgttaataaatggatacttatcaaaaaagaa

SEQ ID NO: 31489 - DNA, 2283 bp, Homo sapiens
  source 1..2283: mol_type = unassigned DNA
aaggctcctcagccgagcgccgagcggtcgatcgccgtagctcccgcagcctgcgatctccagtctgtggctcctaccagccattgtaggccaataatccgttatggagcatgcctttaccccgttggagcccctgctttccactgggaatttgaagtactgccttgtaattcttaatcagcctttggacaactattttcgtcatctttggaacaaagctcttttaagagcctgtgccgatggaggtgccaaccgcttatatgatatcaccgaaggagagagagaaagctttttgcctgaattcatcaatggagactttgattctattaggcctgaagtcagagaatactatgctactaagggatgtgagctcatttcaactcctgatcaagaccacactgactttactaagtgccttaaaatgctccaaaagaagatagaagaaaaagacttaaagggaaagcacaggttgcatgtagacactggaatggagggtgattggtgtggccttattcctgttggacagccttgtatgcaggttacaaccacaggcctcaagtggaacctcacaaatgatgtgcttgcttttggaacattggtcagtacttccaatacctacgacgggtctggtgttgtgactgtggaaactgaccacccactcctctggaccatggccatcaaaagctaacctgttgactggcatccataagtgtgcctctgccttatctcatttctcaacagttcattgctcaacaagaacgattcacctgggtttgcaagaatctaaacctctctaggggaagcccactgggtttaaagatgttagtgtttagataatacaggtaacattataaatgacagatctcaattttatagtagtgggaaagatacatgctaagaaagcaaataagctctattatattcggttggaacctaatgggaatcattccactatacaattcagtactgattattcttcttacattattaatcattccatttatcctagaaaattgtttttaatttgaatcagagaaaactgttgaggttcctcttggagtctagaacatccttaaatgtctaacaacaagggctacctctgagtaccttttagtattagttttctgtatatgatatatattatcttatactgaaaaaaaattcctttcagattggggtgttagaagtgcaccaggtcactctgaccttattactgtctttggtattgtcttaaataaatcaagaatcattgacctaattgttaaatttaaaaataggtagttagcaataggtggaaagagaaatgatgtgaaagataaatgatgattcgtggagccctactcacacattaacccccaaattcaaaagtaagaatgcaaaagtctagagggggtaacagtctgcatcatcatcacaacctaaatggagaaagctgtgcagaggaaacttaagcataaaaattgaattcgtttctgacataccttagactgaaaaactgttggttcatccagaagtgtattcatattaccagaaaatgagtttgtctatggggatacatgaacttcatatactaaggagcctaactccaaagcctgcgttctcatcccagtctgatattcacctaagtttccggacccttttccttagctgtaaaatggaagcggttggactgatggtgtctgaggttctttcccacactgaaattctaaatattgacacttagcagtcatagggctgataatacacacagttactgacttagcctaaacaacctggtgcatcgaaatgtattcacctttcttttgtaaagagaccatcttctatcttctttccacctttctctgttttatgaaaccaactgttgacatacaaaccatgattgaaggagaacctgtccaacatgttttatgtacacaaatccctatgttgctataagaaaagtgaaagtaactgttttcttcttggtgctatgacagtgtgagactcaggttgtctgtagagaatgaaaggagcagtggcccgcgtgattgtggcatttaaggagcagtggcccatgtgactgtggcattttcggcacttttcattactttctgcttgaccggaagttgaggcttagctatgtttccatcttcagtttctgaagactagttatatattccttactagaaatatattcataatatataaaagaaatatatctgtgattttaaaattttgctaccaaagaatgcatgttctgtgtgccctgaaaatgttaccagtgttaataaatggatacttatc

SEQ ID NO: 31490 - DNA, 2806 bp, Homo sapiens
  source 1..2806: mol_type = unassigned DNA
ggcagttaactgccaccaagtggtggttgtatgccatagctctgtaacatgaacagtgtttccaataaactgtccaccgcaaaacccgttaaaaaatgagtgagctccatgagctgaggagctagcagattgccgggattacaaagacaacgagacaggaccctttccttagcaggatttacaatctctcttttaagagcctgtgccgatggaggtgccaaccgcttatatgatatcaccgaaggagagagagaaagattcctctgacagtatcctccaagacctgacatggacaatgtgtgaaaaagcgctcaacctccaacttgaaactctcctcgaggcccccagccaccagtcatctcatcaggacaccgaaagacacccattactgtggagcttccaagggtcttggcaactcttttatcggaaacgagagctttttgcctgaattcatcaatggagactttgattctattaggcctgaagtcagagaatactatgctactaagggatgtgagctcatttcaactcctgatcaagaccacactgactttactaagtgccttaaaatgctccaaaagaagatagaagaaaaagacttaaagaagaaacagtgaaaggaatactgttcaattccaacatcagctgtgtaaccgaggcatcgtaatacttttatgacaagtttcactacctttttgcctgtgccagtgtacctcaaagggatatggttgatgtgatcgtgacactgggaggccttgctgggcgttttgaccagattatggcatctgtgaataccttgttccaagcgactcacatcactccttttccaattataataatccaagaggaatcgctgatctacctgctccaaccaggaaagcacaggttgcatgtagacactggaatggagggtgattggtgtggccttattcctgttggacagccttgtatgcaggttacaaccacaggcctcaagtggaacctcagaacttgtgactacactaggaccacctggatagccaaggataatcccgtcccaagactaatcagattaatcagacttaatcacatctgtaaagttcctcttgccatcaaatgatgtgcttgcttttggaacattggtcagtacttccaatacctacgacgggtctggtgttgtgactgtggaaactgaccacccactcctctggaccatggccatcaaaagctaacctgttgactggcatccataagtgtgcctctgccttatctcatttctcaacagttcattgctcaacaagaacgattcacctgggtttgcaagaatctaaacctctctaggggaagcccactgggtttaaagatgttagtgtttagataatacaggtaacattataaatgacagatctcaattttatagtagtgggaaagatacatgctaagaaagcaaataagctctattatattcggttggaacctaatgggaatcattccactatacaattcagtactgattattcttcttacattattaatcattccatttatcctagaaaattgtttttaatttgaatcagagaaaactgttgaggttcctcttggagtctagaacatccttaaatgtctaacaacaagggctacctctgagtaccttttagtattagttttctgtatatgatatatattatcttatactgaaaaaaaattcctttcagattggggtgttagaagtgcaccaggtcactctgaccttattactgtctttggtattgtcttaaataaatcaagaatcattgacctaattgttaaatttaaaaataggtagttagcaataggtggaaagagaaatgatgtgaaagataaatgatgattcgtggagccctactcacacattaacccccaaattcaaaagtaagaatgcaaaagtctagagggggtaacagtctgcatcatcatcacaacctaaatggagaaagctgtgcagaggaaacttaagcataaaaattgaattcgtttctgacataccttagactgaaaaactgttggttcatccagaagtgtattcatattaccagaaaatgagtttgtctatggggatacatgaacttcatatactaaggagcctaactccaaagcctgcgttctcatcccagtctgatattcacctaagtttccggacccttttccttagctgtaaaatggaagcggttggactgatggtgtctgaggttctttcccacactgaaattctaaatattgacacttagcagtcatagggctgataatacacacagttactgacttagcctaaacaacctggtgcatcgaaatgtattcacctttcttttgtaaagagaccatcttctatcttctttccacctttctctgttttatgaaaccaactgttgacatacaaaccatgattgaaggagaacctgtccaacatgttttatgtacacaaatccctatgttgctataagaaaagtgaaagtaactgttttcttcttggtgctatgacagtgtgagactcaggttgtctgtagagaatgaaaggagcagtggcccgcgtgattgtggcatttaaggagcagtggcccatgtgactgtggcattttcggcacttttcattactttctgcttgaccggaagttgaggcttagctatgtttccatcttcagtttctgaagactagttatatattccttactagaaatatattcataatatataaaagaaatatatctgtgattttaaaattttgctaccaaagaatgcatgttctgtgtgccctgaaaatgttaccagtgttaataaatggatacttatc

SEQ ID NO: 31491 - DNA, 581 bp, Homo sapiens
  source 1..581: mol_type = unassigned DNA
aaagcttttaacccgacggctcagggaggacaccggtagcaggactagaagcagcacagtggaaaaggccaataatccgttatggagcatgcctttaccccgttggagcccctgctttccactgggaatttgaagtactgccttgtaattcttaatcagcctttggacaactattttcgtcatctttggaacaaagctcttttaagagcctgtgccgatggaggtgccaaccgcttatatgatatcaccgaaggagagagagaaagctttttgcctgaattcatcaatggagactttgattctattaggcctgaagtcagagaatactatgctactaagggatgtgagctcatttcaactcctgatcaagaccacactgactttactaagtgccttaaaatgctccaaaagaagatagaagaaaaagacttaaaggttgatgtgatcgtgacactgggaggccttgctgggcgttttgaccagattatggcatctgtgaataccttgttccaagcgactcacatcactccttttccaattataataatccaagaggaatcgctgatctacctgctccaacc

SEQ ID NO: 31492 - DNA, 2860 bp, Homo sapiens
  source 1..2860: mol_type = unassigned DNA
gcctcaggcatgagacctgtaccagcccccgggagccgtgcggggccaacaatgaggagcagaatgcaaggggcggcctcgctcccctggccaccgcgggggtcgcggcctcccattacatagcgcgtgtctcgagccctggcctgctctcggcaccgccacaacgggcgtaatatggccgctggtgccgggacctgccgggcgcgcggagggtcgggccgaggtccgggatccggaactgctcccggcattcctcgcgagtgtatggcgtgggctcccttccccctctgtgggtcccgcgaggagactctcgggctttgaggtgagacctgaagttccgctggccggtagtgtagcaggaaagggcaggtcctcccgggtcgtgagccagtagcctcctggggtggcaaggtgtagagaggggggcgttgaaaggacacccgctacccggcctgctttctaggggtctctttggattgaggacatcagcagcagtggaagggattttactggagacctgtcactgtcagagccttaaaatatcaccgacggggccttaatgtcaccgaggtagagagaaaagggcagtagccctagagactattgcgacacagtgtgcccctcataagtttttccagggaggggttctgtactgagttgacgccccaggagctgagcaccaggctttgcatccttgggaactcagcaaacgtttgttcagccaattgcaggtagcatggcccagggcttgattgaggtggagcgaaagttccttccagggcctggcacagaggagcggctgcaggagttggggggcaccctggagtaccgggtcaccttccgagacacctactatgacacccctgagctgagcctcatgcaggctgaccactggctgcgacgacgagaggatagtggatgggagctcaaatgtcctggagcagcaggtgtcttaggaccccacacggagtataaggaactcacagcggaacctacaattgtggcccaactctgtaaggtgctgcgggctgacggcctgggggctggagatgtggctgctgtgctgggcccactggggctgcaggaagtagctagttttgtgactaagcggagtgcctggaagctggtgctcttgggagctgatgaagaggagccacagctcagggtggacttggatacagccgactttggctacgctgtgggtgaggtagaggccctggtgcatgaggaggctgaagtaccaactgccctagagaagatccacaggctcagcagcatgcttggtgtgcctgcacaggagacagcaccagccaagctgattgtgtatctacagcgtttccggcctcaagactatcagcgcctgctagaagtgaacagctccagagagaggccacaggagactgaagatcctgaccactgcctgggctaggggtgtcacttcctagaaggggaagggaactctgggtctaacggagtccactcctgggcccactgtgcctctcccctcagtgtcccttctgacagtgactcctctctctccagcgctgcctgtttcttccccctcctctaagctactcttccttgagccctccctggctgcttcctctcgctcatccgtcagatgcaatctgtgggccgcccctctcccctggccgctaagcagcctccattgatttccgctcgtgtttataggatttccacttagccgtgatcagtagttaagcacaggaaaatcccttgccaccccccctcccttggtcgatgccattgattctgccagcggctcctaaaccgccttacagctgagttagaagatgaggagaggcagcagggatttccctgccttgggatgtgggaaacagaagaaaagttgaggaaatggttgggaatcgctgttagaactctagaaattctaatctgactttgccactgtgcccagctctggcccagagggtagagtgcctcctgtggaagtttaggggcaaatttgttccctgacctggagagggttagaaagaaccaacagctgccccctccccgcccccgtgttgagacaggttctcaaggctcaggggaagatgcatacctcctatgtaagaatgctcttcccttgctgttattcatacacactttccacttcaaatatacccaaatatggctttcctcacttctcaggctttattgggctttatttgtgggagaagggggctggtccccagtttttgcagtgcaaagccagagcgccacctgctggtagccctcaggtgtaggttcgaagctgctggggccccctggggtttgggacacaggagaatttcaggctgtgagtggagacagttactgccacgattccacaggcaagttgttcacctcaaagatctcctgcaccgactggtgaaagtggtcgtaggtgaggcgcagctttagccgcaggggggcctaggaataggagagcagggaccagggttagcacccacggcttcttctatccctgggtcttgtcttgggggaactcctgaagctcaccttgttaggattgaggattctgaagagctgggtgataggaaggccaccccgagctggaactgtgttcccactgggggcctgcagctgcagctggagactctgaacacaggagtttaacagagcacagtatggcagtaggtagggctcaggcagcccctctatactcagtggctccacacccttttcctgtaactccccaagtgctgatctccagatgactcaatcccatctcacactgtctcccacccacctcctccacttagtggccttttctcctggagtccccaggccacctctgaactctgatctttacaaaccttgggcacagcagcct

SEQ ID NO: 31493 - DNA, 1779 bp, Homo sapiens
  source 1..1779: mol_type = unassigned DNA
ggggtgcctggctcagcctcaggcatgagacctgtaccagcccccgggagccgtgcggggccaacaatgaggagcagaatgcaaggggcggcctcgctcccctggccaccgcgggggtcgcggcctcccattacatagcgcgtgtctcgagccctggcctgctctcggcaccgccacaacgggcgtaatatggccgctggtgccgggacctgccgggcgcgcggagggtcgggccgaggtccgggatccggaactgctcccggcattcctcgcgagtgtatggcgtgggctcccttccccctctgtgggtcccgcgaggagactctcgggctttgagccaattgcaggtagcatggcccagggcttgattgaggtggagcgaaagttccttccagggcctggcacagaggagcggctgcaggagttggggggcaccctggagtaccgggtcaccttccgagacacctactatgacacccctgagctgagcctcatgcaggctgaccactggctgcgacgacgagaggatagtggatgggagctcaaatgtcctggagcagcaggtgtcttaggaccccacacggagtataaggaactcacagcggaacctacaattgtggcccaactctgtaaggtgctgcgggctgacggcctgggggctggagatgtggctgctgtgctgggcccactggggctgcaggaagtagctagttttgtgactaagcggagtgcctggaagctggtgctcttgggagctgatgaagaggagccacagctcagggtggacttggatacagccgactttggctacgctgtgggtgaggtagaggccctggtgcatgaggaggctgaagtaccaactgccctagagaagatccacaggctcagcagcatgcttggtgtgcctgcacaggagacagcaccagccaagctgattgtgtatctacagcgtttccggcctcaagactatcagcgcctgctagaagtgaacagctccagagagaggccacaggagactgaagatcctgaccactgcctgggctaggggtgtcacttcctagaaggggaagggaactctgggtctaacggagtccactcctgggcccactgtgcctctcccctcagtgtcccttctgacagtgactcctctctctccagcgctgcctgtttcttccccctcctctaagctactcttccttgagccctccctggctgcttcctctcgctcatccgtcagatgcaatctgtgggccgcccctctcccctggccgctaagcagcctccattgatttccgctcgtgtttataggatttccacttagccgtgatcagtagttaagcacaggaaaatcccttgccaccccccctcccttggtcgatgccattgattctgccagcggctcctaaaccgccttacagctgagttagaagatgaggagaggcagcagggatttccctgccttgggatgtgggaaacagaagaaaagttgaggaaatggttgggaatcgctgttagaactctagaaattctaatctgactttgccactgtgcccagctctggcccagagggtagagtgcctcctgtggaagtttaggggcaaatttgttccctgacctggagagggttagaaagaaccaacagctgccccctccccgcccccgtgttgagacaggttctcaaggctcaggggaagatgcatacctcctatgtaagaatgctcttcccttgctgttattcatacacactttccacttcaaatatacccaaatatggctttc

SEQ ID NO: 31494 - DNA, 581 bp, Homo sapiens
  source 1..581: mol_type = unassigned DNA
attacatagcgcgtgtctcgagccctggcctgctctcggcaccgccacaacgggcgtaatatggccgctggtgccgggacctgccgggcgcgcggagggtcgggccgaggtccgggatccggaactgctcccggcattcctcgcgagtgtatggcgtgggctcccttccccctctgtgggtcccgcgaggagactctcgggctttgaggtagcatggcccagggcttgattgaggtggagcgaaagttccttccagggcctggcacagaggagcggctgcaggagttggggggcaccctggagtaccgggtcaccttccgagacacctactatgacacccctgagctgagcctcatgcaggctgaccactggctgcgacgacgagaggatagtggatgggagctcaaatgtcctggagcagcaggtgtcttaggaccccacacggagtataaggaactcacagcggaacctacaattgtggcccaactctgtaaggtgctgcgggctgacggcctgggggctggagatgtggctgctgtgctgggcccactggggctgcaggaagtagctagttttgtgac

SEQ ID NO: 31495 - DNA, 2539 bp, Homo sapiens
  source 1..2539: mol_type = unassigned DNA
gccccgggagcgcgggcggcgggccccttggtcctcaggcggccgtggcggcggtggcggcggttgggccgaggcaggcggcctcagtggccgaggtggctggacgcgtagcaggtggaaggagggagggagccgcaggcgcagacccacccgccatgaagccccccgcagcctgtgcaggagacatggcggacgcagcatctccgtgctctgtggtaaacgacctgcggtgggacctgagtgcccagcagatagaggagcgcaccagggagctcatcgagcagaccaagcgcgtgtatgaccaggttggcacccaggagtttgaggacgtgtcctacgagagcacgctcaaggcgctggccgatgtggaggtcacctacacagttcagaggaatatccttgacttcccccagcatgtttccccctccaaggacatccggacagccagcacagaggccgacaagaagctctctgagttcgacgtggagatgagcatgagggaggacgtgtaccagaggatcgtgtggctccaggagaaagttcagaaggactcactgaggcccgaggctgcgcggtacctggagcggctaatcaagctgggccggagaaatgggcttcacctccccagagagactcaggaaaacatcaaacgcatcaagaagaagctgagccttctgtgcatcgacttcaacaagaacctgaacgaggacacgaccttcctgcccttcacgctccaggagctaggagggctccccgaggactttctgaactccctggagaagatggaggacggcaagttgaaggtcaccctcaagtacccccattacttccccctcctgaagaaatgccacgtgcctgagaccaggaggaaagtggaggaggccttcaactgccggtgcaaggaggagaactgcgctatcctcaaggagctggtgacgctgcgggcccagaagtcccgcctgctggggttccacacgcacgccgactatgtcctggagatgaacatggccaagaccagccagaccgtggccaccttcctagatgagctggcgcagaagctgaagcccctgggggagcaggagcgtgcggtgattctggagctgaagcgtgcggagtgcgagcgccggggcctgcccttcgacggccgcatccgtgcctgggacatgcgctactacatgaaccaggtggaggagacgcgctactgcgtggaccagaacctgctcaaggagtacttccccgtgcaggtggtcacgcacgggctgctgggcatctaccaggagctcctggggctggccttccaccacgaggagggcgccagtgcctggcatgaggacgtgcggctctacaccgcgagggacgcggcctcgggggaggtggtcggcaagttctacctggacctgtacccgcgggaaggaaagtacgggcacgcggcctgctttggcctgcagcccggctgcctgcggcaggatgggagccgccagatcgccatcgcggccatggtggccaacttcaccaagcccacagccgacgcgccctcgctgctgcagcatgacgaggtggagacctacttccatgagtttggccacgtgatgcaccagctctgctcccaggcggagttcgccatgttcagcgggacccacgtggagcgggactttgtggaggcgccgtcgcagatgctggagaactgggtgtgggagcaggagccgctgctgcggatgtcgcggcactaccgcacaggcagcgccgtgccccgggagctcctggagaagctcattgagtcccggcaggccaacacaggcctcttcaacctgcgccagatcgtcctcgccaaggtggaccaggccctgcacacgcagacggacgcagaccccgccgaggagtatgcgcggctctgccaggagatcctcggggtcccggccacgccaggaaccaacatgcctgcaaccttcggccatctggcaggtggctacgacgcccagtactacgggtacctgtggagcgaggtgtattccatggacatgttccacacgcgcttcaagcaggagggtgtcctgaacagcaaggttggcatggattacagaagctgcatcctgagacccggcggttccgaggatgccagcgccatgctgaggcgcttcctgggccgtgaccccaagcaggacgccttcctcctgagcaaggggctgcaggtcgggggctgcgagcccgagccgcaggtctgctgaggcctggcactgcgactgcccagtctggcctgcgctcccgccgccctggtgccttagcccccggcacaggatggggcaggctctggcacagtgcctgggactggcagggtggctgagcggctgtcttgcctcttgtcattgtctgtccccacccggtcgtggcccacccggctagagacggcgtcctcaaggcatctggagggctttcgtggctgccagggcctggtctttgttgcactaacacgtctcctctctgggaaacgtcccttgtcaggagacggctcttctttgaaatgaggtcattaaaaggaaac

SEQ ID NO: 31496 - DNA, 1879 bp, Homo sapiens
  source 1..1879: mol_type = unassigned DNA
ttttgtggatcttagtaggcgagtttgaaaacacggagtccaggaatgaggatcgaccgtgtgtccacctttcctggcttccctgccacactgtttgcacagcactcgtagccagcacacgcgtgtgcacatccacacaggtgctcacacaggtgcccacgcacgtgcctgcaggcctgctttgcatgctgctttctgcgtgtccctggcgcctggcacggcgagtcccttggtgcattccgtcgggacaaggagtgtggctgcgtggtccttggaacagaaaagcctcggtgttgcagagaggaccttgaggatcacccaggagttccctcgccgttggctgcctgccatggttccagcgggactcagtcaagggctgtgcttttagggaaggttccacacacacacgagcagggagatgcagcatgcctcacagcgtccccacccggacctggccgtccccaggtcccaacccctcggggtgcggagctttcagggagcagcagctctgtggctagaggagaagcgtgggtggcctccagggacggggtcatgtggccggcatcttcaggtgtgtcctgctgccaccggcagccagcagcagcccaggggcctccgggtcccggtcgttttccagttttggggtgggagggccgggcccagcgcatcacctgtgcactcgccctgtttgcactgtggcagctgacacgggccaggccggcgggaacgggctaggcaggacctgggcactctgaggctctgccccatccctgcaggcggagttcgccatgttcagcgggacccacgtggagcgggactttgtggaggcgccgtcgcagatgctggagaactgggtgtgggagcaggagccgctgctgcggatgtcgcggcactaccgcacaggcagcgccgtgccccgggagctcctggagaagctcattgagtcccggcaggccaacacaggcctcttcaacctgcgccagatcgtcctcgccaaggtggaccaggccctgcacacgcagacggacgcagaccccgccgaggagtatgcgcggctctgccaggagatcctcggggtcccggccacgccaggaaccaacatgcctgcaaccttcggccatctggcaggtggctacgacgcccagtactacgggtacctgtggagcgaggtgtattccatggacatgttccacacgcgcttcaagcaggagggtgtcctgaacagcaagtttcctcactatgaagtgcggccgttacgccatgtgagcctgtgcctcccgctgacttggtgtgacccaggctcgggacagccgccagagtccctcacaaggaacaggtggctaccagctttgagggccggccctgccctgcctgggtgcaacattgcactgggcagcctgcaggttggcatggattacagaagctgcatcctgagacccggcggttccgaggatgccagcgccatgctgaggcgcttcctgggccgtgaccccaagcaggacgccttcctcctgagcaaggggctgcaggtcgggggctgcgagcccgagccgcaggtctgctgaggcctggcactgcgactgcccagtctggcctgcgctcccgccgccctggtgccttagcccccggcacaggatggggcaggctctggcacagtgcctgggactggcagggtggctgagcggctgtcttgcctcttgtcattgtctgtccccacccggtcgtggcccacccggctagagacggcgtcctcaaggcatctggagggctttcgtggctgccagggcctggtctttgttgcactaacacgtctcctctctgggaaacgtcccttgtcaggagacggctcttctttgaaatgaggtcattaaaaggaaac

SEQ ID NO: 31497 - DNA, 3181 bp, Homo sapiens
  source 1..3181: mol_type = unassigned DNA
attggtggcggaggcaatggccggcaaccagctgtaagcgaggcacggaagacatatgcttgtgagacaaaggtgtctctgaaactatggatggtacaagaacttcacttgacattgaagagtactcggatactgaggtacagaaaaaccaagtactaactctggaagaatggcaagacaagtgggtgaacggcaagactgcttttcatcaggaacaaggacatcagctattaaagaagcatttagatactttccttaaaggcaagagtggactgagggtattttttcctctttgcggaaaagcggttgagatgaaatggtttgcagaccggggacacagtgtagttggtgtggaaatcagtgaacttgggatacaagaattttttacagagcagaatctttcttactcagaagaaccaatcaccgaaattcctggaaccaaagtatttaagagttcttcggggaacatttcattgtactgttgcagtatttttgatcttcccaggacaaatattggcaaatttgacatgatttgggatagaggagcattagttgccatcaatccaggtgatcgcaaatgctatgcagatacaatgttttccctcctgggaaagaagtttcagtatctcctgtgtgttctttcttatgatccaactaaacatccaggtccaccattttatgttccacatgctgaaattgaaaggttgtttggtaaaatatgcaatatacgttgtcttgagaaggttgatgcttttgaagaacgacataaaagttggggaattgactgtctttttgaaaagttatatctacttacagaaaagtaaatgagacatagataaaataaaatcacactgacatgtttttgaggaattgaaaattatgctaaagcctgaaaatgtaatggatgaatttttaaaattgtttataaatcatatgatagatctttactaaaaatggctttttagtaaagccatttactttttctaaaaaagttttagaagaaaaagatgtaactaaacttttaaagtagctcctttggagaggagattatgatgtgaaagattatgcctatgtgtcttgcagattgcaagatattttaccaatcagcatgtgttacctgtacaattaaaaaaatatttcaaaatgcaatgcatattaaatataatacacacagaaaaactggcatttattttgttttatttttttgagatggagtttcgttcttgttgcccaacctggagtgcaatggtgcaatctcagctcactgcaacctctgcctcccaggttcaggtgattctcctgcctcagcctcctgagtagctgggattacaggtgtgcgccaccacgcccagctaattttttgtatttttagtagagacagggtttcaccatgttggtcaggctgatctcgagctcctgacctcaggtgatctacccacctcggcctcccaaagtgctgggattacaggcgtgagccactgcacctggcctgacattctttatgaaatttagaattgttgaagaactataacatttcagtagggttcaaggtggtcccaaaagttatataaaagattagtttttactataaacccttgtcttttactcagatcctagcatcccttttcacatggtttctccatgtatataacagaatcaagaaacaaattttaattaaacaatctgtaacagaatcaagaaacaaatacattttaattaaacaatctatatggaacaaacattcccaaattctaagaataaatttttctttaagttttctctgagtttggcaattgttgttttttataatttaatctgtttaaatcatcaggtcttataaaatataatgtacttagagctggattcatggctgtttattatgaaaggttagatttctcagttcttctttaaccacattttgttatatcagacagtcctctataactctgtactacccaacaactaaatggtttagattgtttagctcatgttaataggatggttgtgtattataaaaaacgagttacgtgtgtgtgtgcacgcatgcacgcacatgtgctggcttaaaggttgttaatgcaaggtttggggtcccctttaacactggtgaaagctacggtactctccccagagatatgtcttgtcagcctctctagttccccttggcctgcatgtacaaacttctaccctagaagctctctgccatcgatgtattctaatagatttgtaaggctattaatttgaagcaactccttgctcacagtgattcttgcttctctgagacctgctcccagtcgatactgtgggcttcagaagccatgactccccaactctgcctgtatcaccggttgaatggacaactaacccgagctggaccaacacaattctctccagagacttttgattttacttttatgtagagacagggtctcactttgttgcccacgctgatgttgaacttgacgtgaggcctcaagcagtcctcctgtcttggccacccaaagtgctaggattacaggtatgagccattgcgctggccctcttcataggcttttggacttgggaatagaaaagcaaccccgtctctactaaaaatacaaaaaaattagccaggcgtggtggcacgtgcctgtaatcccagctacttgggaggctgaggcaggagaatcacttgaacctaggaggcggaggttgcagtgagctgagatcatgccactgcacgcaagcctgggcaacagagcaagactctgtctcaaaagaaagaaaaagaaaagaaaaaaaagaaaggcaagttgactgctgaaaggggaatctgtgtacgcctgggagctgtggggcagccacattccagcacatggatctgagaaacagaacgctgatctgcagaaagagatgagaaccaaagagaggccacctgcgtcctgggtccattttcatcctccctgaagcccagctgcccagggtggggagaaacaccctgtgtccatgggatagagtcctttccgcttgcagttgtgcccaaagaatcttaaatacaaatgagatatccttaggtagttgatcatttatgtaatatgtgtcttcactggggaatactgacttcctaaaatctcaagatggaagatataccacatgtaaattattttagagcaattaaattgttttcaggattttccaaaaa

SEQ ID NO: 31498 - DNA, 2396 bp, Homo sapiens
  source 1..2396: mol_type = unassigned DNA
agtgctagtggcggcaggtgcaggtggccgcgcggcatcctggggcttgcagtctcccgagcgttctgttgtgtccctgcctacaattttagggaacctaataaaagggtggtcggtatgtttttatttgggtgtgtacttttgttaggtcgctttttcgctatgcattaagtacggactttaggactcaactagtaccaggaagaaaaagaccggacattttcacctgtttgttatacagcgaaggggaaaaattgggaagaaatcctcaagctacaagaaaaataaccagaagctttacactttagcctgcagtgacttatatcctggtgtcctaagtccacctaagtcagttttgcaataagaggtcccaagtttggttttcttggagcttgcatcagttggttgcatcatccctgagtagaagatttgcggttgcaaggaaaaataaggtacagagcttctccagcgggaaagtgcatgtctgcacggcacgagcccacgcaccgcagaacaggcttgccaggtctcctcagagaccctcgcaggaacctaacaatgaaatccagttgtccagtcttgatttgtggaggggtaaggagaatccgaggccagtgggcaatccgcccactgttgggagcgactgacctcacgaatcaataatttgcttttgactaggaagtgcagcggttcttggggggaggggctggactgggtggcggacgcgaggagcaacggttctcccgaacctctcccccgcccctactatcttggcctacattttcccgctccgtcccgggacctggacacccagaatccacgaaaagcaactcgcgctcgagaacagctctcgtacccttctacgtgatctgcacctttaagctcactccatcccaaaccggaccccggaggcaccacccacatccgtctaacatcacttccttcagagtttgaaaaaaaaaaatctgggaagtagaggtgttgtgctgagcggcgctcggcgaactgtgtggaccgtctgctgggactccggccctgcgtccgctcagccccgtggccccgcgcacctactgccatggagacgcggcctcgtctcggggccacctgtttgctgggcttcagtttcctgctcctcgtcatctcttctgatggacataatgggcttggaaagggttttggagatcatattcattggaggacactggaagatgggaagaaagaagcagctgccagtggactgcccctgatggtgattattcataaatcctggtgtggagcttgcaaagctctaaagcccaaatttgcagaatctacggaaatttcagaactctcccataattttgttatggtaaatcttgaggatgaagaggaacccaaagatgaagatttcagccctgacgggggttatattccacgaatcctttttctggatcccagtggcaaggtgcatcctgaaatcatcaatgagaatggaaaccccagctacaagtatttttatgtcagtgccgagcaagttgttcaggggatgaaggaagctcaggaaaggctgacgggtgatgccttcagaaagaaacatcttgaagatgaattgtaacatgaatgtgccccttctttcatcagagttagtgttctggaaggaaagcagcagggaagggaatattgaggaatcatctagaacaattaagccgaccaggaaacctcattcctacctacactggaaggagcgctctcactgtggaagagttctgctaacagaagctggtctgcatgtttgtggatccagcggagagtggcagactttcttctccttttccctctcacctaaatgtcaacttgtcattgaatgtaaagaatgaaaccttctgacacaaaacttgagccacttggatgtttactcctcgcacttaagtatttgagtcttttcccatttcctcccactttactcaccttagtggtgaaaggagactagtagcatcttttctacaacgttaaaattgcagaagtagcttatcattaaaaaacaacaacaacaacaataacaataaatcctaagtgtaaatcagttattctaccccctaccaaggatatcagcctgttttttcccttttttctcctgggaataattgtgggcttcttcccaaatttctacagcctctttcctcttctcatgcttgagcttccctgtttgcacgcatgcgtgtgcaggactggctgtgtgcttggactcggctccaggtggaagcatgctttcccttgttactgttggagaaactcaaaccttcaagccctaggtgtagccattttgtcaagtcatcaactgtatttttgtactggcattaacaaaaaaagagataaaatattgtaccattaaactttaataaaactttaaaaggaaa

SEQ ID NO: 31499 - DNA, 2312 bp, Homo sapiens
  source 1..2312: mol_type = unassigned DNA
ggagtttggggatgaggcagctgaagaacagagtcttgtgatggtggaaccaggacttcgttgttccttcattgtgtgggcagaagaggtggaggattttaggcgccacctggtcttgtccccactgcccagacaggcagggaatccctcttcttccttttgctgaatcagctggagaagaaagcccagcaggaggcctgctagcctcagcctcgggccctaccagggtcctaggtactggaatggaacttcgccgaggtcaccgctcaaacggccacaacgagggagccgatttagatcctctgggcctgttccttccttttctttaaacgtcccagtctagcttagaggaggacctgttttgttagataaatggcaagcaaaaaacgagaagtccagttacagacagtcatcaataatcaaagcctgtgggatgagatgttgcagaacaaaggcttaacagtgattgatgtttaccaagcctggtgtggaccttgcagagcaatgcaacctttattcagaaaattgaaaaatgaactgaacgaagacgaaattctgcattttgctgtcgcagaagctgacaacattgtgactttgcagccatttagagataaatgtgaacctgtttttctctttagtgttaatggcaaaattatcgaaaagattcagggtgcaaatgcaccgcttgttaataaaaaagttattaatttgatcgatgaggagagaaaaattgcagcaggtgaaatggctcgacctcagtatcctgaaattccattagtagactcagattcagaagttagtgaagaatcaccatgtgaaagtgttcaggaattatacagtattgctattatcaaaccggatgctgtgattagtaaaaaagttctagaaattaaaagaaaaattaccaaagctggatttattatagaagcagagcataagacagtgctcactgaagaacaagttgtcaacttctatagtcgaatagcagaccagtgtgacttcgaagagtttgtctcttttatgacaagtggcttaagctatattctagttgtatctcaaggaagtaaacacaatcctccctctgaagaaaccgaaccacagactgacaccgaacctaacgaacgatctgaggatcaacctgaggtcgaagcccaggttacacctggaatgatgaagaacaaacaagacagtttacaagaatatctggaaagacaacatttagctcagctctgtgacattgaagaggatgcagctaatgttgctaagttcatggatgctttcttccccgattttaaaaaaatgaaaagcatgaaattagaaaagacattggcattacttcgaccaaatctctttcatgaaaggaaagatgatgttttgcgtattattaaagatgaagacttcaaaatactggagcaaagacaagtagtattatcggaaaaagaagcacaagcactgtgcaaggaatatgaaaatgaagactattttaataaacttatagaaaacatgaccagtggtccatctctagcccttgttttattgagagacaatggcttgcaatactggaaacaattactgggaccaagaactgttgaagaagccattgaatattttccagagagtttatgtgcacagtttgcgatggacagtttgccggtcaaccagttgtatggcagcgattcattagaaaccgctgaaagggaaatacagcatttctttcctcttcaaagcactttaggcttgattaaacctcatgcaacaagtgaacaaagagagcagatcctgaagatagttaaggaggctggatttgatctgacacaggtgaagaaaatgttcctaactcctgagcaaatagagaaaatttatccaaaagtaacaggaaaagacttttataaagatttattggaaatgttatctgtgggtccatctatggtcatgattctgaccaagtggaatgctgttgcagaatggagacgattgatgggcccaacagacccagaagaagcaaaattactttcccctgactccatccgagcccagtttggaataagtaaattgaaaaacattgtccatggagcatctaacgcctatgaagcaaaagaggttgttaatagactctttgaggatcctgaggaaaactaaagtatatactgtgaaaactttgagaagataatacatatgttcacgtcaatatacaaccatttggcacagcttcctgggaggaataataagaaaaacatgctttggaggaaaactcaagatacaaaaatgaatggctatgcataataacaataagaatgtattccccaaacaaa

SEQ ID NO: 31500 - DNA, 1879 bp, Homo sapiens
  source 1..1879: mol_type = unassigned DNA
aaacgtcccagtctagcttagaggaggacctgttttgtgtaaggcttgccggagcaaccagcacctttcctggaatacagtcttgtttgtggcttttcctttgtttagataaatggcaagcaaaaaacgagaagtccagttacagacagtcatcaataatcaaagcctgtgggatgagatgttgcagaacaaaggcttaacagtgattgatgtttaccaagcctggtgtggaccttgcagagcaatgcaacctttattcagaaaattgaaaaatgaactgaacgaagacgaaattctgcattttgctgtcgcagaagctgacaacattgtgactttgcagccatttagagataaatgtgaacctgtttttctctttagtgttaatggcaaaattatcgaaaagattcagggtgcaaatgcaccgcttgttaataaaaaagttattaatttgatcgatgaggagagaaaaattgcagcaggtgaaatggctcgacctcagtatcctgaaattccattagtagactcagattcagaagttagtgaagaatcaccatgtgaaagtgttcaggaattatacagtattgctattatcaaaccggatgctgtgattagtaaaaaagttctagaaattaaaagaaaaattaccaaagctggatttattatagaagcagagcataagacagtgctcactgaagaacaagttgtcaacttctatagtcgaatagcagaccagtgtgacttcgaagagtttgtctcttttatgacaagtggcttaagctatattctagttgtatctcaaggaagtaaacacaatcctccctctgaagaaaccgaaccacagactgacaccgaacctaacgaacgatctgaggatcaacctgaggtcgaagcccaggttacacctggaatgatgaagaacaaacaagacagtttacaagaatatctggaaagacaacatttagctcagctctgtgacattgaagaggatgcagctaatgttgctaagttcatggatgctttcttccccgattttaaaaaaatgaaaagcatgaaattagaaaagacattggcattacttcgaccaaatctctttcatgaaaggaaagatgatgttttgcgtattattaaagatgaagacttcaaaatactggagcaaagacaagtagtattatcggaaaaagaagcacaagcactgtgcaaggaatatgaaaatgaagactattttaataaacttatagaaaacatgaccagtggtccatctctagcccttgttttattgagagacaatggcttgcaatactggaaacaattactgggaccaagaactgttgaagaagccattgaatattttccagagagtttatgtgcacagtttgcgatggacagtttgccggtcaaccagttgtatggcagcgattcattagaaaccgctgaaagggaaatacagcatttctttcctcttcaaagcactttaggcttgattaaacctcatgcaacaagtgaacaaagagagcagatcctgaagatagttaaggaggctggatttgatctgacacaggtgaagaaaatgttcctaactcctgagcaaatagagaaaatttatccaaaagtaacaggaaaagacttttataaagatttattggaaatgttatctgtgggtccatctatggtcatgattctgaccaagtggaatgctgttgcagaatggagacgattgatgggcccaacagacccagaagaagcaaaattactttcccctgactccatccgagcccagtttggaataagtaaattgaaaaacattgtccatggagcatctaacgcctatgaagcaaaagaggttgttaatagactctttgaggatcctgaggaaaactaa

SEQ ID NO: 31501 - DNA, 1637 bp, Homo sapiens
  source 1..1637: mol_type = unassigned DNA
cgggctgctgggcgggaggcgcacgcgcagaactgttcgccacccgaccgcccgccccttcctctggcgtccaaggtgatatcgcgcgaggttcgcagccaataaggaggcggatgtgacggcccgtttgcagccgccggcagctactgcaaggcaaaagccggagtggacgtgtcttttgaaactgctgctctttcacttctcaggcgtcaccgagagctcagcacccaggctgaactctgtaccatttggaagaatggaagctgatgcatctgttgacatgttttccaaagtcctggagcatcagctgcttcagactaccaaactggtggaagaacatttggattctgaaattcaaaaactggatcagatggatgaggatgaattggaacgccttaaagaaaagagactccaggcactaaggaaagctcaacagcagaaacaagaatggctttctaaaggacatggggaatacagagaaatccctagtgaaagagacttttttcaagaagtcaaggagagtgaaaatgtggtttgccatttctacagagactccacattcaggtgtaaaatactagacagacatctggcaatattgtccaagaaacacctcgagaccaaatttttgaagctgaatgtggaaaaagcacctttcctttgtgagagactgcatatcaaagtcattcccacactagcactgctaaaagatgggaaaacacaagattatgttgttgggtttactgacctaggaaatacagatgacttcaccacagaaactttagaatggaggctcggttcttctgacattcttaattacagtggaaatttaatggagccaccatttcagaaccaaaagaaatttggaacaaacttcacaaagctggaaaagaaaactatccgaggaaagaaatatgattcagactctgatgatgattagagctcaataattctttgtaaattgtctttttttttctgcttcagatttaaatgtgtttttaaaattctattaatgtctatacattggtcacctaaatactcatattctcgagttttatacagttgtatcacatcgaaaagtgtctttactgttttctgtgtggccatcatgtttaagttgaggaaaactcagttcttaaattatctgggaagggtctggattctctatttttgagattgactttatcacaatatgattcttacatctttataccatttacaattgtgttttagatctacagagttagaaattcgaaaactattccaggactaattcttaatcggcattatttatacaagaggtcaagtaacatttactagcgcaatactgcacttgtaaatgaattataaacgctcttctggaatatatttaaataaccattaaagaactgcttattcattctggacactgcatgttgatgttgaatcaactgatgccagcagaaagctattttgatttgtgaacatactgccttatttaaagggtcctgattgcttgtattttaagacattcattaaaaagaaaccaggaaacacttttgaaataacagcataaggaacttcactgtctctgctcaataaaatacctgtaactggaagtttatgtggaaattgtcataaaagcatacatccaacaaaaa

SEQ ID NO: 31502 - DNA, 568 bp, Homo sapiens
  source 1..568: mol_type = unassigned DNA
acagacaagaataaatatcttgatcactgacacatgctgtacaaataaaattaggaagtcaactctttccatcatgagtaacagaactcaatcgaatgtgacacacagaaatgtctcaaaaatctctagcacccaggctgaactctgtaccatttggaagaatggaagctgatgcatctgttgacatgttttccaaagtcctggagcatcagctgcttcagactaccaaactggtggaagaacatttggattctgaaattcaaaaactggatcagatggatgaggatgaattggaacgccttaaagaaaagagactccaggcactaaggaaagctcaacagcagaaacaagaatggctttctaaaggacatggggaatacagagaaatccctagtgaaagagacttttttcaagaagtcaaggagagtgaaaatgtggtttgccatttctacagagactccacattcaggtgtaaaatactagacagacatctggcaatattgtccaagaaacacctcgagaccaaatttttgaagctgaatgtggaaaaagcacctttcctttgtga

SEQ ID NO: 31503 - DNA, 1014 bp, Homo sapiens
  source 1..1014: mol_type = unassigned DNA
acagacaagaataaatatcttgatcactgacacatgctgtacaaataaaattaggaagtcaactctttccatcatgagtaacagaactcaatcgaatgtgacacacagaaatgtctcaaaaatctctagcacccaggctgaactctgtaccatttggaagaatggaagctgatgcatctgttgacatgttttccaaagtcctggagcatcagctgcttcagactaccaaactggtggaagaacatttggattctgaaattcaaaaactggatcagatggatgaggatgaattggaacgccttaaagaaaagagactccaggcactaaggaaagctcaacagcagaaacaagaatggctttctaaaggacatggggaatacagagaaatccctagtgaaagagacttttttcaagaagtcaaggagagtgaaaatgtggtttgccatttctacagagactccacattcaggtgtaaaatactagacagacatctggcaatattgtccaagaaacacctcgagaccaaatttttgaagctgaatgtggaaaaagcacctttcctttgtgagagactgcatatcaaagtcattcccacactagcactgctaaaagatgggaaaacacaagattatgttgttgggtttactgacctaggaaatacagatgacttcaccacagaaactttagaatggaggctcggttcttctgacattcttaattacaggtggtggccctagggccgtaggttgctggcccctgttctgaaccaccgagagataccagttcacatgtcctcagttcagcaatgtggggagagatgatcggctggatgatgctattttacagacacccaggacctacagcatgttccaaatgtctacatcaattgagacaggatgttgctatgttgcccaggctggtcttgaagtgccttgacctcctaaagtgttggaaccacagacgtgagccactccacccagcctaaaacttcatcttctttggtaaatgtgcttt

SEQ ID NO: 31504 - DNA, 1893 bp, Homo sapiens
  source 1..1893: mol_type = unassigned DNA
gatggcggcaatggcggtggcgctgcggggattaggagggcgcttccggtggcggacgcaggccgtggcgggcggggtgcggggcgcggcgcggggcgcagcagcaggtcagcgggactatgatctcctggtggtcggcgggggatctggtggcctggcttgtgccaaggaggccgcccagctgggaaggaaggtggccgtggtggactacgtggaaccttctccccaaggcacccggtggggcctcggcggcacctgcgtcaacgtgggctgcatccccaagaagctgatgcaccaggcggcactgctgggaggcctgatccaagatgcccccaactatggctgggaggtggcccagcccgtgccgcatgactggaggaagatggcagaagctgttcaaaatcacgtgaaatccttgaactggggccaccgtgtccagcttcaggacagaaaagtcaagtactttaacatcaaagccagctttgttgacgagcacacggtttgcggcgttgccaaaggtgggaaagagattctgctgtcagccgatcacatcatcattgctactggagggcggccgagataccccacgcacatcgaaggtgccttggaatatggaatcacaagtgatgacatcttctggctgaaggaatcccctggaaaaacgttggtggtcggggccagctatgtggccctggagtgtgctggcttcctcaccgggattgggctggacaccaccatcatgatgcgcagcatccccctccgcggcttcgaccagcaaatgtcctccatggtcatagagcacatggcatctcatggcacccggttcctgaggggctgtgccccctcgcgggtcaggaggctccctgatggccagctgcaggtcacctgggaggacagcaccaccggcaaggaggacacgggcacctttgacaccgtcctgtgggccatagcaccttgcatctctgcgtgtctccccaccaccgtgggacatgctggaaaaaaccagagaagagactgagacggcatcagccaggtgtcctcatcgaggatcaactaggcaatcatcctcgccttccctggcccttgagcaattgcttattaaggtttcagcacataaatcctacttgtcaccttccaggtttaagtcttggtatgtttcttttctttttttttttttttttgagatggagtctcgctctgtcgcccaggctggagtgcagtggcaacctccgcctcccgggttcaagcgattctcctgcctcagcctcctgggtagctggggctacaggcgcccaccactacacctgactaatttttgtatttttagtagagacggggtttcaccatgtaggccaggatggtctcaatctcctgaccttgtgatccacctgccttggcctcccaaagtactgagattacaggtgtgagccaccgcacctggccagtatgtattttttctttagcatattaaatgttttgctgcttcaggctttccagctaggtttttttctttttttgcgtgtgaaacagggtctctctctgttgcctaggaggagtgtggtggtgtgatcatagctcactgcagcctccacctcccaggctcaatcaatcttcccatctcagccttctaagtgctgggattacaggtttgagctactgtgcccagccaagctagtttgttgtttttaacataaaaatgatatggatttgaaagttttaaaaattatggtgacatacacataacatcaaattcatcatcttaagcattttaaagtatatagttcagtggtgttaagtacgttcatattgtacaagcagcatgaccatccatctctagaacttttccattatctccaaactgagctctgtccccattaaacactcactccctgc

SEQ ID NO: 31505 - DNA, 2025 bp, Homo sapiens
  source 1..2025: mol_type = unassigned DNA
ccggacctcaggcccagttcagtgtacttcccctctctacttcctccctccagtcccttctccatccctcccttttttggctgccccttgcctgccttcctcgccagtagcttgcagagtagacacgatgacaccttttgcaggctaaaaaggctgagagtggcactatgtgcagtgagccaccatggaggaccaagcaggtcagcgggactatgatctcctggtggtcggcgggggatctggtggcctggcttgtgccaaggaggccgcccagctgggaaggaaggtggccgtggtggactacgtggaaccttctccccaaggcacccggtggggcctcggcggcacctgcgtcaacgtgggctgcatccccaagaagctgatgcaccaggcggcactgctgggaggcctgatccaagatgcccccaactatggctgggaggtggcccagcccgtgccgcatgactggaggaagatggcagaagctgttcaaaatcacgtgaaatccttgaactggggccaccgtgtccagcttcaggacagaaaagtcaagtactttaacatcaaagccagctttgttgacgagcacacggtttgcggcgttgccaaaggtgggaaagagattctgctgtcagccgatcacatcatcattgctactggagggcggccgagataccccacgcacatcgaaggtgccttggaatatggaatcacaagtgatgacatcttctggctgaaggaatcccctggaaaaacgttggtggtcggggccagctatgtggccctggagtgtgctggcttcctcaccgggattgggctggacaccaccatcatgatgcgcagcatccccctccgcggcttcgaccagcaaatgtcctccatggtcatagagcacatggcatctcatggcacccggttcctgaggggctgtgccccctcgcgggtcaggaggctccctgatggccagctgcaggtcacctgggaggacagcaccaccggcaaggaggacacgggcacctttgacaccgtcctgtgggccataggtcgagtcccagacaccagaagtctgaatttggagaaggctggggtagatactagccccgacactcagaagatcctggtggactcccgggaagccacctctgtgccccacatctacgccattggtgacgtggtggaggggcggcctgagctgacacccatagcgatcatggccgggaggctcctggtgcagcggctcttcggcgggtcctcagatctgatggactacgacaatgttcccacgaccgtcttcaccccgctggagtatggctgtgtggggctgtccgaggaggaggcagtggctcgccacgggcaggagcatgttgaggtctatcacgcccattataaaccactggagttcacggtggctggacgagatgcatcccagtgttatgtaaagatggtgtgcctgagggagcccccacagctggtgctgggcctgcatttccttggccccaacgcaggcgaagttactcaaggatttgctctggggatcaagtgtggggcttcctatgcgcaggtgatgcggaccgtgggtatccatcccacatgctctgaggaggtagtcaagctgcgcatctccaagcgctcaggcctggaccccacggtgacaggctgctgagggtaagcgccatccctgcaggccagggcacacggtgcgcccgccgccagctcctcggaggccagacccaggatggctgcaggccaggtttggggggcctcaaccctctcctggagcgcctgtgagatggtcagcgtggagcgcaagtgctggacaggtggcccgtgtgccccacagggatggctcaggggactgtccacctcacccctgcacctctcagcctctgccgccgggcacccccccccaggctcctggtgccagatgatgacgacctgggtggaaacctaccctgtgggcacccatgtccgagccccctggcatttctgcaatgcaaataaagagggtactttttctgaagtgtg

SEQ ID NO: 31506 - DNA, 1933 bp, Homo sapiens
  source 1..1933: mol_type = unassigned DNA
cacgacgatggcggcaatggcggtggcgctgcggggattaggagggcgcttccggtggcggacgcaggccgtggcgggcggggtgcggggcgcggcgcggggcgcagcagcaggtcagcgggactatgatctcctggtggtcggcgggggatctggtggcctggcttgtgccaaggaggccgcccagctgggaaggaaggtggccgtggtggactacgtggaaccttctccccaaggcacccggtggggcctcggcggcacctgcgtcaacgtgggctgcatccccaagaagctgatgcaccaggcggcactgctgggaggcctgatccaagatgcccccaactatggctgggaggtggcccagcccgtgccgcatgactggaggaagatggcagaagctgttcaaaatcacgtgaaatccttgaactggggccaccgtgtccagcttcaggacagaaaagtcaagtactttaacatcaaagccagctttgttgacgagcacacggtttgcggcgttgccaaaggtgggaaagagattctgctgtcagccgatcacatcatcattgctactggagggcggccgagataccccacgcacatcgaaggtgccttggaatatggaatcacaagtgatgacatcttctggctgaaggaatcccctggaaaaacgttggtggtcggggccagctatgtggccctggagtgtgctggcttcctcaccgggattgggctggacaccaccatcatgatgcgcagcatccccctccgcggcttcgaccagcaaatgtcctccatggtcatagagcacatggcatctcatggcacccggttcctgaggggctgtgccccctcgcgggtcaggaggctccctgatggccagctgcaggtcacctgggaggacagcaccaccggcaaggaggacacgggcacctttgacaccgtcctgtgggccataggtcgagtcccagacaccagaagtctgaatttggagaaggctggggtagatactagccccgacactcagaagatcctggtggactcccgggaagccacctctgtgccccacatctacgccattggtgacgtggtggaggggcggcctgagctgacacccatagcgatcatggccgggaggctcctggtgcagcggctcttcggcgggtcctcagatctgatggactacgacaatgttcccacgaccgtcttcaccccgctggagtatggctgtgtggggctgtccgaggaggaggcagtggctcgccacgggcaggagcatgttgaggtctatcacgcccattataaaccactggagttcacggtggctggacgagatgcatcccagtgttatgtaaagatggtgtgcctgagggagcccccacagctggtgctgggcctgcatttccttggccccaacgcaggcgaagttactcaaggatttgctctggggatcaagtgtggggcttcctatgcgcaggtgatgcggaccgtgggtatccatcccacatgctctgaggaggtagtcaagctgcgcatctccaagcgctcaggcctggaccccacggtgacaggctgctgagggtaagcgccatccctgcaggccagggcacacggtgcgcccgccgccagctcctcggaggccagacccaggatggctgcaggccaggtttggggggcctcaaccctctcctggagcgcctgtgagatggtcagcgtggagcgcaagtgctggacaggtggcccgtgtgccccacagggatggctcaggggactgtccacctcacccctgcacctctcagcctctgccgccgggcacccccccccaggctcctggtgccagatgatgacgacctgggtggaaacctaccctgtgggcacccatgtccgagccccctggcatttctgcaatgcaaataaagagggtactttttctgaa

SEQ ID NO: 31507 - DNA, 3130 bp, Homo sapiens
  source 1..3130: mol_type = unassigned DNA
atggcggcaatggcggtggcgctgcggggattaggagggcgcttccggtggcggacgcaggccgtggcgggcggggtgcggggcgcggcgcggggcgcagcaggtcagcgggactatgatctcctggtggtcggcgggggatctggtggcctggcttgtgccaaggaggccgcccagctgggaaggaaggtggccgtggtggactacgtggaaccttctccccaaggcacccggtggggcctcggcggcacctgcgtcaacgtgggctgcatccccaagaagctgatgcaccaggcggcactgctgggaggcctgatccaagatgcccccaactatggctgggaggtggcccagcccgtgccgcatgactggaggaagatggcagaagctgttcaaaatcacgtgaaatccttgaactggggccaccgtgtccagcttcaggacagaaaagtcaagtactttaacatcaaagccagctttgttgacgagcacacggtttgcggcgttgccaaaggtgggaaagagattctgctgtcagccgatcacatcatcattgctactggagggcggccgagataccccacgcacatcgaaggtgccttggaatatggaatcacaagtgatgacatcttctggctgaaggaatcccctggaaaaacgttggtggtcggggccagctatgtggccctggagtgtgctggcttcctcaccgggattgggctggacaccaccatcatgatgcgcagcatccccctccgcggcttcgaccagcaaatgtcctccatggtcatagagcacatggcatctcatggcacccggttcctgaggggctgtgccccctcgcgggtcaggaggctccctgatggccagctgcaggtcacctgggaggacagcaccaccggcaaggaggacacgggcacctttgacaccgtcctgtgggccataggtcgagtcccagacaccagaagtctgaatttggagaaggctggggtagatactagccccgacactcagaagatcctggtggactcccgggaagccacctctgtgccccacatctacgccattggtgacgtggtggaggggcggcctgagctgacacccatagcgatcatggccgggaggctcctggtgcagcggctcttcggcgggtcctcagatctgatggactacgacaatgttcccacgaccgtcttcaccccgctggagtatggctgtgtggggctgtccgaggaggaggcagtggctcgccacgggcaggagcatgttgaggtctatcacgcccattataaaccactggagttcacggtggctggacgagatgcatcccagtgttatgtaaagatggtgtgcctgagggagcccccacagctggtgctgggcctgcatttccttggccccaacgcaggcgaagttactcaaggatttgctctggggatcaagtgtggggcttcctatgcgcaggtgatgcggaccgtgggtatccatcccacatgctctgaggaggtagtcaagctgcgcatctccaagcgctcaggcctggaccccacggtgacaggctgctgagggtaagcgccatccctgcaggccagggcacacggtgcgcccgccgccagctcctcggaggccagacccaggtatgcaggtggggctggctctgtttgaggacagggcatgtggcaggggtgcaggagccctggccatgggctccctccaggtgtacagcaaggctacacctgccacgccacccagaatgggtgctccatcctgtaaccaggccacagcggtgacaggcagaaggggaagttcccaggggcccaaacctccccgggggaccccagaccccggcctggccacagctgctccccacacacaggaggtatcaagaaacggggctcatccttagcagcctatcccaggtggatgttggcgtggaaggtgtcccgggtgggctaaagtcgggcatctcaagttgctgccccacagggggctgcagtcgggaagctggcctcccaccgaggcctcccaccaaggcctggctcctgcagagttcagcgcccgctcatttccctatctcccagaaggtggagacgctgccctgtgatggccggccctgcccagcctgccctgcacatctggttctgttccagctctgcagagccaggctgaccggggggcatgttgttcatcgtgacctcttctggggaggaagaaactggcaagggctcctggcctctgccccagggatgcctgtgccagagccccctcgcctcgtggtctaatagtgcatcctccggcctgggctgcagggcaggggccggggcagggtgggccctcagcccgtgccatccagcccacctggggcacccccatggctgtcagcccctcccagggttggggtgtttgggctccatctctcccccggggctgaggtggagaccaggcagagcagtgggctccccccaagatgcctgtggacaggctctagggtctgcatggcgccgaggggctctggggaggcctctctgggggtactcagggccccctgcttcaccgtggccgcctccccccggcggggccgcgctcgatagggataaacaaagggcatcctgaggaaactcttatcagaacattacacctcccagagctgttttgttaggagcctgctataaatttttatcatttcaaaatatttttgtagcaccgcgtcgctccctgtgacgcatcgccctggggtggggccattctctgctgggtttatttctcacccatctcccttgggggtccctgggtgtggcagtgggagacatagctaggctgatgtgaggggtgggtggctgacctgtgctgaccttcctgttgttggcaggatggctgcaggccaggtttggggggcctcaaccctctcctggagcgcctgtgagatggtcagcgtggagcgcaagtgctggacaggtggcccgtgtgccccacagggatggctcaggggactgtccacctcacccctgcacctctcagcctctgccgccgggcacccccccccaggctcctggtgccagatgatgacgacctgggtggaaacctaccctgtgggcacccatgtccgagccccctggcatttctgcaatgc

SEQ ID NO: 31508 - DNA, 1964 bp, Homo sapiens
  source 1..1964: mol_type = unassigned DNA
ggcagccctagctgccccagaagccccacgacgatggcggcaatggcggtggcgctgcggggattaggagggcgcttccggtggcggacgcaggccgtggcgggcggggtgcggggcgcggcgcggggcgcagcagcaggtcagcgggactatgatctcctggtggtcggcgggggatctggtggcctggcttgtgccaaggaggccgcccagctgggaaggaaggtggccgtggtggactacgtggaaccttctccccaaggcacccggtggggcctcggcggcacctgcgtcaacgtgggctgcatccccaagaagctgatgcaccaggcggcactgctgggaggcctgatccaagatgcccccaactatggctgggaggtggcccagcccgtgccgcatgactggaggaagatggcagaagctgttcaaaatcacgtgaaatccttgaactggggccaccgtgtccagcttcaggacagaaaagtcaagtactttaacatcaaagccagctttgttgacgagcacacggtttgcggcgttgccaaaggtgggaaagagattctgctgtcagccgatcacatcatcattgctactggagggcggccgagataccccacgcacatcgaaggtgccttggaatatggaatcacaagtgatgacatcttctggctgaaggaatcccctggaaaaacgctgcctgtcagtgtgtcatatgtggccctggagtgtgctggcttcctcaccgggattgggctggacaccaccatcatgatgcgcagcatccccctccgcggcttcgaccagcaaatgtcctccatggtcatagagcacatggcatctcatggcacccggttcctgaggggctgtgccccctcgcgggtcaggaggctccctgatggccagctgcaggtcacctgggaggacagcaccaccggcaaggaggacacgggcacctttgacaccgtcctgtgggccataggtcgagtcccagacaccagaagtctgaatttggagaaggctggggtagatactagccccgacactcagaagatcctggtggactcccgggaagccacctctgtgccccacatctacgccattggtgacgtggtggaggggcggcctgagctgacacccatagcgatcatggccgggaggctcctggtgcagcggctcttcggcgggtcctcagatctgatggactacgacaatgttcccacgaccgtcttcaccccgctggagtatggctgtgtggggctgtccgaggaggaggcagtggctcgccacgggcaggagcatgttgaggtctatcacgcccattataaaccactggagttcacggtggctggacgagatgcatcccagtgttatgtaaagatggtgtgcctgagggagcccccacagctggtgctgggcctgcatttccttggccccaacgcaggcgaagttactcaaggatttgctctggggatcaagtgtggggcttcctatgcgcaggtgatgcggaccgtgggtatccatcccacatgctctgaggaggtagtcaagctgcgcatctccaagcgctcaggcctggaccccacggtgacaggctgctgagggtaagcgccatccctgcaggccagggcacacggtgcgcccgccgccagctcctcggaggccagacccaggatggctgcaggccaggtttggggggcctcaaccctctcctggagcgcctgtgagatggtcagcgtggagcgcaagtgctggacaggtggcccgtgtgccccacagggatggctcaggggactgtccacctcacccctgcacctctcagcctctgccgccgggcacccccccccaggctcctggtgccagatgatgacgacctgggtggaaacctaccctgtgggcacccatgtccgagccccctggcatttctgcaatgcaaataaagagggtactttttctgaagtgtg

SEQ ID NO: 31509 - DNA, 1929 bp, Homo sapiens
  source 1..1929: mol_type = unassigned DNA
cgacgatggcggcaatggcggtggcgctgcggggattaggagggcgcttccggtggcggacgcaggccgtggcgggcggggtgcggggcgcggcgcggggcgcagcagcaggtcagcgggactatgatctcctggtggtcggcgggggatctggtggcctggcttgtgccaaggaggccgcccagctgggaaggaaggtggccgtggtggactacgtggaaccttctccccaaggcacccggtggggcctcggcggcacctgcgtcaacgtgggctgcatccccaagaagctgatgcaccaggcggcactgctgggaggcctgatccaagatgcccccaactatggctgggaggtggcccagcccgtgccgcatgactggaggaagatggcagaagctgttcaaaatcacgtgaaatccttgaactggggccaccgtgtccagcttcaggacagaaaagtcaagtactttaacatcaaagccagctttgttgacgagcacacggtttgcggcgttgccaaaggtgggaaagagattctgctgtcagccgatcacatcatcattgctactggagggcggccgagataccccacgcacatcgaaggtgccttggaatatggaatcacaagtgatgacatcttctggctgaaggaatcccctggaaaaacgtgtgtggtggctcatgcttatgtggccctggagtgtgctggcttcctcaccgggattgggctggacaccaccatcatgatgcgcagcatccccctccgcggcttcgaccagcaaatgtcctccatggtcatagagcacatggcatctcatggcacccggttcctgaggggctgtgccccctcgcgggtcaggaggctccctgatggccagctgcaggtcacctgggaggacagcaccaccggcaaggaggacacgggcacctttgacaccgtcctgtgggccataggtcgagtcccagacaccagaagtctgaatttggagaaggctggggtagatactagccccgacactcagaagatcctggtggactcccgggaagccacctctgtgccccacatctacgccattggtgacgtggtggaggggcggcctgagctgacacccatagcgatcatggccgggaggctcctggtgcagcggctcttcggcgggtcctcagatctgatggactacgacaatgttcccacgaccgtcttcaccccgctggagtatggctgtgtggggctgtccgaggaggaggcagtggctcgccacgggcaggagcatgttgaggtctatcacgcccattataaaccactggagttcacggtggctggacgagatgcatcccagtgttatgtaaagatggtgtgcctgagggagcccccacagctggtgctgggcctgcatttccttggccccaacgcaggcgaagttactcaaggatttgctctggggatcaagtgtggggcttcctatgcgcaggtgatgcggaccgtgggtatccatcccacatgctctgaggaggtagtcaagctgcgcatctccaagcgctcaggcctggaccccacggtgacaggctgctgagggtaagcgccatccctgcaggccagggcacacggtgcgcccgccgccagctcctcggaggccagacccaggatggctgcaggccaggtttggggggcctcaaccctctcctggagcgcctgtgagatggtcagcgtggagcgcaagtgctggacaggtggcccgtgtgccccacagggatggctcaggggactgtccacctcacccctgcacctctcagcctctgccgccgggcacccccccccaggctcctggtgccagatgatgacgacctgggtggaaacctaccctgtgggcacccatgtccgagccccctggcatttctgcaatgcaaataaagagggtactttttctg

SEQ ID NO: 31510 - DNA, 1814 bp, Homo sapiens
  source 1..1814: mol_type = unassigned DNA
cgatgacaccttttgcaggctaaaaaggctgagagtggcactatgtgcagtgagccaccatggaggaccaagcaggtcagcgggactatgatctcctggtggtcggcgggggatctggtggcctggcttgtgccaaggaggccgcccagctgggaaggaaggtggccgtggtggactacgtggaaccttctccccaaggcacccggtggggcctcggcggcacctgcgtcaacgtgggctgcatccccaagaagctgatgcaccaggcggcactgctgggaggcctgatccaagatgcccccaactatggctgggaggtggcccagcccgtgccgcatgactggaggaagatggcagaagctgttcaaaatcacgtgaaatccttgaactggggccaccgtgtccagcttcaggacagaaaagtcaagtactttaacatcaaagccagctttgttgacgagcacacggtttgcggcgttgccaaaggtgggaaagagattctgctgtcagccgatcacatcatcattgctactggagggcggccgagataccccacgcacatcgaaggtgccttggaatatggaatcacaagtgatgacatcttctggctgaaggaatcccctggaaaaacgttggtggtcggggccagctatgtggccctggagtgtgctggcttcctcaccgggattgggctggacaccaccatcatgatgcgcagcatccccctccgcggcttcgaccagcaaatgtcctccatggtcatagagcacatggcatctcatggcacccggttcctgaggggctgtgccccctcgcgggtcaggaggctccctgatggccagctgcaggtcacctgggaggacagcaccaccggcaaggaggacacgggcacctttgacaccgtcctgtgggccataggtcgagtcccagacaccagaagtctgaatttggagaaggctggggtagatactagccccgacactcagaagatcctggtggactcccgggaagccacctctgtgccccacatctacgccattggtgacgtggtggaggggcggcctgagctgacacccatagcgatcatggccgggaggctcctggtgcagcggctcttcggcgggtcctcagatctgatggactacgacaatgttcccacgaccgtcttcaccccgctggagtatggctgtgtggggctgtccgaggaggaggcagtggctcgccacgggcaggagcatgttgaggtctatcacgcccattataaaccactggagttcacggtggctggacgagatgcatcccagtgttatgtaaagatggtgtgcctgagggagcccccacagctggtgctgggcctgcatttccttggccccaacgcaggcgaagttactcaaggatttgctctggggatcaagtgtggggcttcctatgcgcaggtgatgcggaccgtgggtatccatcccacatgctctgaggaggtagtcaagctgcgcatctccaagcgctcaggcctggaccccacggtgacaggctgctgagggtaagcgccatccctgcaggccagggcacacggtgcgcccgccgccagctcctcggaggccagacccaggatggctgcaggccaggtttggggggcctcaaccctctcctggagcgcctgtgagatggtcagcgtggagcgcaagtgctggacaggtggcccgtgtgccccacagggatggctcaggggactgtccacctcacccctgcacctctcagcctctgccgccgggcacccccccccaggctcctggtgccagatgatgacgacctgg

SEQ ID NO: 31511 - DNA, 1385 bp, Homo sapiens
  source 1..1385: mol_type = unassigned DNA
gtttgcgtgtgcgggcgggaccggatttcgtccgtgggcccgggggcggcgggggccggggagtgaggggccggctgagcccacctcgctgggccctccctggcgccccgccttgggcggcggcgagcgcgcgggccgccatgtcgtacatgctcccgcacctgcacaacggctggcaggtggaccaggccatcctctcggaggaggaccgcgtggtcgtcatccgcttcggccacgactgggatcctacgtgcatgaagatggacgaggtcctgtacagcatcgccgagaaggttaaaaattttgcagttatttatcttgtggatattacagaagtgcctgacttcaacaaaatgtatgagttatacgatccatgtactgtcatgtttttcttcaggaacaagcacatcatgattgacttggggactggcaacaacaacaagattaactgggccatggaggacaagcaggagatggtggacatcatcgagacggtgtaccgcggggcccgcaaaggccgcggcctggtggtgtcccccaaggactactccaccaagtaccgctactgaggcgccctcagtctgcgcggataaatgtcgtggagccctttttgtatggaaacgttttaagctatttaaagcctttggaaaatacaggaagctccagggctggagcacctctgagatggaattgataacatggtcttaactcaccgaaataaacaagcacgtggtgagaggagcaggcctacttgtttgttctcaggaaacttaatgaatagattactgattttcctagtcaaagttaattcttacccttggagtaaaacgaaggtgtttatcctgtgagcctgtgcgttttgcatactgggttggtttgctggggctgcggtgacagcatatgccgcgagctgggctttaacagagatgtgtgctctcacagctttgcaggcgggggtctgagatcagggtgtcgcgggtggggggtcactgctgaggccgtgaggggaatctgctcaggcctgtccctggcttctgggggctgctggtggtattttcagttccttggtgtgtggatacttcgccccatctctgccttcacctgtgtcctccctgtgtgggtgctggtgtccaaaatttccccttttcgtagtgacaccagctgtgttggattggggcccaccctgctccagcatggcctaatcttaactaattacatttgcaaggatcttatgtccacaaaagtcacagtctgaggtgctgggggttaggacttcaatatataaattttgcggttacacaattcaatccatgacagaatccaaaggtttactctggttataaaaacagtacaataaaatattgtttatagccttccctgtaagg

SEQ ID NO: 31512 - DNA, 903 bp, Homo sapiens
  source 1..903: mol_type = unassigned DNA
gcgggaccggatttcgtccgtgggcccgggggcggcgggggccggggagtgaggggccggctgagcccacctcgctgggccctccctggcgccccgccttgggcggcggcgagcgcgcgggccgccatgtcgtacatgctcccgcacctgcacaacggctggcaggtggaccaggccatcctctcggaggaggaccgcgtggtcgtcatccgcttcggccacgactgggatcctacgtgcatgaagatggacgaggtcctgtacagcatcgccgagaaggttaaaaattttgcagttatttatcttgtggatattacagaagtgcctgacttcaacaaaatgtatgagttatacgatccatgtactgtcatgtttttcttcagttaccatagaggttggtgaattagctacatgagcattagaccattctccaaaagtggagcctcctactcggaacaagcacatcatgattgacttggggactggcaacaacaacaagattaactgggccatggaggacaagcaggagatggtggacatcatcgagacggtgtaccgcggggcccgcaaaggccgcggcctggtggtgtcccccaaggactactccaccaagtaccgctactgaggcgccctcagtctgcgcggataaatgtcgtggagccctttttgtatggaaacgttttaagctatttaaagcctttggaaaatacaggaagctccagggctggagcacctctgagatggaattgataacatggtcttaactcaccgaaataaacaagcacgtggtgagaggagcaggcctacttgtttgttctcaggaaacttaatgaatagattactgattttcctagtcaaagttaattcttacccttggagtaaaacgaaggtgtttatcctgtg

SEQ ID NO: 31513 - DNA, 1211 bp, Homo sapiens
  source 1..1211: mol_type = unassigned DNA
ggcggcgcagggtccccctctggcggtggcgcgatggtgcgcgccgcctggggagctgcggccgggggtttgaaccggccaacttctccagccggccggggcgagcgccagcgcggcgtccggggcgagtgacacgcagagctgaagccatggttcatcaggtgctctaccgggcgctggtctccaccaagtggctggcggagtccatcaggactggcaagctggggcccggcctgcgggtgctggacgcgtcctggtactcaccaggcacccgagaggcccgcaaggagtacctcgagcgccacgtacccggcgcctctttctttgacatagaagagtgccgggacacggcgtcgccctacgagatgatgctgcccagcgaggctggcttcgccgagtatgtgggccgcctgggcatcagcaaccacacgcacgtggtggtgtatgatggtgaacacctgggcagcttctatgctccccgggtctggtggatgttccgtgtgtttggccaccgcaccgtatcagtgctcaatggtggcttccggaactggctgaaggagggccacccggtgacatccgagccctcacgcccagaaccggccgtcttcaaagccacactggaccgctccctgctcaagacctacgagcaggtgctggagaaccttgaatctaagaggttccagctggtggattcaaggtctcaagggcggttcctgggcaccgagccggagccggatgcagtaggactggactcgggccatatccgtggtgccgtcaacatgcctttcatggacttcctgactgaggatggcttcgagaagggcccagaagagctccgtgctctgttccagaccaagaaggtggatctctcgcagcctctcattgccacgtgccgcaagggagtcaccgcctgccacgtggccttggctgcctacctctgcggcaagcctgatgtggccgtgtacgatggctcctggtccgagtggtttcgccgggcccccccagagagccgtgtgtcccagggaaagtctgagaaggcctgagccgtgacctcttctgcttactgtaactgcggccggtttagtgaccccatgacttacagccggttcttacctcttaggtgaaggagatgacatgtttttagaattgctgtgcaaggctcaccctctctctgtcaacactggaataaactttgccttttctgagtagtg

SEQ ID NO: 31514 - DNA, 1797 bp, Homo sapiens
  source 1..1797: mol_type = unassigned DNA
gccgggggtttgaaccggccaacttctccagccggccggggcgagcgccagcgcggcgtccggggcgagtgagtgcggggcgggggcagcggccgggcgcctgggccgccggtcgggccacctgctgcccggggaaggatagcgttgcgagagtgggacggggtgccccgggaacccctgatccacctagggcagagggcagcgagctacgggccggactcgggcactctggaggcgggcgagctcgggctgcctggggaggccgcaggcgatggcgtgtgcgcggctcgcggagcttcctagccgtgcgcccaccccctctgccttggaaggaaaggggattctaagcccaagatgccatcgccccccatcccgggcatgctttcattgctctttcctggcgggatcgagtactgtaacttctaggagccagatccccgccccaggaagcgcccctacttggagtcctcggaaactcttgccccacccgcttctgcgctgggcccccgggccggctgggaggggcggggccggctttccagagggaatctgcaaacttatcccgctgcacgccccagcctcgctggcttgctgtaaacaaggaacccgggggagtgcggagggagaaagagcttctcccaggcctcaccctactgcacacaccgacttccttcctcacgcctgtctctctttcctggttcccacccgtgccaggtgacacgcagagctgaagccatggttcatcaggtgctctaccgggcgctggtctccaccaagtggctggcggagtccatcaggactggcaagctggggcccggcctgcgggtgctggacgcgtcctggtactcaccaggcacccgagaggcccgcaaggagtacctcgagcgccacgtacccggcgcctctttctttgacatagaagagtgccgggacacggcgtcgccctacgagatgatgctgcccagcgaggctggcttcgccgagtatgtgggccgcctgggcatcagcaaccacacgcacgtggtggtgtatgatggtgaacacctgggcagcttctatgctccccgggtctggtggatgttccgtgtgtttggccaccgcaccgtatcagtgctcaatggtggcttccggaactggctgaaggagggccacccggtgacatccgagccctcacgcccagaaccggccgtcttcaaagccacactggaccgctccctgctcaagacctacgagcaggtgctggagaaccttgaatctaagaggttccagctggtggattcaaggtctcaagggcggttcctgggcaccgagccggagccggatgcagtaggactggactcgggccatatccgtggtgccgtcaacatgcctttcatggacttcctgactgaggatggcttcgagaagggcccagaagagctccgtgctctgttccagaccaagaaggtggatctctcgcagcctctcattgccacgtgccgcaagggagtcaccgcctgccacgtggccttggctgcctacctctgcggcaagcctgatgtggccgtgtacgatggctcctggtccgagtggtttcgccgggcccccccagagagccgtgtgtcccagggaaagtctgagaaggcctgagccgtgacctcttctgcttactgtaactgcggccggtttagtgaccccatgacttacagccggttcttacctcttaggtgaaggagatgacatgtttttagaattgctgtgcaaggctcaccctctctctgtcaacactggaataaactttgccttttctgagtagtg

SEQ ID NO: 31515 - DNA, 965 bp, Homo sapiens
  source 1..965: mol_type = unassigned DNA
aacttctccagccggccggggcgagcgccagcgcggcgtccggggcgagtgacacgcagagctgaagccatggttcatcaggtgctctaccgggcgctggtctccaccaagtggctggcggagtccatcaggactggcaagctggggcccggcctgcgggtgctggacgcgtcctggtactcaccaggcacccgagaggcccgcaaggagtacctcgagcgccacgtacccggcgcctctttctttgacatagaagagtgccgggacacggcgtcgccctacgagatgatgctgcccagcgaggctggcttcgccgagtatgtgggccgcctgggcatcagcaaccacacgcacgtggtggtgtatgatggtgaacacctgggcagcttctatgctccccgggtctggtggatgttccgtgtgtttggccaccgcaccgtatcagtgctcaatggtggcttccggaactggctgaaggagggccacccggtgacatccgagccctcacgcccagaaccggccgtcttcaaagccacactggaccgctccctgctcaagacctacgagcaggtgctggagaaccttgaatctaagaggttccagctggtggattcaaggtctcaagggcggttcctgggcaccgagccggagccggatgcagtaggactggactcgggccatatccgtggtgccgtcaacatgcctttcatggacttcctgactgaggatggctcctggtccgagtggtttcgccgggcccccccagagagccgtgtgtcccagggaaagtctgagaaggcctgagccgtgacctcttctgcttactgtaactgcggccggtttagtgaccccatgacttacagccggttcttacctcttaggtgaaggagatgacatgtttttagaattgctgtgcaaggctcaccctctctctgtcaacactggaataaactttgccttttctg

SEQ ID NO: 31516 - DNA, 451 bp, Homo sapiens
  source 1..451: mol_type = unassigned DNA
ccgcgccacccggcgtccccctcagacccccgcgggtcccggaggccccgcgcgcgaggtgacacgcagagctgaagccatggttcatcaggtgctctaccgggcgctggtctccaccaagtggctggcggagtccatcaggactggcaagctggggcccggcctgcgggtgctggacgcgtcctggtactcaccaggcacccgagaggcccgcaaggagtacctcgagcgccacgtacccggcgcctctttctttgacatagaagagtgccgggacacggcgtcgccctacgagatgatgctgcccagcgaggctggcttcgccgagtatgtgggccgcctgggcatcagcaaccacacgcacgtggtggtgtatgatggtgaacacctgggcagcttctatgctccccgggtctggtggatgttccgtgtgtttggccaccgcaccgta

SEQ ID NO: 31517 - DNA, 2113 bp, Homo sapiens
  source 1..2113: mol_type = unassigned DNA
aggcgccgcagcgcagtggcgggcacgcgcagccgagaagatgtctccgacgccgccgctcttcagtttgcccgaagcgcggacgcggtttacgaagtctaccagagaggccttgaacaacaaaaacatcaagccattgttaagtaccttcagccaggtacctggcagtgaaaatgaaaaaaaatgtacccttgaccaagctttcagaggtattctagaagaagaaattataaatcattcatcatgtgaaaacgttttagctattatttctcttgctattgggggagtaactgaaggtatttgtaccgcatctacaccttttgtattgttgggagatgttttggattgtcttcctttggatcagtgtgacacaatattcacttttgtggaaaaaaatgttgctacttggaaatcaaatacattctattctgctgggaaaaattacttactacgtatgtgcaatgatctcctaagaagattgtctaaatcccagaatacagtcttctgtggacggattcagctctttttggccaggcttttccctctgtctgagaaatcaggtcttaacttgcagagtcagtttaatctggaaaatgtcactgttttcaatacaaatgagcaggaaagcaccctgggtcagaagcacactgaagatagagaagaaggaatggatgtagaagaaggcgaaatgggagacgaggaagctccaacaacgtgctctattccaattgattacaacctgtatcgaaaattctggtcacttcaggattacttcaggaaccctgtgcaatgctatgagaagatttcatggaaaacttttctcaagtattctgaagaagttttagctgtttttaagagttataaattagatgatactcaggcctcaagaaaaaagatggaagaattgaaaacaggaggagaacatgtatattttgcaaaatttttaacaagtgaaaagctgatggatttacaactgagtgacagtaactttcgtcgacacatcctgttgcagtatctcattttattccaatatctcaaggggcaggtcaaattcaaaagttcaaactatgttttaactgatgagcaatcactttggattgaagatactacaaaatcagtttatcaactactatctgaaaacccccccgatggagaaagattttcaaagatggtagagcatatattaaacactgaagaaaactggaactcgtggaaaaatgaaggttgcccaagttttgtgaaagaaagaacatcagataccaaacctacgagaataattcggaagagaacagcacccgaggacttcctagggaaaggacccaccaaaaaaattctgatgggaaatgaggagttaacaaggctttggaatctttgccctgataatatggaagcctgtaaatcagagacaagggaacacatgcccactttggaggaattctttgaagaagccattgaacaggcagaccctgaaaatatggtggaaaatgaatataaggctgtgaacaattcaaattatggttggagagccctgagactattagcacggagaagccctcacttcttccagccaaccaaccagcagtttaaaagtttaccagaatatcttgaaaatatggtaataaagctagccaaggaattaccgcctccttctgaagaaataaaaacaggtgaggatgaagatgaggaagataatgatgctctactgaaggaaaatgaaagtcctgatgttcggcgagacaaacctgtaacaggagaacaaatagaggtatttgccaacaagctgggtgaacaatggaagattctggctccctacttggaaatgaaagactcagaaattaggcagattgagtgtgacagtgaagacatgaagatgagagctaagcagctcctggttgcctggcaagatcaagagggagttcatgcaacacctgagaatctgattaatgcactgaataagtctggattaagtgaccttgcagaaagtctaactaatgacaatgagacaaatagttagcttcttttttttttctttttattaaaactgtgatagattttgttaccaagcagcatttgataagaggtccactggttttggtaaacaataaacattttt

SEQ ID NO: 31518 - DNA, 5609 bp, Homo sapiens
  source 1..5609: mol_type = unassigned DNA
acatccgggcttctgctactagtgagaggaagatggcggccgcggctgtggtggttcccgcagagtggataaagaactgggagaaatcagggagaggcgaatttttgcatttatgtcggatcctcagtgaaaataaaagccatgatagttcaacatacagagatttccagcaagctctctatgagttgtcatatcatgtaattaaaggaaatctaaagcatgaacaggcatctaatgttcttagtgacattagtgaatttcgtgaggatatgccctccattcttgctgatgtattctgcatattagacattgagacaaattgtttagaagaaaaaagcaagagagactattttacacagttggtattagcatgtttgtatttagtttcagacacagttctaaaggaacgcctggatccagaaacactggaatcattagggcttatcaaacaatcacagcaattcaatcaaaagtcagttaaaatcaagacaaaactcttttataagcagcaaaaattcaatttgttaagagaagagaatgaaggttatgccaagctgattgctgaattggggcaagatttatctggaagtattactagtgatttaatcttagaaaatatcaaatctttaataggatgctttaatctggatcccaatagagttttggatgtcattttagaagtgtttgaatgcaggccagaacacgatgacttctttatatctttgttagaatcttacatgagtatgtgtgaaccgcaaacactgtgtcatattcttgggttcaaattcaagttttaccaggaaccaaatggcgagacaccatcatctttatacagagttgcagcagtacttctacaatttaatcttattgatttagatgatctttatgtacatcttcttccggctgataattgcattatggatgaacacaaacgagaaattgcggaagctaagcaaattgttagaaagcttacgatggttgtgttgtcttctgaaaaaatggatgagcgagagaaagaaaaggaaaaagaagaggagaaagtagagaaaccacctgataaccaaaaacttggcttgttggaagccttattaaagattggtgattggcaacatgcacagaacattatggatcagatgcctccatactatgcagcttcacacaagctaatagcccttgctatttgcaagctcattcatataactattgagcctctctaccgaagagttggagttcctaaaggtgctaaaggctcacctgttaatgctttgcaaaacaagagagcaccaaaacaagctgagagctttgaagatttgaggagagacgtgttcaatatgttctgttaccttggtcctcacctttctcacgatcccattttatttgcaaaagtggtgcgcataggcaagtcatttatgaaggagtttcagtctgatggaagcaaacaagaagataaagaaaaaacggaagttatccttagctgtttgcttagcattactgaccaggtactacttccatctctttctttgatggactgcaatgcttgtatgtctgaggaactatggggaatgtttaaaacatttccatatcagcatagatatcgtctgtatggccagtggaagaatgaaacttataacagtcacccacttttagtaaaagttaaagctcaaacaatagacagagccaaatatatcatgaagcgcctaaccaaggaaaatgtgaagccttctggaagacaaattgggaagttgagccacagcaatccaaccattttgtttgattatatcttgtcacaaatacagaagtatgataacttaataacacctgtagtagattcattgaaatacctcacttcactgaattatgatgtcttggcctattgtatcattgaagctttagctaatccagaaaaggaaagaatgaaacatgatgacacaaccatctcaagctggcttcagagtctggctagtttctgtggtgcagtttttcgtaaatatccaattgatcttgctggtcttcttcagtatgttgccaatcagctaaaggcgggcaaaagttttgacctgcttatattgaaagaagtggtacaaaaaatggcaggaatagaaattacagaggaaatgacaatggagcaactagaggctatgactggtggagagcagctaaaagctgagggtggttattttggtcagatcagaaacactaaaaaatcctctcagagattaaaggatgctctattggaccatgatcttgcccttcctctctgtctgcttatggctcagcagagaaatggggtaatctttcaggaaggtggagagaaacatttgaaacttgtgggaaagctctatgaccagtgtcatgataccctggtgcagtttggtgggtttttagcatctaatctgagcacagaagattatataaagcgagtgccttcaattgatgtactctgtaatgaatttcatacaccccatgatgcagcatttttcctgtctaggccaatgtatgcccatcatatttcgtcaaagtatgatgaacttaaaaaatcagaaaagggaagtaaacagcaacataaagttcataagtacattacatcatgtgagatggtgatggcgcctgtccatgaagcagtggtctccttacatgtttccaaagtctgggatgacatcagccctcaattctatgctacattctggtcattgacaatgtatgaccttgcagttccacacaccagctatgaacgagaagtcaataaacttaaagtccagatgaaagcaattgatgacaatcaggaaatgcccccaaataaaaagaaaaaagagaaggagcgctgtactgcccttcaggacaagcttcttgaagaagaaaagaaacagatggaacatgtacagagagttctacagagattgaaactggaaaaggacaactggcttttagcaaaatctaccaaaaatgagaccatcacaaaatttctacagctgtgtatatttcctcgatgtattttttcagcaattgatgctgtttactgtgctcgttttgttgaattggtacatcaacagaaaactccaaatttttccacacttctttgctatgatcgagttttctctgacataatttacacagttgcaagctgtactgaaaatgaagccagtcgatacggaaggtttctttgctgcatgttagagactgtgaccaggtggcatagtgatagagccacatatgaaaaggaatgtggaaactatccaggattccttaccatattacgggcaactggatttgatggtggaaataaggctgatcaattagactatgaaaattttcgacatgttgtacataaatggcattacaaactaaccaaggcatcggtacattgccttgaaacaggcgaatatactcacatcaggaatatcttgattgtgctaacaaaaatacttccttggtacccaaaagttttgaatctgggtcaagctttggaaagaagagtacacaaaatctgccaagaagaaaaagagaagaggccagatctatatgcattggctatgggctactctgggcagttgaaaagtagaaagtcatacatgatacctgaaaatgagtttcatcacaaagacccccctccgaggaatgcagttgccagtgtgcaaaatgggcctggtggtgggccttcttcatcatcaataggaagtgcatctaaatcggatgaaagcagtactgaggagactgataaatcaagggagagatctcagtgtggtgtgaaagctgttaataaagcttctagtaccacacctaaagggaattcaagcaatggaaatagtggctctaacagcaacaaagctgttaaagaaaatgacaaagaaaaagggaaagagaaagaaaaagagaaaaaagaaaagactccagctactactccagaggccagggtacttggtaaagatggtaaagaaaaaccaaaggaagagcggccaaataaagatgaaaaagcaagagagaccaaggaaagaacgccgaagtctgacaaagagaaagaaaaattcaagaaggaagaaaaagctaaagatgagaaatttaagaccactgtccccaacgcagaatcaaaatcaactcaagaaagggaaagagagaaggagccatccagagaaagagatatagcaaaggaaatgaaatcaaaggaaaatgttaaaggaggagaaaaaacaccagtttctgggtccttgaaatcacctgttcccagatcagatattccagagcctgaaagggaacaaaaacgccgcaaaattgatactcacccttctccatcacattcctccacagtaaaggacagtctcatcgaactcaaggaatcttcagcaaagctctacattaatcatactcctccaccactgtccaagagtaaggagagagaaatggacaagaaagatttggacaagtcaagggaaagatccagagaaagagagaaaaaagatgaaaaggacaggaaagagcggaaaagggatcactcaaacaacgaccgtgaagtgccaccggacttaaccaagagacgtaaagaggagaatggaacaatgggggtttcaaaacataaaagtgaaagtccttgtgaatctccttatccaaatgagaaagacaaggaaaaaaataagtcaaaatcttcaggcaaagaaaaaggcagtgattcatttaaatctgagaagatggataaaatctcctccggtggcaaaaaggagtccaggcatgataaagaaaagatagaaaagaaagagaaacgggacagttcaggaggaaaggaagagaagaaacatcataagtcctcggacaagcacagataatgaagactttccatcaaggtgagatcggactggaactgttcggctgcgaccagaaatttattttcctgagtaaattgccgagaattaagaatgaagagggccatttgcatctccttaaattattcagttacctgctttattgctccatgtggaaaacttaaaattgttaagttgtgcattactgtattttaacttgttgcttagtttctacatgtttattttcagtaatggctgaaagtgttaactgttccatacttttagcacaatgtgctgcataaggttacctgtgtacagagttttactttagattaactaaatattgcctgggttcagtttttatttccattctgaaatgcttcctttttattgtttgaaactgaaaataaacaattgttgaacccttttgattttacctcattttaaaactgttttaatttattatttggcttgttcttaatattagtcactaaaagcagtgggagcattgtcttatgaaatgcttaggaatcattttatatagtacatgtacaacattaaacgtgtttaaaaaagaaaaaggtaccagcgatcacttgtcccttgccattttttcttgtaattatgttagacaaatcttggcggcggggggatcaaaacataattgttttaattctacagctgtaggagctttgtattgctgaactttcatctggaaaagtttcacagtgacatttttaaaagagaatttttttatctgccgaattctaccagtgtaaccttttttctaaataaacaatagttttctcaaatggttgt

SEQ ID NO: 31519 - DNA, 4930 bp, Homo sapiens
  source 1..4930: mol_type = unassigned DNA
acacatccgggcttctgctactagtgagaggaagatggcggccgcggctgtggtggttcccgcagagtggataaagaactgggagaaatcagggagaggcgaatttttgcatttatgtcggatcctcagtgaaaataaaagccatgatagttcaacatacagagatttccagcaagctctctatgagttgtcatatcatgtaattaaaggaaatctaaagcatgaacaggcatctaatgttcttagtgacattagtgaatttcgtgaggatatgccctccattcttgctgatgtattctgcatattagacattgagacaaattgtttagaagaaaaaagcaagagagactattttacacagttggtattagcatgtttgtatttagtttcagacacagttctaaaggaacgcctggatccagaaacactggaatcattagggcttatcaaacaatcacagcaattcaatcaaaagtcagttaaaatcaagacaaaactcttttataagcagcaaaaattcaatttgttaagagaagagaatgaaggttatgccaagctgattgctgaattggggcaagatttatctggaagtattactagtgatttaatcttagaaaatatcaaatctttaataggatgctttaatctggatcccaatagagttttggatgtcattttagaagtgtttgaatgcaggccagaacacgatgacttctttatatctttgttagaatcttacatgagtatgtgtgaaccgcaaacactgtgtcatattcttgggttcaaattcaagttttaccaggaaccaaatggcgagacaccatcatctttatacagagttgcagcagtacttctacaatttaatcttattgatttagatgatctttatgtacatcttcttccggctgataattgcattatggatgaacacaaacgagaaattgcggaagctaagcaaattgttagaaagcttacgatggttgtgttgtcttctgaaaaaatggatgagcgagagaaagaaaaggaaaaagaagaggagaaagtagagaaaccacctgataaccaaaaacttggcttgttggaagccttattaaagattggtgattggcaacatgcacagaacattatggatcagatgcctccatactatgcagcttcacacaagctaatagcccttgctatttgcaagctcattcatataactattgagcctctctaccgaagagttggagttcctaaaggtgctaaaggctcacctgttaatgctttgcaaaacaagagagcaccaaaacaagctgagagctttgaagatttgaggagagacgtgttcaatatgttctgttaccttggtcctcacctttctcacgatcccattttatttgcaaaagtggtgcgcataggcaagtcatttatgaaggagtttcagtctgatggaagcaaacaagaagataaagaaaaaacggaagttatccttagctgtttgcttagcattactgaccaggtactacttccatctctttctttgatggactgcaatgcttgtatgtctgaggaactatggggaatgtttaaaacatttccatatcagcatagatatcgtctgtatggccagtggaagaatgaaacttataacagtcacccacttttagtaaaagttaaagctcaaacaatagacagagccaaatatatcatgaagcgcctaaccaaggaaaatgtgaagccttctggaagacaaattgggaagttgagccacagcaatccaaccattttgtttgattatatcttgtcacaaatacagaagtatgataacttaataacacctgtagtagattcattgaaatacctcacttcactgaattatgatgtcttggcctattgtatcattgaagctttagctaatccagaaaaggaaagaatgaaacatgatgacacaaccatctcaagctggcttcagagtctggctagtttctgtggtgcagtttttcgtaaatatccaattgatcttgctggtcttcttcagtatgttgccaatcagctaaaggcgggcaaaagttttgacctgcttatattgaaagaagtggtacaaaaaatggcaggaatagaaattacagaggaaatgacaatggagcaactagaggctatgactggtggagagcagctaaaagctgagggtggttattttggtcagatcagaaacactaaaaaatcctctcagagattaaaggatgctctattggaccatgatcttgcccttcctctctgtctgcttatggctcagcagagaaatggggtaatctttcaggaaggtggagagaaacatttgaaacttgtgggaaagctctatgaccagtgtcatgataccctggtgcagtttggtgggtttttagcatctaatctgagcacagaagattatataaagcgagtgccttcaattgatgtactctgtaatgaatttcatacaccccatgatgcagcatttttcctgtctaggccaatgtatgcccatcatatttcgtcaaagtatgatgaacttaaaaaatcagaaaagggaagtaaacagcaacataaagttcataagtacattacatcatgtgagatggtgatggcgcctgtccatgaagcagtggtctccttacatgtttccaaagtctgggatgacatcagccctcaattctatgctacattctggtcattgacaatgtatgaccttgcagttccacacaccagctatgaacgagaagtcaataaacttaaagtccagatgaaagcaattgatgacaatcaggaaatgcccccaaataaaaagaaaaaagagaaggagcgctgtactgcccttcaggacaagcttcttgaagaagaaaagaaacagatggaacatgtacagagagttctacagagattgaaactggaaaaggacaactggcttttagcaaaatctaccaaaaatgagaccatcacaaaatttctacagctgtgtatatttcctcgatgtattttttcagcaattgatgctgtttactgtgctcgttttgttgaattggtacatcaacagaaaactccaaatttttccacacttctttgctatgatcgagttttctctgacataatttacacagttgcaagctgtactgaaaatgaagccagtcgatacggaaggtttctttgctgcatgttagagactgtgaccaggtggcatagtgatagagccacatatgaaaaggaatgtggaaactatccaggattccttaccatattacgggcaactggatttgatggtggaaataaggctgatcaattagactatgaaaattttcgacatgttgtacataaatggcattacaaactaaccaaggcatcggtacattgccttgaaacaggcgaatatactcacatcaggaatatcttgattgtgctaacaaaaatacttccttggtacccaaaagttttgaatctgggtcaagctttggaaagaagagtacacaaaatctgccaagaagaaaaagagaagaggccagatctatatgcattggctatgggctactctgggcagttgaaaagtagaaagtcatacatgatacctgaaaatgagtttcatcacaaagacccccctccgaggaatgcagttgccagtgtgcaaaatgggcctggtggtgggccttcttcatcatcaataggaagtgcatctaaatcggatgaaagcagtactgaggagactgataaatcaagggagagatctcagtgtggtgtgaaagctgttaataaagcttctagtaccacacctaaagggaattcaagcaatggaaatagtggctctaacagcaacaaagctgttaaagaaaatgacaaagaaaaagggaaagagaaagaaaaagagaaaaaagaaaagactccagctactactccagaggccagggtacttggtaaagatggtaaagaaaaaccaaaggaagagcggccaaataaagatgaaaaagcaagagagaccaaggaaagaacgccgaagtctgacaaagagaaagaaaaattcaagaaggaagaaaaagctaaagatgagaaatttaagaccactgtccccaacgcagaatcaaaatcaactcaagaaagggaaagagagaaggagccatccagagaaagagatatagcaaaggaaatgaaatcaaaggaaaatgttaaaggaggagaaaaaacaccagtttctgggtccttgaaatcacctgttcccagatcagatattccagagcctgaaagggaacaaaaacgccgcaaaattgatactcacccttctccatcacattcctccacagtaaaggacagtctcatcgaactcaaggaatcttcagcaaagctctacattaatcatactcctccaccactgtccaagagtaaggagagagaaatggacaagaaagatttggacaagtcaagggaaagatccagagaaagagagaaaaaagatgaaaaggacaggaaagagcggaaaagggatcactcaaacaacgaccgtgaagtgccaccggacttaaccaagagacgtaaagaggagaatggaacaatgggggtttcaaaacataaaagtgaaagtccttgtgaatctccttatccaaatgagaaagacaaggaaaaaaataagtcaaaatcttcaggcaaagaaaaaggcagtgattcatttaaatctgagaagatggataaaatctcctccggtggcaaaaaggagtccaggcatgataaagaaaagatagaaaagaaagagaaacgggacagttcaggaggaaaggaagagaagaaacatcataagtcctcggacaagcacagataatgaagactttccatcaaggtaatgcacttaatgctttatgtgagatttaaaaagtattttacccatcttaaataaattgtgtttccatcatagtggatacagtgttcagaccct

SEQ ID NO: 31520 - DNA, 2816 bp, Homo sapiens
  source 1..2816: mol_type = unassigned DNA
acatccgggcttctgctactagtgagaggaagatggcggccgcggctgtggtggttcccgcagagtggataaagaactgggagaaatcagggagaggcgaatttttgcatttatgtcggatcctcagtgaaaataaaagccatgatagttcaacatacagagatttccagcaagctctctatgagttgtcatatcatgtaattaaaggaaatctaaagcatgaacaggcatctaatgttcttagtgacattagtgaatttcgtgaggatatgccctccattcttgctgatgtattctgcatattagacattgagacaaattgtttagaagaaaaaagcaagagagactattttacacagttggtattagcatgtttgtatttagtttcagacacagttctaaaggaacgcctggatccagaaacactggaatcattagggcttatcaaacaatcacagcaattcaatcaaaagtcagttaaaatcaagacaaaactcttttataagcagcaaaaattcaatttgttaagagaagagaatgaaggttatgccaagctgattgctgaattggggcaagatttatctggaagtattactagtgatttaatcttagaaaatatcaaatctttaataggatgctttaatctggatcccaatagagttttggatgtcattttagaagtgtttgaatgcaggccagaacacgatgacttctttatatctttgttagaatcttacatgagtatgtgtgaaccgcaaacactgtgtcatattcttgggttcaaattcaagttttaccaggaaccaaatggcgagacaccatcatctttatacagagttgcagcagtacttctacaatttaatcttattgatttagatgatctttatgtacatcttcttccggctgataattgcattatggatgaacacaaacgagaaattgcggaagctaagcaaattgttagaaagcttacgatggttgtgttgtcttctgaaaaaatggatgagcgagagaaagaaaaggaaaaagaagaggagaaagtagagaaaccacctgataaccaaaaacttggcttgttggaagccttattaaagattggtgattggcaacatgcacagaacattatggatcagatgcctccatactatgcagcttcacacaagctaatagcccttgctatttgcaagctcattcatataactattgagcctctctaccgaagagttggagttcctaaaggtgctaaaggctcacctgttaatgctttgcaaaacaagagagcaccaaaacaagctgagagctttgaagatttgaggagagacgtgttcaatatgttctgttaccttggtcctcacctttctcacgatcccattttatttgcaaaagtggtgcgcataggcaagtcatttatgaaggagtttcagtctgatggaagcaaacaagaagataaagaaaaaacggaagttatccttagctgtttgcttagcattactgaccaggtactacttccatctctttctttgatggactgcaatgcttgtatgtctgaggaactatggggaatgtttaaaacatttccatatcagcatagatatcgtctgtatggccagtggaagaatgaaacttataacagtcacccacttttagtaaaagttaaagctcaaacaatagacagagccaaatatatcatgaagcgcctaaccaaggaaaatgtgaagccttctggaagacaaattgggaagttgagccacagcaatccaaccattttgtttgattatgtatgttttgagatcttgtcacaaatacagaagtatgataacttaataacacctgtagtagattcattgaaatacctcacttcactgaattatgatgtcttggcctattgtatcattgaagctttagctaatccagaaaaggaaagaatgaaacatgatgacacaaccatctcaagctggcttcagagtctggctagtttctgtggtgcagtttttcgtaaatatccaattgatcttgctggtcttcttcagtatgttgccaatcagctaaaggcgggcaaaagttttgacctgcttatattgaaagaagtggtacaaaaaatggcaggaatagaaattacagaggaaatgacaatggagcaactagaggctatgactggtggagagcagctaaaagctgagggtggttattttggtcagatcagaaacactaaaaaatcctctcagagattaaaggatgctctattggaccatgatcttgcccttcctctctgtctgcttatggctcagcagagaaatggggtaatctttcaggaaggtggagagaaacatttgaaacttgtgggaaagctctatgaccagtgtcatgataccctggtgcagtttggtgggtttttagcatctaatctgagcacagaagattatataaagcgagtgccttcaattgatgtactctgtaatgaatttcatacaccccatgatgcagcatttttcctgtctaggccaatgtatgcccatcatatttcgtcaaagtatgatgaacttaaaaaatcagaaaagggaagtaaacagcaacataaagttcataagtacattacatcatgtgagatggtgatggcgcctgtccatgaagcagtggtctccttacatgtttccaaagtctgggatgacatcagccctcaattctatgctacattctggtcattgacaatgtatgaccttgcagttccacacaccagctatgaacgagaagtcaataaacttaaagtccagatgaaagcaattgatgacaatcaggaaatgattcctccacagtaa

SEQ ID NO: 31521 - DNA, 1365 bp, Homo sapiens
  source 1..1365: mol_type = unassigned DNA
gggaacaaaaacgccgcaaaattgatactcacccttctccatcacattcctccacagtaaaggacagtctcatcgaactcaaggaatcttcagcaaagctctacattaatcatactcctccaccactgtccaagagtaaggagagagaaatggacaagaaagatttggacaagtcaagggaaagatccagagaaagagagaaaaaagatgaaaaggacaggaaagagcggaaaagggatcactcaaacaacgaccgtgaagtgccaccggacttaaccaagagacgtaaagaggagaatggaacaatgggggtttcaaaacataaaagtgaaagtccttgtgaatctccttatccaaatgagaaagacaaggaaaaaaataagtcaaaatcttcaggcaaagaaaaaggcagtgattcatttaaatctgagaagatggataaaatctcctccggtggcaaaaaggagtccaggcatgataaagaaaagatagaaaagaaagagaaacgggacagttcaggaggaaaggaagagaagaaacatcataagtcctcggacaagcacagataatgaagactttccatcaaggtgagatcggactggaactgttcggctgcgaccagaaatttattttcctgagtaaattgccgagaattaagaatgaagagggccatttgcatctccttaaattattcagttacctgctttattgctccatgtggaaaacttaaaattgttaagttgtgcattactgtattttaacttgttgcttagtttctacatgtttattttcagtaatggctgaaagtgttaactgttccatacttttagcacaatgtgctgcataaggttacctgtgtacagagttttactttagattaactaaatattgcctgggttcagtttttatttccattctgaaatgcttcctttttattgtttgaaactgaaaataaacaattgttgaacccttttgattttacctcattttaaaactgttttaatttattatttggcttgttcttaatattagtcactaaaagcagtgggagcattgtcttatgaaatgcttaggaatcattttatatagtacatgtacaacattaaacgtgtttaaaaaagaaaaaggtaccagcgatcacttgtcccttgccattttttcttgtaattatgttagacaaatcttggcggcggggggatcaaaacataattgttttaattctacagctgtaggagctttgtattgctgaactttcatctggaaaagtttcacagtgacatttttaaaagagaatttttttatctgccgaattctaccagtgtaaccttttttctaaataaacaatagttttctcaaatggttgta

SEQ ID NO: 31522 - DNA, 1589 bp, Homo sapiens
  source 1..1589: mol_type = unassigned DNA
ttccgggcgcatgcgtgcggcagcggcgccaggactgactgcgccgtggaggctgctgcagtgttgtgagttggaagctggggagctcggcatggcggtccccgctgcagccatggggccctcggcgttgggccagagcggccccggctcgatggccccgtggtgctcagtgagcagcggcccgtcgcgctacgtgcttgggatgcaggagctgttccggggccacagcaagacgcgcgagttcctggcgcacagcgccaaggtgcactcggtggcctggagttgcgacgggcgtcgcctagcctcggggtccttcgacaagacggccagcgtcttcttgctggagaaggaccggttggtcaaagaaaacaattatcggggacatggggatagtgtggaccagctttgttggcatccaagtaatcctgacctatttgttacggcgtccggagataaaaccattcgcatctgggatgtgaggactacaaaatgcattgccactgtgaacactaaaggggagaacattaatatctgctggagtcctgatgggcagaccattgctgtaggcaacaaggatgatgtggtgacctttattgatgccaagacacaccgttccaaagcagaagagcagttcaagttcgaggtcaacgaaatctcctggaacaatgacaataatatgttcttcctgacaaatggcaatggttgtatcaacatcctcagctacccagaactgaagcctgtgcagtccatcaacgcccatccttccaactgcatctgtatcaagtttgaccccatggggaagtactttgccacaggaagtgcagatgctttggtcagcctctgggatgtggatgagttagtgtgtgttcggtgcttttccaggctggattggcctgtaagaaccctcagtttcagccatgatgggaaaatgctggcgtcagcatcggaagatcattttattgacattgctgaagtggagacaggggacaaactatgggaggtacagtgtgagtctccgaccttcacagtggcgtggcaccccaaaaggcctctgctggcatttgcctgtgatgacaaagacggcaaatatgacagcagccgggaagccggaactgtgaagctgtttgggcttcctaatgattcttgagaggaggttgtagggagaggaggccccggcagaggtcttccttcatgtggttagtttggtctgttctctcggagttggtgggcaccctaaatatttgtaagttggtataaattgtaaacgtctctggtcaggctgcgcatttcattcttttgctttgtctgtgtattagctctttccattctttgcccccagcatgagttaactcgcgtggactctgcagtgcgagtagtgaccccaccataccttgtcctctggacctcctgtcttctctgcttctgggtgcatggtagactttgtggcatttgatacaacttggacaatacctagtttggagggaggggaatggaagggcatggaagtttttttaaataattaaaaatatatatatataattttgagaattgagcatttaataaactgacttttgttattatggaacttc

SEQ ID NO: 31523 - DNA, 2560 bp, Homo sapiens
  source 1..2560: mol_type = unassigned DNA
gggcagtggggctgggagatggggcggggctgggcgctccgggactgaggtgctgatcgcccaaagggcgcccctgggctggggtctgacccggcttctcctccctcactacccgcggtccccggcctctcggcgctgcgctgttacctcatccgaaaagtgttcgctgcagcatcctcaggcttcacgttggagcctcttgattgtggaggaacaaccatgtcatcagaatcgagcaaaaaacggaagcccaaagtgatccgaagcgatggagccccagctgaaggaaagcggaatcgatctgacaccgagcaggaaggtaaatactacagtgaggaggccgaggtggatctgcgggaccctggcagagactatgagttatacaagtacacctgccaggagctacagaggctgatggctgagatccaagacctgaagagcaggggtggcaaggatgtggcaatagaaatagaagaacggaggatccagagctgtgtgcatttcatgactctaaagaagcttaaccgattagcccacatcaggttgaagaaaggaagagatcagacccacgaggctaagcagaaagtagatgcctatcatctgcagctccagaacctgttgtatgaggtgatgcacctacagaaggagatcaccaaatgtttggagtttaagtcaaagcatgaagaaattgatctggtcagtttagaggagttttataaggaggctccaccagatatcagcaaggccgaagtcaccatgggagaccctcaccagcaaacactggcacgtctggactgggagctggagcagcggaaaaggctggcagagaagtaccgagagtgcctatctaacaaggagaagattctcaaggagattgaggtgaagaaggagtacctgagcagcctccagccccgcctcaacagcatcatgcaggcttcccttccggtgcaggagtacctgtttatgccattcgaccaggctcacaagcagtatgagacagccagacacctgccgcctcccctctatgtcctctttgttcaggccactgcgtatgggcaggcctgtgataagacgttatctgtggcaatcgaaggcagtgtggatgaagccaaggctctgttcaaacctccagaggactcccaagatgacgagagtgactcagatgccgaggaggagcagactacgaagcgccggagacccacactgggggttcagttggacgacaaacgcaaggagatgctgaagaggcacccactgtctgtcatgctcgacctgaagtgcaaagatgacagtgtgcttcacctgactttctactacctcatgaacctcaacatcatgacagtaaaagccaaagtgacaactgccatggagctgatcacccccatcagtgcaggtgacttgctgtctcctgactcagtcctgagttgcttgtatcctggggatcatggaaagaaaactccgaatccagccaatcagtatcagtttgataaagttggcatcctgactttgagcgactatgtacttgagctaggtcacccctatttgtgggtgcagaagctgggtggcctccacttccccaaagagcagccccagcaaacagtgattgctgaccactcgctgagcgccagccacatggagaccaccatgaaacttctgaagaccagggtgcagtcccgcctggccctccacaaacagtttgcatccctagaacatggcattgtgccagttaccagtgattgccagtacctcttccctgccaaggttgtctctcgcctggtgaaatgggtgacagttgcccatgaggattacatggagctgcacttcaccaaagacattgtggatgcgggactggctggggacaccaatctctactacatggcgctcatcgaaaggggcacagccaaactgcaggccgctgtggtgttgaaccctggctactcctccatcccacctgttttccagctctgtttgaactggaaaggggagaaaaccaacagcaacgatgacaacattcgggccatggagggcgaagtcaatgtgtgctacaaggagctgtgtggcccttggcccagccaccagctgttgaccaaccagctgcagcggctgtgtgtgctgctggatgtttacctggagaccgagagccatgacgacagtgtggaggggcccaaggaatttccccaggagaagatgtgtctgcggctcttcaggggtcctagcaggatgaagccatttaaatacaaccatcctcagggattcttcagccatcgctgatctcccgcgcagaccgttgtttcccccaaggcctcaccctgagcactgggcttctgctttctgctctggcccacatgtgactcttgatattctccaaagacaccagccaattaaaaagcgtcacctgaccagtggcctttgtctgtggttcctggcaaggtggctttgcagtctggaagggcaggtgggagctgtgacacagtgtgaaaaagcatttgtagagagactttttctcagcagccaataaaagcagagtggaaaaagattccaattctgcagagagatgctc

SEQ ID NO: 31524 - DNA, 2676 bp, Homo sapiens
  source 1..2676: mol_type = unassigned DNA
gggcagtggggctgggagatggggcggggctgggcgctccgggactgaggtgctgatcgcccaaagggcgcccctgggctggggtctgacccggcttctcctccctcactacccgcggtccccggcctctcggcgctgcgctgttacctcatccgaaaagtgttcgctgcagcatcctcaggcttcacgttggagcctcttgattgtggtgttcagcattatttaagatcacctatgcatcatctgaagccacagtcccaggtcatcttcatcaccttccccagtggaatgcctcctgtgttaaagcccacaacaacccctgtggaggaacaaccatgtcatcagaatcgagcaaaaaacggaagcccaaagtgatccgaagcgatggagccccagctgaaggaaagcggaatcgatctgacaccgagcaggaaggtaaatactacagtgaggaggccgaggtggatctgcgggaccctggcagagactatgagttatacaagtacacctgccaggagctacagaggctgatggctgagatccaagacctgaagagcaggggtggcaaggatgtggcaatagaaatagaagaacggaggatccagagctgtgtgcatttcatgactctaaagaagcttaaccgattagcccacatcaggttgaagaaaggaagagatcagacccacgaggctaagcagaaagtagatgcctatcatctgcagctccagaacctgttgtatgaggtgatgcacctacagaaggagatcaccaaatgtttggagtttaagtcaaagcatgaagaaattgatctggtcagtttagaggagttttataaggaggctccaccagatatcagcaaggccgaagtcaccatgggagaccctcaccagcaaacactggcacgtctggactgggagctggagcagcggaaaaggctggcagagaagtaccgagagtgcctatctaacaaggagaagattctcaaggagattgaggtgaagaaggagtacctgagcagcctccagccccgcctcaacagcatcatgcaggcttcccttccggtgcaggagtacctgtttatgccattcgaccaggctcacaagcagtatgagacagccagacacctgccgcctcccctctatgtcctctttgttcaggccactgcgtatgggcaggcctgtgataagacgttatctgtggcaatcgaaggcagtgtggatgaagccaaggctctgttcaaacctccagaggactcccaagatgacgagagtgactcagatgccgaggaggagcagactacgaagcgccggagacccacactgggggttcagttggacgacaaacgcaaggagatgctgaagaggcacccactgtctgtcatgctcgacctgaagtgcaaagatgacagtgtgcttcacctgactttctactacctcatgaacctcaacatcatgacagtaaaagccaaagtgacaactgccatggagctgatcacccccatcagtgcaggtgacttgctgtctcctgactcagtcctgagttgcttgtatcctggggatcatggaaagaaaactccgaatccagccaatcagtatcagtttgataaagttggcatcctgactttgagcgactatgtacttgagctaggtcacccctatttgtgggtgcagaagctgggtggcctccacttccccaaagagcagccccagcaaacagtgattgctgaccactcgctgagcgccagccacatggagaccaccatgaaacttctgaagaccagggtgcagtcccgcctggccctccacaaacagtttgcatccctagaacatggcattgtgccagttaccagtgattgccagtacctcttccctgccaaggttgtctctcgcctggtgaaatgggtgacagttgcccatgaggattacatggagctgcacttcaccaaagacattgtggatgcgggactggctggggacaccaatctctactacatggcgctcatcgaaaggggcacagccaaactgcaggccgctgtggtgttgaaccctggctactcctccatcccacctgttttccagctctgtttgaactggaaaggggagaaaaccaacagcaacgatgacaacattcgggccatggagggcgaagtcaatgtgtgctacaaggagctgtgtggcccttggcccagccaccagctgttgaccaaccagctgcagcggctgtgtgtgctgctggatgtttacctggagaccgagagccatgacgacagtgtggaggggcccaaggaatttccccaggagaagatgtgtctgcggctcttcaggggtcctagcaggatgaagccatttaaatacaaccatcctcagggattcttcagccatcgctgatctcccgcgcagaccgttgtttcccccaaggcctcaccctgagcactgggcttctgctttctgctctggcccacatgtgactcttgatattctccaaagacaccagccaattaaaaagcgtcacctgaccagtggcctttgtctgtggttcctggcaaggtggctttgcagtctggaagggcaggtgggagctgtgacacagtgtgaaaaagcatttgtagagagactttttctcagcagccaataaaagcagagtggaaaaagattccaattctgcagagagatgctc

SEQ ID NO: 31525 - DNA, 2374 bp, Homo sapiens
  source 1..2374: mol_type = unassigned DNA
cccttccttacttccggttctctatggtgcgcgggcaagctttgctccgcctccggcagtggcttactcccggtgccaggttcttggagctgtgaggtgttcagcattatttaagatcacctatgcatcatctgaagccacagtcccaggtcatcttcatcaccttccccagtggaatgcctcctgtgttaaagcccacaacaacccctgtggaggaacaaccatgtcatcagaatcgagcaaaaaacggaagcccaaagtgatccgaagcgatggagccccagctgaaggaaagcggaatcgatctgacaccgagcaggaaggtaaatactacagtgaggaggccgaggtggatctgcgggaccctggcagagactatgagttatacaagtacacctgccaggagctacagaggctgatggctgagatccaagacctgaagagcaggggtggcaaggatgtggcaatagaaatagaagaacggaggatccagagctgtgtgcatttcatgactctaaagaagcttaaccgattagcccacatcaggttgaagaaaggaagagatcagacccacgaggctaagcagaaagtagatgcctatcatctgcagctccagaacctgttgtatgaggtgatgcacctacagaaggagatcaccaaatgtttggagtttaagtcaaagcatgaagaaattgatctggtcagtttagaggagttttataaggaggctccaccagatatcagcaaggccgaagtcaccatgggagaccctcaccagcaaacactggcacgtctggactgggagctggagcagcggaaaaggctggcagagaagtaccgagagtgcctatctaacaaggagaagattctcaaggagattgaggtgaagaaggagtacctgagcagcctccagccccgcctcaacagcatcatgcaggcttcccttccggtgcaggagtacctgtttatgccattcgaccaggctcacaagcagtatgagacagccagacacctgccgcctcccctctatgtcctctttgttcaggccactgcgtatgggcaggcctgtgataagacgttatctgtggcaatcgaaggcagtgtggatgaagccaaggctctgttcaaacctccagaggactcccaagatgacgagagtgactcagatgccgaggaggagcagactacgaagcgccggagacccacactgggggttcagttggacgacaaacgcaaggagatgctgaagaggcacccactgtctgtcatgctcgacctgaagtgcaaagatgacagtgtgcttcacctgactttctactacctcatgaacctcaacatcatgacagtaaaagccaaagtgacaactgccatggagctgatcacccccatcagtgcaggtgacttgctgtctcctgactcagtcctgagttgcttgtatcctggggatcatggaaagaaaactccgaatccagccaatcagtatcagtttgataaagttggcatcctgactttgagcgactatgtacttgagctaggtcacccctatttgtgggtgcagaagctgggtggcctccacttccccaaagagcagccccagcaaacagtgattgctgaccactcgctgagcgccagccacatggagaccaccatgaaacttctgaagaccagggtgcagtcccgcctggccctccacaaacagtttgcatccctagaacatggcattgtgccagttaccagtgattgccagtacctcttccctgccaaggttgtctctcgcctggtgaaatgggtgacagttgcccatgaggattacatggagctgcacttcaccaaagacattgtggatgcgggactggctggggacaccaatctctactacatggcgctcatcgaaaggggcacagccaaactgcaggccgctgtggtgttgaaccctggctactcctccatcccacctgttttccagctctgtttgaactggaaaggggagaaaaccaacagcaacgatgacaacattcgggccatggagggcgaagtcaatgtgtgctacaaggagctgtgtggcccttggcccagccaccagctgttgaccaaccagctgcagcggctgtgtgtgctgctggatgtttacctggagaccgagagccatgacgacagtgtggaggggcccaaggaatttccccaggagaagatgtgtctgcggctcttcaggggtcctagcaggatgaagccatttaaatacaaccatcctcagggattcttcagccatcgctgatctcccgcgcagaccgttgtttcccccaaggcctcaccctgagcactgggcttctgctttctgctctggcccacatgtgactcttgatattctccaaag

SEQ ID NO: 31526 - DNA, 738 bp, Homo sapiens
  source 1..738: mol_type = unassigned DNA
aacagagatgacaaaagaccacttgaagagaggttcctaatactagacagatggagagtggcttggctgtttccccctgcatattggggttgaaaacttaaatgtgtagttccagtccttctatgcagagtctctcctgccctccctccttcctgcagtctcaccacgccaccacctccctcgggggcctccgcgctgagcttccggcctctacgcctcgcttccggtcggccgccccttccttacttccggttctctatggtgcgcgggcaagctttgctccgcctccggcagtggcttactcccggtgccaggttcttggagctgtgaggtgttcagcattatttaagatcacctatgcatcatctgaagccacagtcccaggtcatcttcatcaccttccccagtggaatgcctcctgtgttaaagcccacaacaacccctgtggaggaacaaccatgtcatcagaatcgagcaaaaaacggaagcccaaagtgatccgaagcgatggagccccagctgaaggaaagcggaatcgatctgacaccgagcaggaaggtaaatactacagtgaggaggccgaggtggatctgcgggaccctggcagagactatgagttatacaagtacacctgccaggagctacagaggctgatggctgagatccaagacctgaagagcaggggtggcaaggatgtggcaatagaaatagaagaacggaggatccagagctgtgtgc

SEQ ID NO: 31527 - DNA, 729 bp, Homo sapiens
  source 1..729: mol_type = unassigned DNA
gagctgtgaggtgaggaggggacaagggcagtggggctgggagatggggcggggctgggcgctccgggactgaggtgctgatcgcccaaagggcgcccctgggctggggtctgacccggcttctcctccctcactacccgcggtccccggcctctcggcgctgcgctgttacctcatccgaaaagtgttcgctgcagcatcctcaggcttcacgttggagcctcttgattgtggaggaacaaccatgtcatcagaatcgagcaaaaaacggaagcccaaagtgatccgaagcgatggagccccagctgaaggaaagcggaatcgatctgacaccgagcaggaaggtaaatactacagtgaggaggccgaggtggatctgcgggaccctggcagagactatgagttatacaagtacacctgccaggagctacagaggctgatggctgagatccaagacctgaagagcaggggtggcaaggatgtggcaatagaaatagaagaacggaggatccagagctgtgtgcatttcatgactctaaagaagcttaaccgattagcccacatcaggttgaagaaaggaagagatcagacccacgaggctaagcagaaagtagatgcctatcatctgcagctccagaacctgttgtatgaggtgatgcacctacagaaggagatcaccaaatgtttggagtttaagtcaaagcatgaagaaattgatctggtcagttt

SEQ ID NO: 31528 - DNA, 1006 bp, Homo sapiens
  source 1..1006: mol_type = unassigned DNA
gggcagtggggctgggagatggggcggggctgggcgctccgggactgaggtgctgatcgcccaaagggcgcccctgggctggggtctgacccggcttctcctccctcactacccgcggtccccggcctctcggcgctgcgctgttacctcatccgaaaagtgttcgctgcagcatcctcaggcttcacgttggagcctcttgattgtggtgttcagcattatttaagatcacctatgcatcatctgaagccacagtcccaggtcatcttcatcaccttccccagtggaatgcctcctgtgttaaagcccacaacaacccctgtggaggaacaaccatgtcatcagaatcgagcaaaaaacggaagcccaaagtgatccgaagcgatggagccccagctgaaggaaagcggaatcgatctgacaccgagcaggaaggtaaatactacagtgaggaggccgaggtggatctgcgggaccctggcagagactatgagttatacaagtacacctgccaggagctacagaggctgatggctgagatccaagacctgaagagcaggggtggcaaggatgtggcaatagaaatagaagaacggaggatccagagctgtgtgcatttcatgactctaaagaagcttaaccgattagcccacatcaggttgaagaaaggaagagatcagacccacgaggctaagcagaaagtagatgcctatcatctgcagctccagaacctgttgtatgaggtgatgcacctacagaaggagatcaccaaatgtttggagtttaagtcaaagcatgaagaaattgatctggtcagtttagaggagttttataaggaggctccaccagatatcagcaaggccgaagtcaccatgggagaccctcaccagcaaacactggcacgtctggactgggagctggagcagcggaaaaggctggcagagaagtaccgagagtgcctatctaacaaggagaagattctcaaggagattgaggtgaagaagga

SEQ ID NO: 31529 - DNA, 4753 bp, Homo sapiens
  source 1..4753: mol_type = unassigned DNA
gcttccggtcggccgccccttccttacttccggttctctatggtgcgcgggcaagctttgctccgcctccggcagtggcttactcccggtgccaggttcttggagctgtgaggaggaacaaccatgtcatcagaatcgagcaaaaaacggaagcccaaagtgatccgaagcgatggagccccagctgaaggaaagcggaatcgatctgacaccgagcaggaaggtaaatactacagtgaggaggccgaggtggatctgcgggaccctggcagagactatgagttatacaagtacacctgccaggagctacagaggctgatggctgagatccaagacctgaagagcaggggtggcaaggatgtggcaatagaaatagaagaacggaggatccagagctgtgtgcatttcatgactctaaagaagcttaaccgattagcccacatcaggttgaagaaaggaagagatcagacccacgaggctaagcagaaagtagatgcctatcatctgcagctccagaacctgttgtatgaggtgatgcacctacagaaggagatcaccaaatgtttggagtttaagtcaaagcatgaagaaattgatctggtcagtttagaggagttttataaggaggctccaccagatatcagcaaggccgaagtcaccatgggagaccctcaccagcaaacactggcacgtctggactgggagctggagcagcggaaaaggctggcagagaagtaccgagagtgcctatctaacaaggagaagattctcaaggagattgaggtgaagaaggagtacctgagcagcctccagccccgcctcaacagcatcatgcaggcttcccttccggtgcaggagtacctgtttatgccattcgaccaggctcacaagcagtatgagacagccagacacctgccgcctcccctctatgtcctctttgttcaggccactgcgtatgggcaggcctgtgataagacgttatctgtggcaatcgaaggcagtgtggatgaagccaaggctctgttcaaacctccagaggactcccaagatgacgagagtgactcagatgccgaggaggagcagactacgaagcgccggagacccacactgggggttcagttggacgacaaacgcaaggagatgctgaagaggcacccactgtctgtcatgctcgacctgaagtgcaaagatgacagtgtgcttcacctgactttctactacctcatgaacctcaacatcatgacagtaaaagccaaagtgacaactgccatggagctgatcacccccatcagtgcaggtgacttgctgtctcctgactcagtcctgagttgcttgtatcctggggatcatggaaagaaaactccgaatccagccaatcagtatcagtttgataaagttggcatcctgactttgagcgactatgtacttgagctaggtcacccctatttgtgggtgcagaagctgggtggcctccacttccccaaagagcagccccagcaaacagtgattgctgaccactcgctgagcgccagccacatggagaccaccatgaaacttctgaagaccagggtgcagtcccgcctggccctccacaaacagtttgcatccctagaacatggcattgtgccagttaccagtgattgccagtacctcttccctgccaaggttgtctctcgcctggtgaaatgggtgacagttgcccatgaggattacatggagctgcacttcaccaaagacattgtggatgcgggactggctggggacaccaatctctactacatggcgctcatcgaaaggggcacagccaaactgcaggccgctgtggtgttgaaccctggctactcctccatcccacctgttttccagctctgtttgaactggaaaggggagaaaaccaacagcaacgatgacaacattcgggccatggagggcgaagtcaatgtgtgctacaaggagctgtgtggcccttggcccagccaccagctgttgaccaaccagctgcagcggctgtgtgtgctgctggatgtttacctggagaccgagagccatgacgacagtgtggaggggcccaaggaatttccccaggagaagatgtgtctgcggctcttcaggggtcctagcaggatgaagccatttaaatacaaccatcctcagggattcttcagccatcgctgatctcccgcgcagaccgttgtttcccccaaggcctcaccctgagcactgggcttctgctttctgctctggcccacatgtgactcttgatattctccaaagacaccagccaattaaaaagcgtcacctgaccagtggcctttgtctgtggttcctggcaaggtggctttgcagtctggaagggcaggtgggagctgtgacacagtgtgaaaaagcatttgtagagagactttttctcagcagccaataaaagcagagtggaaaaagattccaattctgcagagagatgctcacctcttgtctacgcacaccctatttgtgctttgcggggtgaggtcctcatgatcttgtatttattatcccaagttcctgctgttaagaggtggtaggagaagccaaaggcagcagagcacaaaaagcaaaactcttccctccccacccgctcttcccattagtcctgtcagggttgccgatggacaaattgtctctgatcgttggatgttataaatgtctgacagtgcagtgcaaacagaagacaaactcagttgatccttgaacaactcaggggttaggggcaccaacaccccctgccctgcacagttgaaaaatccgtgtataacttttgactccctaaaaacttaactaatagcctgctgttgaccagtagtatgctattagtagttacttactgctaacatagtcagtacatattttcagtatatattttgtatcttatacactgtattcttacaatacagtaaactagagaaaagaaaatgttataaggaaagtcacaagggggcctgagtgcagtggctcacgtctgtaatcccagcactttgggaggccaaggcgggtggatcacttgaggtcaggagtttgagaccagcctggccgacatggtgaaaccctgtctctactaaaaacatggaaattagccaagcgtggtggcgcatgcctgtagtcccagttactcaggaggctgaggcagaattacttgaacccatgaggcagaggttgcagtaagccaagatcacgctcctgcgctccggcttgggcgagagtgagactccgtctcaaaaataaataaataagaaagccataaggaagaaaatatatatctactattaagtagaagtggatcaccataaaggtcttcacatactgtctcagggttgaatagtctaaggaagaggaggggttggtcttggtgtctcagggatggcagaggcagaaaaagtgggggaggtggagggggaggcaggcaccactgttatttttattgaacaaaatctgtgcagggactcatgactgtaatcctagtactttggaaagctaaggcgggaggatcccttgaggccaggagttcaggtccagcctgggcaacgtagtgagagaccctgtatctacaaaaaatttaaaaatcagccaggtgtggtggtatgcaccaatagtcccagttactcagaaggctgaggtgggcggatgactggagtccaggagttcaaggtagcagtgagctattcatcgtgcctgtactgtactccagcctgggaaacaatgcgagtccctatctctaaaaaattttaaaaaaagaaatctgcatataatagacccacagagtccaaactattgttcagagatcaactgtacttcacagagagtaattctaagtcttacaggatttcatggagatggcgagagtggtgttggagaatcaatcacatacagagatacaggacagtgagaccaggtaacatttgaggagaatattttttttttattgagacagggtcttgctctgttgtccaggctggagtgcagtggcacgaacacagctcactgccgcctcaacctctcctgggttcaagtgatcctcctgcctcagcctcccaagtagctgggaccacaggtgtgtgccaccatttctggctaatttttaaattttttgtagaggcgggatcccactatttttcccaggctggtctcaaactcctgggctcaaatgatcctcccacctcggcctcccaaagtgctaggattataggcatgagccaccacacccggcctgagtagagtctttaaggtaatgacaaaagtgcctcaaaatataattatttgattaagagaagtcttgggaagataggtaacaacctttaaaatgttcataaaattacatcctttgtaatactcctgcaagtcaaagtaaaggatggcatagactattcttggacagttttgtcaaaaagtgtatcttgaccccaccatcagtactccattcttcattttaaaaaataagatgggctgggcacagtggcttacgcctttaatatcagtactttgggaggctggtgggcggatcacctgagatcaggagttcaagaccagcctggccaacatggtgaaaccccgtctctactaaaaatacaaaaattagctgggcatggtggtgcgcgcctgtaatcccagccactcgggaggctgaggcaggagaattgcttgaatccccgaggcggaggttgcactgagccgagatggtgccactgcaccatctggacaacagagcaagactccgtcttgg

SEQ ID NO: 31530 - DNA, 990 bp, Homo sapiens
  source 1..990: mol_type = unassigned DNA
gcctcctcctccatggctgtttacccggctgcattgtgggagtttgacctccgccgccgccaaccgccgcctcagcttgcgccgccgccgccgccgccgccgccgcgcacgccatgggagccgtgactgacgacgaagttatacggaagcgtctcctcattgatggagatggtgctggagatgatcggagaattaatctgctagtgaagagtttcattaaatggtgcaactctgggtcccaggaagagggatatagccagtaccaacgtatgctgagcacgctgtctcaatgtgaattttcaatgggcaaaactttactagtatatgatatgaatctcagagaaatggaaaattatgaaaaaatttacaaggaaatagaatgtagcatagctggagcacatgaaaaaattgctgagtgcaaaaagcaaattcttcaagcaaaacgaatacgaaaaaatcgccaagaatatgatgctttggcaaaagtgattcagcaccatccagacaggcatgagacattaaaggaactagaggctctgggaaaagaattagagcatctttcacacattaaagaaagtgttgaagataagctggaattgagacggaaacagtttcatgttcttcttagtaccatccatgaacttcagcaaacattggaaaatgatgaaaaactctcagaggtagaagaagctcaggaagcaagcatggaaacagatcctaagccatagacaggctaattgcccaccactcccaggaatattgaaatagctacatgaccataatgtgtttaaaatgtggtatgctcttgagatatttaaagttttggcagtaaaatactctgtttttaagtatgaatgtatttcattcatatttcctctcacaaaggaaaatgacttcagtatagatttgtttttattaaaatgcattttttattcttaagtggtaggaagcaacatccaaaaatgcttaataaaatgcttttaagctgca

SEQ ID NO: 31531 - DNA, 2262 bp, Homo sapiens
  source 1..2262: mol_type = unassigned DNA
atgggcggggcgcggctcggagcgcgaaacatggcggggcaggacgctggctgcggccgtggcggcgacgactactcagaggacgagggcgacagcagcgtgtccagggcggctgtggaggtgttcgggaagctgaaggacctaaactgccccttcctcgagggtctgtatatcacagagccaaagacaattcaggaactgctgtgcagcccctcagagtaccgcttggagatcctagagtggatgtgtacccgggtctggccctcactgcaggacaggttcagctcactgaaaggggtcccaacagaggtgaagatccaagaaatgacgaagctgggccacgagctgatgctgtgtgcgccagatgaccaggagctcctcaagggctgtgcctgcgcccagaagcagctacacttcatggaccagttgctcgataccatccggagcctgaccattgggtgctccagttgctcgagcctgatggagcacttcgaggacaccagggagaagaacgaggccttgctgggggagctcttctctagcccccacctgcagatgctcctgaatccagagtgcgacccgtggcccctggacatgcagcccctcctcaacaagcagagtgatgactggcagtgggccagtgcctctgccaagtccgaggaggaggagaagctggcggagcttgccaggcagctgcaggagagtgctgccaagttgcacgcgcttagaacggagtactttgcacagcatgagcaaggggctgctgcgggcgcagccgacatcagcaccctagaccagaagctgcgtctggtcacttccgacttccaccagctaatcttggcttttctccaagtctacgacgacgagctgggcgagtgctgccagcgcccaggccctgacctccacccgtgcggccccatcatccaggccacgcaccagaatctgacttcctacagccaaatccccagaggccaacctaaaaagccggctttagttacgatgactacagttcccacgtgcgcaactctgcccttggctcaaggattccgtgatgttcattttggttttctaagcgagaggctccgagccttccaacctctgactggctggtcctgtgagacccctcgatcagggatgctgctgcaagtggtcatggcagttgctgacacctctgcgaaggccgtggagaccgtgaagaagcagcaaggcgagcagatctgctggggtggcagcagctccgtcatgagtctagctaccaagatgaatgaactaatggagaaatagaaagtcttcagtgatggcctacgccaaagcacaggatggggcgggcaggaagccctctcccaagatcgagttggccgaggatggatgattgtggcagcagaagccgttgcagccccacgttgtgctctaggcagctgggggcgggctgcggccgctgattaaaggccgcctagagcagcctgtgtggcgacaggtgcccagaagcccaggaagccggtcagtgcccgccccagtttgaggacttgctatccccgtgggaacatcaccatgtccgaggcaccccgggccgagacctttgtcttcctggacctggaagccactgggctccccagtgtggagcccgagattgccgagctgtccctctttgctgtccaccgctcctccctggagaacccggagcacgacgagtctggtgccctagtattgccccgggtcctggacaagctcacgctgtgcatgtgcccggagcgccccttcactgccaaggccagcgagatcaccggcctgagcagtgagggcctggcgcgatgccggaaggctggctttgatggcgccgtggtgcggacgctgcaggccttcctgagccgccaggcagggcccatctgccttgtggcccacaatggctttgattatgatttccccctgctgtgtgccgagctgcggcgcctgggtgcccgcctgccccgggacactgtctgcctggacacgctgccggccctgcggggcctggaccgcgcccacagccacggcacccgggcccggggccgccagggttacagcctcggcagcctcttccaccgctacttccgggcagagccaagcgcagcccactcagccgagggcgacgtgcacaccctgctcctgatcttcctgcaccgcgccgcagagctgctcgcctgggccgatgagcaggcccgtgggtgggcccacatcgagcccatgtacttgccgcctgatgaccccagcctggaggcctga

SEQ ID NO: 31532 - DNA, 1982 bp, Homo sapiens
  source 1..1982: mol_type = unassigned DNA
atgggcggggcgcggctcggagcgcgaaacatggcggggcaggacgctggctgcggccgtggcggcgacgactactcagaggacgagggcgacagcagcgtgtccagggcggctgtggaggtgttcgggaagctgaaggacctaaactgccccttcctcgagggtctgtatatcacagagccaaagacaattcaggaactgctgtgcagcccctcagagtaccgcttggagatcctagagtggatgtgtacccgggtctggccctcactgcaggacaggttcagctcactgaaaggggtcccaacagaggtgaagatccaagaaatgacgaagctgggccacgagctgatgctgtgtgcgccagatgaccaggagctcctcaagggctgtgcctgcgcccagaagcagctacacttcatggaccagttgctcgataccatccggagcctgaccattgggtgctccagttgctcgagcctgatggagcacttcgaggacaccagggagaagaacgaggccttgctgggggagctcttctctagcccccacctgcagatgctcctgaatccagagtgcgacccgtggcccctggacatgcagcccctcctcaacaagcagagtgatgactggcagtgggccagtgcctctgccaagtccgaggaggaggagaagctggcggagcttgccaggcagctgcaggagagtgctgccaagttgcacgcgcttagaacggagtactttgcacagcatgagcaaggggctgctgcgggcgcagccgacatcagcaccctagaccagaagctgcgtctggtcacttccgacttccaccagctaatcttggcttttctccaagtctacgacgacgagctgggcgagtgctgccagcgcccaggccctgacctccacccgtgcggccccatcatccaggccacgcaccagaatctgacttcctacagccaactgctgcaagtggtcatggcagttgctgacacctctgcgaaggccgtggagaccgtgaagaagcagcaaggcgagcagatctgctggggtggcagcagctccgtcatgagtctagctaccaagatgaatgaactaatggagaaatagaaagtcttcagtgatggcctacgccaaagcacaggatggggcgggcaggaagccctctcccaagatcgagttggccgaggatggatgattgtggcagcagaagccgttgcagccccacgttgtgctctagtttgaggacttgctatccccgtgggaacatcaccatgtccgaggcaccccgggccgagacctttgtcttcctggacctggaagccactgggctccccagtgtggagcccgagattgccgagctgtccctctttgctgtccaccgctcctccctggagaacccggagcacgacgagtctggtgccctagtattgccccgggtcctggacaagctcacgctgtgcatgtgcccggagcgccccttcactgccaaggccagcgagatcaccggcctgagcagtgagggcctggcgcgatgccggaaggctggctttgatggcgccgtggtgcggacgctgcaggccttcctgagccgccaggcagggcccatctgccttgtggcccacaatggctttgattatgatttccccctgctgtgtgccgagctgcggcgcctgggtgcccgcctgccccgggacactgtctgcctggacacgctgccggccctgcggggcctggaccgcgcccacagccacggcacccgggcccggggccgccagggttacagcctcggcagcctcttccaccgctacttccgggcagagccaagcgcagcccactcagccgagggcgacgtgcacaccctgctcctgatcttcctgcaccgcgccgcagagctgctcgcctgggccgatgagcaggcccgtgggtgggcccacatcgagcccatgtacttgccgcctgatgaccccagcctggaggcctga

SEQ ID NO: 31533 - DNA, 2116 bp, Homo sapiens
  source 1..2116: mol_type = unassigned DNA
atgggcggggcgcggctcggagcgcgaaacatggcggggcaggacgctggctgcggccgtggcggcgacgactactcagaggacgagggcgacagcagcgtgtccagggcggctgtggaggtgttcgggaagctgaaggacctaaactgccccttcctcgagggtctgtatatcacagagccaaagacaattcaggaactgctgtgcagcccctcagagtaccgcttggagatcctagagtggatgtgtacccgggtctggccctcactgcaggacaggttcagctcactgaaaggggtcccaacagaggtgaagatccaagaaatgacgaagctgggccacgagctgatgctgtgtgcgccagatgaccaggagctcctcaagggctgtgcctgcgcccagaagcagctacacttcatggaccagttgctcgataccatccggagcctgaccattgggtgctccagttgctcgagcctgatggagcacttcgaggacaccagggagaagaacgaggccttgctgggggagctcttctctagcccccacctgcagatgctcctgaatccagagtgcgacccgtggcccctggacatgcagcccctcctcaacaagcagagtgatgactggcagtgggccagtgcctctgccaagtccgaggaggaggagaagctggcggagcttgccaggcagctgcaggagagtgctgccaagttgcacgcgcttagaacggagtactttgcacagcatgagcaaggggctgctgcgggcgcagccgacatcagcaccctagaccagaagctgcgtctggtcacttccgacttccaccagctaatcttggcttttctccaagtctacgacgacgagctgggcgagtgctgccagcgcccaggccctgacctccacccgtgcggccccatcatccaggccacgcaccagaatctgacttcctacagccaactgctgcaagtggtcatggcagttgctgacacctctgcgaaggccgtggagaccgtgaagaagcagcaaggcgagcagatctgctggggtggcagcagctccgtcatgagtctagctaccaagatgaatgaactaatggagaaatagaaagtcttcagtgatggcctacgccaaagcacaggatggggcgggcaggaagccctctcccaagatcgagttggccgaggatggatgattgtggcagcagaagccgttgcagccccacgttgtgctctaggcagctgggggcgggctgcggccgctgattaaaggccgcctagagcagcctgtgtggcgacaggtgcccagaagcccaggaagccggtcagtgcccgccccagtcctcagggtttgtgcctctcgctcggacagtttgaggacttgctatccccgtgggaacatcaccatgtccgaggcaccccgggccgagacctttgtcttcctggacctggaagccactgggctccccagtgtggagcccgagattgccgagctgtccctctttgctgtccaccgctcctccctggagaacccggagcacgacgagtctggtgccctagtattgccccgggtcctggacaagctcacgctgtgcatgtgcccggagcgccccttcactgccaaggccagcgagatcaccggcctgagcagtgagggcctggcgcgatgccggaaggctggctttgatggcgccgtggtgcggacgctgcaggccttcctgagccgccaggcagggcccatctgccttgtggcccacaatggctttgattatgatttccccctgctgtgtgccgagctgcggcgcctgggtgcccgcctgccccgggacactgtctgcctggacacgctgccggccctgcggggcctggaccgcgcccacagccacggcacccgggcccggggccgccagggttacagcctcggcagcctcttccaccgctacttccgggcagagccaagcgcagcccactcagccgagggcgacgtgcacaccctgctcctgatcttcctgcaccgcgccgcagagctgctcgcctgggccgatgagcaggcccgtgggtgggcccacatcgagcccatgtacttgccgcctgatgaccccagcctggaggcctga

SEQ ID NO: 31534 - DNA, 1255 bp, Homo sapiens
  source 1..1255: mol_type = unassigned DNA
caccttggtcacactccagagctcgcttcatccccacgagcggcacctgatctccagtgacggggagactgaggcctggcaaagaggacctgttgcctttgtgtaactggccccagcatgggggaggcattggccccagcatgggggaggcattgaccccaggcctgccaggcctggcagccacagcctggctaggtggaggttactgccttccgcaccactctggcttcctccccgtgcctgtgaagagctcggggcctgcttcctaatttgtaaacacggggcgtgtgtctcagtggctgtgagctagcgagggggtggcgagcgagccggctgcgcaggtcctgaggccccaggcctcattgttggccaacaggcagctgggggcgggctgcggccgctgattaaaggccgcctagagcagcctgtgtggcgacaggtgcccagaagcccaggaagccggtcagtgcccgccccagtcctcagggtttgtgcctctcgctcggacagtttgaggacttgctatccccgtgggaacatcaccatgtccgaggcaccccgggccgagacctttgtcttcctggacctggaagccactgggctccccagtgtggagcccgagattgccgagctgtccctctttgctgtccaccgctcctccctggagaacccggagcacgacgagtctggtgccctagtattgccccgggtcctggacaagctcacgctgtgcatgtgcccggagcgccccttcactgccaaggccagcgagatcaccggcctgagcagtgagggcctggcgcgatgccggaaggctggctttgatggcgccgtggtgcggacgctgcaggccttcctgagccgccaggcagggcccatctgccttgtggcccacaatggctttgattatgatttccccctgctgtgtgccgagctgcggcgcctgggtgcccgcctgccccgggacactgtctgcctggacacgctgccggccctgcggggcctggaccgcgcccacagccacggcacccgggcccggggccgccagggttacagcctcggcagcctcttccaccgctacttccgggcagagccaagcgcagcccactcagccgagggcgacgtgcacaccctgctcctgatcttcctgcaccgcgccgcagagctgctcgcctgggccgatgagcaggcccgtgggtgggcccacatcgagcccatgtacttgccgcctgatgaccccagcctggaggcctga

SEQ ID NO: 31535 - DNA, 1864 bp, Homo sapiens
  source 1..1864: mol_type = unassigned DNA
atgggcggggcgcggctcggagcgcgaaacatggcggggcaggacgctggctgcggccgtggcggcgacgactactcagaggacgagggcgacagcagcgtgtccagggcggctgtggaggtgttcgggaagctgaaggacctaaactgccccttcctcgagggtctgtatatcacagagccaaagacaattcaggaactgctgtgcagcccctcagagtaccgcttggagatcctagagtggatgtgtacccgggtctggccctcactgcaggacaggttcagctcactgaaaggggtcccaacagaggtgaagatccaagaaatgacgaagctgggccacgagctgatgctgtgtgcgccagatgaccaggagctcctcaagggctgtgcctgcgcccagaagcagctacacttcatggaccagttgctcgataccatccggagcctgaccattgggtgctccagttgctcgagcctgatggagcacttcgaggacaccagggagaagaacgaggccttgctgggggagctcttctctagcccccacctgcagatgctcctgaatccagagtgcgacccgtggcccctggacatgcagcccctcctcaacaagcagagtgatgactggcagtgggccagtgcctctgccaagtccgaggaggaggagaagctggcggagcttgccaggcagctgcaggagagtgctgccaagttgcacgcgcttagaacggagtctacgacgacgagctgggcgagtgctgccagcgcccaggccctgacctccacccgtgcggccccatcatccaggccacgcaccagaatctgacttcctacagccaactgctgcaagtggtcatggcagttgctgacacctctgcgaaggccgtggagaccgtgaagaagcagcaaggcgagcagatctgctggggtggcagcagctccgtcatgagtctagctaccaagatgaatgaactaatggagaaatagaaagtcttcagtgatggcctacgccaaagcacaggatggggcgggcaggaagccctctcccaagatcgagttggccgaggatggatgattgtggcagcagaagccgttgcagccccacgttgtgctctagtttgaggacttgctatccccgtgggaacatcaccatgtccgaggcaccccgggccgagacctttgtcttcctggacctggaagccactgggctccccagtgtggagcccgagattgccgagctgtccctctttgctgtccaccgctcctccctggagaacccggagcacgacgagtctggtgccctagtattgccccgggtcctggacaagctcacgctgtgcatgtgcccggagcgccccttcactgccaaggccagcgagatcaccggcctgagcagtgagggcctggcgcgatgccggaaggctggctttgatggcgccgtggtgcggacgctgcaggccttcctgagccgccaggcagggcccatctgccttgtggcccacaatggctttgattatgatttccccctgctgtgtgccgagctgcggcgcctgggtgcccgcctgccccgggacactgtctgcctggacacgctgccggccctgcggggcctggaccgcgcccacagccacggcacccgggcccggggccgccagggttacagcctcggcagcctcttccaccgctacttccgggcagagccaagcgcagcccactcagccgagggcgacgtgcacaccctgctcctgatcttcctgcaccgcgccgcagagctgctcgcctgggccgatgagcaggcccgtgggtgggcccacatcgagcccatgtacttgccgcctgatgaccccagcctggaggcctga

SEQ ID NO: 31536 - DNA, 907 bp, Homo sapiens
  source 1..907: mol_type = unassigned DNA
tggcctacgccaaagcacaggatggggcgggcaggaagccctctcccaagatcgagttggccgaggatggatgattgtggcagcagaagccgttgcagccccacgttgtgctctagtaggtgacaggagtggggctgacgctcccagagccaaaggtcacagtttgaggacttgctatccccgtgggaacatcaccatgtccgaggcaccccgggccgagacctttgtcttcctggacctggaagccactgggctccccagtgtggagcccgagattgccgagctgtccctctttgctgtccaccgctcctccctggagaacccggagcacgacgagtctggtgccctagtattgccccgggtcctggacaagctcacgctgtgcatgtgcccggagcgccccttcactgccaaggccagcgagatcaccggcctgagcagtgagggcctggcgcgatgccggaaggctggctttgatggcgccgtggtgcggacgctgcaggccttcctgagccgccaggcagggcccatctgccttgtggcccacaatggctttgattatgatttccccctgctgtgtgccgagctgcggcgcctgggtgcccgcctgccccgggacactgtctgcctggacacgctgccggccctgcggggcctggaccgcgcccacagccacggcacccgggcccggggccgccagggttacagcctcggcagcctcttccaccgctacttccgggcagagccaagcgcagcccactcagccgagggcgacgtgcacaccctgctcctgatcttcctgcaccgcgccgcagagctgctcgcctgggccgatgagcaggcccgtgggtgggcccacatcgagcccatgtacttgccgcctgatgaccccagcctggaggcctga

SEQ ID NO: 31537 - DNA, 861 bp, Homo sapiens
  source 1..861: mol_type = unassigned DNA
tggcctacgccaaagcacaggatggggcgggcaggaagccctctcccaagatcgagttggccgaggatggatgattgtggcagcagaagccgttgcagccccacgttgtgctctagtttgaggacttgctatccccgtgggaacatcaccatgtccgaggcaccccgggccgagacctttgtcttcctggacctggaagccactgggctccccagtgtggagcccgagattgccgagctgtccctctttgctgtccaccgctcctccctggagaacccggagcacgacgagtctggtgccctagtattgccccgggtcctggacaagctcacgctgtgcatgtgcccggagcgccccttcactgccaaggccagcgagatcaccggcctgagcagtgagggcctggcgcgatgccggaaggctggctttgatggcgccgtggtgcggacgctgcaggccttcctgagccgccaggcagggcccatctgccttgtggcccacaatggctttgattatgatttccccctgctgtgtgccgagctgcggcgcctgggtgcccgcctgccccgggacactgtctgcctggacacgctgccggccctgcggggcctggaccgcgcccacagccacggcacccgggcccggggccgccagggttacagcctcggcagcctcttccaccgctacttccgggcagagccaagcgcagcccactcagccgagggcgacgtgcacaccctgctcctgatcttcctgcaccgcgccgcagagctgctcgcctgggccgatgagcaggcccgtgggtgggcccacatcgagcccatgtacttgccgcctgatgaccccagcctggaggcctga

SEQ ID NO: 31538 - DNA, 907 bp, Homo sapiens; identical to SEQ ID NO: 31536
  source 1..907: mol_type = unassigned DNA

SEQ ID NO: 31539 - DNA, 4314 bp, Homo sapiens
  source 1..4314: mol_type = unassigned DNA
ggtcagcggagagtaggcatgtagcttctgcagttgctcctcctcaccctccgcgacctgatttcctagaagggctctgtcacccgaaaagattttccactggcttagaggagggagggcccgccttcccccgttatccattggctgctcgttccgccgcaagttgggggcggggttagggcgcctttcgattgcatcagctggtccagccgaggccaagtcccgggcgctagcccacctcccacccgcctcttggctcctctcctctaggccgtcgctttcgggttctctcatcgcttcgtcgttcgccaatgtttgaggagaaggccagcagtccttcagggaagatgggaggcgaggagaagccgattggtgctggtgaagagaagcaaaaggaaggaggcaaaaagaagaacaaagaaggatctggagatggaggtcgagctgagttgaatccttggcctgaatatatttacacacgtcttgagatgtataatatactaaaagcagaacatgattccattctggcagaaaaggcagaaaaagatagcaagccaattaaagtcactttgcctgatggtaaacaggttgatgcggaatcttggaaaactacaccatatcaaattgcctgtggaattagtcaaggcctggccgacaacaccgttattgctaaagtaaataatgttgtgtgggacctggaccgccctctggaagaagattgtaccttggagcttctcaagtttgaggatgaggaagctcaggcagtgtattggcactctagtgctcacataatgggtgaagccatggaaagagtctatggtggatgtttatgctacggtccgccaatagaaaatggattctattatgacatgtacctcgaagaagggggtgtgtctagcaatgatttctcttctctggaggctttgtgtaagaaaatcattaaagaaaaacaagcttttgaaagactggaagttaagaaagaaactttactggcaatgtttaagtacaacaagttcaaatgccggatattgaatgaaaaggtgaatactccaactaccacagtctatagatgtggccctttgatagatctctgccggggtcctcatgttagacacacgggcaaaattaaggctttaaaaatacacaaaaattcctccacgtactgggaaggcaaagcagatatggagactctccagagaatttatggcatttcattcccagatcctaaaatgttgaaagagtgggagaagttccaagaggaagctaaaaaccgagatcataggaaaattggcagggaccaagaactatatttctttcatgaactcagccctggaagttgcttttttctgccaaaaggagcctacatttataatgcacttattgaattcattaggagcgaatataggaaaagaggattccaggaggtagtcaccccaaacatcttcaacagccgactctggatgacctcgggccactggcagcactacagcgagaacatgttctcctttgaggtggagaaggagctgtttgccctgaaacccatgaactgcccaggacactgccttatgtttgatcatcggccaaggtcctggcgagaactgcctctgcggctagctgattttggggtacttcataggaacgagctgtctggagcactcacaggactcacccgggtacgaagattccaacaggatgatgctcacatattctgtgccatggagcagattgaagatgaaataaaaggttgtttggattttctacgtacggtatatagcgtatttggattttcttttaaactaaacctttctactcgcccggaaaaattccttggagatatcgaagtatgggatcaagctgagaaacaacttgaaaacagtctgaatgaatttggtgaaaagtgggagttaaactctggagatggagctttctatggcccaaagattgacatacagattaaagatgcgattgggcggtaccaccagtgtgcaaccatccagctggatttccagttgcccatcagatttaatcttacttatgtaagccatgatggtgatgataagaaaaggccagtgattgttcatcgagccatcttgggatcagtggaaagaatgattgctatcctcacagaaaactatgggggcaaatggcccttttggctgtcccctcgccaggtaatggtagttccagtgggaccaacctgtgatgaatatgcccaaaaggtacgacaacaattccacgatgccaaattcatggcagacattgatctggatccaggctgtacattgaataaaaagattcgaaatgcacagttagcacagtataacttcattttagttgttggtgaaaaagagaaaatcagtggcactgttaatatccgcacaagagacaataaggtccacggggaacgcaccatttctgaaactatcgagcggctacagcagctcaaagagttccgcagcaaacaggcagaagaagaattttaatgaaaaaattacccagattggctccatggaaaaggaggaacagcgtttccgtaaaattgactttgtactctgaaaacgtcaatttatattgaacttggaggagtttggcaaagtctgaataggtcaacctgcaggcgtaactatttttgacctagtcagtttttaaacaatgtgcatttgaaggagttaattaaaagagagccaataaaatgattttactcattcagtatctgagtactggaagtgaaacatgaggaatgctttagtgtaatgtgggagaacttttttgtaaatttaatgcaattgaaaaagttttcaaattcaattaagataactagaattggattatggtgtaaaaataaaaaaaaaatttattcacataagtttcaagactgctctgtccctcacatgtacacatacatgcctgagacagataatgtggttcagtatttatctttacagttttacagcaaatataatgcagggtggatggagacggggtaggtctgcagcatcataatgctattcataaactgggtgtgagctgggtgctggcttctcagaggataaacacttttgggagtgtcatttttacttaatgttggatggacaccttttcaaacaaaaactaccatggatctattacagagtagatttgcacaaatgtttaagataaaacgtgaatcttcagagaaatatctgtttatggcagactgttctggaccatagaatcacttggtttacaaattccctattttctcataagggatcattttcaaaatcttctaccaataaatggtgattgaaaggacagcacaaagtaaataatttcttatgtggataaatactaattcctccttgttagaatgatattttaaaagtaacatcttttttttaattttttttgagacaagatcctttgtcccccaggctggagtgtggtgccatgatctcggctcactgcaacctcagcctcccaagtaggtgggactaaagacatgtgccaccatgcctggctgatgtttgtattttctatagagatggtttcatcatgttgcccaggctggtatcaaactcctggataaaagagacccacctgcctcagtctcccaaagtgctgggattacaggtgtgagccaccacgcccagcctaaaaagcaacatcttgtcagtgctataatctcaaatagcttgtttgcaaggtgtgatggttaatactaagtgtcaacttgattggattaaaggatgcctttattgtttctgggtgtgtctgtgagggtgttgccagagagattgacatttgagtcagtggcctgggagaggcagacacaccctctgtgtgcgtgggcaccatccagtcggctgccagtgcagctagaacaaagcgggtggaagaaagtgggattaagttggcttgctgagtcttctggctttcatctttctcctgtgctggatgattcctgcccttggacatcagactccaggttcttcagcttttggactcttggacttatacccgtggtttgccaggggccttctggcctttggccattgactggagatggcactgtcggcttccctgcttttgaggcttggactcggactgaaccactactggcttccttgctccttagcttgcagacagcctatcgtgggacttcaccgtgtgcttgtgtgagtcaattcttactaaatttcctttcatatatacatatatcctattctgtctctctggagaaccctgactaatacacaagggtcacttcaaagagaagctaatttgcatagattaattttcactttaataaaggagctaagatctttaatcata

SEQ ID NO: 31540 - DNA, 2475 bp, Homo sapiens
  source 1..2475: mol_type = unassigned DNA
tggtccagccgaggccaagtcccgggcgctagcccacctcccacccgcctcttggctcctctcctctaggccgtcgctttcgggttctctcatcgcttcgtcgttcgccaatgtttgaggagaaggccagcagtccttcagggaagatgggaggcgaggagaagccgattggtgctggtgaagagaagcaaaaggaaggaggcaaaaagaagaacaaagaaggatctggagatggaggtcgagctgagttgaatccttggcctgaatatatttacacacgtcttgagatgtataatatactaaaagcagaacatgattccattctggcagaaaaggcagaaaaagatagcaagccaattaaagtcactttgcctgatggtaaacaggttgatgcggaatcttggaaaactacaccatatcaaattgcctgtggaattagccatggaaagagtctatggtggatgtttatgctacggtccgccaatagaaaatggattctattatgacatgtacctcgaagaagggggtgtgtctagcaatgatttctcttctctggaggctttgtgtaagaaaatcattaaagaaaaacaagcttttgaaagactggaagttaagaaagaaactttactggcaatgtttaagtacaacaagttcaaatgccggatattgaatgaaaaggtgaatactccaactaccacagtctatagatgtggccctttgatagatctctgccggggtcctcatgttagacacacgggcaaaattaaggctttaaaaatacacaaaaattcctccacgtactgggaaggcaaagcagatatggagactctccagagaatttatggcatttcattcccagatcctaaaatgttgaaagagtgggagaagttccaagaggaagctaaaaaccgagatcataggaaaattggcagggaccaagaactatatttctttcatgaactcagccctggaagttgcttttttctgccaaaaggagcctacatttataatgcacttattgaattcattaggagcgaatataggaaaagaggattccaggaggtagtcaccccaaacatcttcaacagccgactctggatgacctcgggccactggcagcactacagcgagaacatgttctcctttgaggtggagaaggagctgtttgccctgaaacccatgaactgcccaggacactgccttatgtttgatcatcggccaaggtcctggcgagaactgcctctgcggctagctgattttggggtacttcataggaacgagctgtctggagcactcacaggactcacccgggtacgaagattccaacaggatgatgctcacatattctgtgccatggagcagattgaagatgaaataaaaggttgtttggattttctacgtacggtatatagcgtatttggattttcttttaaactaaacctttctactcgcccggaaaaattccttggagatatcgaagtatgggatcaagctgagaaacaacttgaaaacagtctgaatgaatttggtgaaaagtgggagttaaactctggagatggagctttctatggcccaaagattgacatacagattaaagatgcgattgggcggtaccaccagtgtgcaaccatccagctggatttccagttgcccatcagatttaatcttacttatgtaagccatgatggtgatgataagaaaaggccagtgattgttcatcgagccatcttgggatcagtggaaagaatgattgctatcctcacagaaaactatgggggcaaatggcccttttggctgtcccctcgccaggtaatggtagttccagtgggaccaacctgtgatgaatatgcccaaaaggtacgacaacaattccacgatgccaaattcatggcagacattgatctggatccaggctgtacattgaataaaaagattcgaaatgcacagttagcacagtataacttcattttagttgttggtgaaaaagagaaaatcagtggcactgttaatatccgcacaagagacaataaggtccacggggaacgcaccatttctgaaactatcgagcggctacagcagctcaaagagttccgcagcaaacaggcagaagaagaattttaatgaaaaaattacccagattggctccatggaaaaggaggaacagcgtttccgtaaaattgactttgtactctgaaaacgtcaatttatattgaacttggaggagtttggcaaagtctgaataggtcaacctgcaggcgtaactatttttgacctagtcagtttttaaacaatgtgcatttgaaggagttaattaaaagagagccaataaaatgattttactcattcagtatctgagtactggaagtgaaacatgaggaatgctttagtgtaatgtgggagaacttttttgtaaatttaatgcaattgaaaaagttttcaaattcaattaagataactagaattggattatggtgt

SEQ ID NO: 31541 - DNA, 2523 bp, Homo sapiens
  source 1..2523: mol_type = unassigned DNA
gattgcatcagctggtccagccgaggccaagtcccgggcgctagcccacctcccacccgcctcttggctcctctcctctaggccgtcgctttcgggttctctcatcgcttcgtcgttcgccaatgtttgaggagaaggccagcagtccttcagggaagatgggaggcgaggagaagccgattggtgctggtgaagagaagcaaaaggaaggaggcaaaaagaagaacaaagaaggatctggagatggaggtcgagctgagttgaatccttggcctgaatatatttacacacgtcttgagatgtataatatactaaaagcagaacatgattccattctggcagaaaaggcagaaaaagatagcaagccaattaaagtcactttgcctgatggtaaacaggttgatgcggaatcttggaaaactacaccatatcaaattgcctgtggaattagtcacacagcttcctgcaaaaacctctcttcacttgcatctctgcttgcatctgtggccattccctcatctggaatgccatggcctcctcttttcttccttcaaggcctggccgacaacaccgttattgctaaagtaaataatgttgtgtgggacctggaccgccctctggaagaagattgtaccttggagcttctcaagtttgaggatgaggaagctcaggcagtgtattggcactctagtgctcacataatgggtgaagccatggaaagagtctatggtggatgtttatgctacggtccgccaatagaaaatggattctattatgacatgtacctcgaagaagggggtgtgtctagcaatgatttctcttctctggaggctttgtgtaagaaaatcattaaagaaaaacaagcttttgaaagactggaagttaagaaagaaactttactggcaatgtttaagtacaacaagttcaaatgccggatattgaatgaaaaggtgaatactccaactaccacagtctatagatgtggccctttgatagatctctgccggggtcctcatgttagacacacgggcaaaattaaggctttaaaaatacacaaaaattcctccacgtactgggaaggcaaagcagatatggagactctccagagaatttatggcatttcattcccagatcctaaaatgttgaaagagtgggagaagttccaagaggaagctaaaaaccgagatcataggaaaattggcagggaccaagaactatatttctttcatgaactcagccctggaagttgcttttttctgccaaaaggagcctacatttataatgcacttattgaattcattaggagcgaatataggaaaagaggattccaggaggtagtcaccccaaacatcttcaacagccgactctggatgacctcgggccactggcagcactacagcgagaacatgttctcctttgaggtggagaaggagctgtttgccctgaaacccatgaactgcccaggacactgccttatgtttgatcatcggccaaggtcctggcgagaactgcctctgcggctagctgattttggggtacttcataggaacgagctgtctggagcactcacaggactcacccgggtacgaagattccaacaggatgatgctcacatattctgtgccatggagcagattgaagatgaaataaaaggttgtttggattttctacgtacggtatatagcgtatttggattttcttttaaactaaacctttctactcgcccggaaaaattccttggagatatcgaagtatgggatcaagctgagaaacaacttgaaaacagtctgaatgaatttggtgaaaagtgggagttaaactctggagatggagctttctatggcccaaagattgacatacagattaaagatgcgattgggcggtaccaccagtgtgcaaccatccagctggatttccagttgcccatcagatttaatcttacttatgtaagccatgatggtgatgataagaaaaggccagtgattgttcatcgagccatcttgggatcagtggaaagaatgattgctatcctcacagaaaactatgggggcaaatggcccttttggctgtcccctcgccaggtaatggtagttccagtgggaccaacctgtgatgaatatgcccaaaaggtacgacaacaattccacgatgccaaattcatggcagacattgatctggatccaggctgtacattgaataaaaagattcgaaatgcacagttagcacagtataacttcattttagttgttggtgaaaaagagaaaatcagtggcactgttaatatccgcacaagagacaataaggtccacggggaacgcaccatttctgaaactatcgagcggctacagcagctcaaagagttccgcagcaaacaggcagaagaagaattttaatgaaaaaattacccagattggctccatggaaaaggaggaacagcgtttccgtaaaattgactttgtactctgaaaacgtcaatttatattgaacttggaggagtttggcaaagtctgaataggtcaacct

SEQ ID NO: 31542 - DNA, 2534 bp, Homo sapiens
  source 1..2534: mol_type = unassigned DNA
atgattgttccacataaagtcagaagggaggaaaggcgcacgcgcattggggacttgactctggaaagcgtccagaccaaggtcagcggagagtaggccgtcgctttcgggttctctcatcgcttcgtcgttcgccaatgtttgaggagaaggccagcagtccttcagggaagatgggaggcgaggagaagccgattggtgctggtgaagagaagcaaaaggaaggaggcaaaaagaagaacaaagaaggatctggagatggaggtcgagctgagttgaatccttggcctgaatatatttacacacgtcttgagatgtataatatactaaaagcagaacatgattccattctggcagaaaaggcagaaaaagatagcaagccaattaaagtcactttgcctgatggtaaacaggttgatgcggaatcttggaaaactacaccatatcaaattgcctgtggaattagtcaaggcctggccgacaacaccgttattgctaaagtaaataatgttgtgtgggacctggaccgccctctggaagaagattgtaccttggagcttctcaagtttgaggatgaggaagctcaggcagtgtattggcactctagtgctcacataatgggtgaagccatggaaagagtctatggtggatgtttatgctacggtccgccaatagaaaatggattctattatgacatgtacctcgaagaagggggtgtgtctagcaatgatttctcttctctggaggctttgtgtaagaaaatcattaaagaaaaacaagcttttgaaagactggaagttaagaaagaaactttactggcaatgtttaagtacaacaagttcaaatgccggatattgaatgaaaaggtgaatactccaactaccacagtctatagatgtggccctttgatagatctctgccggggtcctcatgttagacacacgggcaaaattaaggctttaaaaatacacaaaaattcctccacgtactgggaaggcaaagcagatatggagactctccagagaatttatggcatttcattcccagatcctaaaatgttgaaagagtgggagaagttccaagaggaagctaaaaaccgagatcataggaaaattggcagggaccaagaactatatttctttcatgaactcagccctggaagttgcttttttctgccaaaaggagcctacatttataatgcacttattgaattcattaggagcgaatataggaaaagaggattccaggaggtagtcaccccaaacatcttcaacagccgactctggatgacctcgggccactggcagcactacagcgagaacatgttctcctttgaggtggagaaggagctgtttgccctgaaacccatgaactgcccaggacactgccttatgtttgatcatcggccaaggtcctggcgagaactgcctctgcggctagctgattttggggtacttcataggaacgagctgtctggagcactcacaggactcacccgggtacgaagattccaacaggatgatgctcacatattctgtgccatggagcagattgaagatgaaataaaaggttgtttggattttctacgtacggtatatagcgtatttggattttcttttaaactaaacctttctactcgcccggaaaaattccttggagatatcgaagtatgggatcaagctgagaaacaacttgaaaacagtctgaatgaatttggtgaaaagtgggagttaaactctggagatggagctttctatggcccaaagattgacatacagattaaagatgcgattgggcggtaccaccagtgtgcaaccatccagctggatttccagttgcccatcagatttaatcttacttatgtaagccatgatggtgatgataagaaaaggccagtgattgttcatcgagccatcttgggatcagtggaaagaatgattgctatcctcacagaaaactatgggggcaaatggcccttttggctgtcccctcgccaggtaatggtagttccagtgggaccaacctgtgatgaatatgcccaaaaggtacgacaacaattccacgatgccaaattcatggcagacattgatctggatccaggctgtacattgaataaaaagattcgaaatgcacagttagcacagtataacttcattttagttgttggtgaaaaagagaaaatcagtggcactgttaatatccgcacaagagacaataaggtccacggggaacgcaccatttctgaaactatcgagcggctacagcagctcaaagagttccgcagcaaacaggcagaagaagaattttaatgaaaaaattacccagattggctccatggaaaaggaggaacagcgtttccgtaaaattgactttgtactctgaaaacgtcaatttatattgaacttggaggagtttggcaaagtctgaataggtcaacctgcaggcgtaactatttttgacctagtcagtttttaaacaatgtgcatttgaaggagttaattaaaagagagccaataaaatgattttactcattc

SEQ ID NO: 31543 - DNA, 466 bp, Homo sapiens
  source 1..466: mol_type = unassigned DNA
gcattggggacttgactctggaaagcgtccagaccaaggccgtcgctttcgggttctctcatcgcttcgtcgttcgccaatgtttgaggagaaggccagcagtccttcagggaagatgggaggcgaggagaagccgattggtgctggtgaagagaagcaaaaggaaggaggcaaaaagaagaacaaagaaggatctggagatggaggtcgagctgagttgaatccttggcctgaatatatttacacacgtcttgagatgtataatatactaaaagcagaacatgattccattctggcagaaaaggcagaaaaagatagcaagccaattaaagtcactttgcctgatggtaaacaggttgatgcggaatcttggaaaactacaccatatcaaattgcctgtggaattagtcaaggcctggccgacaacaccgttattgctaaagtaaataatgttgtgtgggacctg

SEQ ID NO: 31544 - DNA, 2458 bp, Homo sapiens
  source 1..2458: mol_type = unassigned DNA
cgattgcatcagctggtccagccgaggccaagtcccgggcgctagcccacctcccacccgcctcttggctcctctcctctaggccgtcgctttcgggttctctcatcgcttcgtcgttcgccaatgtttgaggagaaggccagcagtccttcagggaagatgggaggcgaggagaagccgattggtgctggtgaagagaagcaaaaggaaggaggcaaaaagaagaacaaagaaggatctggagatggaggtcgagctgagtcaaggcctggccgacaacaccgttattgctaaagtaaataatgttgtgtgggacctggaccgccctctggaagaagattgtaccttggagcttctcaagtttgaggatgaggaagctcaggcagtgtattggcactctagtgctcacataatgggtgaagccatggaaagagtctatggtggatgtttatgctacggtccgccaatagaaaatggattctattatgacatgtacctcgaagaagggggtgtgtctagcaatgatttctcttctctggaggctttgtgtaagaaaatcattaaagaaaaacaagcttttgaaagactggaagttaagaaagaaactttactggcaatgtttaagtacaacaagttcaaatgccggatattgaatgaaaaggtgaatactccaactaccacagtctatagatgtggccctttgatagatctctgccggggtcctcatgttagacacacgggcaaaattaaggctttaaaaatacacaaaaattcctccacgtactgggaaggcaaagcagatatggagactctccagagaatttatggcatttcattcccagatcctaaaatgttgaaagagtgggagaagttccaagaggaagctaaaaaccgagatcataggaaaattggcagggaccaagaactatatttctttcatgaactcagccctggaagttgcttttttctgccaaaaggagcctacatttataatgcacttattgaattcattaggagcgaatataggaaaagaggattccaggaggtagtcaccccaaacatcttcaacagccgactctggatgacctcgggccactggcagcactacagcgagaacatgttctcctttgaggtggagaaggagctgtttgccctgaaacccatgaactgcccaggacactgccttatgtttgatcatcggccaaggtcctggcgagaactgcctctgcggctagctgattttggggtacttcataggaacgagctgtctggagcactcacaggactcacccgggtacgaagattccaacaggatgatgctcacatattctgtgccatggagcagattgaagatgaaataaaaggttgtttggattttctacgtacggtatatagcgtatttggattttcttttaaactaaacctttctactcgcccggaaaaattccttggagatatcgaagtatgggatcaagctgagaaacaacttgaaaacagtctgaatgaatttggtgaaaagtgggagttaaactctggagatggagctttctatggcccaaagattgacatacagattaaagatgcgattgggcggtaccaccagtgtgcaaccatccagctggatttccagttgcccatcagatttaatcttacttatgtaagccatgatggtgatgataagaaaaggccagtgattgttcatcgagccatcttgggatcagtggaaagaatgattgctatcctcacagaaaactatgggggcaaatggcccttttggctgtcccctcgccaggtaatggtagttccagtgggaccaacctgtgatgaatatgcccaaaaggtacgacaacaattccacgatgccaaattcatggcagacattgatctggatccaggctgtacattgaataaaaagattcgaaatgcacagttagcacagtataacttcattttagttgttggtgaaaaagagaaaatcagtggcactgttaatatccgcacaagagacaataaggtccacggggaacgcaccatttctgaaactatcgagcggctacagcagctcaaagagttccgcagcaaacaggcagaagaagaattttaatgaaaaaattacccagattggctccatggaaaaggaggaacagcgtttccgtaaaattgactttgtactctgaaaacgtcaatttatattgaacttggaggagtttggcaaagtctgaataggtcaacctgcaggcgtaactatttttgacctagtcagtttttaaacaatgtgcatttgaaggagttaattaaaagagagccaataaaatgattttactcattcagtatctgagtactggaagtgaaacatgaggaatgctttagtgtaatgtgggagaacttttttgtaaatttaatgcaattgaaaaagttttcaaattcaattaagataactagaattggattatggtgt

SEQ ID NO: 31545 - DNA, 2110 bp, Homo sapiens
  source 1..2110: mol_type = unassigned DNA
actggtgtgaaggaacatggccctgtatcagaggtggcggtgtctccggctccaaggtttacaggcttgcaggctacacacggcagttgtgtcgacccctccacgctggttggcagagcggcttggcctttttgaggagctgtgggctgctcaggtaaagagattagcaagcatggcacagaaggaaccccggactattaagatatcacttcctggaggccagaaaattgatgctgtggcatggaacacaaccccctaccaactagcccggcagatcagttcaacactggcagatactgcagtggtccaagtacagaatatggcttttaccatgatttcttcctgggaaaggagaggtgtggcacattggttgacctttgccagggcccccaccttcggcatactggacagattggaggactgaagctgctatcggctgagtatgcccatcgtggtttctccgaggtgaaaactcccacactgttttctacgaagctctgggaacagtcagggcactgggagcattatcaggaagacatgtttgccgtgcagcccccaggctctgacaggcctcccagctcccagagtgacgattctaccaggcatatcacagatacactcgccctcaagcctatgaactgccctgcacactgcctgatgttcgcccaccggcccagatcctggcgggaactgcccctgcgactagctgactttggggctctacaccgggccgaagcctctggtggtctggggggactgacccgactgcggtgcttccagcaggatgacgctcacatcttctgtacaacagatcagctggaagcagagatccaaagctgtcttgatttcctccgttccgtctatgccgttcttggcttctccttccgcctggcactgtccacccggccatctggcttcctgggggacccttgcctttgggaccaggccgaacaggtccttaaacaggccctgaaggaatttggagaaccctgggacctcaactctggagatggtgccttctatggacctaagattgacgtgcacctccacgatgccctgggccggccacatcagtgtgggacaattcagcttgacttccaactgcccctgagatttgacctccagtataaggggcaggcgggtgccctggagcgtccagtcctcattcaccgagcagtgctcggttctgtggaaagactgttgggagtgctggcagaaagctgcggggggaaatggccactgtggctgtccccgttccaggtggtggtcatccctgtggggagtgagcaagaggaatacgccaaagaggcacagcagagcctgcgggctgcaggactggtcagtgacctggatgcagactctggactgaccctcagccggagaatccgccgggcccagcttgcccactacaattttcagtttgtggttggccagaaagagcaaagtaagagaacagtgaacattcggactcgagataatcgtcgccttggggagtgggacttgcctgaggctgtgcagcgactggtggagctacagaacacgagggtcccaaatgccgaagaaattttctgagcctttgtacatagatgaggcaaaaacctgcgagtgccatcagcctccctcacatgggagaccccaacccagctgacaatgtggagcccccagaacttcagaactgtgtggaggcacatgtctgctctcctgaaaagagacttggtttggggaccccacaaaaggagggaagctgtagctgtttggatgtgaggagaatgaaactacaaaaaaaaataaattgggccaggcgcagtggctcatgcctgtaatcccagcactctgggaggctgaggcggacggatcatgaggtcaggagatcaagaccaccctggctaacacggtgaaaccctgtctctactaaaaatacaaaaaattagccgggcatggtggcacacgcctgtaatcccagctactcaggaggctgaggcaggagaatcgcttgaacccgggaggtagaggttgcagtgagctgagattgcgccactgcacccccctaggcgacagagcgagactctgtctctaaataaataaataaataaataaatacaaactggaa

SEQ ID NO: 31546 - DNA, 2106 bp, Homo sapiens
  source 1..2106: mol_type = unassigned DNA
actggtgtgaaggaacatggccctgtatcagaggtggcggtgtctccggctccaaggtttacaggcttgcaggctacacacggcagttgtgtcgacccctccacgctggttggcagagcggcttggcctttttgaggagctgtgggctgctcaggtaaagagattagcaagcatggcacagaaggaaccccggactattaagatatcacttcctggaggccagaaaattgatgctgtggcatggaacacaaccccctaccaactagcccggcagatcagttcaacactggcagatactgcagaggtccaagtacagaatatggcttttaccatgatttcttcctgggaaaggagaggtgtggcacattggttgacctttgccagggcccccaccttcggcatactggacagattggaggactgaagctgctatcggctgagtatgcccatcgtggtttctccgaggtgaaaactcccacactgttttctacgaagctctgggaacagtcagggcactgggagcattatcaggaagacatgtttgccgtgcagcccccaggctctgacaggcctcccagctcccagagtgacgattctaccaggcatatcacagatacactcgccctcaagcctatgaactgccctgcacactgcctgatgttcgcccaccggcccagatcctggcgggaactgcccctgcgactagctgactttggggctctacaccgggccgaagcctctggtggtctggggggactgacccgactgcggtgcttccagcaggatgacgctcacatcttctgtacaacagatcagctggaagcagagatccaaagctgtcttgatttcctccgttccgtctatgccgttcttggcttctccttccgcctggcactgtccacccggccatctggcttcctgggggacccttgcctttgggaccaggccgaacaggtccttaaacaggccctgaaggaatttggagaaccctgggacctcaactctggagatggtgccttctatggacctaagattgacgtgcacctccacgatgccctgggccggccacatcagtgtgggacaattcagcttgacttccaactgcccctgagatttgacctccagtataaggggcaggcgggtgccctggagcgtccagtcctcattcaccgagcagtgctcggttctgtggaaagactgttgggagtgctggcagaaagctgcggggggaaatggccactgtggctgtccccgttccaggtggtggtcatccctgtggggagtgagcaagaggaatacgccaaagaggcacagcagagcctgcgggctgcaggactggtcagtgacctggatgcagactctggactgaccctcagccggagaatccgccgggcccagcttgcccactacaattttcagtttgtggttggccagaaagagcaaagtaagagaacagtgaacattcggactcgagataatcgtcgccttggggagtgggacttgcctgaggctgtgcagcgactggtggagctacagaacacgagggtcccaaatgccgaagaaattttctgagcctttgtacatagatgaggcaaaaacctgcgagtgccatcagcctccctcacatgggagaccccaacccagctgacaatgtggagcccccagaacttcagaactgtgtggaggcacatgtctgctctcctgaaaagagacttggtttggggaccccacaaaaggagggaagctgtagctgtttggatgtgaggagaatgaaactacaaaaaaaaataaattgggccaggcgcagtggctcatgcctgtaatcccagcactctgggaggctgaggcggacggatcatgaggtcaggagatcaagaccaccctggctaacacggtgaaaccctgtctctactaaaaatacaaaaaattagccgggcatggtggcacacgcctgtaatcccagctactcaggaggctgaggcaggagaatcgcttgaacccgggaggtagaggttgcagtgagctgagattgcgccactgcacccccctaggcgacagagcgagactctgtctctaaataaataaataaataaataaatacaaact

SEQ ID NO: 31547 - DNA, 628 bp, Homo sapiens
  source 1..628: mol_type = unassigned DNA
aggcactggtgtgaaggaacatggccctgtatcagaggtggcggtgtctccggctccaaggtttacaggcttgcaggctacacacggcagttgtgtcgacccctccacgctggttggcagagcggcttggcctttttgaggagctgtgggctgctcaggtaaagagattagcaagcatggcacagaaggaaccccggactattaagatatcacttcctggaggccagaaaattgatgctgtggcatggaacacaaccccctaccaactagcccggcagatcagttcaacactggcagatactgcagtggctgctcaagtgaatggagaaccttatgatctggagcggcccttggagacagattctgacctcagatttctgacattcgattccccagaggggaaagcagtaagtttctttcttatcaggaatacagtgactactaaaccaagagatattgaagcaggaaattctaacattttattcttttgccgcagtttctccatttgcagttgggagggagacctaccacagactgtcttgactatttctggttaggaaacttatggtgaaagtttttaacttagcttcgatctattaagcaaacatttgtgctagtgagagggaga

SEQ ID NO: 31548 - DNA, 1998 bp, Homo sapiens
  source 1..1998: mol_type = unassigned DNA
aatctgtttgaggatgtaggcactggtgtgaaggaacatggccctgtatcagaggtggcggtgtctccggctccaaggtttacaggcttgcaggctacacacggcagttgtgtcgacccctccacgctggttggcagagcggcttggcctttttgaggagctgtgggctgctcaggtaaagagattagcaagcatggcacagaaggaaccccggactattaagatatcacttcctggaggccagaaaattgatgctgtggcatggaacacaaccccctaccaactagcccggcagatcagttcaacactggcagatactgcagtggctgctcaagtgaatggagaaccttatgatctggagcggcccttggagacagattctgacctcagatttctgacattcgattccccagaggggaaagcagtgttctggcactccagcacccatgtcctgggggcagcagctgaacaattcctaggtgctgttctctgcagaggtccaagtacagaatatggcttttaccatgatttcttcctgggaaaggagaggacaatccggggctcagagctgcctgttttggagcggatttgccaggaacttacagctgctgctcgacccttccggaggctagaggcttcacgggatcagcttcgccagttgttcaaggctgagtatgcccatcgtggtttctccgaggtgaaaactcccacactgttttctacgaagctctgggaacagtcagggcactgggagcattatcaggaagacatgtttgccgtgcagcccccaggctctgacaggcctcccagctcccagagtgacgattctaccaggcatatcacagatacactcgccctcaagcctatgaactgccctgcacactgcctgatgttcgcccaccggcccagatcctggcgggaactgcccctgcgactagctgactttggggctctacaccgggccgaagcctctggtggtctggggggactgacccgactgcggtgcttccagcaggatgacgctcacatcttctgtacaacagatcagctggaagcagagatccaaagctgtcttgatttcctccgttccgtctatgccgttcttggcttctccttccgcctggcactgtccacccggccatctggcttcctgggggacccttgcctttgggaccaggccgaacaggtccttaaacaggccctgaaggaatttggagaaccctgggacctcaactctggagatggtgccttctatggacctaagattgacgtgcacctccacgatgccctgggccggccacatcagtgtgggacaattcagcttgacttccaactgcccctgagatttgacctccagtataaggggcaggcgggtgccctggagcgtccagtcctcattcaccgagcagtgctcggttctgtggaaagactgttgggagtgctggcagaaagctgcggggggaaatggccactgtggctgtccccgttccaggtggtggtcatccctgtggggagtgagcaagaggaatacgccaaagaggcacagcagagcctgcgggctgcaggactggtcagtgacctggatgcagactctggactgaccctcagccggagaatccgccgggcccagcttgcccactacaattttcagtttgtggttggccagaaagagcaaagtaagagaacagtgaacattcggactcgagataatcgtcgccttggggagtgggacttgcctgaggctgtgcagcgactggtggagctacagaacacgagggtcccaaatgccgaagaaattttctgagcctttgtacatagatgaggcaaaaacctgcgagtgccatcagcctccctcacatgggagaccccaacccagctgacaatgtggagcccccagaacttcagaactgtgtggaggcacatgtctgctctcctgaaaagagacttggtttggggaccccacaaaaggagggaagctgtagctgtttggatgtgagg

SEQ ID NO: 31549 - DNA, 2729 bp, Homo sapiens
  source 1..2729: mol_type = unassigned DNA
ctgtttgaggatgtaggcactggtgtgaaggaacatggccctgtatcagaggtggcggtgtctccggctccaaggtttacaggcttgcaggctacacacggcagttgtgtcgacccctccacgctggttggcagagcggcttggcctttttgaggagctgtgggctgctcaggtaaagagattagcaagcatggcacagaaggaaccccggactattaagatatcacttcctggaggccagaaaattgatgctgtggcatggaacacaaccccctaccaactagcccggcagatcagttcaacactggcagatactgcagtggctgctcaagtgaatggagaaccttatgatctggagcggcccttggagacagattctgacctcagatttctgacattcgattccccagaggggaaagcagtgttctggcactccagcacccatgtcctgggggcagcagctgaacaattcctaggtgctgttctctgcagaggtccaagtacagaatatggcttttaccatgatttcttcctgggaaaggagaggacaatccggggctcagagctgcctgttttggagcggatttgccaggaacttacagctgctgctcgacccttccggaggctagaggcttcacgggatcagcttcgccagttgttcaaggataacccctttaagcttcacttgattgaggagaaagtgacaggtccaacagcaacagtatatgggtgtggcacattggttgacctttgccagggcccccaccttcggcatactggacagattggaggactgaagctgctatcgaactcatcatccttatggaggtcttcaggggccccagagacactgcagagagtgtcagggatttccttccccacaacagaattgctgagggtctgggaagcatggagggaggaagcagaattgcgggaccaccggcgcattgggaaggaacaggagctcttcttcttccatgaactgagccctgggagctgcttcttcctgccacgagggacaagggtgtataatgcactagtggcgtttatcagggctgagtatgcccatcgtggtttctccgaggtgaaaactcccacactgttttctacgaagctctgggaacagtcagggcactgggagcattatcaggaagacatgtttgccgtgcagcccccaggctctgacaggcctcccagctcccagagtgacgattctaccaggcatatcacagatacactcgccctcaagcctatgaactgccctgcacactgcctgatgttcgcccaccggcccagatcctggcgggaactgcccctgcgactagctgactttggggctctacaccgggccgaagcctctggtggtctggggggactgacccgactgcggtgcttccagcaggatgacgctcacatcttctgtacaacagatcagctggaagcagagatccaaagctgtcttgatttcctccgttccgtctatgccgttcttggcttctccttccgcctggcactgtccacccggccatctggcttcctgggggacccttgcctttgggaccaggccgaacaggtccttaaacaggccctgaaggaatttggagaaccctgggacctcaactctggagatggtgccttctatggacctaagattgacgtgcacctccacgatgccctgggccggccacatcagtgtgggacaattcagcttgacttccaactgcccctgagatttgacctccagtataaggggcaggcgggtgccctggagcgtccagtcctcattcaccgagcagtgctcggttctgtggaaagactgttgggagtgctggcagaaagctgcggggggaaatggccactgtggctgtccccgttccaggtggtggtcatccctgtggggagtgagcaagaggaatacgccaaagaggcacagcagagcctgcgggctgcaggactggtcagtgacctggatgcagactctggactgaccctcagccggagaatccgccgggcccagcttgcccactacaattttcagtttgtggttggccagaaagagcaaagtaagagaacagtgaacattcggactcgagataatcgtcgccttggggagtgggacttgcctgaggctgtgcagcgactggtggagctacagaacacgagggtcccaaatgccgaagaaattttctgagcctttgtacatagatgaggcaaaaacctgcgagtgccatcagcctccctcacatgggagaccccaacccagctgacaatgtggagcccccagaacttcagaactgtgtggaggcacatgtctgctctcctgaaaagagacttggtttggggaccccacaaaaggagggaagctgtagctgtttggatgtgaggagaatgaaactacaaaaaaaaataaattgggccaggcgcagtggctcatgcctgtaatcccagcactctgggaggctgaggcggacggatcatgaggtcaggagatcaagaccaccctggctaacacggtgaaaccctgtctctactaaaaatacaaaaaattagccgggcatggtggcacacgcctgtaatcccagctactcaggaggctgaggcaggagaatcgcttgaacccgggaggtagaggttgcagtgagctgagattgcgccactgcacccccctaggcgacagagcgagactctgtctctaaataaataaataaataaataaatacaaactggaa

SEQ ID NO: 31550 - DNA, 1474 bp, Homo sapiens
  source 1..1474: mol_type = unassigned DNA
gataatctgtttgaggatgtaggcactggtgtgaaggaacatggccctgtatcagaggtggcggtgtctccggctccaaggtttacaggcttgcaggctacacacggcagttgtgtcgacccctccacgctggttggcagagcggcttggcctttttgaggagctgtgggctgctcaggtaaagagattagcaagcatggcacagaaggaaccccggactattaagatatcacttcctggaggccagaaaattgatgctgtggcatggaacacaaccccctaccaactagcccggcagatcagttcaacactggcagatactgcagtggctgctcaagtgaatggagaaccttatgatctggagcggcccttggagacagattctgacctcagatttctgacattcgattccccagaggggaaagcagacaatccggggctcagagctgcctgttttggagcggatttgccaggaacttacagctgctgctcgacccttccggaggctagaggcttcacgggatcagcttcgccagttgttcaaggataacccctttaagcttcacttgattgaggagaaagtgacaggtccaacagcaacagtatatgggtgtggcacattggttgacctttgccagggcccccaccttcggcatactggacagattggaggactgaagctgctatcgaactcatcatccttatggaggtcttcaggggccccagagacactgcagagagtgtcagggatttccttccccacaacagaattgctgagggtctgggaagcatggagggaggaagcagaattgcgggaccaccggcgcattgggaaggaacaggagctcttcttcttccatgaactgagccctgggagctgcttcttcctgccacgagggacaagggtgtataatgcactagtggcgtttatcagggctgagtatgcccatcgtggtttctccgaggtgaaaactcccacactgttttctacgaagctctgggaacagtcagggcactgggagcattatcaggaagacatgtttgccgtgcagcccccaggctctgacaggcctcccagctcccagagtgacgattctaccaggcatatcacagatacactcgccctcaagcctatgaactgccctgcacactgcctgatgttcgcccaccggcccagatcctggcgggaactgcccctgcgactagctgactttggggctctacaccgggccgaagcctctggtggtctggggggactgacccgactgcggtgcttccagcaggatgacgctcacatcttctgtacaacagatcagctggaagcagagatccaaagctgtcttgatttcctccgttccgtctatgccgttcttggcttctccttccgcctggcactgtccacccggccatctggcttcctgggggacccttgcctttgggaccaggccgaacaggtccttaaacaggccctgaa

SEQ ID NO: 31551 - DNA, 10583 bp, Homo sapiens
  source 1..10583: mol_type = unassigned DNA
attctgcgaggaatggcagcggcagcagcatccccgccagaggcggcggcggcggcggcagcggccacggccaccaccgcggacgctattgttccctggtgttagacgcgctctccctccttctcatctgaagcgaacaatagcaggaaagagctttgctttctgtactctttgaaaagacgttccaagagcggagaaaaattccctgccgagcgtgctacggctctggaccctggagtggctgcaggcggcatggggctgcaagccaggcgctgggcgtccgggagccggggcgctgcggggccgcgccggggcgtcctgcagctgctgccgctgccgctgccgctgccgctgctcctgctgctgctgctacgcccgggcgccggcagggctgcggcgcagggcgaggcggaggcgcccaccctctatctgtggaagactggtccatggggccgatgtatgggagatgaatgtggtcccggaggcatccaaacgagggctgtgtggtgtgctcatgtggagggatggactacactgcatactaactgtaagcaggccgagagacccaataaccagcagaattgtttcaaagtttgcgattggcacaaagagttgtacgactggagactgggaccttggaatcagtgtcagcccgtgatttcaaaaagcctagagaaacctcttgagtgcattaagggggaagaaggtattcaggtgagggagatagcgtgcatccagaaagacaaagacattcctgcggaggatatcatctgtgagtactttgagcccaagcctctcctggagcaggcttgcctcattccttgccagcaagattgcatcgtgtctgaattttctgcctggtccgaatgctccaagacctgcggcagcgggctccagcaccggacgcgtcatgtggtggcgcccccgcagttcggaggctctggctgtccaaacctgacggagttccaggtgtgccaatccagtccatgcgaggccgaggagctcaggtacagcctgcatgtggggccctggagcacctgctcaatgccccactcccgacaagtaagacaagcaaggagacgcgggaagaataaagaacgggaaaaggaccgcagcaaaggagtaaaggatccagaagcccgcgagcttattaagaaaaagagaaacagaaacaggcagaacagacaagagaacaaatattgggacatccagattggatatcagaccagagaggttatgtgcattaacaagacggggaaagctgctgatttaagcttttgccagcaagagaagcttccaatgaccttccagtcctgtgtgatcaccaaagagtgccaggtttccgagtggtcagagtggagcccctgctcaaaaacatgccatgacatggtgtcccctgcaggcactcgtgtaaggacacgaaccatcaggcagtttcccattggcagtgaaaaggagtgtccagaatttgaagaaaaagaaccctgtttgtctcaaggagatggagttgtcccctgtgccacgtatggctggagaactacagagtggactgagtgccgtgtggaccctttgctcagtcagcaggacaagaggcgcggcaaccagacggccctctgtggagggggcatccagacccgagaggtgtactgcgtgcaggccaacgaaaacctcctctcacaattaagtacccacaagaacaaagaagcctcaaagccaatggacttaaaattatgcactggacctatccctaatactacacagctgtgccacattccttgtccaactgaatgtgaagtttcaccttggtcagcttggggaccttgtacttatgaaaactgtaatgatcagcaagggaaaaaaggcttcaaactgaggaagcggcgcattaccaatgagcccactggaggctctggggtaaccggaaactgccctcacttactggaagccattccctgtgaagagcctgcctgttatgactggaaagcagtgagactgggaaactgcgagccagataacggaaaggagtgtggtccaggcacgcaagttcaagaggttgtgtgcatcaacagtgatggagaagaagttgacagacagctgtgcagagatgccatcttccccatccctgtggcctgtgatgccccatgcccgaaagactgtgtgctcagcacatggtctacgtggtcctcctgctcacacacctgctcagggaaaacgacagaagggaaacagatacgagcacgatccattctggcctatgcgggtgaagaaggtggaattcgctgtccaaatagcagtgctttgcaagaagtacgaagctgtaatgagcatccttgcacagtgtaccactggcaaactggtccctggggccagtgcattgaggacacctcagtatcgtccttcaacacaactacgacttggaatggggaggcctcctgctctgtcggcatgcagacaagaaaagtcatctgtgtgcgagtcaatgtgggccaagtgggacccaaaaaatgtcctgaaagccttcgacctgaaactgtaaggccttgtctgcttccttgtaagaaggactgtattgtgaccccatatagtgactggacatcatgcccctcttcgtgtaaagaaggggactccagtatcaggaagcagtctaggcatcgggtcatcattcagctgccagccaacgggggccgagactgcacagatcccctctatgaagagaaggcctgtgaggcacctcaagcgtgccaaagctacaggtggaagactcacaaatggcgcagatgccaattagtcccttggagcgtgcaacaagacagccctggagcacaggaaggctgtgggcctgggcgacaggcaagagccattacttgtcgcaagcaagatggaggacaggctggaatccatgagtgcctacagtatgcaggccctgtgccagcccttacccaggcctgccagatcccctgccaggatgactgtcaattgaccagctggtccaagttttcttcatgcaatggagactgtggtgcagttaggaccagaaagcgcactcttgttggaaaaagtaaaaagaaggaaaaatgtaaaaattcccatttgtatcccctgattgagactcagtattgtccttgtgacaaatataatgcacaacctgtggggaactggtcagactgtattttaccagagggaaaagtggaagtgttgctgggaatgaaagtacaaggagacatcaaggaatgcggacaaggatatcgttaccaagcaatggcatgctacgatcaaaatggcaggcttgtggaaacatctagatgtaacagccatggttacattgaggaggcctgcatcatcccctgcccctcagactgcaagctcagtgagtggtccaactggtcgcgctgcagcaagtcctgtgggagtggtgtgaaggttcgttctaaatggctgcgtgaaaaaccatataatggaggaaggccttgccccaaactggaccatgtcaaccagtttcaggtgtatgaggttgtcccatgccacagtgactgcaaccagtacctatgggtcacagagccctggagcatctgcaaggtgacctttgtgaatatgcgggagaactgtggagagggcgtgcaaacccgaaaagtgagatgcatgcagaatacagcagatggcccttctgaacatgtagaggattacctctgtgacccagaagagatgcccctgggctctagagtgtgcaaattaccatgccctgaggactgtgtgatatctgaatggggtccatggacccaatgtgttttgccttgcaatcaaagcagtttccggcaaaggtcagctgatcccatcagacaaccagctgatgaaggaagatcttgccctaatgctgttgagaaagaaccctgtaacctgaacaaaaactgctaccactatgattataatgtaacagactggagtacatgtcagctgagtgagaaggcagtttgtggaaatggaataaaaacaaggatgttggattgtgttcgaagtgatggcaagtcagttgacctgaaatattgtgaagcgcttggcttggagaagaactggcagatgaacacgtcctgcatggtggaatgccctgtgaactgtcagctttctgattggtctccttggtcagaatgttctcaaacatgtggcctcacaggaaaaatgatccgaagacgaacagtgacccagccctttcaaggtgatggaagaccatgcccttccctgatggaccagtccaaaccctgcccagtgaagccttgttatcggtggcaatatggccagtggtctccatgccaagtgcaggaggcccagtgtggagaagggaccagaacaaggaacatttcttgtgtagtaagtgatgggtcagctgatgatttcagcaaagtggtggatgaggaattctgtgctgacattgaactcattatagatggtaataaaaatatggttctggaggaatcctgcagccagccttgcccaggtgactgttatttgaaggactggtcttcctggagcctgtgtcagctgacctgtgtgaatggtgaggatctaggctttggtggaatacaggtcagatccagaccggtgattatacaagaactagagaatcagcatctgtgcccagagcagatgttagaaacaaaatcatgttatgatggacagtgctatgaatataaatggatggccagtgcttggaagggctcttcccgaacagtgtggtgtcaaaggtcagatggtataaatgtaacagggggctgcttggtgatgagccagcctgatgccgacaggtcttgtaacccaccgtgtagtcaaccccactcgtactgtagcgagacaaaaacatgccattgtgaagaagggtacactgaagtcatgtcttctaacagcacccttgagcaatgcacacttatccccgtggtggtattacccaccatggaggacaaaagaggagatgtgaaaaccagtcgggctgtacatccaacccaaccctccagtaacccagcaggacggggaaggacctggtttctacagccatttgggccagatgggagactaaagacctgggtttacggtgtagcagctggggcatttgtgttactcatctttattgtctccatgatttatctagcttgcaaaaagccaaagaaaccccaaagaaggcaaaacaaccgactgaaacctttaaccttagcctatgatggagatgccgacatgtaacatataacttttcctggcaacaaccagtttcggctttctgacttcatagatgtccagaggccacaacaaatgtatccaaactgtgtggattaaaatatattttaatttttaaaaatggcatcataaagacaagagtgaaaatcatactgccactggagatatttaagacagtaccacttatatacagaccatcaaccgtgagaattataggagatttagctgaatacatgctgcattctgaaagttttatgtcatcttttctgaaatctaccgactgaaaaaccactttcatctctaaaaaataatggtggaattggccagttaggatgcctgatacaagaccgtctgcagtgttaatccataaaacttcctagcatgaagagtttctaccaagatctccacaatactatggtcaaattaacatgtgtactcagttgaatgacacacattatgtcagattatgtacttgctaataagcaattttaacaatgcataacaaataaactctaagctaagcagaaaatccactgaataaattcagcatcttggtggtcgatggtagattttattgacctgcatttcagagacaaagcctcttttttaagacttcttgtctctctccaaagtaagaatgctggacaagtactagtgtcttagaagaacgagtcctcaagttcagtattttatagtggtaattgtctggaaaactaatttacttgtgttaatacaatacgtttctactttccctgattttcaaactggttgcctgcatcttttttgctatatggaaggcacatttttgcactatattagtgcagcacgataggcgcttaaccagtattgccatagaaactgcctcttttcatgtgggatgaagacatctgtgccaagagtggcatgaagacatttgcaagttcttgtatcctgaagagagtaaagttcagtttggatggcagcaagatgaaatcagctattacacctgctgtacacacacttcctcatcactgcagccattgtgaaattgacaacatggcggtaatttaagtgttgaagtccctaaccccttaaccctctaaaaggtggattcctctagttggtttgtaattgttctttgaaggctgtttatgactagatttttatatttgttatctttgttaagaaaaaaaaagaaaaaggaactggatgtctttttaattttgagcagatggagaaaataaataatgtatcaatgacctttgtaactaaaggaaatcaaaattatatgttgatttttctttctctctgatttcccagtttcagattgaatgtctgtcttgcaggcagttatttcaaaatccatagtcttttgcctttctcactggcaaaatttgaagcaatctctctcttcaatgtatgatttcaaaactaaaattttaaaagagaagaataaatatcttatccaagacttcattgcatatctagagcaagagtggcaaactttttctgtaaaggactatatagaaaatattttccacaaggtctatgttgcaacttctcaactttgccattctgctaatgcaatcttagtaaataaaagaatgaacataactgttttcctatataacttcccttacaaaaacagccagtaggccacctttgcaggtcatattttgctgacccctggtctggatgttttttaatgctagctctccatggtgtcatctttcgttttcattcatttttcaaaggtgagaatttacagtcattacatttcccactgtatcagaagtagctgtattttctacagatgtagccctgggaatggcacagtggaacaatatttaactaactcagcagacttcttgcaaatgaaaagaaaactcaaaaggtgccattaaaaagcaataccattttcaggcaacattattgcaacaacctttgtgagagaggacactagcttttcaggatatttgaaaaataatataactaacatgctattttatcttaaacagctgtgttcctgtaaaagtgttttggattagaaggtatttttaccttcatactggagtatgaactccccctgctgttcattagagtatttgcaaagattacaaaagacatcaggttaggatgtcattgtccccaaaatgaaaatatttgtatgtatttcaataagaactaaatgcagtaagcgctaattcctcattcaatattcactatattaggaaatgtaaatcatttcaaagagaacaggtagtcaggaagatgaaaattttactttaaagcaaggatttaaacaaagaaaaccataaaaacaaagtccattttatctgttttattaaagaggaagaaaaaataatattgttactttaaaactgtgattgtcaatatatataatcaggggtcttccagataatcctaaagttgatctctttgaataaaataaactccatttgtccaaaatagttaagaaagactctattgtggttacttgaaaaattcagctaaccctcttatgaaatgtgtgcaacacctattaattttgaaatgtgggatagaatacctactaaagctatatttaaggtattgtaaaatgtcattaattcagaaaagattagtatcatcctacctataagaattaaattagcaaatcaaaattatagaatgttatgaaaaatacattttattcataaattaattagattttacagcatatatgcatgcatatatatatatacacacacacacacacacacccatatatatgagagagaggaaattaggttcaacatgacctaatattagagaacatattggaaggtcactgtttgttaggataaataaatactggataacctcgttagaaaggtggaaagaggagaacgtagcaatctggctattttggacaaagggaaggttattatattcatgtttataacatgaaaatggccttatttttgtttctgacatgagacaataatgagttaaatattttattggaatttcatcaaaaccttatttttactgttccttctaaaaatttgggaggggaatatagtagtaacttctctattgacacttttacctcaccgagggggtaaaagatgtagaactgctgttccctagaatgaaggtctgttgtttggtttttaaaaaaagaagagcagaaaaagtttgacacagtattatatgattttgctggactatttcactagaaaccacgtagaataggactaactgatctcttttgaaaggggctgatttgcttattcatcaataactaatccaatatgtggacagtaatcttaatttcaaagccttttttgaggatactacggtgtagcttaagtgaatttaaaaagagtgcataaaagcttgtttttaattacttataacaaagcacaaattacttctaacaaggcaaatatttattgacatataagacattctgctaggcattgtaaaaaaaaaaaaaaaagtaatggcttttgtatacataggtacttaagacagacatccaaaagaaggaaaaaatgcttaatgagtgaagatagcactgaaacatgttgacttttactctaggtttgtttttagatggggttagtattttcccctacgtaatgtacatgtctttaggccacagtattaggagtttgatttttccctgccccaccctcaggtaggtggcagtggtcattgtagcttaatcagacccctgttaagttcctgggcatttcaaggtaaattcacgtcttccttctcacagaaattgaatagacctctcacacacttatttacctcccccaacaacctgtatccttggccctttctgattttctctgcttggtctctttctactcttgacagctattcttacctacttcccactaaacatgcccaattttttaattaaaaaaaaaagaattcctatatttccttccctattagaatcaaagtgtcactcactcagagtgtgaacatcctgatttacaccaaatccactggtcaaagaaatgaataaagggaaaaggaaaaatgtggaaggcatgcaggaaaaaaaaaaaaaaaaaagcccttttctgtaaaaatgtccatgcctacacttgctttagaccatcccatatcctcctgcctccatctcgagtctttgttcacattccacaccacaagacagtgagggaggactgtacttttcagtaccatacagaagggagagcctgttctaaagctgacgtgggtctcaatagtacatgagaagcacaattcccaaatgatctgggatctcctgtttataaatatattaccaaattcaagtgtgggttcttcttctatttccactgtaagattgagggtgttgaaaaaacagtagtccttgagcaaatctgtgaggaatcttgtcagaatgtgatctttcctgggactagtttagttgtgagaactacatctgcttgttctgggaataagggtctccccaggtcctgccctcaggtggccctggctgcaggacaggatttcaggtatcagaaactggtgtgtgagccaagcaaatagttatccatttataaaaaggatggtttgcagtgtgttataataattttatatctagcagggacaatgaaaaatggttatgtctacattattaaatgaatgaaactaatgctaaacagttaattttgcatttttatttttctgtgtttctaccaagtcagatcttaaaaatgggcagtatatgaagagctttagtttgtgggagtcatgttttcagtgatcaaaaatctctatattatttagaatataattgtcagtcttgttgtgttttgtagatttattgtttttaagccatagtttctagattacctacttttaaccctcaagtaaacttttccctatttttcagaaatctgtttgtgtttatttttagaaagtaaacatttagattccttttctggtactttttttctccatttctatcacacagatttgaagagatcagtatctatcattgtaaaatataactttattaaaatttgcaatctgtctttctataaattattattccctaaatgtgtattttatgttaatttaactacctgaatatttattttgtttaaataaggaggcagctgtctaagaatttttgttaatattactttgtaaattgcgtaatgtaatttattttacattatgtacatttcctttttaacgcacaaaatgtctatgtacaattaactacagatttgcaaataatgtcactaagctttattcagtcaatacagatggcatgtgaagatgtaatatgcttttttacattttcatatgggttatttgtaaataactatattgctgacaaacataaatacggaaatcattttcattct

SEQ ID NO: 31552 - DNA, 6477 bp, Homo sapiens
  source 1..6477: mol_type = unassigned DNA
attctgcgaggaatggcagcggcagcagcatccccgccagaggcggcggcggcggcggcagcggccacggccaccaccgcggacgctattgttccctggtgttagacgcgctctccctccttctcatctgaagcgaacaatagcaggaaagagctttgctttctgtactctttgaaaagacgttccaagagcggagaaaaattccctgccgagcgtgctacggctctggaccctggagtggctgcaggcggcatggggctgcaagccaggcgctgggcgtccgggagccggggcgctgcggggccgcgccggggcgtcctgcagctgctgccgctgccgctgccgctgccgctgctcctgctgctgctgctacgcccgggcgccggcagggctgcggcgcagggcgaggcggaggcgcccaccctctatctgtggaagactggtccatggggccgatgtatgggagatgaatgtggtcccggaggcatccaaacgagggctgtgtggtgtgctcatgtggagggatggactacactgcatactaactgtaagcaggccgagagacccaataaccagcagaattgtttcaaagtttgcgattggcacaaagagttgtacgactggagactgggaccttggaatcagtgtcagcccgtgatttcaaaaagcctagagaaacctcttgagtgcattaagggggaagaaggtattcaggtgagggagatagcgtgcatccagaaagacaaagacattcctgcggaggatatcatctgtgagtactttgagcccaagcctctcctggagcaggcttgcctcattccttgccagcaagattgcatcgtgtctgaattttctgcctggtccgaatgctccaagacctgcggcagcgggctccagcaccggacgcgtcatgtggtggcgcccccgcagttcggaggctctggctgtccaaacctgacggagttccaggtgtgccaatccagtccatgcgaggccgaggagctcaggtacagcctgcatgtggggccctggagcacctgctcaatgccccactcccgacaagtaagacaagcaaggagacgcgggaagaataaagaacgggaaaaggaccgcagcaaaggagtaaaggatccagaagcccgcgagcttattaagaaaaagagaaacagaaacaggcagaacagacaagagaacaaatattgggacatccagattggatatcagaccagagaggttatgtgcattaacaagacggggaaagctgctgatttaagcttttgccagcaagagaagcttccaatgaccttccagtcctgtgtgatcaccaaagagtgccaggtttccgagtggtcagagtggagcccctgctcaaaaacatgccatgacatggtgtcccctgcaggcactcgtgtaaggacacgaaccatcaggcagtttcccattggcagtgaaaaggagtgtccagaatttgaagaaaaagaaccctgtttgtctcaaggagatggagttgtcccctgtgccacgtatggctggagaactacagagtggactgagtgccgtgtggaccctttgctcagtcagcaggacaagaggcgcggcaaccagacggccctctgtggagggggcatccagacccgagaggtgtactgcgtgcaggccaacgaaaacctcctctcacaattaagtacccacaagaacaaagaagcctcaaagccaatggacttaaaattatgcactggacctatccctaatactacacagctgtgccacattccttgtccaactgaatgtgaagtttcaccttggtcagcttggggaccttgtacttatgaaaactgtaatgatcagcaagggaaaaaaggcttcaaactgaggaagcggcgcattaccaatgagcccactggaggctctggggtaaccggaaactgccctcacttactggaagccattccctgtgaagagcctgcctgttatgactggaaagcagtgagactgggaaactgcgagccagataacggaaaggagtgtggtccaggcacgcaagttcaagaggttgtgtgcatcaacagtgatggagaagaagttgacagacagctgtgcagagatgccatcttccccatccctgtggcctgtgatgccccatgcccgaaagactgtgtgctcagcacatggtctacgtggtcctcctgctcacacacctgctcagggaaaacgacagaagggaaacagatacgagcacgatccattctggcctatgcgggtgaagaaggtggaattcgctgtccaaatagcagtgctttgcaagaagtacgaagctgtaatgagcatccttgcacagtgtaccactggcaaactggtccctggggccagtgcattgaggacacctcagtatcgtccttcaacacaactacgacttggaatggggaggcctcctgctctgtcggcatgcagacaagaaaagtcatctgtgtgcgagtcaatgtgggccaagtgggacccaaaaaatgtcctgaaagccttcgacctgaaactgtaaggccttgtctgcttccttgtaagaaggactgtattgtgaccccatatagtgactggacatcatgcccctcttcgtgtaaagaaggggactccagtatcaggaagcagtctaggcatcgggtcatcattcagctgccagccaacgggggccgagactgcacagatcccctctatgaagagaaggcctgtgaggcacctcaagcgtgccaaagctacaggtggaagactcacaaatggcgcagatgccaattagtcccttggagcgtgcaacaagacagccctggagcacaggaaggctgtgggcctgggcgacaggcaagagccattacttgtcgcaagcaagatggaggacaggctggaatccatgagtgcctacagtatgcaggccctgtgccagcccttacccaggcctgccagatcccctgccaggatgactgtcaattgaccagctggtccaagttttcttcatgcaatggagactgtggtgcagttaggaccagaaagcgcactcttgttggaaaaagtaaaaagaaggaaaaatgtaaaaattcccatttgtatcccctgattgagactcagtattgtccttgtgacaaatataatgcacaacctgtggggaactggtcagactgtattttaccagagggaaaagtggaagtgttgctgggaatgaaagtacaaggagacatcaaggaatgcggacaaggatatcgttaccaagcaatggcatgctacgatcaaaatggcaggcttgtggaaacatctagatgtaacagccatggttacattgaggaggcctgcatcatcccctgcccctcagactgcaagctcagtgagtggtccaactggtcgcgctgcagcaagtcctgtgggagtggtgtgaaggttcgttctaaatggctgcgtgaaaaaccatataatggaggaaggccttgccccaaactggaccatgtcaaccaggcacaggtgtatgaggttgtcccatgccacagtgactgcaaccagtacctatgggtcacagagccctggagcatctgcaaggtgacctttgtgaatatgcgggagaactgtggagagggcgtgcaaacccgaaaagtgagatgcatgcagaatacagcagatggcccttctgaacatgtagaggattacctctgtgacccagaagagatgcccctgggctctagagtgtgcaaattaccatgccctgaggactgtgtgatatctgaatggggtccatggacccaatgtgttttgccttgcaatcaaagcagtttccggcaaaggtcagctgatcccatcagacaaccagctgatgaaggaagatcttgccctaatgctgttgagaaagaaccctgtaacctgaacaaaaactgctaccactatgattataatgtaacagactggagtacatgtcagctgagtgagaaggcagtttgtggaaatggaataaaaacaaggatgttggattgtgttcgaagtgatggcaagtcagttgacctgaaatattgtgaagcgcttggcttggagaagaactggcagatgaacacgtcctgcatggtggaatgccctgtgaactgtcagctttctgattggtctccttggtcagaatgttctcaaacatgtggcctcacaggaaaaatgatccgaagacgaacagtgacccagccctttcaaggtgatggaagaccatgcccttccctgatggaccagtccaaaccctgcccagtgaagccttgttatcggtggcaatatggccagtggtctccatgccaagtgcaggaggcccagtgtggagaagggaccagaacaaggaacatttcttgtgtagtaagtgatgggtcagctgatgatttcagcaaagtggtggatgaggaattctgtgctgacattgaactcattatagatggtaataaaaatatggttctggaggaatcctgcagccagccttgcccaggtgactgttatttgaaggactggtcttcctggagcctgtgtcagctgacctgtgtgaatggtgaggatctaggctttggtggaatacaggtcagatccagaccggtgattatacaagaactagagaatcagcatctgtgcccagagcagatgttagaaacaaaatcatgttatgatggacagtgctatgaatataaatggatggccagtgcttggaagggctcttcccgaacagtgtggtgtcaaaggtcagatggtataaatgtaacagggggctgcttggtgatgagccagcctgatgccgacaggtcttgtaacccaccgtgtagtcaaccccactcgtactgtagcgagacaaaaacatgccattgtgaagaagggtacactgaagtcatgtcttctaacagcacccttgagcaatgcacacttatccccgtggtggtattacccaccatggaggacaaaagaggagatgtgaaaaccagtcgggctgtacatccaacccaaccctccagtaacccagcaggacggggaaggacctggtttctacagccatttgggccagatgggagactaaagacctgggtttacggtgtagcagctggggcatttgtgttactcatctttattgtctccatgatttatctagcttgcaaaaagccaaagaaaccccaaagaaggcaaaacaaccgactgaaacctttaaccttagcctatgatggagatgccgacatgtaacatataacttttcctggcaacaaccagtttcggctttctgacttcatagatgtccagaggccacaacaaatgtatccaaactgtgtggattaaaatatattttaatttttaaaaatggcatcataaagacaagagtgaaaatcatactgccactggagatatttaagacagtaccacttatatacagaccatcaaccgtgagaattataggagatttagctgaatacatgctgcattctgaaagttttatgtcatcttttctgaaatctaccgactgaaaaaccactttcatctctaaaaaataatggtggaattggccagttaggatgcctgatacaagaccgtctgcagtgttaatccataaaacttcctagcatgaagagtttctaccaagatctccacaatactatggtcaaattaacatgtgtactcagttgaatgacacacattatgtcagattatgtacttgctaataagcaattttaacaatgcataacaaataaactctaagctaagcagaaaatccactgaataaattcagcatcttggtggtcgatggtagattttattgacctgcatttcagagacaaagcctcttttttaagacttcttgtctctctccaaagtaagaatgctggacaagtactagtgtcttagaagaacgagtcctcaagttcagtattttatagtggtaattgtctggaaaactaatttacttgtgttaatacaatacgtttctactttccctgattttcaaactggttgcctgcatcttttttgctatatggaaggcacatttttgcactatattagtgcagcacgataggcgcttaaccagtattgccatagaaactgcctcttttcatgtgggatgaagacatctgtgccaagagtggcatgaagacatttgcaagttcttgtatcctgaagagagtaaagttcagtttggatggcagcaagatgaaatcagctattacacctgctgtacacacacttcctcatcactgcagccattgtgaaattgacaacatggcggtaatttaagtgttgaagtccctaaccccttaaccctctaaaaggtggattcctctagttggtttgtaattgttctttgaaggctgtttatgactagatttttatatttgttatctttgttaagaaaaaaaaagaaaaaggaactggatgtctttttaattttgagcagatggagaaaataaataatgtatcaatgacctttgtaactaaaggaaa

SEQ ID NO: 31553 - DNA, 3967 bp, Homo sapiens
  source 1..3967: mol_type = unassigned DNA
tgaggagcagccacttccctgcaggctgagcggagccctggatggagcttggcacccaagcccctcatgtctgccctgctgagtctgtgttttgtgctgcccctggcggcccccggccacggcacgcagggttgggagccctgcacagacctgcgccccctggacatcctggcggaagtggtcccttctgatggcgccacaagcgggatcaggatagttcaggttcacggtgcacggggactccagctctcagtagccgccccccgcaccatgagcttcccagcatccaggattttctcccagtgtgacctcttccctgaagaattttccatcgtcgtaactttgagagttcccaatcttccacccaagaggaacgagtacctgctgacggtggtggcagaggagagcgacctgctgctgctcggcctgcggttgtcacctgcccagctgcacttcctgttccttcgcgaggacacggccggcgcctggcagacccgagtgtccttccgcagcccggccctggtggatggccgctggcacacactggtcctggctgtgtccgcaggcgtcttctccctcaccacggactgcggcctcccggtggacataatggccgatgtgcccttcccagccaccctgtcagtgaaaggagctcgattcttcgtcggcagccggaggagagccaaaggcctgttcatgggactggtgaggcaactggtcctgctgccgggctcagacgccaccccaaggctgtgtcccagcaggaacgccccgctggcggtgctgtccatcccacgggtcctgcaggctctcacggggaagccagaagataacgaggtgctaaaatatccctatgaaaccaacattcgagtgacgctgggaccccagccaccgtgtaccgaggtggaagacgcccagttctggtttgatgccagccggaagggcctgtatctgtgtgttggcaacgagtgggtctccgtgttagcagccaaagaaagactggactacgtggaggagcatcagaacttgtccaccaactcagagaccctgggcattgaggtgttccgcatccctcaggtggggctctttgtggccacagccaatcgcaaagccacatccgccgtctacaagtggaccgaagagaagttcgtctcatatcagaacatccccacgcaccaagcacaggcctggaggcatttcaccatcgggaaaaagatcttcctggcagtggctaattttgaaccagatgagaagggtcaggagttctctgtcatttacaaatggagccacagaaagctgaagtttaccccatatcagagcattgccacacacagcgcccgagactgggaggccttcgaggtggatggggagcacttcctggcggtggccaaccaccgggaaggcgacaaccacaacatcgacagtgtcatctacaagtggaacccggcaacccggctcttcgaggccaaccagaccatcgccacctccggcgcctacgactgggagttcttcagtgtggggccctactcgttcctggtggtggccaacaccttcaacggcacctccaccaaggtgcactcgcacctctacatccgactcctgggctccttccagctcttccagtccttcccgacgttcggtgctgcagactgggaggtcttccagatcggggagaggatcttcctcgctgtggcaaacagtcacagctacgatgtggagatgcaagtccagaatgattcctatgtcatcaactccgtcatctacgagctgaacgtgaccgcgcaggcctttgtcaagttccaggacattctcacctgcagtgctctggactgggagtttttctcggtgggagaagattatttcctggtggtggccaactccttcgatgggcgtaccttctcggtgaacagtattatttacaggtggcagggctacgagggcttcgtggcggtgcacagcctccccaccgtcggctgcagggactgggaggccttcagcaccacggctggtgcctacctcatctactccagcgccaaggagcccctctccagggtcctgcggctgaggacacgctgaggccgcggctgcccggcagcaactggggtggccaggtggggcgggaccccagcacctcccccaactgaccctggacgtccaggtgggcccagcctagggcatcccgggcctgggcatcaggcagggtgcaggtggggccatctgcggccctggttcgggcagggacatccatccacctctgagtccttctgagccacagccccagtgacggtctggtcttgcaggcagaggcccagagcccctgccagtgctcgcccatctgagtgtcaagcggggatttcgctgtcaaggaaccgtttctatacatttttacctcaaacaacaggacctcggttcatgtccctgcggctggcctctcgccagccactcctgcagtgtgcgtccggccgcctgagcaggtgtggtgccgtcccgccattgccgccacctatttattgtgttttatctgaacggaagtgtatttatactgctctttacaaaagcaccggtgctcctctctaggcagcgggtgggcacagcccctcaccacggacacggacagaggaccacctccccatacagagagaggcttccctcccagcctcagtttacccgtaaatgcactagcgcgaggtcagaaatcacaagcctgggcatggcctgggtcgcaccccctccccacggccccacccacagggacctcaacttctgggcccgggattttttccctattcagcagcattttaatcacatgtcctccagctgactgggactcaggctgcgtgcctccgtctgcctgtgtgctggctgtcctagctccctggtaacagcatcctctgctggctctcctgtggtcatcttgtctctgcagctgggagagctgcttgtctgtccgtcacaggcagtgaggatgagagggggtgatgggcgcaaggccccaggggtcctccctcttaacccatgtaggtgccagagaaaccacccccactccatgagaagaggctcagacagcaggctccggggccacgcagcccagaccacacctgccacggtcttccaggaacggtgctcctgcttctgcaacacaaatcggaacaggagcgatcctcagagagtttacaatgtgctttttccgccaatcagaactgtggacaaaacttcctatttcctacaccgcagctgtctgttcaccttcagctcagagagcactcctgacctttcgtaatgaaatggaagcctccccttgtctggcaaataataaactcagtgtctacttttgccggctttgggaccttcgtgtttttccggggctcaggtctcactccagccatcgctgtggccagtggagagccactcccctctgggggcagtcgccgagagcctccttcccctccgtccagccagcaaggctttcccaagcgtcctgggcaggagggttgggccctgctttccaccaagtcactcagaaggtcccaatcacacatgattggcctcattgggtcagcacctgtgaaaggaagattaaaaactcgacaccccaattcactcaaccaagaagaaaaaagctgaaagctgagtcctgcaggaagctgcctttccctttgccctaagcagacagctgcagatgagagggtcagcatctccactagtggctgctctgtgtgccccttatctcatggaaagtgccaatttactgagcacgagataaacaggtaactgactgttcccacctgctccttttctcctgcagcatggagcaatcagtcatgtgaccacaccctcctccctctgccccctccagccggcttttccccttgactgaagccttcaacatcatcttgggagagaggcacagacctgtctcctgggtgcatccttagccttggcaaaataaacttctccattgatcgag

SEQ ID NO: 31554 - DNA, 1866 bp, Homo sapiens
  source 1..1866: mol_type = unassigned DNA
tgaggagcagccacttccctgcaggctgagcggagccctggatggagcttggcacccaagcccctcatgtctgccctgctgagtctgtgttttgtgctgcccctggcggcccccggccacggcacgcagggttgggagccctgcacagacctgcgccccctggacatcctggcggaagtggtcccttctgatggcgccacaagcgggatcaggatagttcaggttcacggtgcacggggactccagctctcagtagccgccccccgcaccatgagcttcccagcatccaggattttctcccagtgtgacctcttccctgaagaattttccatcgtcgtaactttgagagttcccaatcttccacccaagaggaacgagtacctgctgacggtggtggcagaggagagcgacctgctgctgctcggcctgcggttgtcacctgcccagctgcacttcctgttccttcgcgaggacacggccggcgcctggcagacccgagtgtccttccgcagcccggccctggtggatggccgctggcacacactggtcctggctgtgtccgcaggcgtcttctccctcaccacggactgcggcctcccggtggacataatggccgatgtgcccttcccagccaccctgtcagtgaaaggagctcgattcttcgtcggcagccggaggagagccaaaggcctgttcatgggactggtgaggcaactggtcctgctgccgggctcagacgccaccccaaggctgtgtcccagcaggaacgccccgctggcggtgctgtccatcccacgggtcctgcaggctctcacggggaagccagaagataacgaggtgctaaaatatccctatgaaaccaacattcgagtgacgctgggaccccagccaccgtgtaccgaggtggaagacgcccagttctggtttgatgccagccggaagggcctgtatctgtgtgttggcaacgagtgggtctccgtgttagcagaagccaaagaaagactggactacgtggaggagcatcagaacttgtccaccaactcagagaccctgggcattgaggtgttccgcatccctcaggtggggctctttgtggccacagccaatcgcaaagccacatccgccgtctacaagtggaccgaagagaagttcgtctcatatcagaacatccccacgcaccaagcacaggcctggaggcatttcaccatcgggaaaaagatcttcctggcagtggctaattttgaaccagatgagaagggtcaggagttctctgtcatttacaaatggagccacagaaagctgaagtttaccccatatcagagcattgccacacacagcgcccgagactgggaggccttcgaggtggatggggagcacttcctggcggtggccaaccaccgggaaggcgacaaccacaacatcgacagtgtcatctacaagtggaacccggcaacccggctcttcgaggccaaccagaccatcgccacctccggcgcctacgactgggagttcttcagtgtggggccctactcgttcctggtggtggccaacaccttcaacggcacctccaccaaggtgcactcgcacctctacatccgactcctgggctccttccagctcttccagtccttcccgacgttcggtgctgcagactgggaggtcttccagatcggggagaggatcttcctcgctgtggcaaacagtcacagctacgatgtggagatgcaagtccagaatgattcctatgtcatcaactccgtcatctacgagctgaacgtgaccgcgcaggcctttgtcaagttccaggacattctcacctgcagtggaggcaggagggggcttcatgcccgtcgtgcggagggatag

SEQ ID NO: 31555 - DNA, 2287 bp, Homo sapiens
  source 1..2287: mol_type = unassigned DNA
agccctggatggagcttggcacccaagcccctcatgtctgccctgctgagtctgtgttttgtgctgcccctggcggcccccggccacggcacgcagggttgggagccctgcacagacctgcgccccctggacatcctggcggaagtggtcccttctgatggcgccacaagcgggatcaggatagttcaggttcacggtgcacggggactccagctctcagtagccgccccccgcaccatgagcttcccagcatccaggattttctcccagtgtgacctcttccctgaagaattttccatcgtcgtaactttgagagttcccaatcttccacccaagaggaacgagtacctgctgacggtggtggcagaggagagcgacctgctgctgctcggcctgcggttgtcacctgcccagccaccgtgtaccgaggtggaagacgcccagttctggtttgatgccagccggaagggcctgtatctgtgtgttggcaacgagtgggtctccgtgttagcagccaaagaaagactggactacgtggaggagcatcagaacttgtccaccaactcagagaccctgggcattgaggtgttccgcatccctcaggtggggctctttgtggccacagccaatcgcaaagccacatccgccgtctacaagtggaccgaagagaagttcgtctcatatcagaacatccccacgcaccaagcacaggcctggaggcatttcaccatcgggaaaaagatcttcctggcagtggctaattttgaaccagatgagaagggtcaggagttctctgtcatttacaaatggagccacagaaagctgaagtttaccccatatcagagcattgccacacacagcgcccgagactgggaggccttcgaggtggatggggagcacttcctggcggtggccaaccaccgggaaggcgacaaccacaacatcgacagtgtcatctacaagtggaacccggcaacccggctcttcgaggccaaccagaccatcgccacctccggcgcctacgactgggagttcttcagtgtggggccctactcgttcctggtggtggccaacaccttcaacggcacctccaccaaggtgcactcgcacctctacatccgactcctgggctccttccagctcttccagtccttcccgacgttcggtgctgcagactgggaggtcttccagatcggggagaggatcttcctcgctgtggcaaacagtcacagctacgatgtggagatgcaagtccagaatgattcctatgtcatcaactccgtcatctacgagctgaacgtgaccgcgcaggcctttgtcaagttccaggacattctcacctgcagtgctctggactgggagtttttctcggtgggagaagattatttcctggtggtggccaactccttcgatgggcgtaccttctcggtgaacagtattatttacaggtggcagggctacgagggcttcgtggcggtgcacagcctccccaccgtcggctgcagggactgggaggccttcagcaccacggctggtgcctacctcatctactccagcgccaaggagcccctctccagggtcctgcggctgaggacacgctgaggccgcggctgcccggcagcaactggggtggccaggtggggcgggaccccagcacctcccccaactgaccctggacgtccaggtgggcccagcctagggcatcccgggcctgggcatcaggcagggtgcaggtggggccatctgcggccctggttcgggcagggacatccatccacctctgagtccttctgagccacagccccagtgacggtctggtcttgcaggcagaggcccagagcccctgccagtgctcgcccatctgagtgtcaagcggggatttcgctgtcaaggaaccgtttctatacatttttacctcaaacaacaggacctcggttcatgtccctgcggctggcctctcgccagccactcctgcagtgtgcgtccggccgcctgagcaggtgtggtgccgtcccgccattgccgccacctatttattgtgttttatctgaacggaagtgtatttatactgctctttacaaaagcaccggtgctcctctctaggcagcgggtgggcacagcccctcaccacggacacggacagaggaccacctccccatacagagagaggcttccctcccagcctcagtttacccgtaaatgcactagcgcgaggtcagaaatcacaagcctgggcatggcctgggtcgcaccccctccccacggccccacccacagggacctcaac

SEQ ID NO: 31556 - DNA, 2367 bp, Homo sapiens
  source 1..2367: mol_type = unassigned DNA
gagggccggcctggacccggcgggcgcacggctccgagcccagcgcagccgagccggtctgcagaggggcccccagaactttgtgtgtgtgtgtgcacgcgcgcgcgtgtgtgcccaggtgcgagggttcgcgcgtgtgctggcggggagggaaccgacccgaaagagagccccacgctggcaaagtggctcgcccatctcacagccggttggcgctcgcggaggctcacagaacatttcctgcctgttgctcacactctgttgtccacagcatacccgcaccctagatggctgactcttgtcttctgtctctttattttccatgtgtgagcctgtgcctgtggtttatctctggaggatgtgcctgagggaggagacatatactgcctggactgcctggctgatgtgagctagtttgtctggttgagttggatgtttaaatagaaggcagaacaacaacagagcacggttcccataagggcggcgagatcagcctcctgtctcatctggaagaccaccactctggggtctcagaggaatgatggaagccttggggtttctaaaattggaagtgaatggccccatggtgacggtggccctgtcagtggctctcttggccctcctgaaatggtactccacatcagcattctcaagactggagaagttaggcctcagacatcccaagccttctcctttcattggaaacttgacatttttccgccagggtttttgggaaagccaaatggagctcagaaagctgtatggacctctgtgtgggtactatcttggtcgtcggatgtttattgttatttctgagccagacatgatcaagcaggtgttggttgagaacttcagtaactttaccaacagaatggcgtcgggtttggagttcaagtcggtagccgacagcgttctgtttttacgtgacaaaagatgggaagaggtcagaggtgccctgatgtctgctttcagtcctgaaaagctgaacgagatggttcccctcatcagccaagcctgcgaacttctcctggctcatttaaaacgctatgcggaatctggggacgcatttgacatccagaggtgctactgcaattacaccacagatgtggttgccagcgtcgcctttggcaccccggtggactcctggcaggcccctgaggatccctttgtgaaacactgcaagcgtttcttcgaattctgcatccccagacctatcctggttttactcttatcatttccatccataatggtcccactggcccggattttgcccaataagaaccgagacgaactgaatggcttttttaacaaactcattaggaatgtgattgccttgcgggaccagcaagctgccgaagagaggcggagagacttcctccaaatggtcctggatgcccgacattctgcaagtcccatgggcgtgcaagactttgacatcgtcagagacgttttctcctctactgggtgcaagccgaacccttcccggcaacaccagcccagccctatggccaggcctttgactgtggatgagattgtgggccaggccttcatcttcctcatcgctggctatgaaatcatcaccaacacactttcttttgccacctacctactggccaccaaccctgactgccaagagaagcttctgagagaggtagacgtttttaaggagaaacacatggcccctgagttctgcagcctcgaggaaggcctgccctatctggacatggtgattgcagagacgctgaggatgtacccgccagctttcagattcacacgggaggcagctcaggactgcgaggtgctggggcagcgcatccccgcaggcgctgtgctagagatggccgtgggtgccctgcaccatgaccctgagcactggccaagcccggagaccttcaaccctgaaaggttcacggctgaggcccggcagcagcaccggcccttcacgtacctgcccttcggggccggcccacggagctgcctcggggtgcgtctagggctgcttgaggtcaagttgacactgctccacgtgctgcacaagttccggttccaagcctgccctgagacccaggtaccgctgcagctagaatccaaatctgccctaggtccaaaaaatggtgtctatatcaagatcgtatcccgctgacacagaaggctgccgggtggggggagggcacccccaaattcaaagaaaaccctaagtgtggatgttcagaattttggaaaaatgtcactgaagtgattgaaagagtgcctggcatgcaaggataagaggttctttacataacatttcctaaatgcttaataaacgtttgttgcacttggttttgacattgccaatggggtttgaaccagtgctctctctaaatg

SEQ ID NO: 31557 - DNA, 2185 bp, Homo sapiens
  source 1..2185: mol_type = unassigned DNA
aaccgacccgaaagagagccccacgctggcaaagtggctcgcccatctcacagccggttggcgctcgcggaggctcacagaacatttcctgcctgttgctcacactctgttgtccacagcatacccgcaccctagatggctgactcttgtcttctgtctctttattttccatgtgtgagcctgtgcctgtggtttatctctggaggatgtgcctgagggaggagacatatactgcctggactgcctggctgatgtgagctagtttgtctggttgagttggatgtttaaatagaaggcagaacaacaacagagcacggttcccataagggcggcgagatcagcctcctgtctcatctggaagaccaccactctggggtctcagaggaatgatggaagccttggggtttctaaaattggaagtgaatggccccatggtgacggtggccctgtcagtggctctcttggccctcctgaaatggtactccacatcagcattctcaagactggagaagttaggcctcagacatcccaagccttctcctttcattggaaacttgacatttttccgccagggtttttgggaaagccaaatggagctcagaaagctgtatggacctctgtgtgggtactatcttggtcgtcggatgtttattgttatttctgagccagacatgatcaagcaggtgttggttgagaacttcagtaactttaccaacagaatggcgtcgggtttggagttcaagtcggtagccgacagcgttctgtttttacgtgacaaaagatgggaagaggtcagaggtgccctgatgtctgctttcagtcctgaaaagctgaacgagatggttcccctcatcagccaagcctgcgaacttctcctggctcatttaaaacgctatgcggaatctggggacgcatttgacatccagaggtgctactgcaattacaccacagatgtggttgccagcgtcgcctttggcaccccggtggactcctggcaggcccctgaggatccctttgtgaaacactgcaagcgtttcttcgaattctgcatccccagacctatcctggttttactcttatcatttccatccataatggtcccactggcccggattttgcccaataagaaccgagacgaactgaatggcttttttaacaaactcattaggaatgtgattgccttgcgggaccagcaagctgccgaagagaggcggagagacttcctccaaatggtcctggatgcccgacattctgcaagtcccatgggcgtgcaagactttgacatcgtcagagacgttttctcctctactgggtgcaagccgaacccttcccggcaacaccagcccagccctatggccaggcctttgactgtggatgagattgtgggccaggccttcatcttcctcatcgctggctatgaaatcatcaccaacacactttcttttgccacctacctactggccaccaaccctgactgccaagagaagcttctgagagaggtagacgtttttaaggagaaacacatggcccctgagttctgcagcctcgaggaaggcctgccctatctggacatggtgattgcagagacgctgaggatgtacccgccagctttcagattcacacgggaggcagctcaggactgcgaggtgctggggcagcgcatccccgcaggcgctgtgctagagatggccgtgggtgccctgcaccatgaccctgagcactggccaagcccggagaccttcaaccctgaaaggttcacggctgaggcccggcagcagcaccggcccttcacgtacctgcccttcggggccggcccacggagctgcctcggggtgcgtctagggctgcttgaggtcaagttgacactgctccacgtgctgcacaagttccggttccaagcctgccctgagacccaggtaccgctgcagctagaatccaaatctgccctaggtccaaaaaatggtgtctatatcaagatcgtatcccgctgacacagaaggctgccgggtggggggagggcacccccaaattcaaagaaaaccctaagtgtggatgttcagaattttggaaaaatgtcactgaagtgattgaaagagtgcctggcatgcaaggataagaggttctttacataacatttcctaaatgcttaataaacgtttgttgcacttggttttgacattgccaa

SEQ ID NO: 31558 - DNA, 1792 bp, Homo sapiens
  source 1..1792: mol_type = unassigned DNA
actccatgtgatgtttgcttggttgcctgttcccttttctacctgcagagcacggttcccataagggcggcgagatcagcctcctgtctcatctggaagaccaccactctggggtctcagaggaatgatggaagccttggggtttctaaaattggaagtgaatggccccatggtgacggtggccctgtcagtggctctcttggccctcctgaaatggtactccacatcagcattctcaagactggagaagttaggcctcagacatcccaagccttctcctttcattggaaacttgacatttttccgccagggtttttgggaaagccaaatggagctcagaaagctgtatggacctctgtgtgggtactatcttggtcgtcggatgtttattgttatttctgagccagacatgatcaagcaggtgttggttgagaacttcagtaactttaccaacagaatggcgtcgggtttggagttcaagtcggtagccgacagcgttctgtttttacgtgacaaaagatgggaagaggtcagaggtgccctgatgtctgctttcagtcctgaaaagctgaacgagatggttcccctcatcagccaagcctgcgaacttctcctggctcatttaaaacgctatgcggaatctggggacgcatttgacatccagaggtgctactgcaattacaccacagatgtggttgccagcgtcgcctttggcaccccggtggactcctggcaggcccctgaggatccctttgtgaaacactgcaagcgtttcttcgaattctgcatccccagacctatcctggttttactcttatcatttccatccataatggtcccactggcccggattttgcccaataagaaccgagacgaactgaatggcttttttaacaaactcattaggaatgtgattgccttgcgggaccagcaagctgccgaagagaggcggagagacttcctccaaatggtcctggatgcccgacattctgcaagtcccatgggcgtgcaagactttgacatcgtcagagacgttttctcctctactgggtgcaagccgaacccttcccggcaacaccagcccagccctatggccaggcctttgactgtggatgagattgtgggccaggccttcatcttcctcatcgctggctatgaaatcatcaccaacacactttcttttgccacctacctactggccaccaaccctgactgccaagagaagcttctgagagaggtagacgtttttaaggagaaacacatggcccctgagttctgcagcctcgaggaaggcctgccctatctggacatggtgattgcagagacgctgaggatgtacccgccagctttcagattcacacgggaggcagctcaggactgcgaggtgctggggcagcgcatccccgcaggcgctgtgctagagatggccgtgggtgccctgcaccatgaccctgagcactggccaagcccggagaccttcaaccctgaaaggtaccgctgcagctagaatccaaatctgccctaggtccaaaaaatggtgtctatatcaagatcgtatcccgctgacacagaaggctgccgggtggggggagggcacccccaaattcaaagaaaaccctaagtgtggatgttcagaattttggaaaaatgtcactgaagtgattgaaagagtgcctggcatgcaaggataagaggttctttacataacatttcctaaatgcttaataaacgtttgttgcacttggttttgacattgccaatggggtttgaaccagtgctctctctaaatgaa

SEQ ID NO: 31559 - DNA, 1901 bp, Homo sapiens
  source 1..1901: mol_type = unassigned DNA
aaggaataaagttgctgattcattcctttacactgaaaccctttgttgtgccctcctcttccttcctctttatagggagacactctgagaaagagcacattgtgggggcccactccatgtgatgtttgcttggttgcctgttcccttttctacctgcagagcacggttcccataagggcggcgagatcagcctcctgtctcatctggaagaccaccactctggggtctcagaggaatgatggaagccttggggtttctaaaattggaagtgaatggccccatggtgacggtggccctgtcagtggctctcttggccctcctgaaatggtactccacatcagcattctcaagactggagaagttaggcctcagacatcccaagccttctcctttcattggaaacttgacatttttccgccagggtttttgggaaagccaaatggagctcagaaagctgtatggacctctgtgtgggtactatcttggtcgtcggatgtttattgttatttctgagccagacatgatcaagcaggtgttggttgagaacttcagtaactttaccaacagaatggcgtcgggtttggagttcaagtcggtagccgacagcgttctgtttttacgtgacaaaagatgggaagaggtcagaggtgccctgatgtctgctttcagtcctgaaaagctgaacgagatggttcccctcatcagccaagcctgcgaacttctcctggctcatttaaaacgctatgcggaatctggggacgcatttgacatccagaggtgctactgcaattacaccacagatgtggttgccagcgtcgcctttggcaccccggtggactcctggcaggcccctgaggatccctttgtgaaacactgcaagcgtttcttcgaattctgcatccccagacctatcctggttttactcttatcatttccatccataatggtcccactggcccggattttgcccaataagaaccgagacgaactgaatggcttttttaacaaactcattaggaatgtgattgccttgcgggaccagcaagctgccgaagagaggcggagagacttcctccaaatggtcctggatgcccgacattctgcaagtcccatgggcgtgcaagactttgacatcgtcagagacgttttctcctctactgggtgcaagccgaacccttcccggcaacaccagcccagccctatggccaggcctttgactgtggatgagattgtgggccaggccttcatcttcctcatcgctggctatgaaatcatcaccaacacactttcttttgccacctacctactggccaccaaccctgactgccaagagaagcttctgagagaggtagacgtttttaaggagaaacacatggcccctgagttctgcagcctcgaggaaggcctgccctatctggacatggtgattgcagagacgctgaggatgtacccgccagctttcagattcacacgggaggcagctcaggactgcgaggtgctggggcagcgcatccccgcaggcgctgtgctagagatggccgtgggtgccctgcaccatgaccctgagcactggccaagcccggagaccttcaaccctgaaaggtaccgctgcagctagaatccaaatctgccctaggtccaaaaaatggtgtctatatcaagatcgtatcccgctgacacagaaggctgccgggtggggggagggcacccccaaattcaaagaaaaccctaagtgtggatgttcagaattttggaaaaatgtcactgaagtgattgaaagagtgcctggcatgcaaggataagaggttctttacataacatttcctaaatgcttaataaacgtttgttgcacttggttttgacattgccaatggggtttgaaccagtgctctctctaaatg

SEQ ID NO: 31560 - DNA, 2202 bp, Homo sapiens
  source 1..2202: mol_type = unassigned DNA
aaggaataaagttgctgattcattcctttacactgaaaccctttgttgtgccctcctcttccttcctctttatagggagacactctgagaaagagcacattgtgggggcccactccatgtgatgtttgcttggttgcctgttcccttttctacctgcagagcacggttcccataagggcggcgagatcagcctcctgtctcatctggaagaccaccactctggggtctcagaggaatgatggaagccttggggtttctaaaattggaagtgaatggccccatggtgacggtggccctgtcagtggctctcttggccctcctgaaatggtactccacatcagcattctcaagactggagaagttaggcctcagacatcccaagccttctcctttcattggaaacttgacatttttccgccagggtttttgggaaagccaaatggagctcagaaagctgtatggacctctgtgtgggtactatcttggtcgtcggatgtttattgttatttctgagccagacatgatcaagcaggtgttggttgagaacttcagtaactttaccaacagaatggcgtcgggtttggagttcaagtcggtagccgacagcgttctgtttttacgtgacaaaagatgggaagaggtcagaggtgccctgatgtctgctttcagtcctgaaaagctgaacgagcttggccttttaatcatgcaagagagaataaaaggtcacatgggtggccagcaggctccacaaagaattccacccacccgtttgtcgaagccgagtggtatctatgtgaatctccattatgccactctacctttctgtatggttcccctcatcagccaagcctgcgaacttctcctggctcatttaaaacgctatgcggaatctggggacgcatttgacatccagaggtgctactgcaattacaccacagatgtggttgccagcgtcgcctttggcaccccggtggactcctggcaggcccctgaggatccctttgtgaaacactgcaagcgtttcttcgaattctgcatccccagacctatcctggttttactcttatcatttccatccataatggtcccactggcccggattttgcccaataagaaccgagacgaactgaatggcttttttaacaaactcattaggaatgtgattgccttgcgggaccagcaagctgccgaagagaggcggagagacttcctccaaatggtcctggatgcccgacattctgcaagtcccatgggcgtgcaagactttgacatcgtcagagacgttttctcctctactgggtgcaagccgaacccttcccggcaacaccagcccagccctatggccaggcctttgactgtggatgagattgtgggccaggccttcatcttcctcatcgctggctatgaaatcatcaccaacacactttcttttgccacctacctactggccaccaaccctgactgccaagagaagcttctgagagaggtagacgtttttaaggagaaacacatggcccctgagttctgcagcctcgaggaaggcctgccctatctggacatggtgattgcagagacgctgaggatgtacccgccagctttcagattcacacgggaggcagctcaggactgcgaggtgctggggcagcgcatccccgcaggcgctgtgctagagatggccgtgggtgccctgcaccatgaccctgagcactggccaagcccggagaccttcaaccctgaaaggttcacggctgaggcccggcagcagcaccggcccttcacgtacctgcccttcggggccggcccacggagctgcctcggggtgcgtctagggctgcttgaggtcaagttgacactgctccacgtgctgcacaagttccggttccaagcctgccctgagacccaggtaccgctgcagctagaatccaaatctgccctaggtccaaaaaatggtgtctatatcaagatcgtatcccgctgacacagaaggctgccgggtggggggagggcacccccaaattcaaagaaaaccctaagtgtggatgttcagaattttggaaaaatgtcactgaagtgattgaaagagtgcctggcatgcaaggataagaggttctttacataacatttcctaaatgcttaataaacgtttgttgcacttggttttgacattgccaatggggtttgaaccagtgctctctctaaatg

SEQ ID NO: 31561 - DNA, 2064 bp, Homo sapiens
  source 1..2064: mol_type = unassigned DNA
aaggaataaagttgctgattcattcctttacactgaaaccctttgttgtgccctcctcttccttcctctttatagggagacactctgagaaagagcacattgtgggggcccactccatgtgatgtttgcttggttgcctgttcccttttctacctgcagagcacggttcccataagggcggcgagatcagcctcctgtctcatctggaagaccaccactctggggtctcagaggaatgatggaagccttggggtttctaaaattggaagtgaatggccccatggtgacggtggccctgtcagtggctctcttggccctcctgaaatggtactccacatcagcattctcaagactggagaagttaggcctcagacatcccaagccttctcctttcattggaaacttgacatttttccgccagggtttttgggaaagccaaatggagctcagaaagctgtatggacctctgtgtgggtactatcttggtcgtcggatgtttattgttatttctgagccagacatgatcaagcaggtgttggttgagaacttcagtaactttaccaacagaatggcgtcgggtttggagttcaagtcggtagccgacagcgttctgtttttacgtgacaaaagatgggaagaggtcagaggtgccctgatgtctgctttcagtcctgaaaagctgaacgagatggttcccctcatcagccaagcctgcgaacttctcctggctcatttaaaacgctatgcggaatctggggacgcatttgacatccagaggtgctactgcaattacaccacagatgtggttgccagcgtcgcctttggcaccccggtggactcctggcaggcccctgaggatccctttgtgaaacactgcaagcgtttcttcgaattctgcatccccagacctatcctggttttactcttatcatttccatccataatggtcccactggcccggattttgcccaataagaaccgagacgaactgaatggcttttttaacaaactcattaggaatgtgattgccttgcgggaccagcaagctgccgaagagaggcggagagacttcctccaaatggtcctggatgcccgacattctgcaagtcccatgggcgtgcaagactttgacatcgtcagagacgttttctcctctactgggtgcaagccgaacccttcccggcaacaccagcccagccctatggccaggcctttgactgtggatgagattgtgggccaggccttcatcttcctcatcgctggctatgaaatcatcaccaacacactttcttttgccacctacctactggccaccaaccctgactgccaagagaagcttctgagagaggtagacgtttttaaggagaaacacatggcccctgagttctgcagcctcgaggaaggcctgccctatctggacatggtgattgcagagacgctgaggatgtacccgccagctttcagattcacacgggaggcagctcaggactgcgaggtgctggggcagcgcatccccgcaggcgctgtgctagagatggccgtgggtgccctgcaccatgaccctgagcactggccaagcccggagaccttcaaccctgaaaggttcacggctgaggcccggcagcagcaccggcccttcacgtacctgcccttcggggccggcccacggagctgcctcggggtgcgtctagggctgcttgaggtcaagttgacactgctccacgtgctgcacaagttccggttccaagcctgccctgagacccaggtaccgctgcagctagaatccaaatctgccctaggtccaaaaaatggtgtctatatcaagatcgtatcccgctgacacagaaggctgccgggtggggggagggcacccccaaattcaaagaaaaccctaagtgtggatgttcagaattttggaaaaatgtcactgaagtgattgaaagagtgcctggcatgcaaggataagaggttctttacataacatttcctaaatgcttaataaacgtttgttgcacttggttttgacattgccaatggggtttgaaccagtgctctctctaaatg

SEQ ID NO: 31562 - DNA, 752 bp, Homo sapiens
  source 1..752: mol_type = unassigned DNA
gtgtgcacgcgcgcgcgtgtgtgcccaggtgcgagggttcgcgcgtgtgctggcggggagggaaccgacccgaaagagagccccacgctggcaaagtggctcgcccatctcacagccggttggcgctcgcggaggagacatatactgcctggactgcctggctgatgtgagctagtttgtctggttgagttggatgtttaaatagaaggcagaacaacaacagagcacggttcccataagggcggcgagatcagcctcctgtctcatctggaagaccaccactctggggtctcagaggaatgatggaagccttggggtttctaaaattggaagtgaatggccccatggtgacggtggccctgtcagtggctctcttggccctcctgaaatggtactccacatcagcattctcaagactggagaagttaggcctcagacatcccaagccttctcctttcattggaaacttgacatttttccgccagggtttttgggaaagccaaatggagctcagaaagctgtatggacctctgtgtgggtactatcttggtcgtcggatgtttattgttatttctgagccagacatgatcaagcaggtgttggttgagaacttcagtaactttaccaacagaatggcgtcgggtttggagttcaagtcggtagccgacagcgttctgtttttacgtgacaaaagatgggaagaggtcagaggtgccctgatgtctgctttcagtcctgaaaagctgaacgag

SEQ ID NO: 31563 - DNA, 1963 bp, Homo sapiens
  source 1..1963: mol_type = unassigned DNA
atagggagacactctgagaaagagcacattgtgggggcccactccatgtgatgtttgcttggttgcctgttcccttttctacctgcagagcacggttcccataagggcggcgagatcagcctcctgtctcatctggaagaccaccactctggggtctcagaggaatgatggaagccttggggtttctaaaattggaagtgaatggccccatggtgacggtggccctgtcagtggctctcttggccctcctgaaatggtactccacatcagcattctcaagactggagaagttaggcctcagacatcccaagccttctcctttcattggaaacttgacatttttccgccagggtttttgggaaagccaaatggagctcagaaagctgtatggacctctgtgtgggtactatcttggtcgtcggatgtttattgttatttctgagccagacatgatcaagcaggtgttggttgagaacttcagtaactttaccaacagaatggcgtcgggtttggagttcaagtcggtagccgacagcgttctgtttttacgtgacaaaagatgggaagaggtcagaggtgccctgatgtctgctttcagtcctgaaaagctgaacgagatggttcccctcatcagccaagcctgcgaacttctcctggctcatttaaaacgctatgcggaatctggggacgcatttgacatccagaggtgctactgcaattacaccacagatgtggttgccagcgtcgcctttggcaccccggtggactcctggcaggcccctgaggatccctttgtgaaacactgcaagcgtttcttcgaattctgcatccccagacctatcctggttttactcttatcatttccatccataatggtcccactggcccggattttgcccaataagaaccgagacgaactgaatggcttttttaacaaactcattaggaatgtgattgccttgcgggaccagcaagctgccgaagagaggcggagagacttcctccaaatggtcctggatgcccgacattctgcaagtcccatgggcgtgcaagactttgacatcgtcagagacgttttctcctctactgggtgcaagccgaacccttcccggcaacaccagcccagccctatggccaggcctttgactgtggatgagattgtgggccaggccttcatcttcctcatcgctggctatgaaatcatcaccaacacactttcttttgccacctacctactggccaccaaccctgactgccaagagaagcttctgagagaggtagacgtttttaaggagaaacacatggcccctgagttctgcagcctcgaggaaggcctgccctatctggacatggtgattgcagagacgctgaggatgtacccgccagctttcagattcacacgggaggcagctcaggactgcgaggtgctggggcagcgcatccccgcaggcgctgtgctagagatggccgtgggtgccctgcaccatgaccctgagcactggccaagcccggagaccttcaaccctgaaaggttcacggctgaggcccggcagcagcaccggcccttcacgtacctgcccttcggggccggcccacggagctgcctcggggtgcgtctagggctgcttgaggtcaagttgacactgctccacgtgctgcacaagttccggttccaagcctgccctgagacccaggtaccgctgcagctagaatccaaatctgccctaggtccaaaaaatggtgtctatatcaagatcgtatcccgctgacacagaaggctgccgggtggggggagggcacccccaaattcaaagaaaaccctaagtgtggatgttcagaattttggaaaaatgtcactgaagtgattgaaagagtgcctggcatgcaaggataagaggttctttacataacatttcctaaatgcttaataaacgtttgttgcacttggttttgacattgccaa

SEQ ID NO: 31564 - DNA, 1378 bp, Homo sapiens
  source 1..1378: mol_type = unassigned DNA
gagcacggttcccataagggcggcgagatcagcctcctgtctcatctggaagaccaccactctggggtctcagaggaatgatggaagccttggggtttctaaaattggaagtgaatggccccatggtgacggtggccctgtcagtggctctcttggccctcctgaaatggtactccacatcagcattctcaagactggagaagttaggcctcagacatcccaagccttctcctttcattggaaacttgacatttttccgccagggtttttgggaaagccaaatggagctcagaaagctgtatggacctctgtgtgggtactatcttggtcgtcggatgtttattgttatttctgagccagacatgatcaagcaggtgttggttgagaacttcagtaactttaccaacagaatgccccagagcatcatgcccaactccagacatcacgtggcctctagagggatgtggcctggagggaggcggctggcctgctacctccatcccttcaggatggccgaaggaattgcagaagtttaactgcttctctgctgcctctagattctctttcccaaacactgcattgctatctcctcgctcaaagtcccctggaagccgtctgtcaagaaactgattctgattattaaatgcagctgtagcttgttgctccatcagcctcagcaaggagtgctgattaaagaagttggagaagccaataagtcaaagtgcacggaccaccaagccacatcctggcaagcagtaaaggtactcccaggagcctgtcatagcacttgagactgtctgagcccctaagccatgagacggcacttgccaactggtgtctccatatttcctcccatgataccaggacatgtgaccctgagagctgacctagaagaggtcaatgatttggcctgctaggggcagacatactcaatgcacatgtccaagcaaggaggacacaataatattgccctcagctttgatcaatttatcctccaagccatttgtctgccgtttctaatttctttcaccatcccctcacccacccctccacgcagactaggtccagtgccccaaactccagagtagagttccaattttcgtcctcttccactcagcacaggattaagccttcaggactaagttcaagttccctagacgatatttaagggcccttgtgtcttagatccattgtgtgtgctccaccctgtctctcactgctccccaatacaaatcgtcactccagcctctccctgctcaccctcacctgctctggagagacctgacctctgccttgctcacgctgacactgcctcagaattgaaggcagtgtaacagtggggctcatattgattatgacgtgagcttgagcacatatc

SEQ ID NO: 31565 - DNA, 2080 bp, Homo sapiens
  source 1..2080: mol_type = unassigned DNA
gagggccggcctggacccggcgggcgcacggctccgagcccagcgcagccgagccggtctgcagaggggcccccagaactttgtgtgtgtgtgtgcacgcgcgcgcgtgtgtgcccaggtgcgagggttcgcgcgtgtgctggcggggagggaaccgacccgaaagagagccccacgctggcaaagtggctcgcccatctcacagccggttggcgctcgcggagctctttattttccatgtgtgagcctgtgcctgtggtttatctctggaggatgtgcctgagggaggagacatatactgcctggactgcctggctgatgtgagctagtttgtctggttgagttggatgtttaaatagaaggcagaacaacaacaggtactccacatcagcattctcaagactggagaagttaggcctcagacatcccaagccttctcctttcattggaaacttgacatttttccgccagggtttttgggaaagccaaatggagctcagaaagctgtatggacctctgtgtgggtactatcttggtcgtcggatgtttattgttatttctgagccagacatgatcaagcaggtgttggttgagaacttcagtaactttaccaacagaatggcgtcgggtttggagttcaagtcggtagccgacagcgttctgtttttacgtgacaaaagatgggaagaggtcagaggtgccctgatgtctgctttcagtcctgaaaagctgaacgagatggttcccctcatcagccaagcctgcgaacttctcctggctcatttaaaacgctatgcggaatctggggacgcatttgacatccagaggtgctactgcaattacaccacagatgtggttgccagcgtcgcctttggcaccccggtggactcctggcaggcccctgaggatccctttgtgaaacactgcaagcgtttcttcgaattctgcatccccagacctatcctggttttactcttatcatttccatccataatggtcccactggcccggattttgcccaataagaaccgagacgaactgaatggcttttttaacaaactcattaggaatgtgattgccttgcgggaccagcaagctgccgaagagaggcggagagacttcctccaaatggtcctggatgcccgacattctgcaagtcccatgggcgtgcaagactttgacatcgtcagagacgttttctcctctactgggtgcaagccgaacccttcccggcaacaccagcccagccctatggccaggcctttgactgtggatgagattgtgggccaggccttcatcttcctcatcgctggctatgaaatcatcaccaacacactttcttttgccacctacctactggccaccaaccctgactgccaagagaagcttctgagagaggtagacgtttttaaggagaaacacatggcccctgagttctgcagcctcgaggaaggcctgccctatctggacatggtgattgcagagacgctgaggatgtacccgccagctttcagattcacacgggaggcagctcaggactgcgaggtgctggggcagcgcatccccgcaggcgctgtgctagagatggccgtgggtgccctgcaccatgaccctgagcactggccaagcccggagaccttcaaccctgaaaggttcacggctgaggcccggcagcagcaccggcccttcacgtacctgcccttcggggccggcccacggagctgcctcggggtgcgtctagggctgcttgaggtcaagttgacactgctccacgtgctgcacaagttccggttccaagcctgccctgagacccaggtaccgctgcagctagaatccaaatctgccctaggtccaaaaaatggtgtctatatcaagatcgtatcccgctgacacagaaggctgccgggtggggggagggcacccccaaattcaaagaaaaccctaagtgtggatgttcagaattttggaaaaatgtcactgaagtgattgaaagagtgcctggcatgcaaggataagaggttctttacataacatttcctaaatgcttaataaacgtttgttgcacttggttttgacattg

SEQ ID NO: 31566 - DNA, 2601 bp, Homo sapiens
  source 1..2601: mol_type = unassigned DNA
cccacccgtcccagctcggcttagcccccgcggacccctccaggccgcgaccccagggcgtcctgtgccgccacgccctccatctgtgtgggtcctctgctgggcccgcccctggtcacagccagactgactcagtttccctgggaggtcccgctcgagcccgtccttcccctccctctgcccgcccccagccctcgccccaccctcggcgcccgcacatctgcctgctcagctccagacggcgcccggacccccgggcgcgggatccagccaggtgggagccccgcagatgaggtctctgaaggtgtgcctgaaccagtgccagcctgccctgtctgcagcatcggcctgatggggtggtgactgatccctcagggctccggagccatgtggcccaacggcagttccctggggccctgtttccggcccacaaacattaccctggaggagagacggctgatcgcctcgccctggttcgccgcctccttctgcgtggtgggcctggcctccaacctgctggccctgagcgtgctggcgggcgcgcggcaggggggttcgcacacgcgctcctccttcctcaccttcctctgcggcctcgtcctcaccgacttcctggggctgctggtgaccggtaccatcgtggtgtcccagcacgccgcgctcttcgagtggcacgccgtggaccctggctgccgtctctgtcgcttcatgggcgtcgtcatgatcttcttcggcctgtccccgctgctgctgggggccgccatggcctcagagcgctacctgggtatcacccggcccttctcgcgcccggcggtcgcctcgcagcgccgcgcctgggccaccgtggggctggtgtgggcggccgcgctggcgctgggcctgctgcccctgctgggcgtgggtcgctacaccgtgcaatacccggggtcctggtgcttcctgacgctgggcgccgagtccggggacgtggccttcgggctgctcttctccatgctgggcggcctctcggtcgggctgtccttcctgctgaacacggtcagcgtggccaccctgtgccacgtctaccacgggcaggaggcggcccagcagcgtccccgggactccgaggtggagatgatggctcagctcctggggatcatggtggtggccagcgtgtgttggctgccccttctggtcttcatcgcccagacagtgctgcgaaacccgcctgccatgagccccgccgggcagctgtcccgcaccacggagaaggagctgctcatctacttgcgcgtggccacctggaaccagatcctggacccctgggtgtatatcctgttccgccgcgccgtgctccggcgtctccagcctcgcctcagcacccggcccaggtcgctgtccctccagccccagctcacgcagcgctccgggctgcagtaggaagtggacagagcgcccctcccgcgcctttccgcggagcccttggcccctcggacagcccatctgcctgttctgaggattcaggggctgggggtgctggatggacagtgggcatcagcagcagggttttgggttgaccccaatccaacccggggacccccaactcctccctgatccttttaccaagcactctcccttcctcggcccctttttcccatccagagctcccaccccttctctgcgtccctcccaaccccaggaagggcatgcagacattggaagagggtcttgcattgctatttttttttttagacggagtcttgctctgtcccccaggctggagtgcagtggcgcaatctcagctcactgcaacctccacctcccgggttcaagcgattctcctgcctcagcctcctgagtagctgggactataggcgcgcgccaccacgcccggctaatttttgtatttttagtagagacggggtttcaccgtgttggccaggctggtcttgaactcctgacctcaggtgattcaccagcctcagcctcccaaagtgctgggatcacaggcatgaaccaccacacctggccatttttttttttttttttagacggagtctcactctgtggcccagcctggagtacagtggcacgatctcggctcactgcaacctccgcctcccgggttcaagcgattctcgtgcctcagcctcccgagcagctgggattacaggcgtaagccactgcgcccggccttgcatgctctttgaccctgaatttgacctacttgctggggtacagttgcttccttttgaacctccaacagggaaggctctgtccagaaaggattgaatgtgaacgggggcacccccttttcttgccaaaatatatctctgcctttggttttattttcctttgggtccagaagttttcaatctctggagtttgtgcattgggcctcacccggagcagacgagggcagggctgggaaggatggggagggacatagaggattcggttcctcccccaccttgtttcttgagtgtttcctaatcacttgatgggtggtaccacctagaattcttccagcagcctgtaatgggagggctacaggttagccctggaacctgcaatcaaaccacctttgaatctgtgtgtcattaaaagtagatataaatgggc

SEQ ID NO: 31567 - DNA, 1941 bp, Homo sapiens
  source 1..1941: mol_type = unassigned DNA
cccacccgtcccagctcggcttagcccccgcggacccctccaggccgcgaccccagggcgtcctgtgccgccacgccctccatctgtgtgggtcctctgctgggcccgcccctggtcacagccagactgactcagtttccctgggaggtcccgctcgagcccgtccttcccctccctctgcccgcccccagccctcgccccaccctcggcgcccgcacatctgcctgctcagctccagacggcgcccggacccccgggcgcgggatccagccaggtgggagccccgcagatgaggtctctgaaggtgtgcctgaaccagtgccagcctgccctgtctgcagcatcggcctgatggggtggtgactgatccctcagggctccggagccatgtggcccaacggcagttccctggggccctgtttccggcccacaaacattaccctggaggagagacggctgatcgcctcgccctggttcgccgcctccttctgcgtggtgggcctggcctccaacctgctggccctgagcgtgctggcgggcgcgcggcaggggggttcgcacacgcgctcctccttcctcaccttcctctgcggcctcgtcctcaccgacttcctggggctgctggtgaccggtaccatcgtggtgtcccagcacgccgcgctcttcgagtggcacgccgtggaccctggctgccgtctctgtcgcttcatgggcgtcgtcatgatcttcttcggcctgtccccgctgctgctgggggccgccatggcctcagagcgctacctgggtatcacccggcccttctcgcgcccggcggtcgcctcgcagcgccgcgcctgggccaccgtggggctggtgtgggcggccgcgctggcgctgggcctgctgcccctgctgggcgtgggtcgctacaccgtgcaatacccggggtcctggtgcttcctgacgctgggcgccgagtccggggacgtggccttcgggctgctcttctccatgctgggcggcctctcggtcgggctgtccttcctgctgaacacggtcagcgtggccaccctgtgccacgtctaccacgggcaggaggcggcccagcagcgtccccgggactccgaggtggagatgatggctcagctcctggggatcatggtggtggccagcgtgtgttggctgccccttctggtcttcatcgcccagacagtgctgcgaaacccgcctgccatgagccccgccgggcagctgtcccgcaccacggagaaggagctgctcatctacttgcgcgtggccacctggaaccagatcctggacccctgggtgtatatcctgttccgccgcgccgtgctccggcgtctccagcctcgcctcagcacccggcccagacggagtctcactctgtggcccagcctggagtacagtggcacgatctcggctcactgcaacctccgcctcccgggttcaagcgattctcgtgcctcagcctcccgagcagctgggattacaggcgtaagccactgcgcccggccttgcatgctctttgaccctgaatttgacctacttgctggggtacagttgcttccttttgaacctccaacagggaaggctctgtccagaaaggattgaatgtgaacgggggcacccccttttcttgccaaaatatatctctgcctttggttttattttcctttgggtccagaagttttcaatctctggagtttgtgcattgggcctcacccggagcagacgagggcagggctgggaaggatggggagggacatagaggattcggttcctcccccaccttgtttcttgagtgtttcctaatcacttgatgggtggtaccacctagaattcttccagcagcctgtaatgggagggctacaggttagccctggaacctgcaatcaaaccacctttgaatctgtgtgtcattaaaagtagatataaatgggc

SEQ ID NO: 31568 - DNA, 1422 bp, Homo sapiens
  source 1..1422: mol_type = unassigned DNA
atgcgagaggtgcgggcgcggctggcggccacgcaggttgaatatatttcaggaaaggtttttttcaccacctgttctgatttgaatatgttgaagaaattaaaatctgcagaaagattatttttgctgattaaaaagcagtttccacttattatttcttctgtaagtaaaggaaaaatatttaatgaaatgcaaagacttataaatgaagatccaggaagttggttgaatgccatttcaatttggaaaaatcttcttgaacttgatgcaaaaaaggaaaaactttctcagagagatgataaccaactaaaaagaaaagtgggagaaaatgaaatcattgcaaagaaattaaaaatagaacaaatgcaaaagatagaagagaatagggactgccagctggaaaaacaaataaaagaagaaactctggagcaaagagattttaccactaaaagcgaaaagtttcaagaagaagaatttcagaatgacatagagaaagcaattgatactcataatcagaatgacttgactttcagagtatcttgtcgctgcagtggaactattggaaaggccttcactgcacaggaggtaggaaaagtaattggaattgctattatgaaacactttggatggaaagcagacttgaggaatccacaattagagatctttatacatctaaatgacatttactctgtggtggggattcctgtgttcagggtttccctagccagcagagcttacatcaagacagctggactgcgatctacaatagcgtgggcaatggcatctctggctgacattaaggctggtgcatttgttttagatccaatgtgtggacttggaacaatacttttggaagctgctaaagaatggccagatgtgtattatgtaggtgctgatgtcagcgactcacagttactaggtacttgggacaatctgaaagctgcaggccttgaggataaaattgaattacttaaaatctctgttatagaattgccattgccttcagaaagtgttgatattattatttctgacattccatttgggaaaaagtttaagttaggaaaagacatcaaaagcattctacaagaaatggaaagagtgcttcatgttggcggaaccattgtattgttgcttagtgaagatcaccacaggcgccttacagattgtaaagagagcaacatccctttcaattccaaggacagtcacacagatgaacctggaattaaaaagtgcttgaatcctgaagaaaaaactggtgcattcaagacagcgtcaacttcattcgaagccagtaaccacaaattcttagacagaatgtcaccatttggctccttggtaccagtggaatgctacaaagttagccttggaaagacagatgcgttcatatgtaaatataagaagtcgcactcttctggactgtag

SEQ ID NO: 31569 - DNA, 996 bp, Homo sapiens
  source 1..996: mol_type = unassigned DNA
gtaatgcgagaggtgcgggcgcggctggcggccacgcaggttgaatatatttcaggaaaggtttttttcaccacctgttctgatttgaatatgttgaagaaattaaaatctgcagaaagattatttttgctgattaaaaagcagtttccacttattatttcttctgtaagtaaaggaaaaatatttaatgaaatgcaaagacttataaatgaagatccaggaagttggttgaatgccatttcaatttggaaaaatcttcttgaacttgatgcaaaaaaggaaaaactttctcagagagatgataaccaactaaaaagaaaagtgggagaaaatgaaatcattgcaaagaaattaaaaatagaacaaatgcaaaagatagaagagaatagggactgccagctggaaaaacaaataaaagaagaaactctggagcaaagagattttaccactaaaagcgaaaagtttcaagaagaagaatttcagaatgacatagagaaagcaattgatactcataatcagaatgacttgactttcagagtatcttgtcgctgcagtggaactattggaaaggccttcactgcacaggtcctgtacatgggattgtcaccaggacctagactgcaaatgcacatgaggtctcagcaatgtagagaagagcgaacaccacaaactgttgccatcaccagacctcatcagttggcccttacaaagttcagtgatgttaaaggccattggtctgaatactttatcaaccttaaaatcagtcaaaccctaaagggaggtaggaaaagtaattggaattgctattatgaaacactttggatggaaagcagacttgaggaatccacaattagagatctttatacatctaaatgacatttactctgtggtggggattcctgtgttcagggtttccctagccagcagagcttacatcaagacagctggactgcgatctacaatagcgtgggcaatggcatctctggctgacattaa

SEQ ID NO: 31570 - DNA, 1970 bp, Homo sapiens
  source 1..1970: mol_type = unassigned DNA
gaaggcgcgagggcgcgcctgagccgccatgtcggaggcgcgtggagagccagggtccgggcctgaggctggcgcccgattcttctgcactgcgggtcgcggcctggagccgttcgtaatgcgagaggtgcgggcgcggctggcggccacgcaggttgaatatatttcaggaaaggtttttttcaccacctgttctgatttgaatatgttgaagaaattaaaatctgcagaaagattatttttgctgattaaaaagcagtttccacttattatttcttctgtaagtaaaggaaaaatatttaatgaaatgcaaagacttataaatgaagatccaggaagttggttgaatgccatttcaatttggaaaaatcttcttgaacttgatgcaaaaaaggaaaaactttctcagagagatgataaccaactaaaaagaaaagtgggagaaaatgaaatcattgcaaagaaattaaaaatagaacaaatgcaaaagatagaagagaatagggactgccagctggaaaaacaaataaaagaagaaactctggagcaaagagattttaccactaaaagcgaaaagtttcaagaagaagaatttcagaatgacatagagaaagcaattgatactcataatcagaatgacttgactttcagagtatcttgtcgctgcagtggaactattggaaaggccttcactgcacaggaggtaggaaaagtaattggaattgctattatgaaacactttggatggaaagcagacttgaggaatccacaattagagatctttatacatctaaatgacatttactctgtggtggggattcctgtgttcagggtttccctagccagcagagcttacatcaagacagctggactgcgatctacaatagcgtgggcaatggcatctctggctgacattaaggctggtgcatttgttttagatccaatgtgtggacttggaacaatacttttggaagctgctaaagaatggccagatgtgtattatgtaggtgctgatgtcagcgactcacagttactaggtacttgggacaatctgaaagctgcaggccttgaggataaaattgaattacttaaaatctctgttatagaattgccattgccttcagaaagtgttgatattattatttctgacattccatttgggaaaaagtttaagttaggaaaagacatcaaaagcattctacaagaaatggaaagagtgcttcatgttggcggaaccattgtattgttgcttagtgaagatcaccacaggcgccttacagattgtaaagagagcaacatccctttcaattccaaggacagtcacacagatgaacctggaattaaaaagtgcttgaatcctgaagaaaaaactggtgcattcaagacagcgtcaacttcattcgaagccagtaaccacaaattcttagacagaatgtcaccatttggctccttggtaccagtggaatgctacaaagttagccttggaaagacagatgcgttcatatgtaaatataagaagtcgcactcttctggactgtagcaggcttgctgccatcagccgggttcaggcccttgtaagttagctgtacagcagaagtttgctgtctctaggattcatatagcacccacagagctccaagtaaccaaattcccccaaagacaggaggtgtggctgatgggtacacatgcttggtaagagtttctgctttatattctaaagtacttaatgtttttgagaaaaaagttatcgaatattttttagacttaagttttatcttctgtcagaatgtgaaaagttctgcccagtttctgagcaaaaacttcaatttcaaaataaaggttttcaggggttcacttaagtgtatcacaatcaacaccagacgggatattttaactatcagattttcggaaatgtaaaaacctttatgtgtaacttcttttgatattaaacttgatttttgagcctgtaa

SEQ ID NO: 31571 - DNA, 3554 bp, Homo sapiens
  source 1..3554: mol_type = unassigned DNA
actaggcagggatgagcaagaggaatggctcacccttgagagctggggtccatagcccaggtcagttctccagctctcccacttaccagccaagacaggaggtgaggattgagatgggatgaacccagcaggcggccatgggttaaaggtcgccatgaatgtaatgtgcccagcacagtgcctgctaaaaggcaacactcccttcctggtctgaagaccaaacaagcagactgtactcaggaaagccagaagaaccttccagctgtctggaccagaaggtgccagcccaggggctgaagaagacgtaatgcccagagcaaaaagcgcctgcagccccctgaagggctgggtgctctggaatagatgagggggcgaaatggggctggggaccagggacggacagggtgggtccagcacctgcctcgcttccgaagggctgctccaacactgaaaaacacccaaccagcttcctttcagaaagactggaatattccaaaacttctcactggaggctccggaggaggtgggctccagctgaaaaggaaatgtggaggcgtgggcgctcccggcctgcatcctgcacctcttacactttggttttcccacagactcctgaagaataggtcagaagaaagggttaaagccttaaaaggggaacaaccattgcggggctcagggaggaggataatgttctttgggctgccgcaccctgatccccggggtcccgaaccctcccgtccctggccaggcctgccagccacagggtgagggcccccttccgccgcaacctgccactctcacaccaatgcgggaccgccttctcttccttccccaccccccaccccaccctgccgtcctttctcccccaatctccgcctctgattggctgagcccccggctccccgctccccctctcctccatccccggtgaaaactgcgggctccgagctgggtgcagcaaccggaggcggcggcgcgtctggaggaggctgcagcagcggaagaccccagtccagatccaggactgagatcccagaaccatgaacctggccatcagcatcgctctcctgctaacagtcttgcaggtctcccgagggcagaaggtgaccagcctaacggcctgcctagtggaccagagccttcgtctggactgccgccatgagaataccagcagttcacccatccagtacgagttcagcctgacccgtgagacaaagaagcacgtgctctttggcactgtgggggtgcctgagcacacataccgctcccgaaccaacttcaccagcaaatacaacatgaaggtcctctacttatccgccttcactagcaaggacgagggcacctacacgtgtgcactccaccactctggccattccccacccatctcctcccagaacgtcacagtgctcagagacaaactggtcaagtgtgagggcatcagcctgctggctcagaacacctcgtggctgctgctgctcctgctctccctctccctcctccaggccacggatttcatgtccctgtgactggtggggcccatggaggagacaggaagcctcaagttccagtgcagagatcctacttctctgagtcagctgaccccctccccccaatccctcaaaccttgaggagaagtggggaccccacccctcatcaggagttccagtgctgcatgcgattatctacccacgtccacgcggccacctcaccctctccgcacacctctggctgtctttttgtactttttgttccagagctgcttctgtctggtttatttaggttttatccttccttttctttgagagttcgtgaagagggaagccaggattggggacctgatggagagtgagagcatgtgaggggtagtgggatggtggggtaccagccactggaggggtcatccttgcccatcgggaccagaaacctgggagagacttggatgaggagtggttgggctgtgcctgggcctagcacggacatggtctgtcctgacagcactcctcggcaggcatggctggtgcctgaagaccccagatgtgagggcaccaccaagaatttgtggcctaccttgtgagggagagaactgagcatctccagcattctcagccacaaccaaaaaaaaataaaaagggcagccctccttaccactgtggaagtccctcagaggccttggggcatgacccagtgaagatgcaggtttgaccaggaaagcagcgctagtggagggttggagaaggaggtaaaggatgagggttcatcatccctccctgcctaaggaagctaaaagcatggccctgctgcccctccctgcctccacccacagtggagagggctacaaaggaggacaagaccctctcaggctgtcccaagctcccaagagcttccagagctctgacccacagcctccaagtcaggtggggtggagtcccagagctgcacagggtttggcccaagtttctaagggaggcacttcctcccctcgcccatcagtgccagcccctgctggctggtgcctgagcccctcagacagccccctgccccgcaggcctgccttctcagggacttctgcggggcctgaggcaagccatggagtgagacccaggagccggacacttctcaggaaatggcttttcccaacccccagcccccacccggtggttcttcctgttctgtgactgtgtatagtgccaccacagcttatggcatctcattgaggacaaagaaaactgcacaataaaaccaagcctctggaatctgtcctcgtgtccacctggccttcgctcctccagcagtgcctgcctgcccccgcttcgctggggtctccacgggtgaggctggggaacgccacctcttcctcttccctgacttctccccaaccacttagtagcaacgctaccccaggggctaatgactgcacactgggcttcttttcagaatgaccctaacgagacacatttgcccaaataaacgaacatcccatgtctgctgactcacctggctggaacaacatgcttactgccaacatgtgggccgaaccacatggccctggctctggaatgcacaagtggctttgcgtgaatctgcgctaagctatgcagtctgctttttcttctcagctctggtagttcttcagaaatgtaccctccaggcacatccactattgcgagggtgagcacgaagggtgggagatgcccatgtcctcaaggcatcacttcctaaatccaaaagcatcggcaggagaaaggactggggacaaatactgtcccttcgggagtagggagggaacactgaggcccatccctggctccttccctaaaagtagagtaaaatggaagcgagcatcctgggattgggggcaagagggggaccgcagggtagctgtgggttccaactgctgtcagagtcagagaggcagccccaagccagcctccctgctttgccagggaatttgggggaggaaggtgacagctgcccagaggctgactcatctgatatttagcactgggtaggatgattgtttctgagcatttttcttaaaggcctcagatctaaat

SEQ ID NO: 31572 - DNA, 2050 bp, Homo sapiens
  source 1..2050: mol_type = unassigned DNA
tttgggaaaggagaggattggaatacggaaatggattaaggatgaggcccgccgggggcttgagagggaggaagagcagaccttctctgggtctggagccgcctgaggacacagaccagaggaaatgaatacagactgcacctccccagccgctctccacccctcccctggctcttctaccctctccagccccagacccatttcttccctttcttgctctggccattgctcccccttcccctcctagatcccaagcccgcacaacatctcaaacaagagtcctcgattcaaaagccagatgccgaccccccttcctcctggatctggctcagggcagcagctccaccccgggacagagagagcattgattgtagctgcagccgccgcgggatcctagcctcacccgtcaaggggctgagcgccagggaccctgaactcgtctagtggtgcgccctgcgcacccgggcgcactcaaccgaggcaatgccctgcgcgctctcgcgggtgcacgccccttctgtggcctctcctgggcgagcactgctctgcagataggctagactaccggctccgcgtcgcctcgccaagggttggttcagccaaggctgcaaaaaacaaaaaaagaccaggcagacagcctatccagggtggctattgaaactgggctggaaaactgcagtcccaggaactccagagagctggacattgggaagcatccttggctcacatacaatcggagatcactatgtctttctctcctccaggaacacgattagcttgtgtcctatccagataggaatagatgctccctatctgggagcatccttagctatggtgaatggtatctagccatccactggggatggcgagtgacttagggatttgtgtctcacgtatatgaagcagtcatcgccagatgttggttgtttttcttaacccccatcataacccgatccaggactgagatcccagaaccatgaacctggccatcagcatcgctctcctgctaacagtcttgcaggtctcccgagggcagaaggtgaccagcctaacggcctgcctagtggaccagagccttcgtctggactgccgccatgagaataccagcagttcacccatccagtacgagttcagcctgacccgtgagacaaagaagcacgtgctctttggcactgtgggggtgcctgagcacacataccgctcccgaaccaacttcaccagcaaatacaacatgaaggtcctctacttatccgccttcactagcaaggacgagggcacctacacgtgtgcactccaccactctggccattccccacccatctcctcccagaacgtcacagtgctcagagacaaactggtcaagtgtgagggcatcagcctgctggctcagaacacctcgtggctgctgctgctcctgctctccctctccctcctccaggccacggatttcatgtccctgtgactggtggggcccatggaggagacaggaagcctcaagttccagtgcagagatcctacttctctgagtcagctgaccccctccccccaatccctcaaaccttgaggagaagtggggaccccacccctcatcaggagttccagtgctgcatgcgattatctacccacgtccacgcggccacctcaccctctccgcacacctctggctgtctttttgtactttttgttccagagctgcttctgtctggtttatttaggttttatccttccttttctttgagagttcgtgaagagggaagccaggattggggacctgatggagagtgagagcatgtgaggggtagtgggatggtggggtaccagccactggaggggtcatccttgcccatcgggaccagaaacctgggagagacttggatgaggagtggttgggctgtgcctgggcctagcacggacatggtctgtcctgacagcactcctcggcaggcatggctggtgcctgaagaccccagatgtgagggcaccaccaagaatttgtggcctaccttgtgagggagagaactgagcatctccagcattctcagccacaacc

SEQ ID NO: 31573 - DNA, 736 bp, Homo sapiens
  source 1..736: mol_type = unassigned DNA
gcagccagaaagctctggagcatcagggagactccaacttaaggcaacagcatgggtgaataagggcttcctgtggactggcaatgagaggcaaaacctggtgcttgagcactggcccctaaggcaggccttacagatctcttacactcgtggtgggaagagtttagtgtgaaactggggtggaattgggtgtccacgtatgttcccttttgccttactatatgttctgtcagtttctttcaggaaaatcttcatcttacaacttgtagggctggtgttaacttacgacttcactaactgtgactttgagaagattaaagcagcctatctcagtactatttctaaagacctgattacatatatgagtgggaccaaaagtaccgagttcaacaacaccgtctcttgtagcaatcggccacattgccttactgaaatccagagcctaaccttcaatcccaccgccggctgcgcgtcgctcgccaaagaaatgttcgccatgaaaactaaggctgccttagctatctggtgcccaggctattcggaaactcagataaatgctactcaggcaatgaagaagaggagaaaaaggaaagtcacaaccaataaatgtctggaacaagtgtcacaattacaaggattgtggcgtcgcttcaatcgacctttactgaaacaacagtaaaccatctttattatggtcatatttcacagcaccaaaataaatcatctttattaagta

SEQ ID NO: 31574 - DNA, 2411 bp, Homo sapiens
  source 1..2411: mol_type = unassigned DNA
accctcgccacgcccctgctcccccgcggttggttcttccttgctctactcaaccctgacctcttctctctgactctcgacttgtgttccccgctcctccctgaccttcctcccctcccctttcactcaattctcaccaactctttctctctctggtgttttctccttttctcgtaaactttgccgcctatgagcagccacattgccttactgaaatccagagcctaaccttcaatcccaccgccggctgcgcgtcgctcgccaaagaaatgttcgccatgaaaactaaggctgccttagctatctggtgcccaggctattcggaaactcagataaatgctactcaggcaatgaagaagaggagaaaaaggaaagtcacaaccaataaatgtctggaacaagtgtcacaattacaaggattgtggcgtcgcttcaatcgacctttactgaaacaacagtaaaccatctttattatggtcatatttcacagcaccaaaataaatcatctttattaagtagatgaaacattaactctaactgtgacaaagaagaccacaaatagttatcttttaattacagaagagtttcttaacttacttttgtaagtttttattgtgtaagtttataatgcaggggaagtactactcctcaaatgttgagggaagcttccataacattgatgactggcttcatggcagtaattctcggctgtagttgcataagcattgctcaagaggaaaatccaaaagtgcagcaggagaactcttttccctgaaaaaggaaaaatattgaactcaatgatagcacctaaacttacatttaaaagacagacattccttctacatgtaatgacacttcttgtgttaaactaaaaatttacaagagaagaaagtgaaagcaaatggggtttcacaaatagttgtaaatatagtgaagcaatttgaaataattttcaagcaaagtattgtgaaagtattctaagccaagttttaaatattatctaacagacaagagtggtatatacaagtagatcctgagaagtacctttgttacagctactataaatatacatataaattatagaatctactttaatttattttgtgaacacttttgaaaatgtacatgttcctttgtaattgacactatatatttcttaataaaataattctcaaatttgtttcttatgaatcatctctcaaatctagttagacaatttgcacacatacttttctaagggacattatcttccttcaggtttttacctccactcatccttagagcccactgactgctcccctttatacctgttggccctgcctataggagagaatatttggagataggcagcttcaggatgcattgcaatcatccttttcttaaattatgtcactagtcttttattttttcccctcttgaactttcctcacacctggaagaaacaaagtaggaaaaagtgaacaggggatgtcaaatcgattcttgaattcccgctgcaagctagagccgcaggcaccctctcactcaatttccactcagaaccctataaacaccagtgggaagggcaacccactgcacgtgggaatgcactgatttttcctaggagtagacatgttcctctaattactccctgagggttagttggggctaaaccatgacagaagtggggaagttcaatgtccttaaatccatcttacttgccaacaggtaagaggaagcttacattacatgtccagtccacatttaaagagcacttactgtggaacaagccttcagccaaacaatggggatagaaaagtaggtaagactcagcctttgtccagagaagctcagggtatagctgaataggcagtttcttttgtcctgaggaaaatcaggacatgcctgctttctaaaaatcttcctctgaagacctgacccaagctcttaaatgctattgtaagagaaatttctttgtctattaactccattttagtagggattcactgactagattttactgaactatgaaaataaatacacataatttttcacaaaattttgggcccaattcccctaaaagaattgaggattagggagaaaggagacaactcaaagtcatcccattaagtgcagtttctttgaatcttctgctttatctttaaaaatttgtataatttatatattttattctatgtgttccatagatatcttaatgtaaaattagtcatttaaattacactgtcaattaaaagtaatgggcaagagattgcatcatactaatttagtaagaacgttcccaaatgttgtaacaatgtggatcatacatctctggttttttaaatgtattgaggctttcttggtggactagtatagtatacggtcagttatgtcaatgtttcatggtcaataaaaaggaagttgcaaattgt

SEQ ID NO: 31575 - DNA, 1624 bp, Homo sapiens
  source 1..1624: mol_type = unassigned DNA
cctgatttccaggccctcccagtccctgggcgcacgtcccggattcctcccacgagggggcgggctgcggccaaatctcccgccaggtcagcggccgggcgctgattggccccatggcggcggggccggctcgtgattggccagcacgccgtggtttaaagcggtcggcgcgggaaccaggggcttactgcgggacggccttggagagtactcgggttcgtgaacttcccggaggcgcaatgagctgcattaacctgcccactgtgctgcctggctcccccagcaagacccgggggcagatccaggtgattctcgggccgatgttctcaggaaaaagcacagagttgatgagacgcgtccgtcgcttccagattgctcagtacaagtgcctggtgatcaagtatgccaaagacactcgctacagcagcagcttctgcacacatgaccggaacaccatggaggcactgcccgcctgcctgctccgagacgtggcccaggaggccctgggcgtggctgtcataggcatcgacgaggggcagtttttccctgacatcgtggagttctgcgaggccatggccaacgccgggaagaccgtaattgtggctgcactggatgggaccttccagaggaagccatttggggccatcctgaacctggtgccgctggccgagagcgtggtgaagctgacggcggtgtgcatggagtgcttccgggaagccgcctataccaagaggctcggcacagagaaggaggtcgaggtgattgggggagcagacaagtaccactccgtgtgtcggctctgctacttcaagaaggcctcaggccagcctgccgggccggacaacaaagagaactgcccagtgccaggaaagccaggggaagccgtggctgccaggaagctctttgccccacagcagattctgcaatgcagccctgccaactgagggacctgcgagggccgcccgctcccttcctgccactgccgcctactggacgctgccctgcatgctgcccagccactccaggaggaagtcgggaggcgtggagggtgaccacaccttggccttctgggaactctcctttgtgtggctgccccacctgccgcatgctccctcctctcctacccactggtctgcttaaagcttccctctcagctgctgggacgatcgcccaggctggagctggccccgcttggtggcctgggatctggcacactccctctccttggggtgagggacagagccccacgctgttgacatcagcctgcttcttcccctctgcggctttcactgctgagtttctgttctccctgggaagcctgtgccagcacctttgagccttggcccacactgaggcttaggcctctctgcctgggatgggctcccaccctcccctgaggatggcctggattcacgccctcttgtttccttttgggctcaaagcccttcctacctctggtgatggtttccacaggaacaacagcatctttcaccaagatgggtggcaccaaccttgctgggacttggatcccaggggcttatctcttcaagtgtggagagggcagggtccacgcctctgctgtagcttatgaaattaactaattgaaaattcactggttggtgga

SEQ ID NO: 31576 - DNA, 1028 bp, Homo sapiens
  source 1..1028: mol_type = unassigned DNA
gagagtactcgggttcgtgaacttcccggaggcgcaatgagctgcattaacctgcccactgtgctgcctggctcccccagcaagacccgggggcagatccaggtgattctcgggccgatgttctcaggaaaaagcacagagttgatgagacgcgtccgtcgcttccagattgctcagtacaagtgcctggtgatcaagtatgccaaagacactcgctacagcagcagcttctgcacacatgaccggaacaccatggaggcactgcccgcctgcctgctccgagacgtggcccaggaggccctgggcgtggctgtcataggcatcgacgaggggcagtttttccctgacatcgtggagttctgcgaggccatggccaacgccgggaagaccgtaattgtggctgcactggatgggaccttccagaggaagccatttggggccatcctgaacctggtgccgctggccgagagcgtggtgaagctgacggcggtgtgcatggagtgcttccgggaagccgcctataccaagaggctcggcacagagaaggaggtcgaggtgattgggggagcagacaagtaccactccgtgtgtcggctctgctacttcaagaaggcctcaggccagcctgccgggccggacaacaaagagaactgcccagtgccaggaaagccaggggaagccgtggctgccaggaagctctttgccccacagcagattctgcaatgcagccctgccaactgagggacctgcgagggccgcccgctcccttcctgccactgccgcctactggacgctgccctgcatgctgccctgaggatggcctggattcacgccctcttgtttccttttgggctcaaagcccttcctacctctggtgatggtttccacaggaacaacagcatctttcaccaagatgggtggcaccaaccttgctgggacttggatcccaggggcttatctcttcaagtgtggagagggcagggtccacgcctctgctgtagcttatgaaattaactaattgaaaattc

SEQ ID NO: 31577 - DNA, 5114 bp, Homo sapiens
  source 1..5114: mol_type = unassigned DNA
ggaataagtgacatcatgagtgtgtgccaggtgtctgattacagaaggtgttcaattaatctgcaatcattaattaacccttcagtcgctggtattatttgccatccatcctccgagtgttgccaagttatgggtgcgttctgccagcgtcctagcagtggtaaggcttctggctgccagcggcgaacctctcccttcgagtatttctcctcttgctgagatgaaatgcgaccgggtctctttaagggccaggcgccgggatccaggcggcgcccaacggctggactagcagtcgtccgcgccgactcgcacaagaaggaaccccgggcctctggatccgctcgcccggctatgctgctgtggccgctgcggggctgggccgcccgggcgctgcgctgctttgggccgggaagtcgcgggagcccggcctcaggccccgggccgcggagggtgcagcgccgggcctggcctcccgataaagaacaggaaaaagagaaaaaatcagtgatctgtgtcgagggcaatattgcaagtgggaagacgacatgcctggaattcttctccaacgcgacagacgtcgaggtgttaacggagcctgtgtccaagtggagaaatgtccgtggccacaatcctctgggcctgatgtaccacgatgcctctcgctggggtcttacgctacagacttatgtgcagctcaccatgctggacaggcatactcgtcctcaggtgtcatctgtacggttgatggagaggtcgattcacagcgcaagatacatttttgtagaaaacctgtatagaagtgggaagatgccagaagtggactatgtagttctgtcggaatggtttgactggatcttgaggaacatggacgtgtctgttgatttgatagtttaccttcggaccaatcctgagacttgttaccagaggttaaagaagagatgcagggaagaggagaaggtcattccgctggaatacctggaagcaattcaccatctccatgaggagtggctcatcaaaggcagccttttccccatggcagcccctgttctggtgattgaggctgaccaccacatggagaggatgttagaactctttgaacaaaatcgggatcgaatattaactccagagaatcggaagcattgcccataggaggcaaaaggtctatggctcatgtctgaaaaatgcctgctgctgccaagttagctattgggagcaatctggaaaaacttgctcccaggagggctttgtgtctggccagcttgattttcctaatggtctcatctcctttgctagtgtctttgtcatgcgtctctggccctcgtgggtaaatgacaaacgggaccaatgggtttgccaagccctttgctgttcgcagcctcacattcccccggtgcctctcccatggctttgtgctgctgagtcgctctcatgaagcccttagggagagcacctgttgtgtgcctgacaccacgctggagctgtgtaccaatcgtctcagccttcattaggaggccgaggtaggagtcttatatcccaggtgaggaatttgaagctcagaaaggttgaggggctccccagaggtcacacagcctgtgtgcagtggagctggcaccattcagactttcagccgactcagcaactttcccttgccctgggctgcctcctcctgagagctgttccccaccgccctgcctcttccggttggaggctctcatgtctctttggggagagctggcagtgtgcggagctgataacattttcccaatattgagcagttcccaaggacagtcagcatttctagacttccacaaaattatgctgcatttggctggagcccggtgttcagtggtttccctgcccgaggtcgctgcagccccatctaccacatcttcatgtggacattgagattcacatgctggctcctgaagggtgctcagtctccttggtgattaaggtcctgcttgaactgctgccaactccatgtcagggaagtcgcttttggtgcctggctggtttgcccagagccaagctggggcaaggggcagccagccctggcttccaaggctcccgtactgtctgtgtccttgtataaggagctttgctcttggaattactgaaagtctgtggcccaagagagagacacaagtggccttaagtctttttgaagtgttatttcatccagggaaatgcctcgagccatagagcctgaaatcatctttgttggctcagaaaataccttagcttcactcagctggactgcattgaaggcgaggctgccccttggatcaagcagaaaacaagagaaagaaagaacgttccctttggggatagtctggaaagttgggatttgcaaataaaggctctggaagcattgctggtcctgaagctttggaggtgggcagagagagcttcaagaagactagatgcaaaccctggaaaggattaaggctcaactctggagaaacaggccacagcctctcagagcagctgttggctgtaaatagaggtagcaaggccgctcccaggcccctgtgagtgtgggcacctgtgcatgcaatgctccgactctgcagaggtgccaagtgcccctgctgggccagtcccagagagttaggaagtcaaggcctgcaactcctggttcttcctgtttggaccagttcttgtgccattggcaggatgagaggcagcagccaggcgggagctgtgtctagcagcacctgtagcccacgtgctgctaattagctggaaaactggcgaaggcagaacctttgctaccaggaatcttgacatgtggggtctgtctttgagaatttgtaaatgaacagtccaatatttcctctcggctcattttgcacatccatttttggggaaatgtgatttctctctctttttttttttttttttttgcctaaggcacaatctcaagaggtcctgagaccacgtacccatgatttttttcttgctctgtgatacccaataactccttcacctaagccctgttgttgattttgaagtgcttcctaggccagtgattttagcttctgccagctgcttttgccagtagattaacgtgtttttatttttcaaactccgtgtttcctaacgtggagtgtatgggtctaagagagcctgctgtcctccctgccttccaccttggagaggaggctggacgcatcagcagtggccagggcaggtcgcaaaatctcccagcctagagaccacacctgaaacggctgaagccagcttgcacaagggctgctgtccctctgcggcaggcagagctggtgggggcaggggtcacagagcagtcatagacaccatggaccagggcaggagaagggcagatggcacatgggcacaacagggccttgtccttagagcactggggggtcatggctgggaggggcatggcaggggctggcatccctgtagagccagaggggccacccagggcagtgacattccagatatgttgggctcacctcatccttgctgtgagactggagttccatggggacatgaagtcagtacaccgcagagctgctcagctgctctacctctcgctgacttttttgttgcacatatacattttctttcaattagcatttatttcagcttttatttaagctttttgacagtacatgtaaaatatatgattataaccatttaaaaataccttatgtacctggttttttttggaaactagatagaaatatatttatcttttacataaaagaagtgtgtagtggggtggtccagggctttgtggtggcttagtggccatcggggtcccaggctcttcccacctttctcttttgggtccacctcttggctcctggcttccttcctctggggcctgactgtccaggatggcagctggagctcctgctctgggcacggttggcatcagagcccactgctccccatccactctttaatccagatgctggtaatgtccctttccaaggcataactaagataagctggaaggttcttacgaggctttgctagaggccctgggaggtggggggaaaggcaagagggcagtgcccacccatagaccgggtcacatgacctggcatcagcgccgtggggtcctttgggcttcacctccctctcccctctgcccccacgtcatcccaccctcatcctcaccctcaccattcccatcccgtaccgtaatgtcccttgcaaggcctaactctgtgaggaatgaaaccacctcatccttgttccaataacatgagtgaccgaatttacaaacgagtgaatgtggacctctggaaacattacccagcttgtttttacttttcactttctctttctgcccctttcatttccgtaggagccctttacctagatgagaagtgtccccccgcctggggaatatatcagtcagaacaatcttcctgcagacatgcaccattagacccgagtgacggtggtgccatttaaacctcagagcaggtaaaaggtggtcctgaaacctgtctacccacagggtgctatggaatctgaatcacttcttttttcctagagccctggggtggggagctccctcaagtgttcacatgtgtgtggaatgaggaacacccatctccttggccctctccaccctgaagagttagttattaaaataattggcaagctcttgcaaatgtcagtcatccattgttcagaatggaatagcaataatacatccctggctgccctgggcttggccaggattactcactgaaggcctcagggttactggcacacactttcttttcctaataatcccatcccctcagctttcctaaggctagagtgaatttcgtgttcctttagtttacataagatggtgaacttggcaaaagctatcattaaacagaagctaagagaaagcctatgtcgtggaatccagaatgggtattgccattcactgctgtccacagaagctgtcttgaatttctttctgtgtcttttctttttttttctttaagactgttgtttaccagactgggctctgtggaacacaggtgtcctgggagatggttaatcattacaaaatattggtaacaatctaaagatgcatacataagagagtggtcaaataaaccattttccattca

SEQ ID NO: 31578 - DNA, 5060 bp, Homo sapiens
  source 1..5060: mol_type = unassigned DNA
ggaataagtgacatcatgagtgtgtgccaggtgtctgattacagaaggtgttcaattaatctgcaatcattaattaacccttcagtcgctggtattatttgccatccatcctccgagtgttgccaagttatgggtgcgttctgccagcgtcctagcagtggtaaggcttctggctgccagcggcgaacctctcccttcgagtatttctcctcttgctgagatgaaatgcgaccgggtctctttaagggccaggcgccgggatccaggcggcgcccaacggctggactagcagtcgtccgcgccgactcgcacaagaaggaaccccgggcctctggatccgctcgcccggctatgctgctgtggccgctgcggggctgggccgcccgggcgctgcgctgctttgggccgggaagtcgcgggagcccggcctcaggccccgggccgcggagggtgcagcgccgggcctggcctcccgataaagaacaggaaaaagagaaaaaatcagtgatctgtgtcgagggcaatattgcaagtgggaagacgacatgcctggaattcttctccaacgcgacagacgtcgagggcctgatgtaccacgatgcctctcgctggggtcttacgctacagacttatgtgcagctcaccatgctggacaggcatactcgtcctcaggtgtcatctgtacggttgatggagaggtcgattcacagcgcaagatacatttttgtagaaaacctgtatagaagtgggaagatgccagaagtggactatgtagttctgtcggaatggtttgactggatcttgaggaacatggacgtgtctgttgatttgatagtttaccttcggaccaatcctgagacttgttaccagaggttaaagaagagatgcagggaagaggagaaggtcattccgctggaatacctggaagcaattcaccatctccatgaggagtggctcatcaaaggcagccttttccccatggcagcccctgttctggtgattgaggctgaccaccacatggagaggatgttagaactctttgaacaaaatcgggatcgaatattaactccagagaatcggaagcattgcccataggaggcaaaaggtctatggctcatgtctgaaaaatgcctgctgctgccaagttagctattgggagcaatctggaaaaacttgctcccaggagggctttgtgtctggccagcttgattttcctaatggtctcatctcctttgctagtgtctttgtcatgcgtctctggccctcgtgggtaaatgacaaacgggaccaatgggtttgccaagccctttgctgttcgcagcctcacattcccccggtgcctctcccatggctttgtgctgctgagtcgctctcatgaagcccttagggagagcacctgttgtgtgcctgacaccacgctggagctgtgtaccaatcgtctcagccttcattaggaggccgaggtaggagtcttatatcccaggtgaggaatttgaagctcagaaaggttgaggggctccccagaggtcacacagcctgtgtgcagtggagctggcaccattcagactttcagccgactcagcaactttcccttgccctgggctgcctcctcctgagagctgttccccaccgccctgcctcttccggttggaggctctcatgtctctttggggagagctggcagtgtgcggagctgataacattttcccaatattgagcagttcccaaggacagtcagcatttctagacttccacaaaattatgctgcatttggctggagcccggtgttcagtggtttccctgcccgaggtcgctgcagccccatctaccacatcttcatgtggacattgagattcacatgctggctcctgaagggtgctcagtctccttggtgattaaggtcctgcttgaactgctgccaactccatgtcagggaagtcgcttttggtgcctggctggtttgcccagagccaagctggggcaaggggcagccagccctggcttccaaggctcccgtactgtctgtgtccttgtataaggagctttgctcttggaattactgaaagtctgtggcccaagagagagacacaagtggccttaagtctttttgaagtgttatttcatccagggaaatgcctcgagccatagagcctgaaatcatctttgttggctcagaaaataccttagcttcactcagctggactgcattgaaggcgaggctgccccttggatcaagcagaaaacaagagaaagaaagaacgttccctttggggatagtctggaaagttgggatttgcaaataaaggctctggaagcattgctggtcctgaagctttggaggtgggcagagagagcttcaagaagactagatgcaaaccctggaaaggattaaggctcaactctggagaaacaggccacagcctctcagagcagctgttggctgtaaatagaggtagcaaggccgctcccaggcccctgtgagtgtgggcacctgtgcatgcaatgctccgactctgcagaggtgccaagtgcccctgctgggccagtcccagagagttaggaagtcaaggcctgcaactcctggttcttcctgtttggaccagttcttgtgccattggcaggatgagaggcagcagccaggcgggagctgtgtctagcagcacctgtagcccacgtgctgctaattagctggaaaactggcgaaggcagaacctttgctaccaggaatcttgacatgtggggtctgtctttgagaatttgtaaatgaacagtccaatatttcctctcggctcattttgcacatccatttttggggaaatgtgatttctctctctttttttttttttttttttgcctaaggcacaatctcaagaggtcctgagaccacgtacccatgatttttttcttgctctgtgatacccaataactccttcacctaagccctgttgttgattttgaagtgcttcctaggccagtgattttagcttctgccagctgcttttgccagtagattaacgtgtttttatttttcaaactccgtgtttcctaacgtggagtgtatgggtctaagagagcctgctgtcctccctgccttccaccttggagaggaggctggacgcatcagcagtggccagggcaggtcgcaaaatctcccagcctagagaccacacctgaaacggctgaagccagcttgcacaagggctgctgtccctctgcggcaggcagagctggtgggggcaggggtcacagagcagtcatagacaccatggaccagggcaggagaagggcagatggcacatgggcacaacagggccttgtccttagagcactggggggtcatggctgggaggggcatggcaggggctggcatccctgtagagccagaggggccacccagggcagtgacattccagatatgttgggctcacctcatccttgctgtgagactggagttccatggggacatgaagtcagtacaccgcagagctgctcagctgctctacctctcgctgacttttttgttgcacatatacattttctttcaattagcatttatttcagcttttatttaagctttttgacagtacatgtaaaatatatgattataaccatttaaaaataccttatgtacctggttttttttggaaactagatagaaatatatttatcttttacataaaagaagtgtgtagtggggtggtccagggctttgtggtggcttagtggccatcggggtcccaggctcttcccacctttctcttttgggtccacctcttggctcctggcttccttcctctggggcctgactgtccaggatggcagctggagctcctgctctgggcacggttggcatcagagcccactgctccccatccactctttaatccagatgctggtaatgtccctttccaaggcataactaagataagctggaaggttcttacgaggctttgctagaggccctgggaggtggggggaaaggcaagagggcagtgcccacccatagaccgggtcacatgacctggcatcagcgccgtggggtcctttgggcttcacctccctctcccctctgcccccacgtcatcccaccctcatcctcaccctcaccattcccatcccgtaccgtaatgtcccttgcaaggcctaactctgtgaggaatgaaaccacctcatccttgttccaataacatgagtgaccgaatttacaaacgagtgaatgtggacctctggaaacattacccagcttgtttttacttttcactttctctttctgcccctttcatttccgtaggagccctttacctagatgagaagtgtccccccgcctggggaatatatcagtcagaacaatcttcctgcagacatgcaccattagacccgagtgacggtggtgccatttaaacctcagagcaggtaaaaggtggtcctgaaacctgtctacccacagggtgctatggaatctgaatcacttcttttttcctagagccctggggtggggagctccctcaagtgttcacatgtgtgtggaatgaggaacacccatctccttggccctctccaccctgaagagttagttattaaaataattggcaagctcttgcaaatgtcagtcatccattgttcagaatggaatagcaataatacatccctggctgccctgggcttggccaggattactcactgaaggcctcagggttactggcacacactttcttttcctaataatcccatcccctcagctttcctaaggctagagtgaatttcgtgttcctttagtttacataagatggtgaacttggcaaaagctatcattaaacagaagctaagagaaagcctatgtcgtggaatccagaatgggtattgccattcactgctgtccacagaagctgtcttgaatttctttctgtgtcttttctttttttttctttaagactgttgtttaccagactgggctctgtggaacacaggtgtcctgggagatggttaatcattacaaaatattggtaacaatctaaagatgcatacataagagagtggtcaaataaaccattttccattca

SEQ ID NO: 31579 - DNA, 3738 bp, Homo sapiens
  source 1..3738: mol_type = unassigned DNA
ggaataagtgacatcatgagtgtgtgccaggtgtctgattacagaaggtgttcaattaatctgcaatcattaattaacccttcagtcgctggtattatttgccatccatcctccgagtgttgccaagttatgggtgcgttctgccagcgtcctagcagtggtaaggcttctggctgccagcggcgaacctctcccttcgagtatttctcctcttgctgagatgaaatgcgaccgggtctctttaagggccaggcgccgggatccaggcggcgcccaacggctggactagcagtcgtccgcgccgactcgcacaagaaggaaccccgggcctctggatccgctcgcccggctatgctgctgtggccgctgcggggctgggccgcccgggcgctgcgctgctttgggccgggaagtcgcgggagcccggcctcaggccccgggccgcggagggtgcagcgccgggcctggcctcccgataaagaacaggaaaaagagaaaaaatcagtgatctgtgtcgagggcaatattgcaagtgggaagacgacatgcctggaattcttctccaacgcgacagacgtcgaggtgttaacggagcctgtgtccaagtggagaaatgtccgtggccacaatcctctgggcctgatgtaccacgatgcctctcgctggggtcttacgctacagacttatgtgcagctcaccatgctggacaggcatactcgtcctcaggtgtcatctgtacggttgatggagaggtcgattcacagcgcaagatacatttttgtagaaaacctgtatagaagtgggaagatgccagaagtggactatgtagttctgtcggaatggtttgactggatcttgaggaacatggacgtgtctgttgatttgatagtttaccttcggaccaatcctgagacttgttaccagaggttaaagaagagatgcagggaagaggagaaggtcattccgctggaatacctggaagcaattcaccatctccatgaggagtggctcatcaaaggcagccttttccccatggcagcccctgttctggtgattgaggctgaccaccacatggagaggatgttagaactctttgaacaaaatcgggatcgaatattaactccagagaatcggaagcattgcccataggaggcaaaaggtctatggctcatgtctgaaaaatgcctgctgctgccaagttagctattgggagcaatctggaaaaacttgctcccaggagggctttgtgtctggccagcttgattttcctaatggtctcatctcctttgctagtgtctttgtcatgcgtctctggccctcgtgggtaaatgacaaacgggaccaatgggtttgccaagccctttgctgttcgcagcctcacattcccccggtgcctctcccatggctttgtgctgctgagtcgctctcatgaagcccttagggagagcacctgttgtgtgcctgacaccacgctggagctgtgtaccaatcgtctcagccttcattaggaggccgaggtaggagtcttatatcccaggtgaggaatttgaagctcagaaaggttgaggggctccccagaggtcacacagcctgtgtgcagtggagctggcaccattcagactttcagccgactcagcaactttcccttgccctgggctgcctcctcctgagagctgttccccaccgccctgcctcttccggttggaggctctcatgtctctttggggagagctggcagtgtgcggagctgataacattttcccaatattgagcagttcccaaggacagtcagcatttctagacttccacaaaattatgctgcatttggctggagcccggtgttcagtggtttccctgcccgaggtcgctgcagccccatctaccacatcttcatgtggacattgagattcacatgctggctcctgaagggtgctcagtctccttggtgattaaggtcctgcttgaactgctgccaactccatgtcagggaagtcgcttttggtgcctggctggtttgcccagagccaagctggggcaaggggcagccagccctggcttccaaggctcccgtactgtctgtgtccttgtataaggagctttgctcttggaattactgaaagtctgtggcccaagagagagacacaagtggccttaagtctttttgaagtgttatttcatccagggaaatgcctcgagccatagagcctgaaatcatctttgttggctcagaaaataccttagcttcactcagctggactgcattgaaggcgaggctgccccttggatcaagcagaaaacaagagaaagaaagaacgttccctttggggatagtctggaaagttgggatttgcaaataaaggctctggaagcattgctggtcctgaagctttggaggtgggcagagagagcttcaagaagactagatgcaaaccctggaaaggattaaggctcaactctggagaaacaggccacagcctctcagagcagctgttggctgtaaatagaggtagcaaggccgctcccaggcccctgtgagtgtgggcacctgtgcatgcaatgctccgactctgcagaggtgccaagtgcccctgctgggccagtcccagagagttaggaagtcaaggcctgcaactcctggttcttcctgtttggaccagttcttgtgccattggcaggatgagaggcagcagccaggcgggagctgtgtctagcagcacctgtagcccacgtgctgctaattagctggaaaactggcgaaggcagaacctttgctaccaggaatcttgacatgtggggtctgtctttgagaatttgtaaatgaacagtccaatatttcctctcggctcattttgcacatccatttttggggaaatgtgatttctctctctttttttttttttttttttgcctaaggcacaatctcaagaggtcctgagaccacgtacccatgatttttttcttgctctgtgatacccaataactccttcacctaagccctgttgttgattttgaagtgcttcctaggccagtgattttagcttctgccagctgcttttgccagtagattaacgtgtttttatttttcaaactccgtgtttcctaacgtggagtgtatgggtctaagagagcctgctgtcctccctgccttccaccttggagaggaggctggacgcatcagcagtggccagggcaggtcgcaaaatctcccagcctagagaccacacctgaaacggctgaagccagcttgcacaagggctgctgtccctctgcggcaggcagagctggtgggggcaggggtcacagagcagtcatagacaccatggaccagggcaggagaagggcagatggcacatgggcacaacagggccttgtccttagagcactggggggtcatggctgggaggggcatggcaggggctggcatccctgtagagccagaggggccacccagggcagtgacattccagatatgttgggctcacctcatccttgctgtgagactggagttccatggggacatgaagtcagtacaccgcagagctgctcagctgctctacctctcgctgacttttttgttgcacatatacattttctttcaattagcatttatttcagcttttatttaagctttttgacagtacatgtaaaatatatgattataaccatttaaaaataccttatgtacctggttttttttggaaactagatagaaatatatttatcttttacataaaagaa

SEQ ID NO: 31580 - DNA, 1178 bp, Homo sapiens
  source 1..1178: mol_type = unassigned DNA
tttcctccccggctgcggctgggacgggggcggccatcggccgttacccgggcgcgagaccgcagcgagcgctgggggcgctcggctttggttctgggatggagagagggcctttaaagagcaggacggacacgctctgaacattccggcccaaactcggtcccccgacccatttcctgtcccgattctttcgaccttgggggcgatggggactgggagctgccttaagccgattctgctcacactctgataaagaacaggaaaaagagaaaaaatcagtgatctgtgtcgagggcaatattgcaagtgggaagacgacatgcctggaattcttctccaacgcgacagacgtcgaggtgttaacggagcctgtgtccaagtggagaaatgtccgtggccacaatcctctgggcctgatgtaccacgatgcctctcgctggggtcttacgctacagacttatgtgcagctcaccatgctggacaggcatactcgtcctcaggtgtcatctgtacggttgatggagaggtcgattcacagcgcaagatacatttttgtagaaaacctgtatagaagtgggaagatgccagaagtggactatgtagttctgtcggaatggtttgactggatcttgaggaacatggacgtgtctgttgatttgatagtttaccttcggaccaatcctgagacttgttaccagaggttaaagaagagatgcagggaagaggagaaggtcattccgctggaatacctggaagcaattcaccatctccatgaggagtggctcatcaaaggcagccttttccccatggcagcccctgttctggtgattgaggctgaccaccacatggagaggatgttagaactctttgaacaaaatcgggatcgaatattaactccagagaatcggaagcattgcccataggaggcaaaaggtctatggctcatgtctgaaaaatgcctgctgctgccaagttagctattgggagcaatctggaaaaacttgctcccaggagggctttgtgtctggccagcttgattttcctaatggtctcatctcctttgctagtgtctttgtcatgcgtctctggccctcgtgggtaaatgacaaacgggaccaatgggtttgccaagccctttgctgttcgcagcctcacattcccccggtgcctctcccatg

SEQ ID NO: 31581 - DNA, 1937 bp, Homo sapiens
  source 1..1937: mol_type = unassigned DNA
gccaagttatgggtgcgttctgccagcgtcctagcagtgataaagaacaggaaaaagagaaaaaatcagtgatctgtgtcgagggcaatattgcaagtgggaagacgacatgcctggaattcttctccaacgcgacagacgtcgaggtgttaacggagcctgtgtccaagtggagaaatgtccgtggccacaatcctctgggcctgatgtaccacgatgcctctcgctggggtcttacgctacagacttatgtgcagctcaccatgctggacaggcatactcgtcctcaggtgtcatctgtacggttgatggagaggtcgattcacagcgcaagatacatttttgtagaaaacctgtatagaagtgggaagatgccagaagtggactatgtagttctgtcggaatggtttgactggatcttgaggaacatggacgtgtctgttgatttgatagtttaccttcggaccaatcctgagacttgttaccagaggttaaagaagagatgcagggaagaggagaaggtcattccgctggaatacctggaagcaattcaccatctccatgaggagtggctcatcaaaggcagccttttccccatggcagcccctgttctggtgattgaggctgaccaccacatggagaggatgttagaactctttgaacaaaatcgggatcgaatattaactccagagaatcggaagcattgcccataggaggcaaaaggtctatggctcatgtctgaaaaatgcctgctgctgccaagttagctattgggagcaatctggaaaaacttgctcccaggagggctttgtgtctggccagcttgattttcctaatggtctcatctcctttgctagtgtctttgtcatgcgtctctggccctcgtgggtaaatgacaaacgggaccaatgggtttgccaagccctttgctgttcgcagcctcacattcccccggtgcctctcccatggctttgtgctgctgagtcgctctcatgaagcccttagggagagcacctgttgtgtgcctgacaccacgctggagctgtgtaccaatcgtctcagccttcattaggaggccgaggtaggagtcttatatcccaggtgaggaatttgaagctcagaaaggttgaggggctccccagaggtcacacagcctgtgtgcagtggagctggcaccattcagactttcagccgactcagcaactttcccttgccctgggctgcctcctcctgagagctgttccccaccgccctgcctcttccggttggaggctctcatgtctctttggggagagctggcagtgtgcggagctgataacattttcccaatattgagcagttcccaaggacagtcagcatttctagacttccacaaaattatgctgcatttggctggagcccggtgttcagtggtttccctgcccgaggtcgctgcagccccatctaccacatcttcatgtggacattgagattcacatgctggctcctgaagggtgctcagtctccttggtgattaaggtcctgcttgaactgctgccaactccatgtcagggaagtcgcttttggtgcctggctggtttgcccagagccaagctggggcaaggggcagccagccctggcttccaaggctcccgtactgtctgtgtccttgtataaggagctttgctcttggaattactgaaagtctgtggcccaagagagagacacaagtggccttaagtctttttgaagtgttatttcatccagggaaatgcctcgagccatagagcctgaaatcatctttgttggctcagaaaataccttagcttcactcagctggactgcattgaaggcgaggctgccccttggatcaagcagaaaacaagagaaagaaagaacgttccctttggggatagtctggaaagttgggatttgcaaataaaggctctggaagcatt

SEQ ID NO: 31582 - DNA, 2687 bp, Homo sapiens
  source 1..2687: mol_type = unassigned DNA
gggcggccatcggccgttacccgggcgcgagaccgcagcgagcgctgggggcgctcggctttggttctgggatggagagagggcctttaaagagcaggacggacacgctctgaacattccggcccaaactcggtcccccgacccatttcctgtcccgattctttcgaccttgggggcgatggggactgggagctgccttaagccgattctgctcacactctggtgccagcgtgggggaggggggttacgcccccggcgctctcctgccctccctgggagtggggacccacacagaaacgggtcactgttacacccgggttctggtgtccgccatatggctgttgagagacgcctcagaaccacctgtgggacggatgggcagcgatgcccgccctgggcctagaggaacacctgggtcccaggcccaaaaccacgtccgccgcccactcttccccgtgcaccgcgagtggaggctgttctgcctttccacttgcttaacatccagtctgtgaagatctaaataaataacgtggaaaatgcaaagtataatgtactaagtgaaagaactcgagcacactgggggtccacgaagctgcagctgcagcccagggtggcacatcggcgagacggtggtgcgcgcctccaatctcggagggcgcccaaaatggaaaatgtttttaggccagggagtgagcataaacattagtgtttttgtggtcatgtagcaaattagggcagaggagagttatttaaaagtgagtttaaaaactgatttcctttcttttgtagataaagaacaggaaaaagagaaaaaatcagtgatctgtgtcgagggcaatattgcaagtgggaagacgacatgcctggaattcttctccaacgcgacagacgtcgaggtgttaacggagcctgtgtccaagtggagaaatgtccgtggccacaatcctctgggcctgatgtaccacgatgcctctcgctggggtcttacgctacagacttatgtgcagctcaccatgctggacaggcatactcgtcctcaggtgtcatctgtacggttgatggagaggtcgattcacagcgcaagatacatttttgtagaaaacctgtatagaagtgggaagatgccagaagtggactatgtagttctgtcggaatggtttgactggatcttgaggaacatggacgtgtctgttgatttgatagtttaccttcggaccaatcctgagacttgttaccagaggttaaagaagagatgcagggaagaggagaaggtcattccgctggaatacctggaagcaattcaccatctccatgaggagtggctcatcaaaggcagccttttccccatggcagcccctgttctggtgattgaggctgaccaccacatggagaggatgttagaactctttgaacaaaatcgggatcgaatattaactccagagaatcggaagcattgcccataggaggcaaaaggtctatggctcatgtctgaaaaatgcctgctgctgccaagttagctattgggagcaatctggaaaaacttgctcccaggagggctttgtgtctggccagcttgattttcctaatggtctcatctcctttgctagtgtctttgtcatgcgtctctggccctcgtgggtaaatgacaaacgggaccaatgggtttgccaagccctttgctgttcgcagcctcacattcccccggtgcctctcccatggctttgtgctgctgagtcgctctcatgaagcccttagggagagcacctgttgtgtgcctgacaccacgctggagctgtgtaccaatcgtctcagccttcattaggaggccgaggtaggagtcttatatcccaggtgaggaatttgaagctcagaaaggttgaggggctccccagaggtcacacagcctgtgtgcagtggagctggcaccattcagactttcagccgactcagcaactttcccttgccctgggctgcctcctcctgagagctgttccccaccgccctgcctcttccggttggaggctctcatgtctctttggggagagctggcagtgtgcggagctgataacattttcccaatattgagcagttcccaaggacagtcagcatttctagacttccacaaaattatgctgcatttggctggagcccggtgttcagtggtttccctgcccgaggtcgctgcagccccatctaccacatcttcatgtggacattgagattcacatgctggctcctgaagggtgctcagtctccttggtgattaaggtcctgcttgaactgctgccaactccatgtcagggaagtcgcttttggtgcctggctggtttgcccagagccaagctggggcaaggggcagccagccctggcttccaaggctcccgtactgtctgtgtccttgtataaggagctttgctcttggaattactgaaagtctgtggcccaagagagagacacaagtggccttaagtctttttgaagtgttatttcatccagggaaatgcctcgagccatagagcctgaaatcatctttgttggctcagaaaataccttagcttcactcagctggactgcattgaaggcgaggctgccccttggatcaagcagaaaacaagagaaagaaagaacgttccctttggggatagtctggaaagttgggatttgcaaataaaggctctggaagcatt

SEQ ID NO: 31583 - DNA, 2266 bp, Homo sapiens
  source 1..2266: mol_type = unassigned DNA
agtatttctcctcttgctgagatgaaatgcgaccgggtctctttaagggccaggcgccgggatccaggcggcgcccaacggctggactagcagtcgtccgcgccgactcgcacaagaaggaaccccgggcctctggatccgctcgcccggctatgctgctgtggccgctgcggggctgggccgcccgggcgctgcgctgctttgggccgggaagtcgcgggagcccggcctcaggccccgggccgcggagggtgcagcgccgggcctggcctcccgataaagaacaggaaaaagagaaaaaatcagtgagacggcgtcttgctgtgttgcccaggctggcctccaactcctgggctcaagtgatcctctggcatcagcctcctgagtagctgtgatgacaagtatctgtgtcgagggcaatattgcaagtgggaagacgacatgcctggaattcttctccaacgcgacagacgtcgaggtgttaacggagcctgtgtccaagtggagaaatgtccgtggccacaatcctctgggcctgatgtaccacgatgcctctcgctggggtcttacgctacagacttatgtgcagctcaccatgctggacaggcatactcgtcctcaggtgtcatctgtacggttgatggagaggtcgattcacagcgcaagatacatttttgtagaaaacctgtatagaagtgggaagatgccagaagtggactatgtagttctgtcggaatggtttgactggatcttgaggaacatggacgtgtctgttgatttgatagtttaccttcggaccaatcctgagacttgttaccagaggttaaagaagagatgcagggaagaggagaaggtcattccgctggaatacctggaagcaattcaccatctccatgaggagtggctcatcaaaggcagccttttccccatggcagcccctgttctggtgattgaggctgaccaccacatggagaggatgttagaactctttgaacaaaatcgggatcgaatattaactccagagaatcggaagcattgcccataggaggcaaaaggtctatggctcatgtctgaaaaatgcctgctgctgccaagttagctattgggagcaatctggaaaaacttgctcccaggagggctttgtgtctggccagcttgattttcctaatggtctcatctcctttgctagtgtctttgtcatgcgtctctggccctcgtgggtaaatgacaaacgggaccaatgggtttgccaagccctttgctgttcgcagcctcacattcccccggtgcctctcccatggctttgtgctgctgagtcgctctcatgaagcccttagggagagcacctgttgtgtgcctgacaccacgctggagctgtgtaccaatcgtctcagccttcattaggaggccgaggtaggagtcttatatcccaggtgaggaatttgaagctcagaaaggttgaggggctccccagaggtcacacagcctgtgtgcagtggagctggcaccattcagactttcagccgactcagcaactttcccttgccctgggctgcctcctcctgagagctgttccccaccgccctgcctcttccggttggaggctctcatgtctctttggggagagctggcagtgtgcggagctgataacattttcccaatattgagcagttcccaaggacagtcagcatttctagacttccacaaaattatgctgcatttggctggagcccggtgttcagtggtttccctgcccgaggtcgctgcagccccatctaccacatcttcatgtggacattgagattcacatgctggctcctgaagggtgctcagtctccttggtgattaaggtcctgcttgaactgctgccaactccatgtcagggaagtcgcttttggtgcctggctggtttgcccagagccaagctggggcaaggggcagccagccctggcttccaaggctcccgtactgtctgtgtccttgtataaggagctttgctcttggaattactgaaagtctgtggcccaagagagagacacaagtggccttaagtctttttgaagtgttatttcatccagggaaatgcctcgagccatagagcctgaaatcatctttgttggctcagaaaataccttagcttcactcagctggactgcattgaaggcgaggctgccccttggatcaagcagaaaacaagagaaagaaagaacgttccctttggggatagtctggaaagttgggatttgcaaataaaggctctggaagc

SEQ ID NO: 31584 - DNA, 5039 bp, Homo sapiens
  source 1..5039: mol_type = unassigned DNA
ggaataagtgacatcatgagtgtgtgccaggtgtctgattacagaaggtgttcaattaatctgcaatcattaattaacccttcagtcgctggtattatttgccatccatcctccgagtgttgccaagttatgggtgcgttctgccagcgtcctagcagtggtaaggcttctggctgccagcggcgaacctctcccttcgagtatttctcctcttgctgagatgaaatgcgaccgggtctctttaagggccaggcgccgggatccaggcggcgcccaacggctggactagcagtcgtccgcgccgactcgcacaagaaggaaccccgggcctctggatccgctcgcccggctatgctgctgtggccgctgcggggctgggccgcccgggcgctgcgctgctttgggccgggaagtcgcgggagcccggcctcaggccccgggccgcggagggtgcagcgccgggcctggcctcccgataaagaacaggaaaaagagaaaaaatcagtggtgttaacggagcctgtgtccaagtggagaaatgtccgtggccacaatcctctgggcctgatgtaccacgatgcctctcgctggggtcttacgctacagacttatgtgcagctcaccatgctggacaggcatactcgtcctcaggtgtcatctgtacggttgatggagaggtcgattcacagcgcaagatacatttttgtagaaaacctgtatagaagtgggaagatgccagaagtggactatgtagttctgtcggaatggtttgactggatcttgaggaacatggacgtgtctgttgatttgatagtttaccttcggaccaatcctgagacttgttaccagaggttaaagaagagatgcagggaagaggagaaggtcattccgctggaatacctggaagcaattcaccatctccatgaggagtggctcatcaaaggcagccttttccccatggcagcccctgttctggtgattgaggctgaccaccacatggagaggatgttagaactctttgaacaaaatcgggatcgaatattaactccagagaatcggaagcattgcccataggaggcaaaaggtctatggctcatgtctgaaaaatgcctgctgctgccaagttagctattgggagcaatctggaaaaacttgctcccaggagggctttgtgtctggccagcttgattttcctaatggtctcatctcctttgctagtgtctttgtcatgcgtctctggccctcgtgggtaaatgacaaacgggaccaatgggtttgccaagccctttgctgttcgcagcctcacattcccccggtgcctctcccatggctttgtgctgctgagtcgctctcatgaagcccttagggagagcacctgttgtgtgcctgacaccacgctggagctgtgtaccaatcgtctcagccttcattaggaggccgaggtaggagtcttatatcccaggtgaggaatttgaagctcagaaaggttgaggggctccccagaggtcacacagcctgtgtgcagtggagctggcaccattcagactttcagccgactcagcaactttcccttgccctgggctgcctcctcctgagagctgttccccaccgccctgcctcttccggttggaggctctcatgtctctttggggagagctggcagtgtgcggagctgataacattttcccaatattgagcagttcccaaggacagtcagcatttctagacttccacaaaattatgctgcatttggctggagcccggtgttcagtggtttccctgcccgaggtcgctgcagccccatctaccacatcttcatgtggacattgagattcacatgctggctcctgaagggtgctcagtctccttggtgattaaggtcctgcttgaactgctgccaactccatgtcagggaagtcgcttttggtgcctggctggtttgcccagagccaagctggggcaaggggcagccagccctggcttccaaggctcccgtactgtctgtgtccttgtataaggagctttgctcttggaattactgaaagtctgtggcccaagagagagacacaagtggccttaagtctttttgaagtgttatttcatccagggaaatgcctcgagccatagagcctgaaatcatctttgttggctcagaaaataccttagcttcactcagctggactgcattgaaggcgaggctgccccttggatcaagcagaaaacaagagaaagaaagaacgttccctttggggatagtctggaaagttgggatttgcaaataaaggctctggaagcattgctggtcctgaagctttggaggtgggcagagagagcttcaagaagactagatgcaaaccctggaaaggattaaggctcaactctggagaaacaggccacagcctctcagagcagctgttggctgtaaatagaggtagcaaggccgctcccaggcccctgtgagtgtgggcacctgtgcatgcaatgctccgactctgcagaggtgccaagtgcccctgctgggccagtcccagagagttaggaagtcaaggcctgcaactcctggttcttcctgtttggaccagttcttgtgccattggcaggatgagaggcagcagccaggcgggagctgtgtctagcagcacctgtagcccacgtgctgctaattagctggaaaactggcgaaggcagaacctttgctaccaggaatcttgacatgtggggtctgtctttgagaatttgtaaatgaacagtccaatatttcctctcggctcattttgcacatccatttttggggaaatgtgatttctctctctttttttttttttttttttgcctaaggcacaatctcaagaggtcctgagaccacgtacccatgatttttttcttgctctgtgatacccaataactccttcacctaagccctgttgttgattttgaagtgcttcctaggccagtgattttagcttctgccagctgcttttgccagtagattaacgtgtttttatttttcaaactccgtgtttcctaacgtggagtgtatgggtctaagagagcctgctgtcctccctgccttccaccttggagaggaggctggacgcatcagcagtggccagggcaggtcgcaaaatctcccagcctagagaccacacctgaaacggctgaagccagcttgcacaagggctgctgtccctctgcggcaggcagagctggtgggggcaggggtcacagagcagtcatagacaccatggaccagggcaggagaagggcagatggcacatgggcacaacagggccttgtccttagagcactggggggtcatggctgggaggggcatggcaggggctggcatccctgtagagccagaggggccacccagggcagtgacattccagatatgttgggctcacctcatccttgctgtgagactggagttccatggggacatgaagtcagtacaccgcagagctgctcagctgctctacctctcgctgacttttttgttgcacatatacattttctttcaattagcatttatttcagcttttatttaagctttttgacagtacatgtaaaatatatgattataaccatttaaaaataccttatgtacctggttttttttggaaactagatagaaatatatttatcttttacataaaagaagtgtgtagtggggtggtccagggctttgtggtggcttagtggccatcggggtcccaggctcttcccacctttctcttttgggtccacctcttggctcctggcttccttcctctggggcctgactgtccaggatggcagctggagctcctgctctgggcacggttggcatcagagcccactgctccccatccactctttaatccagatgctggtaatgtccctttccaaggcataactaagataagctggaaggttcttacgaggctttgctagaggccctgggaggtggggggaaaggcaagagggcagtgcccacccatagaccgggtcacatgacctggcatcagcgccgtggggtcctttgggcttcacctccctctcccctctgcccccacgtcatcccaccctcatcctcaccctcaccattcccatcccgtaccgtaatgtcccttgcaaggcctaactctgtgaggaatgaaaccacctcatccttgttccaataacatgagtgaccgaatttacaaacgagtgaatgtggacctctggaaacattacccagcttgtttttacttttcactttctctttctgcccctttcatttccgtaggagccctttacctagatgagaagtgtccccccgcctggggaatatatcagtcagaacaatcttcctgcagacatgcaccattagacccgagtgacggtggtgccatttaaacctcagagcaggtaaaaggtggtcctgaaacctgtctacccacagggtgctatggaatctgaatcacttcttttttcctagagccctggggtggggagctccctcaagtgttcacatgtgtgtggaatgaggaacacccatctccttggccctctccaccctgaagagttagttattaaaataattggcaagctcttgcaaatgtcagtcatccattgttcagaatggaatagcaataatacatccctggctgccctgggcttggccaggattactcactgaaggcctcagggttactggcacacactttcttttcctaataatcccatcccctcagctttcctaaggctagagtgaatttcgtgttcctttagtttacataagatggtgaacttggcaaaagctatcattaaacagaagctaagagaaagcctatgtcgtggaatccagaatgggtattgccattcactgctgtccacagaagctgtcttgaatttctttctgtgtcttttctttttttttctttaagactgttgtttaccagactgggctctgtggaacacaggtgtcctgggagatggttaatcattacaaaatattggtaacaatctaaagatgcatacataagagagtggtcaaataaaccattttccattca

SEQ ID NO: 31585 - DNA, 840 bp, Homo sapiens
  source 1..840: mol_type = unassigned DNA
atgcctgtggccggctcggagctgccgcgccggcccttgccccccgccgcacaggagcgggacgccgagccgcgtccgccgcacggggagctgcagtacctggggcagatccaacacatcctccgctgcggcgtcaggaaggacgaccgcacgggcaccggcaccctgtcggtattcggcatgcaggcgcgctacagcctgagagatgaattccctctgctgacaaccaaacgtgtgttctggaagggtgttttggaggagttgctgtggtttatcaagggatccacaaatgctaaagagctgtcttccaagggagtgaaaatctgggatgccaatggatcccgagactttttggacagcctgggattctccaccagagaagaaggggacttgggcccagtttatggcttccagtggaggcattttggggcagaatacagagatatggaatcagatcttcctctgatggcgctgcctccatgccatgccctctgccagttctatgtggtgaacagtgagctgtcctgccagctgtaccagagatcgggagacatgggcctcggtgtgcctttcaacatcgccagctacgccctgctcacgtacatgattgcgcacatcacgggcctgaagccaggtgactttatacacactttgggagatgcacatatttacctgaatcacatcgagccactgaaaattcagcttcagcgagaacccagacctttcccaaagctcaggattcttcgaaaagttgagaaaattgatgacttcaaagctgaagactttcagattgaagggtacaatccgcatccaactattaaaatggaaatggctgtttag

SEQ ID NO: 31586 - DNA, 693 bp, Homo sapiens
  source 1..693: mol_type = unassigned DNA
atgcctgtggccggctcggagctgccgcgccggcccttgccccccgccgcacaggagcgggacgccgagccgcgtccgccgcacggggagctgcagtacctggggcagatccaacacatcctccgctgcggcgtcaggaaggacgaccgcacgggcaccggcaccctgtcggtattcggcatgcaggcgcgctacagcctgagagattattcaggacagggagttgaccaactgcaaagagtgattgacaccatcaaaaccaaccctgacgacagaagaatcatcatgtgcgcttggaatccaagagatcttcctctgatggcgctgcctccatgccatgccctctgccagttctatgtggtgaacagtgagctgtcctgccagctgtaccagagatcgggagacatgggcctcggtgtgcctttcaacatcgccagctacgccctgctcacgtacatgattgcgcacatcacgggcctgaagccaggtgactttatacacactttgggagatgcacatatttacctgaatcacatcgagccactgaaaattcagcttcagcgagaacccagacctttcccaaagctcaggattcttcgaaaagttgagaaaattgatgacttcaaagctgaagactttcagattgaagggtacaatccgcatccaactattaaaatggaaatggctgtttag

SEQ ID NO: 31587 - DNA, 1662 bp, Homo sapiens
  source 1..1662: mol_type = unassigned DNA
cgggacggccgcgggaaaaggcgcgcggaaggggtcctgccaccgcgccacttggcctgcctccgtcccgccgcgccacttggcctgcctccgtcccgccgcgccacttcgcctgcctccgtcccccgcccgccgcgccatgcctgtggccggctcggagctgccgcgccggcccttgccccccgccgcacaggagcgggacgccgagccgcgtccgccgcacggggagctgcagtacctggggcagatccaacacatcctccgctgcggcgtcaggaaggacgaccgcacgggcaccggcaccctgtcggtattcggcatgcaggcgcgctacagcctgagagatgaattccctctgctgacaaccaaacgtgtgttctggaagggtgttttggaggagttgctgtggtttatcaagggatccacaaatgctaaagagctgtcttccaagggagtgaaaatctgggatgccaatggatcccgagactttttggacagcctgggattctccaccagagaagaaggggacttgggcccagtttatggcttccagtggaggcattttggggcagaatacagagatatggaatcagattattcaggacagggagttgaccaactgcaaagagtgattgacaccatcaaaaccaaccctgacgacagaagaatcatcatgtgcgcttggaatccaagagatcttcctctgatggcgctgcctccatgccatgccctctgccagttctatgtggtgaacagtgagctgtcctgccagctgtaccagagatcgggagacatgggcctcggtgtgcctttcaacatcgccagctacgccctgctcacgtacatgattgcgcacatcacgggcctgaagccaggtgactttatacacactttgggagatgcacatatttacctgaatcacatcgagccactgaaaattcagcttcagcgagaacccagacctttcccaaagctcaggattcttcgaaaagttgagaaaattgatgacttcaaagctgaagactttcagattgaagggtacaatccgcatccaactattaaaatggaaatggctgtttagggtgctttcaaaggagctcgaaggatattgtcagtctttaggggttgggctggatgccgaggtaaaagttctttttgctctaaaagaaaaaggaactaggtcaaaaatctgtccgtgacctatcagttattaatttttaaggatgttgccactggcaaatgtaactgtgccagttctttccataataaaaggctttgagttaactcactgagggtatctgacaatgctgaggttatgaacaaagtgaggagaatgaaatgtatgtgctcttagcaaaaacatgtatgtgcatttcaatcccacgtacttataaagaaggttggtgaatttcacaagctatttttggaatatttttagaatattttaagaatttcacaagctattccctcaaatctgagggagctgagtaacaccatcgatcatgatgtagagtgtggttatgaactttaaagttatagttgttttatatgttgctataataaagaagtgttctgcattcgtccacgctttgttcattctgtactgccacttatctgctcagttccttcctaaaatagattaaagaactctccttaagtaaa

SEQ ID NO: 31588 - DNA, 1299 bp, Homo sapiens
  source 1..1299: mol_type = unassigned DNA
tgcggcgcagcggaggcggaccgcagtcgagtctgcagagtgttgggtctgtagccagcaaattacttcatcatctagattatccattcagttgatcctaattagcaaggataacaaggtaacacaaggcttacttatattcacccaacaaaagtgtctctgtggagccacttcccagtgaactacatactgagataggggttcctggatgagaaggaccaaggacagaaccgagaagagtttaggggcaggttatgcgagatggaaatggcgcagataacggagggaaggatttgagggctcaaacgtaggcgtctgtgtttcgcaaaagttggagacgttctaggctgcctctcgttgcctccatctcgctctgcgcgggttttggaggacattagcattctttcttgtatctccgttgattccagaatcgtccgcactaaagtcccctgcagcgtgaccatgtcgagaccccggaagaggctggctgggacttctggttcagacaagggactatcaggaaaacgcaccaaaactgagaactcaggtgaggcattagctaaagtggaggactccaaccctcagaagacttcagccactaaaaactgtttgaagaatctaagcagccactggctgatgaagtcagagccagagagccgcctagagaaaggtgtagatgtgaagttcagcattgaggatctcaaagcacagcccaaacagacaacatgctgggatggtgttcgtaactaccaggctcggaacttccttagagccatgaagctgggagaagaagccttcttctaccatagcaactgcaaagagccaggcatcgcaggactcatgaagatcgtgaaagaggcttacccagaccacacacagtttgagaaaaacaatccccattatgacccatctagcaaagaggacaaccctaagtggtccatggtggatgtacagtttgttcggatgatgaaacgtttcattcccctggctgagctcaaatcctatcatcaagctcacaaagctactggtggccccttaaaaaatatggttctcttcactcgccagagattatcaatccagcccctgacccaggaagagtttgattttgttttgagcctggaggaaaaggaaccaagttaactgagatactgctgctggaatgggcgagacattgctgcaaagaagtcaagcttttttcagacaaaaggtgtgagggggcttgcttggtatgcttacctgggcttgtgtacctcagtggtttttgtgtacttttttcaataaaatatcaaagttgaagaa

SEQ ID NO: 31589 - DNA, 835 bp, Homo sapiens
  source 1..835: mol_type = unassigned DNA
acagcctgcggcgcagcggaggcggaccgcagtcgagtctgcagagtgttgggtctgtagccagcaaattacttcatcatctagattatccattcagttgatcctaattagcaaggataacaagaatcgtccgcactaaagtcccctgcagcgtgaccatgtcgagaccccggaagaggctggctgggacttctggttcagacaagggactatcaggaaaacgcaccaaaactgagaactcaggtgaggcattagctaaagtggaggactccaaccctcagaagacttcagccactaaaaactgtttgaagaatctaagcagccactggctgatgaagtcagagccagagagccgcctagagaaaggtgtagatgtgaagttcagcattgaggatctcaaagcacagcccaaacagacaacatgctgggatggtgttcgtaactaccaggctcggaacttccttagagccatgaagctgggagaagaagccttcttctaccatagcaactgcaaagagccaggcatcgcaggactcatgaagatcgtgaaagaggcttacccagaccacacacagtttgagaaaaacaatccccattatgacccatctagcaaagaggacaaccctaagtggtccatgaagagtttgattttgttttgagcctggaggaaaaggaaccaagttaactgagatactgctgctggaatgggcgagacattgctgcaaagaagtcaagcttttttcagacaaaaggtgtgagggggcttgcttggtatgcttacctgggcttgtgtacctcagtggtttttgtgtacttttttcaataaaatatcaaa

SEQ ID NO: 31590 - DNA, 943 bp, Homo sapiens
  source 1..943: mol_type = unassigned DNA
cgccgcgggggtcgcgctgcacagcctgcggcgcagcggaggcggaccgcagtcgagtctgcagagtgttggaatcgtccgcactaaagtcccctgcagcgtgaccatgtcgagaccccggaagaggctggctgggacttctggttcagacaagggactatcaggaaaacgcaccaaaactgagaactcaggtgaggcattagctaaagtggaggactccaaccctcagaagacttcagccactaaaaactgtttgaagaatctaagcagccactggctgatgaagtcagagccagagagccgcctagagaaaggtgtagatgtgaagttcagcattgaggatctcaaagcacagcccaaacagacaacatgctgggatggtgttcgtaactaccaggctcggaacttccttagagccatgaagctgggagaagaagccttcttctaccatagcaactgcaaagagccaggcatcgcaggactcatgaagatcgtgaaagaggcttacccagaccacacacagtttgagaaaaacaatccccattatgacccatctagcaaagaggacaaccctaagtggtccatggtggatgtacagtttgttcggatgatgaaacgtttcattcccctggctgagctcaaatcctatcatcaagctcacaaagctactggtggccccttaaaaaatatggttctcttcactcgccagagattatcaatccagcccctgacccaggaagagtttgattttgttttgagcctggaggaaaaggaaccaagttaactgagatactgctgctggaatgggcgagacattgctgcaaagaagtcaagcttttttcagacaaaaggtgtgagggggcttgcttggtatgcttacctgggcttgtgtacctcagtggtttttgtgtacttttttcaataaaatatcaaagttgaagaa

SEQ ID NO: 31591 - DNA, 893 bp, Homo sapiens
  source 1..893: mol_type = unassigned DNA
cctaattagcaaggataacaagaatcgtccgcactaaagtcccctgcagcgtgaccatgtcgagaccccggaagaggctggctgggacttctggttcagacaagggactatcaggaaaacgcaccaaaactgagaactcaggtgaggcattagctaaagtggaggactccaaccctcagaagacttcagccactaaaaactgtttgaagaatctaagcagccactggctgatgaagtcagagccagagagccgcctagagaaaggtgtagatgtgaagttcagcattgaggatctcaaagcacagcccaaacagacaacatgctgggatggtgttcgtaactaccaggctcggaacttccttagagccatgaagctgggagaagaagccttcttctaccatagcaactgcaaagagccaggcatcgcaggactcatgaagatcgtgaaagaggcttacccagaccacacacagtttgagaaaaacaatccccattatgacccatctagcaaagaggacaaccctaagtggtccatggtggatgtacagtttgttcggatgatgaaacgtttcattcccctggctgagctcaaatcctatcatcaagctcacaaagctactggtggccccttaaaaaatatggttctcttcactcgccagagattatcaatccagcccctgacccaggaagagtttgattttgttttgagcctggaggaaaaggaaccaagttaactgagatactgctgctggaatgggcgagacattgctgcaaagaagtcaagcttttttcagacaaaaggtgtgagggggcttgcttggtatgcttacctgggcttgtgtacctcagtggtttttgtgtacttttttcaataaaatatcaaagttgaagaa

SEQ ID NO: 31592 - DNA, 3866 bp, Homo sapiens
  source 1..3866: mol_type = unassigned DNA
agctactccaccccactctggctgtagtgtgacattcctgcctgcctgaggaagaaatggtgagcaggggctgcaattgcagacaagtgtcacccagaagccacaagtttctgtgagcaccaggtctacaaactacccaaggcatagcaatggcattatcactggaagaattcgtccactcccttgacctcaggaccctacccagggttctagaaatccaggcaggcatctatcttgaaggctctatttatgaaatgtttggaaatgaatgctgtttttcaacaggagaagtgattaaaattactggtctcaaagttaagaagatcatagctgaaatttgtgagcagattgaaggttgtgagtctctacagccatttgaactgcctatgaattttccaggtctttttaagattgtggctgataaaactccataccttactatggaagaaatcacaaggaccattcatattggaccaagtagactagggcatccttgcttctatcatcagaaggatataaaactagagaacctcatcataaagcagggtgagcaaatcatgctcaactcagttgaagagattgatggagaaataatggtgagctgtgcagtagcaaggaatcatcaaactcactcatttaatttgcctttgtcacaagaaggagaattctacgagtgtgaagatgaacgtatttacactctaaaggagattgttgaatggaagattcctaagaacagaacaagaactgtaaaccttacagatttttcaaataagtgggactcaacgaatccatttcctaaagacttttatggtaccctgattctcaagcctgtttatgaaattcaaggtgtgatgaaatttcgaaaagatataatccgcatcctccccagtctagatgtcgaagtcaaagacatcactgattcttacgatgctaactggtttcttcagctgttatcaacagaagatctttttgaaatgactagtaaagagttccccatagtgactgaagtcatagaagcacctgaaggaaaccacctgccccaaagcattttacagcctgggaaaaccattgtgatccacaaaaagtaccaggcatcaagaatcttagcttcagaaattagaagcaattttcctaaaagacacttcttgatccccactagctataaaggcaagttcaagcggcgaccgagggagttcccaacggcctatgacctagagatcgctaagagtgaaaaggagcctcttcacgtggtggccaccaaagcgtttcattcccctcatgacaagctgtcatccgtatctgttggggaccagtttctggtgcatcagtcagagacgactgaagtcctctgtgagggaataaaaaaagtggtgaatgttctggcctgtgaaaaaatcctcaaaaagtcctatgaggctgcgctgctccctttgtacatggaaggaggttttgtagaggtgattcatgataagaaacagtacccgatttctgagctctgtaaacagttccgtttgcccttcaatgtgaaggtgtctgtcagggatctttccattgaagaggacgtgttggctgccacaccaggactgcagttggaggaggacattacagactcttacctactcataagtgactttgccaaccccacggagtgctgggaaattcctgtgggccgcttgaatatgactgttcagttagttagtaatttctctagggatgcagaaccatttctagtcaggactctggtagaagagatcactgaagagcaatattacatgatgcggagatatgaaagctcagcctcacatcccccacctcgccctccgaaacacccctcagtagaggaaacaaagttaaccctgctaaccttagcagaagaaaggacggtagacctgcccaagtctcccaagcgtcatcacgtagacataaccaagaaacttcacccaaatcaagctggcctggattcaaaagtactgattggtagtcagaatgatttggtggatgaagagaaagaaaggagcaaccgtggggccacagcaatagcagaaacattcaaaaatgaaaaacatcaaaaataacaagatgtgacagaagccacttaggcagcaaacataaatgttgcagtgaaaaaagaagctagccttctagctgaaaaacgagtattccccaatggactccagaagaaacttgattcatcgctgcaaaggaaagaacaaccttaaaacttttaacagataaaacttacagaaacctatgatatagaattcatatagtctattctgttgtgtctaaatctgtaggcattgtgttgttgttctttaggacgtatttatttaacttgcacattttttcagattcttatttctactaccaacaactaagtaattgggaaataattctgtatttcagtttctgagtaaaaccagtctgaaataggataaaagccaccaaatattttcttttttttccagaatttgttttgccattttttagtgctatcatcattcctaacaagactaacttacagaaaaataattatatctgactgatttaaaatgttcaggtttcttatccaaatcccttggaactatggaaaggagtttgatttcacattcacagtgtatttacaaaatacgctgtgtcataaatatgtttgaattccaacagccaaagccattgagagtcataggagttttccataaccttctcttctatgacccaacaacaagctcatgactgaaatttcaccagatttctgagacgatgtcttaatattctatgtgctatgtaccagataattctttagatgaatgtttcttaggattgtaggaaaattatctagttaatcataatatttgatggaaagaaaaagacaataaaattgtaatataataaatttggctgacaagaaaccaaagtgattcttaattagtatacatcagaatgatgctcttatagttgtaccatctataaaaattactttaagggctctcacattttaataatttatcttattatgtattaagtatacaggaacaatattatttttcctttaacaaaatgaagagacaggctatctggttaatgttacataggaatttaatagtaatgcttgaacttcatccatagatcatactctgtacaaaatttgttagctaacatcctatctcataattattttatgttttgtggagaaatttgttgattttgtaccaaagtgtttctgaagacaataaattgtgagtcaactttagaacaaaaaaaattagagttttttcaatgtttatattctgattaagcttactttaccttacattttttctaagtaacaatgaatcctgatttctagtgtcctaaaaattgcttagtgatttgattgtggtaatatcatttcttatctacaatgtctaaagttttatgggacagtttttcttttatttattttgcctgtttgtgcagataagaacagaaacttttctaagacccacatttggttattgaaggccacagcgaatcttaacctaacagccttgacaaactgcaccataggtgtttttagactcatataatttgttatttttcaaacaatagtgaataattaatatttttgtttggaatttgagaacaattaaatttgtacttttagtaactaccattctttgattagaaaattaagagaatgcatatcttactttggttgtaaattatcaagggctttctaatagaaatcatatataacatttctaaatataagtcctttcacatactgtgtttccagttgtcttgatattgaaaagtgtaataaacttcatgctcacctattggagatttgggaaggttgaaaataaacttcctaatttttatttgta

SEQ ID NO: 31593 - DNA, 4101 bp, Homo sapiens
  source 1..4101: mol_type = unassigned DNA
tgagaggctcttcctggatcccttattttctacaggagaggaggaaaacacctgggatgctccagtgctcttacgcagataatgatcattaacatcagcctctctgatcaaagagctactccaccccactctggctgtagtgtgacattcctgcctgcctgaggaagaaatggtgagcaggggctgcaattgcagacaagtgtcacccagaagccacaagtttctgtgagcaccaggtctacaaactacccaaggcatagcaatggcattatcactggaagaattcgtccactcccttgacctcaggaccctacccagggttctagaaatccaggcaggcatctatcttgaaggctctatttatgaaatgtttggaaatgaatgctgtttttcaacaggagaagtgattaaaattactggtctcaaagttaagaagatcatagctgaaatttgtgagcagattgaaggttgtgagtctctacagccatttgaactgcctatgaattttccaggtctttttaagattgtggctgataaaactccataccttactatggaagaaatcacaaggaccattcatattggaccaagtagactagggcatccttgcttctatcatcagaaggatataaaactagagaacctcatcataaagcagggtgagcaaatcatgctcaactcagttgaagagattgatggagaaataatggtgagctgtgcagtagcaaggaatcatcaaactcactcatttaatttgcctttgtcacaagaaggagaattctacgagtgtgaagatgaacgtatttacactctaaaggagattgttgaatggaagattcctaagaacagaacaagaactgtaaaccttacagatttttcaaataagtgggactcaacgaatccatttcctaaagacttttatggtaccctgattctcaagcctgtttatgaaattcaaggtgtgatgaaatttcgaaaagatataatccgcatcctccccagtctagatgtcgaagtcaaagacatcactgattcttacgatgctaactggtttcttcagctgttatcaacagaagatctttttgaaatgactagtaaagagttccccatagtgactgaagtcatagaagcacctgaaggaaaccacctgccccaaagcattttacagcctgggaaaaccattgtgatccacaaaaagtaccaggcatcaagaatcttagcttcagaaattagaagcaattttcctaaaagacacttcttgatccccactagctataaaggcaagttcaagcggcgaccgagggagttcccaacggcctatgacctagagatcgctaagagtgaaaaggagcctcttcacgtggtggccaccaaagcgtttcattcccctcatgacaagctgtcatccgtatctgttggggaccagtttctggtgcatcagtcagagacgactgaagtcctctgtgagggaataaaaaaagtggtgaatgttctggcctgtgaaaaaatcctcaaaaagtcctatgaggctgcgctgctccctttgtacatggaaggaggttttgtagaggtgattcatgataagaaacagtacccgatttctgagctctgtaaacagttccgtttgcccttcaatgtgaaggtgtctgtcagggatctttccattgaagaggacgtgttggctgccacaccaggactgcagttggaggaggacattacagactcttacctactcataagtgactttgccaaccccacggagtgctgggaaattcctgtgggccgcttgaatatgactgttcagttagttagtaatttctctagggatgcagaaccatttctagtcaggactctggtagaagagatcactgaagagcaatattacatgatgcggagatatgaaagctcagcctcacatcccccacctcgccctccgaaacacccctcagtagaggaaacaaagttaaccctgctaaccttagcagaagaaaggacggtagacctgcccaagtctcccaagcgtcatcacgtagacataaccaagaaacttcacccaaatcaagctggcctggattcaaaagtactgattggtagtcagaatgatttggtggatgaagagaaagaaaggagcaaccgtggggccacagcaatagcagaaacattcaaaaatgaaaaacatcaaaaataacaagatgtgacagaagccacttaggcagcaaacataaatgttgcagtgaaaaaagaagctagccttctagctgaaaaacgagtattccccaatggactccagaagaaacttgattcatcgctgcaaaggaaagaacaaccttaaaacttttaacagataaaacttacagaaacctatgatatagaattcatatagtctattctgttgtgtctaaatctgtaggcattgtgttgttgttctttaggacgtatttatttaacttgcacattttttcagattcttatttctactaccaacaactaagtaattgggaaataattctgtatttcagtttctgagtaaaaccagtctgaaataggataaaagccaccaaatattttcttttttttccagaatttgttttgccattttttagtgctatcatcattcctaacaagactaacttacagaaaaataattatatctgactgatttaaaatgttcaggtttcttatccaaatcccttggaactatggaaaggagtttgatttcacattcacagtgtatttacaaaatacgctgtgtcataaatatgtttgaattccaacagccaaagccattgagagtcataggagttttccataaccttctcttctatgacccaacaacaagctcatgactgaaatttcaccagatttctgagacgatgtcttaatattctatgtgctatgtaccagataattctttagatgaatgtttcttaggattgtaggaaaattatctagttaatcataatatttgatggaaagaaaaagacaataaaattgtaatataataaatttggctgacaagaaaccaaagtgattcttaattagtatacatcagaatgatgctcttatagttgtaccatctataaaaattactttaagggctctcacattttaataatttatcttattatgtattaagtatacaggaacaatattatttttcctttaacaaaatgaagagacaggctatctggttaatgttacataggaatttaatagtaatgcttgaacttcatccatagatcatactctgtacaaaatttgttagctaacatcctatctcataattattttatgttttgtggagaaatttgttgattttgtaccaaagtgtttctgaagacaataaattgtgagtcaactttagaacaaaaaaaattagagttttttcaatgtttatattctgattaagcttactttaccttacattttttctaagtaacaatgaatcctgatttctagtgtcctaaaaattgcttagtgatttgattgtggtaatatcatttcttatctacaatgtctaaagttttatgggacagtttttcttttatttattttgcctgtttgtgcagataagaacagaaacttttctaagacccacatttggttattgaaggccacagcgaatcttaacctaacagccttgacaaactgcaccataggtgtttttagactcatataatttgttatttttcaaacaatagtgaataattaatatttttgtttggaatttgagaacaattaaatttgtacttttagtaactaccattctttgattagaaaattaagagaatgcatatcttactttggttgtaaattatcaagggctttctaatagaaatcatatataacatttctaaatataagtcctttcacatactgtgtttccagttgtcttgatattgaaaagtgtaataaacttcatgctcacctattggagatttgggaaggttgaaaataaacttcctaatttttatttgtatgtgttctcttctatgtttaactctagaataactatcttcctgtaacgattaagttaaaatattctttaactagaattgaaataaattgttcactaaggagggggctgcttgtgctaaaaaa

SEQ ID NO: 31594 - DNA, 631 bp, Homo sapiens
  source 1..631: mol_type = unassigned DNA
gtctacaaactacccaaggcatagcaatggcattatcactggaagaattcgtccactcccttgacctcaggaccctacccagggttctagaaatccaggcaggcatctatcttgaaggctctatttatgaaatgtttggaaatgaatgctgtttttcaacaggagaagtgattaaaattactggtctcaaagttaagaagatcatagctgaaatttgtgagcagattgaaggttgtgagtctctacagccatttgaactgcctatgaattttccagttcgaaaagatataatccgcatcctccccagtctagatgtcgaagtcaaagacatcactgattcttacgatgctaactggtttcttcagctgttatcaacagaagatctttttgaaatgactagtaaagagttccccatagtgactgaagtcatagaagcacctgaaggaaaccacctgccccaaagcattttacagcctgggaaaaccattgtgatccacaaaaagtaccaggcatcaagaatcttagcttcagaaattagaagcaattttcctaaaagacacttcttgatccccactagctataaaggcaagttcaagcggcgaccgagggagttcccaacggcctatgacct

SEQ ID NO: 31595 - DNA, 3830 bp, Homo sapiens
  source 1..3830: mol_type = unassigned DNA
ttcacagataaagtgttctgcagactcaaggtttatacttacaattacgagatttatatttgcattagtctctttggctggtgggtaggggtgagaggctcttcctggatcccttattttctacaggagaggaggaaaacacctgggatgctccagtgctcttacgcagataatgatcattaacatcagcctctctgatcaaaggctctatttatgaaatgtttggaaatgaatgctgtttttcaacaggagaagtgattaaaattactggtctcaaagttaagaagatcatagctgaaatttgtgagcagattgaaggttgtgagtctctacagccatttgaactgcctatgaattttccaggtctttttaagattgtggctgataaaactccataccttactatggaagaaatcacaaggaccattcatattggaccaagtagactagggcatccttgcttctatcatcagaaggatataaaactagagaacctcatcataaagcagggtgagcaaatcatgctcaactcagttgaagagattgatggagaaataatggtgagctgtgcagtagcaaggaatcatcaaactcactcatttaatttgcctttgtcacaagaaggagaattctacgagtgtgaagatgaacgtatttacactctaaaggagattgttgaatggaagattcctaagaacagaacaagaactgtaaaccttacagatttttcaaataagtgggactcaacgaatccatttcctaaagacttttatggtaccctgattctcaagcctgtttatgaaattcaaggtgtgatgaaatttcgaaaagatataatccgcatcctccccagtctagatgtcgaagtcaaagacatcactgattcttacgatgctaactggtttcttcagctgttatcaacagaagatctttttgaaatgactagtaaagagttccccatagtgactgaagtcatagaagcacctgaaggaaaccacctgccccaaagcattttacagcctgggaaaaccattgtgatccacaaaaagtaccaggcatcaagaatcttagcttcagaaattagaagcaattttcctaaaagacacttcttgatccccactagctataaaggcaagttcaagcggcgaccgagggagttcccaacggcctatgacctagagatcgctaagagtgaaaaggagcctcttcacgtggtggccaccaaagcgtttcattcccctcatgacaagctgtcatccgtatctgttggggaccagtttctggtgcatcagtcagagacgactgaagtcctctgtgagggaataaaaaaagtggtgaatgttctggcctgtgaaaaaatcctcaaaaagtcctatgaggctgcgctgctccctttgtacatggaaggaggttttgtagaggtgattcatgataagaaacagtacccgatttctgagctctgtaaacagttccgtttgcccttcaatgtgaaggtgtctgtcagggatctttccattgaagaggacgtgttggctgccacaccaggactgcagttggaggaggacattacagactcttacctactcataagtgactttgccaaccccacggagtgctgggaaattcctgtgggccgcttgaatatgactgttcagttagttagtaatttctctagggatgcagaaccatttctagtcaggactctggtagaagagatcactgaagagcaatattacatgatgcggagatatgaaagctcagcctcacatcccccacctcgccctccgaaacacccctcagtagaggaaacaaagttaaccctgctaaccttagcagaagaaaggacggtagacctgcccaagtctcccaagcgtcatcacgtagacataaccaagaaacttcacccaaatcaagctggcctggattcaaaagtactgattggtagtcagaatgatttggtggatgaagagaaagaaaggagcaaccgtggggccacagcaatagcagaaacattcaaaaatgaaaaacatcaaaaataacaagatgtgacagaagccacttaggcagcaaacataaatgttgcagtgaaaaaagaagctagccttctagctgaaaaacgagtattccccaatggactccagaagaaacttgattcatcgctgcaaaggaaagaacaaccttaaaacttttaacagataaaacttacagaaacctatgatatagaattcatatagtctattctgttgtgtctaaatctgtaggcattgtgttgttgttctttaggacgtatttatttaacttgcacattttttcagattcttatttctactaccaacaactaagtaattgggaaataattctgtatttcagtttctgagtaaaaccagtctgaaataggataaaagccaccaaatattttcttttttttccagaatttgttttgccattttttagtgctatcatcattcctaacaagactaacttacagaaaaataattatatctgactgatttaaaatgttcaggtttcttatccaaatcccttggaactatggaaaggagtttgatttcacattcacagtgtatttacaaaatacgctgtgtcataaatatgtttgaattccaacagccaaagccattgagagtcataggagttttccataaccttctcttctatgacccaacaacaagctcatgactgaaatttcaccagatttctgagacgatgtcttaatattctatgtgctatgtaccagataattctttagatgaatgtttcttaggattgtaggaaaattatctagttaatcataatatttgatggaaagaaaaagacaataaaattgtaatataataaatttggctgacaagaaaccaaagtgattcttaattagtatacatcagaatgatgctcttatagttgtaccatctataaaaattactttaagggctctcacattttaataatttatcttattatgtattaagtatacaggaacaatattatttttcctttaacaaaatgaagagacaggctatctggttaatgttacataggaatttaatagtaatgcttgaacttcatccatagatcatactctgtacaaaatttgttagctaacatcctatctcataattattttatgttttgtggagaaatttgttgattttgtaccaaagtgtttctgaagacaataaattgtgagtcaactttagaacaaaaaaaattagagttttttcaatgtttatattctgattaagcttactttaccttacattttttctaagtaacaatgaatcctgatttctagtgtcctaaaaattgcttagtgatttgattgtggtaatatcatttcttatctacaatgtctaaagttttatgggacagtttttcttttatttattttgcctgtttgtgcagataagaacagaaacttttctaagacccacatttggttattgaaggccacagcgaatcttaacctaacagccttgacaaactgcaccataggtgtttttagactcatataatttgttatttttcaaacaatagtgaataattaatatttttgtttggaatttgagaacaattaaatttgtacttttagtaactaccattctttgattagaaaattaagagaatgcatatcttactttggttgtaaattatcaagggctttctaatagaaatcatatataacatttctaaatataagtcctttcacatactgtgtttccagttgtcttgatattgaaaagtgtaataaacttcatgctcacctattggagatttgggaaggttgaaaataaacttcctaatttttatttgta

SEQ ID NO: 31596 - DNA, 3983 bp, Homo sapiens
  source 1..3983: mol_type = unassigned DNA
agctactccaccccactctggctgtagtgtgacattcctgcctgcctgaggaagaaatggtgagcaggggctgcaattgcagacaagtgtcacccagaagccacaagtttctgtgagcaccaggtctacaaactacccaaggcatagcaatggcattatcactggaagaattcgtccactcccttgacctcaggaccctacccagggttctagaaatccaggcaggcatctatcttgaaggctctatttatgaaatgtttggaaatgaatgctgtttttcaacaggagaagtgattaaaattactggtctcaaagttaagaagatcatagctgaaatttgtgagcagattgaaggttgtgagtctctacagccatttgaactgcctatgaattttccaggtctttttaagattgtggctgataaaactccataccttactatggaagaaatcacaaggaccattcatattggaccaagtagactagggcatccttgcttctatcatcagaaggatataaaactagagaacctcatcataaagcagggtgagcaaatcatgctcaactcagttgaagagattgatggagaaataatggtgagctgtgcagtagcaaggaatcatcaaactcactcatttaatttgcctttgtcacaagaaggagaattctacgagtgtgaagatgaacgtatttacactctaaaggagattgttgaatggaagattcctaagaacagaacaagaactgtaaaccttacagatttttcaaataagtgggactcaacgaatccatttcctaaagacttttatggtaccctgattctcaagcctgtttatgaaattcaaggtgtgatgaaatttcgaaaagatataatccgcatcctccccagtctagatgtcgaagtcaaagacatcactgattcttacgatgctaactggtttcttcagctgttatcaacagaagatctttttgaaatgactagtaaagagttccccatagtgactgaagtcatagaagcacctgaaggaaaccacctgccccaaagcattttacagcctgggaaaaccattgtgatccacaaaaagtaccaggcatcaagaatcttagcttcagaaattagaagcaattttcctaaaagacacttcttgatccccactagctataaaggcaagttcaagcggcgaccgagggagttcccaacggcctatgacctagagatcgctaagagtgaaaaggagcctcttcacgtggtggccaccaaagcgtttcattcccctcatgacaagctgtcatccgtatctgttggggaccagtttctggtgcatcagtcagagacgactgaagtcctctgtgagggaataaaaaaagtggtgaatgttctggcctgtgaaaaaatcctcaaaaagtcctatgaggctgcgctgctccctttgtacatggaaggaggttttgtagaggtgattcatgataagaaacagtacccgatttctgagctctgtaaacagttccgtttgcccttcaatgtgaaggtgtctgtcagggatctttccattgaagaggacgtgttggctgccacaccaggactgcagttggaggaggacattacagactcttacctactcataagtgactttgccaaccccacggagtgctgggaaattcctgtgggccgcttgaatatgactgttcagttagttagtaatttctctagggatgcagaaccatttctagtcaggactctggtagaagagatcactgaagagcaatattacatgatgcggagatatgaaagctcagcctcacatcccccacctcgccctccgaaacacccctcagtagaggaaacaaagttaaccctgctaaccttagcagaagaaaggacggtagacctgcccaagtctcccaaggctggagtgcaatggcgtgatcttggctcgctgcaacctctgcctcccgggttcaagcaattctctgcctcagcctcccacgtagctgggattacaggcaccccccaccacgtccagcgtcatcacgtagacataaccaagaaacttcacccaaatcaagctggcctggattcaaaagtactgattggtagtcagaatgatttggtggatgaagagaaagaaaggagcaaccgtggggccacagcaatagcagaaacattcaaaaatgaaaaacatcaaaaataacaagatgtgacagaagccacttaggcagcaaacataaatgttgcagtgaaaaaagaagctagccttctagctgaaaaacgagtattccccaatggactccagaagaaacttgattcatcgctgcaaaggaaagaacaaccttaaaacttttaacagataaaacttacagaaacctatgatatagaattcatatagtctattctgttgtgtctaaatctgtaggcattgtgttgttgttctttaggacgtatttatttaacttgcacattttttcagattcttatttctactaccaacaactaagtaattgggaaataattctgtatttcagtttctgagtaaaaccagtctgaaataggataaaagccaccaaatattttcttttttttccagaatttgttttgccattttttagtgctatcatcattcctaacaagactaacttacagaaaaataattatatctgactgatttaaaatgttcaggtttcttatccaaatcccttggaactatggaaaggagtttgatttcacattcacagtgtatttacaaaatacgctgtgtcataaatatgtttgaattccaacagccaaagccattgagagtcataggagttttccataaccttctcttctatgacccaacaacaagctcatgactgaaatttcaccagatttctgagacgatgtcttaatattctatgtgctatgtaccagataattctttagatgaatgtttcttaggattgtaggaaaattatctagttaatcataatatttgatggaaagaaaaagacaataaaattgtaatataataaatttggctgacaagaaaccaaagtgattcttaattagtatacatcagaatgatgctcttatagttgtaccatctataaaaattactttaagggctctcacattttaataatttatcttattatgtattaagtatacaggaacaatattatttttcctttaacaaaatgaagagacaggctatctggttaatgttacataggaatttaatagtaatgcttgaacttcatccatagatcatactctgtacaaaatttgttagctaacatcctatctcataattattttatgttttgtggagaaatttgttgattttgtaccaaagtgtttctgaagacaataaattgtgagtcaactttagaacaaaaaaaattagagttttttcaatgtttatattctgattaagcttactttaccttacattttttctaagtaacaatgaatcctgatttctagtgtcctaaaaattgcttagtgatttgattgtggtaatatcatttcttatctacaatgtctaaagttttatgggacagtttttcttttatttattttgcctgtttgtgcagataagaacagaaacttttctaagacccacatttggttattgaaggccacagcgaatcttaacctaacagccttgacaaactgcaccataggtgtttttagactcatataatttgttatttttcaaacaatagtgaataattaatatttttgtttggaatttgagaacaattaaatttgtacttttagtaactaccattctttgattagaaaattaagagaatgcatatcttactttggttgtaaattatcaagggctttctaatagaaatcatatataacatttctaaatataagtcctttcacatactgtgtttccagttgtcttgatattgaaaagtgtaataaacttcatgctcacctattggagatttgggaaggttgaaaataaacttcctaatttttatttgta

SEQ ID NO: 31597 - DNA, 4131 bp, Homo sapiens
  source 1..4131: mol_type = unassigned DNA
ggtgcgcgccgcggcttgggggagagttgagcgcttttcccccctcttttttttttttttcctcttcttcttaaacaaaccacaaacggatgtgagggaaggaaggtgtttcttttactcctgagcccagacacctcactctgttccgtctaagcttgttttgctgaacacttttttttaaaaaaggaaaaagaaaaggagttgcttgatgtgagagtgaaatggacgtaagattttatccacctccagcccagcccgccgctgcgcccgacgctccctgtctgggaccttctccctgcctggacccctactattgcaacaagtttgacggtgagaacatgtatatgagcatgacagagccgagccaggactatgtgccagccagccagtcctaccctggtccaagcctggaaagtgaagacttcaacattccaccaattactcctccttccctcccagaccactcgctggtgcacctgaatgaagttgagtctggttaccattctctgtgtcaccccatgaaccataatggcctgctaccatttcatccacaaaacatggacctccctgaaatcacagtctccaatatgctgggccaggatggaacactgctttctaattccatttctgtgatgccagatatacgaaacccagaaggaactcagtacagttcccatcctcagatggcagccatgagaccaaggggccagcctgcagacatcaggcagcagccaggaatgatgccacatggccagctgactaccattaaccagtcacagctaagtgctcaacttggtttgaatatgggaggaagcaatgttccccacaactcaccatctccacctggaagcaagtctgcaactccttcaccatccagttcagtgcatgaagatgaaggcgatgatacctctaagatcaatggtggagagaagcggcctgcctctgatatggggaaaaaaccaaaaactcccaaaaagaagaagaagaaggatcccaatgagccccagaagcctgtgtctgcctatgcgttattctttcgtgatactcaggccgccatcaagggccaaaatccaaacgctacctttggcgaagtctctaaaattgtggcttcaatgtgggacggtttaggagaagagcaaaaacaggtctataaaaagaaaaccgaggctgcgaagaaggagtacctgaagcaactcgcagcatacagagccagccttgtatccaagagctacagtgaacctgttgacgtgaagacatctcaacctcctcagctgatcaattcgaagccgtcggtgttccatgggcccagccaggcccactcggccctgtacctaagttcccactatcaccaacaaccgggaatgaatcctcacctaactgccatgcatcctagtctccccaggaacatagcccccaagccgaataaccaaatgccagtgactgtctctatagcaaacatggctgtgtcccctcctcctcccctccagatcagcccgcctcttcaccagcatctcaacatgcagcagcaccagccgctcaccatgcagcagccccttgggaaccagctccccatgcaggtccagtctgccttacactcacccaccatgcagcaaggatttactcttcaacccgactatcagactattatcaatcctacatctacagctgcacaagttgtcacccaggcaatggagtatgtgcgttcggggtgcagaaatcctcccccacaaccggtggactggaataacgactactgcagtagtgggggcatgcagagggacaaagcactgtaccttacttgagaatctgaacacctcttctttccactgaggaattcagggaagtgttttcaccatggattgctttgtacagtcaaggcagttctccattttattagaaaatacaagttgctaagcacttaggaccatttgagcttgtgggtcacccactctggaagaaatagtcatgcttctttattatttttttaatcctttatggacattgtttttcttcttccctgaaggaaatttggaccattcagattttatgttggttttttgctgtgaagtgctgcgctctagtaactgccttagcaactgtagatgtctcggataaaagtcctggattttccattggttttcataatgggtgtttatatgaaactactaaagactttttaaatggcttgatgtagcagtcatagcaagtttgtaaatagcatctatgttacactctcctagagtataaaatgtgaatgtttttgtagctaaattgtaattgaaactggctcattccagtttattgatttcacaataggggttaaattggcaaacattcatatttttacttcatttttaaaacaactgactgatagttctatattttcaaaatatttgaaaataaaaagtattcccaagtgattttaatttaaaaacaaattggctttgtctcattgatcagacaaaaagaaactagtattaagggaagcgcaaacacatttattttgtactgcagaaaaattgcttttttgtatcactttttgtgtaatggttagtaaatgtcatttaagtccttttatgtataaaactgccaaatgcttacctggtattttattagatgcagaaacagattggaaacagctaaattacaacttttacatatggctctgtcttattgtttcttcatactgtgtctgtatttaatctttttttatggaacctgttgcgcctatttatgaaataataaatataggtgtttgtaagtaaatttgttagtatttgaaagaggtttctttgatgttttaacttttgctggcaaaaaaaaattcacgcttggtgtgaatactttattatttagtttttacagtaacatgaataaagccaaacctgcttttcatttagcagcaaattaaagtaaccagtccttatttctgcatttctttggttgatgcaaacaaaaaactattatatttaagaactttatttcttcatacgacataacagaattgccctccaagtcacacaagctccaagactaaacaaacagacaggtcctctgtcttaaaaaggttacttcttggttctcagctggttctagtcaattctgaaccaccaccccccgccccccgcaaaaaagtaaaagtcaaaccaaacttcctcaagctgcatgcttttcacaaaatccagaaagcatttaagaattgaactaggggctggaagaagtgaaagggaagcatctaaaaatgaaaggtgagtaaccagatagcaaaagaaaagggaaagccatccaaatttgaaagctgttgatagaaattgagattcttgctgtcttttgtgcctctacaagctactactcattccagaattcctgggtcttccaagaggattcttaaggtaccagagatttgctagggaaccaaaagtgcttgagaatctgcctgagggcttgcatagctttcacattaaaaaaagaaaaagctagcagatttactcctttttaggggatcatatcaagaaagttagtctggttggaaaccaagagaatggctgatgtctctttcttggaatatgtgaaataaatttagcagtttaactaaatacaaatatatgcattgtgtaatccactcagaattaaacagacaaaaggtatgcttgctttggaatgattttaggcattgtacaaccttgaatcacttgagcatgtaataactaataaataatgcagatccatgtgattattaaaatgactgtagctgagagctctaattttcctgtcttgaaactgtataagaactcatgtgattaagttcacagtttattgtttgtctgtttagtattttagaaatataccagcactactaattaactaatgtcttttatttattatattatgataaagtaaaaatttcacttgcattaagtctaaactgagaaggtaattactgggaggagaatgagcagctttgactttgacaggcggtttgtgcaggaaagcacagtgccgtgttgtttacagcttttctagagcagctgtgcgaccagggtagagagtgttgaaattcaataccaaatacagtaaaaacaaatgtaaataaaagaaaacacatcatcaataaaactgttattatgcgtg

SEQ ID NO: 31598 - DNA, 4107 bp, Homo sapiens
  source 1..4107: mol_type = unassigned DNA
ggtgcgcgccgcggcttgggggagagttgagcgcttttcccccctcttttttttttttttcctcttcttcttaaacaaaccacaaacggatgtgagggaaggaaggtgtttcttttactcctgagcccagacacctcactctgttccgtctaagcttgttttgctgaacacttttttttaaaaaaggaaaaagaaaaggagttgcttgatgtgagagtgaaatggacgtaagattttatccacctccagcccagcccgccgctgcgcccgacgctccctgtctgggaccttctccctgcctggacccctactattgcaacaagtttgacggtgagaacatgtatatgagcatgacagagccgagccaggactatgtgccagccagccagtcctaccctggtccaagcctggaaagtgaagacttcaacattccaccaattactcctccttccctcccagaccactcgctggtgcacctgaatgaagttgagtctggttaccattctctgtgtcaccccatgaaccataatggcctgctaccatttcatccacaaaacatggacctccctgaaatcacagtctccaatatgctgggccaggatggaacactgctttctaattccatttctgtgatgccagatatacgaaacccagaaggaactcagtacagttcccatcctcagatggcagccatgagaccaaggggccagcctgcagacatcaggcagcagccaggaatgatgccacatggccagctgactaccattaaccagtcacagctaagtgctcaacttggtttgaatatgggaggaagcaatgttccccacaactcaccatctccacctggaagcaagtctgcaactccttcaccatccagttcagtgcatgaagatgaaggcgatgatacctctaagatcaatggtggagagaagcggcctgcctctgatatggggaaaaaaccaaaaactcccaaaaagaagaagaagaaggatcccaatgagccccagaagcctgtgtctgcctatgcgttattctttcgtgatactcaggccgccatcaagggccaaaatccaaacgctacctttggcgaagtctctaaaattgtggcttcaatgtgggacggtttaggagaagagcaaaaacaggtctataaaaagaaaaccgaggctgcgaagaaggagtacctgaagcaactcgcagcatacagagccagccttgtatccaagagctacagtgaacctgttgacgtgaagacatctcaacctcctcagctgatcaattcgaagccgtcggtgttccatgggcccagccaggcccactatcaccaacaaccgggaatgaatcctcacctaactgccatgcatcctagtctccccaggaacatagcccccaagccgaataaccaaatgccagtgactgtctctatagcaaacatggctgtgtcccctcctcctcccctccagatcagcccgcctcttcaccagcatctcaacatgcagcagcaccagccgctcaccatgcagcagccccttgggaaccagctccccatgcaggtccagtctgccttacactcacccaccatgcagcaaggatttactcttcaacccgactatcagactattatcaatcctacatctacagctgcacaagttgtcacccaggcaatggagtatgtgcgttcggggtgcagaaatcctcccccacaaccggtggactggaataacgactactgcagtagtgggggcatgcagagggacaaagcactgtaccttacttgagaatctgaacacctcttctttccactgaggaattcagggaagtgttttcaccatggattgctttgtacagtcaaggcagttctccattttattagaaaatacaagttgctaagcacttaggaccatttgagcttgtgggtcacccactctggaagaaatagtcatgcttctttattatttttttaatcctttatggacattgtttttcttcttccctgaaggaaatttggaccattcagattttatgttggttttttgctgtgaagtgctgcgctctagtaactgccttagcaactgtagatgtctcggataaaagtcctggattttccattggttttcataatgggtgtttatatgaaactactaaagactttttaaatggcttgatgtagcagtcatagcaagtttgtaaatagcatctatgttacactctcctagagtataaaatgtgaatgtttttgtagctaaattgtaattgaaactggctcattccagtttattgatttcacaataggggttaaattggcaaacattcatatttttacttcatttttaaaacaactgactgatagttctatattttcaaaatatttgaaaataaaaagtattcccaagtgattttaatttaaaaacaaattggctttgtctcattgatcagacaaaaagaaactagtattaagggaagcgcaaacacatttattttgtactgcagaaaaattgcttttttgtatcactttttgtgtaatggttagtaaatgtcatttaagtccttttatgtataaaactgccaaatgcttacctggtattttattagatgcagaaacagattggaaacagctaaattacaacttttacatatggctctgtcttattgtttcttcatactgtgtctgtatttaatctttttttatggaacctgttgcgcctatttatgaaataataaatataggtgtttgtaagtaaatttgttagtatttgaaagaggtttctttgatgttttaacttttgctggcaaaaaaaaattcacgcttggtgtgaatactttattatttagtttttacagtaacatgaataaagccaaacctgcttttcatttagcagcaaattaaagtaaccagtccttatttctgcatttctttggttgatgcaaacaaaaaactattatatttaagaactttatttcttcatacgacataacagaattgccctccaagtcacacaagctccaagactaaacaaacagacaggtcctctgtcttaaaaaggttacttcttggttctcagctggttctagtcaattctgaaccaccaccccccgccccccgcaaaaaagtaaaagtcaaaccaaacttcctcaagctgcatgcttttcacaaaatccagaaagcatttaagaattgaactaggggctggaagaagtgaaagggaagcatctaaaaatgaaaggtgagtaaccagatagcaaaagaaaagggaaagccatccaaatttgaaagctgttgatagaaattgagattcttgctgtcttttgtgcctctacaagctactactcattccagaattcctgggtcttccaagaggattcttaaggtaccagagatttgctagggaaccaaaagtgcttgagaatctgcctgagggcttgcatagctttcacattaaaaaaagaaaaagctagcagatttactcctttttaggggatcatatcaagaaagttagtctggttggaaaccaagagaatggctgatgtctctttcttggaatatgtgaaataaatttagcagtttaactaaatacaaatatatgcattgtgtaatccactcagaattaaacagacaaaaggtatgcttgctttggaatgattttaggcattgtacaaccttgaatcacttgagcatgtaataactaataaataatgcagatccatgtgattattaaaatgactgtagctgagagctctaattttcctgtcttgaaactgtataagaactcatgtgattaagttcacagtttattgtttgtctgtttagtattttagaaatataccagcactactaattaactaatgtcttttatttattatattatgataaagtaaaaatttcacttgcattaagtctaaactgagaaggtaattactgggaggagaatgagcagctttgactttgacaggcggtttgtgcaggaaagcacagtgccgtgttgtttacagcttttctagagcagctgtgcgaccagggtagagagtgttgaaattcaataccaaatacagtaaaaacaaatgtaaataaaagaaaacacatcatcaataaaactgttattatgcgtg

SEQ ID NO: 31599 - DNA, 820 bp, Homo sapiens
  source 1..820: mol_type = unassigned DNA
ttcgcagatccccgagatgccggagttcctggaagacccctcggtcctgacaaaagacaagttgaagagtgagttggtcgccaacaatgtgacgctgccggccggggagcagcgcaaagacgtgtacgtccagctctacctgcagcacctcacggctcgcaaccggccgccgctccccgccggcaccaacagcaaggggcccccggacttctccagtgacgaagagcgcgagcccaccccggtcctcggctctggggccgccgccgcgggccggagccgagcagccgtcggcaggaaagccacaaaaaaaactgataaacccagacaagaagataaagatgatctagatgtaacagagctcactaatgaagatcttttggatcagcttgtgaaatacggagtgaatcctggtcctattgtgggaacaaccaggaagctatatgagaaaaagcttttgaaactgagggaacaaggaacagaatcaagatcttctactcctctgccaacaatttcttcttcagcagaaaatacaaggcagaatggaagtaatgattctgacagatacagtgacaatgaagaagactctaaaatagagctcaagcttgagaagagagaaccactaaagggcagagcaaagactccagtaacactcaagcaaagaagagttgagcacaatcaggtatctttagttttattaccaccgtgtacaggtataaataacctcctgacaacactaatccatgttttagcctttaatggttgacacccagattccagcacgctcaataaacttaattctgttgttaaatgatactaaaaa

SEQ ID NO: 31600 - DNA, 3615 bp, Homo sapiens
  source 1..3615: mol_type = unassigned DNA
gggttggtgcgagcttccagcttggccgcagttggttcgtagttcggctctggggtcttttgtgtccgggtctggcttggctttgtgtccgcgagtttttgttccgctccgcagcgctcttcccgggcaggagccgtgaggctcggaggcggcagcgcggtccccggccaggagcaagcgcgccggcgtgagcggcggcggcaaaggctgtggggagggggcttcgcagatccccgagatgccggagttcctggaagacccctcggtcctgacaaaagacaagttgaagagtgagttggtcgccaacaatgtgacgctgccggccggggagcagcgcaaagacgtgtacgtccagctctacctgcagcacctcacggctcgcaaccggccgccgctccccgccggcaccaacagcaaggggcccccggacttctccagtgacgaagagcgcgagcccaccccggtcctcggctctggggccgccgccgcgggccggagccgagcagccgtcggcaggaaagccacaaaaaaaactgataaacccagacaagaagataaagatgatctagatgtaacagagctcactaatgaagatcttttggatcagcttgtgaaatacggagtgaatcctggtcctattgtgggaacaaccaggaagctatatgagaaaaagcttttgaaactgagggaacaaggaacagaatcaagatcttctactcctctgccaacaatttcttcttcagcagaaaatacaaggcagaatggaagtaatgattctgacagatacagtgacaatgaagaaggaaagaagaaagaacacaagaaagtgaagtccactagggatattgttcctttttctgaacttggaactactccctctggtggtggattttttcagggtatttcttttcctgaaatctccacccgtcctcctttgggcagtaccgaactacaggcagctaagaaagtacatacttctaagggagacctacctagggagcctcttgttgccacaaacttgcctggcaggggacagttgcagaagttagcctctgaaaggaatttgtttatttcatgcaagtctagccatgataggtgtttagagaaaagttcttcgtcatcttctcagcctgaacacagtgccatgttggtctctactgcagcttctccttcactgattaaagaaaccaccactggttactataaagacatagtagaaaatatttgcggtagagagaaaagtggaattcaaccattatgtcctgagaggtcccatatttcagatcaatcgcctctctccagtaaaaggaaagcactagaagagtctgagagctcacaactaatttctccgccacttgcccaggcaatcagagattatgtcaattctctgttggtccagggtggggtaggtagtttgcctggaacttctaactctatgcccccactggatgtagaaaacatacagaagagaattgatcagtctaagtttcaagaaactgaattcctgtctcctccaagaaaagtccctagactgagtgagaagtcagtggaggaaagggattcaggttcctttgtggcatttcagaacatacctggatccgaactgatgtcttcttttgccaaaactgttgtctctcattcactcactaccttaggtctagaagtggctaagcaatcacagcatgataaaatagatgcctcagaactatcttttcccttccatgaatctattttaaaagtaattgaagaagaatggcagcaagttgacaggcagctgccttcactggcatgcaaatatccagtttcttccagggaggcaacacagatattatcagttccaaaagtagatgatgaaatcctagggtttatttctgaagccactccactaggaggtattcaagcagcctccactgagtcttgcaatcagcagttggacttagcactctgtagagcatatgaagctgcagcatcagcattgcagattgcaactcacactgcctttgtagctaaggctatgcaggcagacattagtcaagctgcacagattcttagctcagatcctagtcgtacccaccaagcgcttgggattctgagcaaaacatatgatgcagcctcatatatttgtgaagctgcatttgatgaagtgaagatggctgcccataccatgggaaatgccactgtaggtcgtcgatacctctggctgaaggattgcaaaattaatttagcttctaagaataagctggcttccactccctttaaaggtggaacattatttggaggagaagtatgcaaagtaattaaaaagcgtggaaataaacactagtaaaattaaggacaaaaagacatctatcttatctttcaggtactttatgccaacattttcttttctgttaaggttgttttagtttccagatagggctaattacaaaatgttaagcttctacccatcaaattacagtataaaagtaattgcctgtgtagaactacttgtcttttctaaagatttgcgtagataggaagcctggtacaaacaatttaacgctttctagatcacatattagtctctaagttgttttctgtttcctgctttacttatgtttttacaattctccaaaactaagaaaattctaattaggatataaggagtatttactgttcaatagaataatatgcatcctcctttatacctaggacagaattaaacatttgttacacattcagaacagtgatgttgttctttttgatacttttatctcagtatcttttcacgttccataacttgtccatatttttgctcatattttcttacttttctttgttatttattcatgtctgcaacatcaatcatagtagtctagatcaatgcaactcaaagcaccagtctacaaactgttacttatccacaggcaagataagcatgcacaagaatttaaatctagagatactttttaggtcaatgacaggatttgattttttagcaaaattttattaatagctaaagcaatgtattgatttacactctgatgcaagtaatttatctcttcattgactggtagcaaccaattcatggaccagtaccatggaccacactttgagaaacacttctttggataataatagatatcctgggatagtgcatgttcaccatctattttgtcagataatggggccttttaaaaaataatactttgctttcatgatatattgtattttgtggaaagttaagtttagcaatatagactctaaaagcaaattaaatttttttaagccataagaaattatactatatcccagtatctgtatgtctgtataaagcagtgtattatcatgttttcatttctgtgattgtaagttaagagtcttaactgcagaggtattgtggaaagtagtagccttaagcataataaaatatggtctcttgggtactccctctggccattaccacattcttagattatatgtgtccatctttgcagctttctgagagtaattttatttgttgtcttctgaaatgtacatgtatacatgtacctactgagtgctatgtgatttttaaaaatgtattactgtagaatgcttctgcaaattcaataaagttgttaaatttgaacagtg

SEQ ID NO: 31601 - DNA, 2465 bp, Homo sapiens
  source 1..2465: mol_type = unassigned DNA
gtgtgtgggctggggttggtgcgagcttccagcttggccgcagttggttcgtagttcggctctggggtcttttgtgtccgggtctggcttggctttgtgtccgcgagtttttgttccgctccgcagcgctcttcccgggcaggagccgtgaggctcggaggcggcagcgcggtccccggccaggagcaagcgcgccggcgtgagcggcggcggcaaaggctgtggggagggggcttcgcagatccccgagatgccggagttcctggaagacccctcggtcctgacaaaagacaagttgaagagtgagttggtcgccaacaatgtgacgctgccggccggggagcagcgcaaagacgtgtacgtccagctctacctgcagcacctcacggctcgcaaccggccgccgctccccgccggcaccaacagcaaggggcccccggacttctccagtgacgaagagcgcgagcccaccccggtcctcggctctggggccgccgccgcgggccggagccgagcagccgtcggcaggaaagccacaaaaaaaactgataaacccagacaagaagataaagatgatctagatgtaacagagctcactaatgaagatcttttggatcagcttgtgaaatacggagtgaatcctggtcctattgtgggaacaaccaggaagctatatgagaaaaagcttttgaaactgagggaacaaggaacagaatcaagatcttctactcctctgccaacaatttcttcttcagcagaaaatacaaggcagaatggaagtaatgattctgacagatacagtgacaatgaagaagactctaaaatagagctcaagcttgagaagagagaaccactaaagggcagagcaaagactccagtaacactcaagcaaagaagagttgagcacaatcaggtggaaacttcagaacattttcgtatagatggtccagtaatttcagagagtactcccatagctgaaactataatggcttcaagcaacgaatccttagttgtcaatagggtgactggaaatttcaagcatgcatctcctattctgccaatcactgaattctcagacatacccagaagagcaccaaagaaaccattgacaagagctgaagtgggagaaaaaacagaggaaagaagagtagaaagggatattcttaaggaaatgttcccctatgaagcatctacaccaacaggaattagtgctagttgccgcagaccaatcaaaggggctgcaggccggccattagaactcagtgatttcaggatggaggagtctttttcatctaaatatgttcctaagtatgttcccttggcagatgtcaagtcagaaaagacaaaaaagggacgctccattcccgtatggataaaaattttgctgtttgttgttgtggcagtttttttgtttttggtctatcaagctatggaaaccaaccaagtaaatcccttctctaattttcttcatgttgaccctagaaaatccaactgaatggtatctctttggcacgttcaacttggtctcctattttcaataactgttgaaaaacatttgtgtacacttgttgactccaagaactaaaaataatgtgatttcgcctcaataaatgtagtatttcattgaaaagcaaacaaaatatatataaatggacttcattaaaatgtttttgaactttggactagtaggagatcactttgtgccatatgaataatcttttttagctctggaactttttgtaggctttatttttttaatgtgggcatcttatttcatttttgaaaaaatgtatatgttttttgtgtatttgggaaacgaagggtgaaacatggtagtataatgtgaagctacacatttaaatacttagaattcttacagaaaagattttaagaattattctctgctgaataaaaactgcaaatatgtgaaacataatgaaattcagtaagaggaaaagtaacttggttgtactttttgtaactgcaacaaagtttgatggtgtttatgaggaaaagtacagcaataatctcttctgtaacctttattaatagtaatgttgttgtagccctatcatactcactttttaagacacagtatcatgaaagtcctatttcagtaagacccatttacatacagtagatttttagcagagatcttttagtgtaacatacatattttagagaattgttggctagctgtacatgttttgaaaagctgtttagctagctataaggctataattggaaatttgtattttttatttacagcaaaacatttattcagtcatccagtttgctaccaaaatatgttttagataagtgtgtgtatgtttgtttagaagttagaaattgtaaacactggtcttatgtttcatttggattcattattgcattgtcttgttaccagaaacaaattttgccgagctttttttgccctatatttcccagcataatttgattagaaa

SEQ ID NO: 31602 - DNA, 2374 bp, Homo sapiens
  source 1..2374: mol_type = unassigned DNA
ggttggtgcgagcttccagcttggccgcagttggttcgtagttcggctctggggtcttttgtgtccgggtctggcttggctttgtgtccgcgagtttttgttccgctccgcagcgctcttcccgggcaggagccgtgaggctcggaggcggcagcgcggtccccggccaggagcaagcgcgccggcgtgagcggcggcggcaaaggctgtggggagggggcttcgcagatccccgagatgccggagttcctggaagacccctcggtcctgacaaaagacaagttgaagagtgagttggtcgccaacaatgtgacgctgccggccggggagcagcgcaaagacgtgtacgtccagctctacctgcagcacctcacggctcgcaaccggccgccgctccccgccggcaccaacagcaaggggcccccggacttctccagtgacgaagagcgcgagcccaccccggtcctcggctctggggccgccgccgcgggccggagccgagcagccgtcggcaggaaagccacaaaaaaaactgataaacccagacaagaagataaagatgatctagatgtaacagagctcactaatgaagatcttttggatcagcttgtgaaatacggagtgaatcctggtcctattgtgggaacaaccaggaagctatatgagaaaaagcttttgaaactgagggaacaaggaacagaatcaagatcttctactcctctgccaacaatttcttcttcagcagaaaatacaaggcagaatggaagtaatgattctgacagatacagtgacaatgaagaagactctaaaatagagctcaagcttgagaagagagaaccactaaagggcagagcaaagactccagtaacactcaagcaaagaagagttgagcacaatcaggtgggagaaaaaacagaggaaagaagagtagaaagggatattcttaaggaaatgttcccctatgaagcatctacaccaacaggaattagtgctagttgccgcagaccaatcaaaggggctgcaggccggccattagaactcagtgatttcaggatggaggagtctttttcatctaaatatgttcctaagtatgttcccttggcagatgtcaagtcagaaaagacaaaaaagggacgctccattcccgtatggataaaaattttgctgtttgttgttgtggcagtttttttgtttttggtctatcaagctatggaaaccaaccaagtaaatcccttctctaattttcttcatgttgaccctagaaaatccaactgaatggtatctctttggcacgttcaacttggtctcctattttcaataactgttgaaaaacatttgtgtacacttgttgactccaagaactaaaaataatgtgatttcgcctcaataaatgtagtatttcattgaaaagcaaacaaaatatatataaatggacttcattaaaatgtttttgaactttggactagtaggagatcactttgtgccatatgaataatcttttttagctctggaactttttgtaggctttatttttttaatgtgggcatcttatttcatttttgaaaaaatgtatatgttttttgtgtatttgggaaacgaagggtgaaacatggtagtataatgtgaagctacacatttaaatacttagaattcttacagaaaagattttaagaattattctctgctgaataaaaactgcaaatatgtgaaacataatgaaattcagtaagaggaaaagtaacttggttgtactttttgtaactgcaacaaagtttgatggtgtttatgaggaaaagtacagcaataatctcttctgtaacctttattaatagtaatgttgttgtagccctatcatactcactttttaagacacagtatcatgaaagtcctatttcagtaagacccatttacatacagtagatttttagcagagatcttttagtgtaacatacatattttagagaattgttggctagctgtacatgttttgaaaagctgtttagctagctataaggctataattggaaatttgtattttttatttacagcaaaacatttattcagtcatccagtttgctaccaaaatatgttttagataagtgtgtgtatgtttgtttagaagttagaaattgtaaacactggtcttatgtttcatttggattcattattgcattgtcttgttaccagaaacaaattttgccgagctttttttgccctatatttcccagcataatttgattagaaagtacaaaaagggccaggcgcggtggcttacgcctgtaatcccagcactttgggaggccagggcgggtggatcacgaggtcaagagatcaagaccatcctggccaacatggtgaaaccccgtctctacta

SEQ ID NO: 31603 - DNA, 4242 bp, Homo sapiens
  source 1..4242: mol_type = unassigned DNA
cgcgagccgtctcgccaatcaccgccgcgcttcctcccgtcgcccgccaatggcggcgcgcgttcttggggcgtgggcgaagcaggctgctcgcctcctgcctgtagtgtgtgggctggggttggtgcgagcttccagcttggccgcagttggttcgtagttcggctctggggtcttttgtgtccgggtctggcttggctttgtgtccgcgagtttttgttccgctccgcagcgctcttcccgggcaggagccgtgaggctcggaggcggcagcgcggtccccggccaggagcaagcgcgccggcgtgagcggcggcggcaaaggctgtggggagggggcttcgcagatccccgagatgccggagttcctggaagacccctcggtcctgacaaaagacaagttgaagagtgagttggtcgccaacaatgtgacgctgccggccggggagcagcgcaaagacgtgtacgtccagctctacctgcagcacctcacggctcgcaaccggccgccgctccccgccggcaccaacagcaaggggcccccggacttctccagtgacgaagagcgcgagcccaccccggtcctcggctctggggccgccgccgcgggccggagccgagcagccgtcggcaggaaagccacaaaaaaaactgataaacccagacaagaagataaagatgatctagatgtaacagagctcactaatgaagatcttttggatcagcttgtgaaatacggagtgaatcctggtcctattgtgggaacaaccaggaagctatatgagaaaaagcttttgaaactgagggaacaaggaacagaatcaagatcttctactcctctgccaacaatttcttcttcagcagaaaatacaaggcagaatggaagtaatgattctgacagatacagtgacaatgaagaagactctaaaatagagctcaagcttgagaagagagaaccactaaagggcagagcaaagactccagtaacactcaagcaaagaagagttgagcacaatcagagctattctcaagctggaataactgagactgaatggacaagtggatcttcaaaaggcggacctctgcaggcattaactagggaatctacaagagggtcaagaagaactccaaggaaaagggtggaaacttcagaacattttcgtatagatggtccagtaatttcagagagtactcccatagctgaaactataatggcttcaagcaacgaatccttagttgtcaatagggtgactggaaatttcaagcatgcatctcctattctgccaatcactgaattctcagacatacccagaagagcaccaaagaaaccattgacaagagctgaagtgggagaaaaaacagaggaaagaagagtagaaagggatattcttaaggaaatgttcccctatgaagcatctacaccaacaggaattagtgctagttgccgcagaccaatcaaaggggctgcaggccggccattagaactcagtgatttcaggatggaggagtctttttcatctaaatatgttcctaagtatgttcccttggcagatgtcaagtcagaaaagacaaaaaagggacgctccattcccgtatggataaaaattttgctgtttgttgttgtggcagtttttttgtttttggtctatcaagctatggaaaccaaccaagtaaatcccttctctaattttcttcatgttgaccctagaaaatccaactgaatggtatctctttggcacgttcaacttggtctcctattttcaataactgttgaaaaacatttgtgtacacttgttgactccaagaactaaaaataatgtgatttcgcctcaataaatgtagtatttcattgaaaagcaaacaaaatatatataaatggacttcattaaaatgtttttgaactttggactagtaggagatcactttgtgccatatgaataatcttttttagctctggaactttttgtaggctttatttttttaatgtgggcatcttatttcatttttgaaaaaatgtatatgttttttgtgtatttgggaaacgaagggtgaaacatggtagtataatgtgaagctacacatttaaatacttagaattcttacagaaaagattttaagaattattctctgctgaataaaaactgcaaatatgtgaaacataatgaaattcagtaagaggaaaagtaacttggttgtactttttgtaactgcaacaaagtttgatggtgtttatgaggaaaagtacagcaataatctcttctgtaacctttattaatagtaatgttgttgtagccctatcatactcactttttaagacacagtatcatgaaagtcctatttcagtaagacccatttacatacagtagatttttagcagagatcttttagtgtaacatacatattttagagaattgttggctagctgtacatgttttgaaaagctgtttagctagctataaggctataattggaaatttgtattttttatttacagcaaaacatttattcagtcatccagtttgctaccaaaatatgttttagataagtgtgtgtatgtttgtttagaagttagaaattgtaaacactggtcttatgtttcatttggattcattattgcattgtcttgttaccagaaacaaattttgccgagctttttttgccctatatttcccagcataatttgattagaaagtacaaaaagggccaggcgcggtggcttacgcctgtaatcccagcactttgggaggccagggcgggtggatcacgaggtcaagagatcaagaccatcctggccaacatggtgaaaccccgtctctactaaaaatacaaaaaaattagctgggcgtgatgatgtgcgcctgtagtcctgtctactagggagactgaggcaggagaatcgtttgaacccaggaggcagaggttgcagtgagcagagattacgtcactgcactgtagcctggcgacagagcaagactccatctcaaaaaaaataaaaaagtacaaaaagtacttgcttttatattacatcataagcagtagttaataaagttgtatactcttaagaggtgggcattatgattattttttatttttttattttttatgagatggagtctcactcttgtcacccagactgtagtgcagtggcacgatctgggctcgatgcaacctctgcctcccaggttcaagcaattttcctgcctcggcagagacggggtttcaccatgttggccaggctggtctcgaacccctgacctcaagtgatcagcccacctcagcttcccaaagtgctgggattacaggtgtgatccactgcacccggccggcattatgattttgtgtactcttgaaatggttatctttgtggatgatttttttttttaagctgaaacttacctcatgaataacttgattaaagtagtaggtgattaaaatttcaatagaatcaaatgagacaaaaattttaaactgactcatttgagtttcaactttacagtcattgaccataaagcacactaaaaatgtaagttatttttaaatacatctgaaataaaaatacttactaaaaaggaagaagccgaagatgtatatttagaccagcacacaattttgatttcaattagccttattctaatatttagcttttagatctttcatacacattttcacgtactttgcaattgagaccagaaagacttgtaggtctttctgcagaatgagtgggtccttgcaaagtgagtgggaaacttactcctagatcagaaatgtttgcctctctgagtaaaatgtttctttcagatgagccatagagggggcaccttttactcaacttttctttgttttgaaactttgtttcccatactgttttcagccttttgtttataattagaaattgtgagaagcttcatttagtgtttaaaaatgtggggagataaatcagacttaacatgtatgtaagatcaattcacttaaaagtatggtccaaatagcaaaaataggaccaggtgaaacatgtagtcattttttaaaaacatgtacttggtcttttgtgtgtgtctgttttattccattagaataaatgtgtccttgatgtaaatgcaaagcatttcttcctgattaaattgtagatgtagactttacaatataattcaataataaaaagtaattaacctctagttttgtcgttgcaataaatggttttcagatagcacaaactgtgatttctggataacatttcttatg

SEQ ID NO: 31604 - DNA, 495 bp, Homo sapiens
  source 1..495: mol_type = unassigned DNA
ggcaagaccggcttcggggcgcgcggcggccgctttgtgtgcggggctgcattgtgacgcgggcgatgaagccgcttttcctccgcaaccatgtctgacaaacccgatatggctgagatcgagaaattcgataagtcgaaactgaagaagacagagacgcaagagaaaaatccactgccttccaaagaaacgattgaacaggagaagcaagcaggcgaatcgtaatgaggcgtgcgccgccaatatgcactgtacattccacaagcattgccttcttattttacttcttttagctgtttaactttgtaagatgcaaagaggttggatcaagtttaaatgactgtgctgcccctttcacatcaaagaactactgacaacgaaggccgcgcctgcctttcccatctgtctatctatctggctggcagggaaggaaagaacttgcatgttggtgaaggaagaagtggggtggaagaagtggggtgggacgacagtgaa

SEQ ID NO: 31605 - DNA, 767 bp, Homo sapiens
  source 1..767: mol_type = unassigned DNA
gtgaaggcattccctaaatccgagcccgagtggttctccccgggaaggctactttggggagctggggggatgcgaaacaccctagatactggataatggggtggggaaatcgatgatttaagaacaaaaccgaaaaactggcgttttgccgtgccgctcggaggggacattaaaaaatttcttagtgtttgcccgcaaagcttttcctccgcaaccatgtctgacaaacccgatatggctgagatcgagaaattcgataagtcgaaactgaagaagacagagacgcaagagaaaaatccactgccttccaaagaaacgattgaacaggagaagcaagcaggcgaatcgtaatgaggcgtgcgccgccaatatgcactgtacattccacaagcattgccttcttattttacttcttttagctgtttaactttgtaagatgcaaagaggttggatcaagtttaaatgactgtgctgcccctttcacatcaaagaactactgacaacgaaggccgcgcctgcctttcccatctgtctatctatctggctggcagggaaggaaagaacttgcatgttggtgaaggaagaagtggggtggaagaagtggggtgggacgacagtgaaatctagagtaaaaccaagctggcccaaggtgtcctgcaggctgtaatgcagtttaatcagagtgccatttttttttttgttcaaatgattttaattattggaatgcacaatttttttaatatgcaaataaaaagtttaaaaactta

SEQ ID NO: 31606 - DNA, 1702 bp, Homo sapiens
  source 1..1702: mol_type = unassigned DNA
aactcggtggtggccactgcgcagaccagacttcgctcgtactcgtgcgcctcgcttcggtgagccccagggcccctgcctccttcctcctgccgtcctgcctccgtccccgccctttcatcatccgcgtccctgtgaaggcattccctaaatccgagcccgagtggttctccccgggaaggctactttggggagctggggggatgcgaaacaccctagatactggataatggggtggggaaatcgatgatttaagaacaaaaccgaaaaactggcgttttgccgtgccgctcggaggggacattaaaaaatttcttagtgtttgcccgcaaaggtattgtgcgttgccttggaggctgagatatgggggaatagacaagtcctttgttctgaggttcatcttccgagccccgagcctcctcccagcctcggacggctgcgcgggctgcatctgtgcagcctggcggcggcggggctgtgctatgacatctttacagtccttcttgcagagacatgtgtgccagggatgccgaattgccgggagagcaggcaagaccggcttcggggcgcgcggcggccgctttgtgtgcggggctgcattgtgacgcgggcgatgaagccggtagggcggtggtcggaagctccagccgcggccgccgcctttgtgagaggactagaaagccggatccggcccgcatccttgcggagaggccgcggctaggaaatggaaacgcttttcctacctgggctccattttaggaattcttgccgatttttcccacttgaatttggaagtggctttcctcttctttccttgtcctagccagcctttaattttaaacgctgtaattaacaattcgcagtggtcaatttcctttattctgcaagattcggctttgagaggcatccgccctctttggtccacagcgttttgaaatatggggaggaggggcgcggggggtgtcgcctctttttctgtagaaagaggaagctcgtgagcgcggaacggcagcagtaggagagcgagaagggtttttttcaggctgcgggtcggagggcagaagtgcagttcccagcccagagacagcggggcgggtggctcttcctcacgctcgctcttggcttgctccctgcagcttttcctccgcaaccatgtctgacaaacccgatatggctgagatcgagaaattcgataagtcgaaactgaagaagacagagacgcaagagaaaaatccactgccttccaaagaaacgattgaacaggagaagcaagcaggcgaatcgtaatgaggcgtgcgccgccaatatgcactgtacattccacaagcattgccttcttattttacttcttttagctgtttaactttgtaagatgcaaagaggttggatcaagtttaaatgactgtgctgcccctttcacatcaaagaactactgacaacgaaggccgcgcctgcctttcccatctgtctatctatctggctggcagggaaggaaagaacttgcatgttggtgaaggaagaagtggggtggaagaagtggggtgggacgacagtgaaatctagagtaaaaccaagctggcccaaggtgtcctgcaggctgtaatgcagtttaatcagagtgccatttttttttttgttcaaatgattttaattattggaatgcacaatttttttaatatgcaaataaaaagtttaaaaactt

SEQ ID NO: 31607 - DNA, 628 bp, Homo sapiens
  source 1..628: mol_type = unassigned DNA
acaactcggtggtggccactgcgcagaccagacttcgctcgtactcgtgcgcctcgcttcgcttttcctccgcaaccatgtctgacaaacccgatatggctgagatcgagaaattcgataagtcgaaactgaagaagacagagacgcaagagaaaaatccactgccttccaaagaaacgattgaacaggagaagcaagcaggcgaatcgtaatgaggcgtgcgccgccaatatgcactgtacattccacaagcattgccttcttattttacttcttttagctgtttaactttgtaagatgcaaagaggttggatcaagtttaaatgactgtgctgcccctttcacatcaaagaactactgacaacgaaggccgcgcctgcctttcccatctgtctatctatctggctggcagggaaggaaagaacttgcatgttggtgaaggaagaagtggggtggaagaagtggggtgggacgacagtgaaatctagagtaaaaccaagctggcccaaggtgtcctgcaggctgtaatgcagtttaatcagagtgccatttttttttttgttcaaatgattttaattattggaatgcacaatttttttaatatgcaaataaaaagtttaaaaactta

SEQ ID NO: 31608 - DNA, 1669 bp, Homo sapiens
  source 1..1669: mol_type = unassigned DNA
tgggaacagacagatcctttgttctgaggctcactcatctcccgagccccgagccgtctcccagcctcagacggctctgcgggctgcatctgtgcagcctggcagcggcggcgctgcgctgtgacattttcacagcccttcttgcagaggcatgtgtgctagggatgccgaaatgccgagagcgccggcaggactagcttccgggccgcgctttgtgtgctgggctgcagtgtggcgcgggcgaggaagctggtagggcggttgtcgcaagctccagctgcagcctccgcctacgtgagaagactagaaagcgggcgcaggaccaggcctgcgttgtttgcagagaggccgtggctacaaaatggaagtgcttttgcgacctgggctccattttaggaattcttgcccgattttaaccacttgaacgcggaagtggctttcctattctcttccaagccagcctttaattttaaacgctgtaattaacagttcacaggggtcaaattcctttattccggaacattccactttgagagggatctgtcctctttggtcccctgcgttttcaaatatttgaggaaaggtgtcgcctctttttctgtggaaagaggaagctcatgagcgcgaaacagcaggggacggagggcgagaagggctttctcaggttgcgggtcggagggcagaagcacagttcccagtacagagacccggacaggtggctgtttctcacgctcactttggattgctccctacggcttcctccgcagccatgtctgacaaacctggtatggctgagatcgagaaattcgataagtcgaaactgaagaagacagaaacgcaagagaagaatccattgtcttccaaagaaactatcgaacaggagaggcaagcaggcgaatcttaaacaggcatgtgccaccaatatctactgtacattctacaagcattgctttcttattttacttcttttacttgtttaacttggttagatgcaaacacgttggatgagtttgaaaggactatgctgcccttttgacatcaaagacctgctgacaatggaggccacgcctgcttctcccatcgcctgtctggctggcagggaaggaaaatagcttgaatgttggtgaaagacttagcggagtgggagggcagtgaaatctagagtaaaaccaagttgggccaagtgtcctgcagaatctaaaatgaagtttaatcagcgtgccatttttgttgttgtttgaaagattttaatttttggaatgcacagtttttatttaaaaaagacatttttaaaccactgcttgtgagattgcttgttgattggaaagagtgttttattcaccatttaaacgtttgcaaagtggcgtgccccttggcctcacaggcaaagaataacttaaaagctgacgatttgaataaattatgttacagtatgaaatatgttttacctggatatgtaaaataccttctttattctagctaattgggagatgattttttttggctaattgagattacctttagattatgttttcaaaactggcttatactgtaatctacaactaataagcactaatttagagttcagctatattgttgcatgtagtgagaagggacttaattacaaacttaagacgtaagtgtgcaataaagtaagctaagaagaaaa

SEQ ID NO: 31609 - DNA, 8450 bp, Homo sapiens
  source 1..8450: mol_type = unassigned DNA
cagtggtttctcctccttcctcccaggaagggccaggaaaatggccctggtcctggagatcttcaccctgctggcctccatctgctgggtgtcggccaatatcttcgagtaccaggtggatgcccagccccttcgtccctgtgagctgcagagggaaacggcctttctgaagcaagcagactacgtgccccagtgtgcagaggatggcagcttccagactgtccagtgccagaacgacggccgctcctgctggtgtgtgggtgccaacggcagtgaagtgctgggcagcaggcagccaggacggcctgtggcttgtctgtcattttgtcagctacagaaacagcagatcttactgagtggctacattaacagcacagacacctcctacctccctcagtgtcaggattcaggggactacgcgcctgttcagtgtgatgtgcagcaggtccagtgctggtgtgtggacgcagaggggatggaggtgtatgggacccgccagctggggaggccaaagcgatgtccaaggagctgtgaaataagaaatcgtcgtcttctccacggggtgggagataagtcaccaccccagtgttctgcggagggagagtttatgcctgtccagtgcaaatttgtcaacaccacagacatgatgatttttgatctggtccacagctacaacaggtttccagatgcatttgtgaccttcagttccttccagaggaggttccctgaggtatctgggtattgccactgtgctgacagccaagggcgggaactggctgagacaggtttggagttgttactggatgaaatttatgacaccatttttgctggcctggaccttccttccaccttcactgaaaccaccctgtaccggatactgcagagacggttcctcgcagttcaatcagtcatctctggcagattccgatgccccacaaaatgtgaagtggagcggtttacagcaaccagctttggtcacccctatgttccaagctgccgccgaaatggcgactatcaggcggtgcagtgccagacggaagggccctgctggtgtgtggacgcccaggggaaggaaatgcatggaacccggcagcaaggggagccgccatcttgtgctgaaggccaatcttgtgcctccgaaaggcagcaggccttgtccagactctactttgggacctcaggctacttcagccagcacgacctgttctcttccccagagaaaagatgggcctctccaagagtagccagatttgccacatcctgcccacccacgatcaaggagctctttgtggactctgggcttctccgcccaatggtggagggacagagccaacagttttctgtctcagaaaatcttctcaaagaagccatccgagcaatttttccctcccgagggctggctcgtcttgcccttcagtttaccaccaacccaaagagactccagcaaaacctttttggagggaaatttttggtgaatgttggccagtttaacttgtctggagcccttggcacaagaggcacatttaacttcagtcaatttttccagcaacttggtcttgcaagcttcttgaatggagggagacaagaagatttggccaagccactctctgtgggattagattcaaattcttccacaggaacccctgaagctgctaagaaggatggtactatgaataagccaactgtgggcagctttggctttgaaattaacctacaagagaaccaaaatgccctcaaattccttgcttctctcctggagcttccagaattccttctcttcttgcaacatgctatctctgtgccagaagatgtggcaagagatttaggtgatgtgatggaaacggtactcagctcccagacctgtgagcagacacctgaaaggctatttgtcccatcatgcacgacagaaggaagctatgaggatgtccaatgcttttccggagagtgctggtgtgtgaattcctggggcaaagagcttccaggctcaagagtcagaggtggacagccaaggtgccccacagactgtgaaaagcaaagggctcgcatgcaaagcctcatgggcagccagcctgctggctccaccttgtttgtccctgcttgtactagtgagggacatttcctgcctgtccagtgcttcaactcagagtgctactgtgttgatgctgagggtcaggccattcctggaactcgaagtgcaatagggaagcccaagaaatgccccacgccctgtcaattacagtctgagcaagctttcctcaggacggtgcaggccctgctctctaactccagcatgctacccaccctttccgacacctacatcccacagtgcagcaccgatgggcagtggagacaagtgcaatgcaatgggcctcctgagcaggtcttcgagttgtaccaacgatgggaggctcagaacaagggccaggatctgacgcctgccaagctgctagtgaagatcatgagctacagagaagcagcttccggaaacttcagtctctttattcaaagtctgtatgaggctggccagcaagatgtcttcccggtgctgtcacaatacccttctctgcaagatgtcccactagcagcactggaagggaaacggccccagcccagggagaatatcctcctggagccctacctcttctggcagatcttaaatggccaactcagccaatacccggggtcctactcagacttcagcactcctttggcacattttgatcttcggaactgctggtgtgtggatgaggctggccaagaactggaaggaatgcggtctgagccaagcaagctcccaacatgtcctggctcctgtgaggaagcaaagctccgtgtactgcagttcattagggaaacggaagagattgtttcagcttccaacagttctcggttccctctgggggagagtttcctggtggccaagggaatccggctgaggaatgaggacctcggccttcctccgctcttcccgccccgggaggctttcgcggagcagtttctgcgtgggagtgattacgccattcgcctggcggctcagtctaccttaagcttctatcagagacgccgcttttccccggacgactcggctggagcatccgcccttctgcggtcgggcccctacatgccacagtgtgatgcgtttggaagttgggagcctgtgcagtgccacgctgggactgggcactgctggtgtgtagatgagaaaggagggttcatccctggctcactgactgcccgctctctgcagattccacagtgcccgacaacctgcgagaaatctcgaaccagtgggctgctttccagttggaaacaggctagatcccaagaaaacccatctccaaaagacctgttcgtcccagcctgcctagaaacaggagagtatgccaggctgcaggcatcgggggctggcacctggtgtgtggaccctgcatcaggagaagagttgcggcctggctcgagcagcagtgcccagtgcccaagcctctgcaatgtgctcaagagtggagtcctctccaggagagtcagcccaggctatgtcccagcctgcagggcagaggatgggggcttttccccagtgcaatgtgaccaggcccagggcagctgctggtgtgtcatggacagcggagaagaggtgcctgggacgcgcgtgaccgggggccagcccgcctgtgagagcccgcggtgtccgctgccattcaacgcgtcggaggtggttggtggaacaatcctgtgtgagacaatctcgggccccacaggctctgccatgcagcagtgccaattgctgtgccgccagggctcctggagcgtgtttccaccagggccattgatatgtagcctggagagcggacgctgggagtcacagctgcctcagccccgggcctgccaacggccccagctgtggcagaccatccagacccaagggcactttcagctccagctcccgccgggcaagatgtgcagtgctgactacgcggatttgctgcagactttccaggttttcatattggatgagctgacagcccgcggcttctgccagatccaggtgaagacttttggcaccctggtttccattcctgtctgcaacaactcctctgtgcaggtgggttgtctgaccagggagcgtttaggagtgaatgttacatggaaatcacggcttgaggacatcccagtggcttctcttcctgacttacatgacattgagagagccttggtgggcaaggatctccttgggcgcttcacagatctgatccagagtggctcattccagcttcatctggactccaagacgttcccagcggaaaccatccgcttcctccaaggggaccactttggcacctctcccaggacatggtttgggtgctcggaaggattctaccaagtcttgacaagtgaggccagtcaggacggactgggatgcgttaagtgtcctgaaggaagctattcccaagatgaggaatgcattccttgtcctgttggattctaccaagaacaggcagggagcttggcctgtgtcccatgtcctgtgggcagaacgaccatttctgctggagctttcagccagactcactgtgtcactgactgtcagaggaacgaagcaggcctgcaatgtgaccagaatggccagtatcgagccagccagaaggacaggggcagtgggaaggccttctgtgtggacggcgaggggcggaggctgccatggtgggaaacagaggcccctcttgaggactcacagtgtttgatgatgcagaagtttgagaaggttccagaatcaaaggtgatcttcgacgccaatgctcctgtggctgtcagatccaaagttcctgattctgagttccccgtgatgcagtgcttgacagattgcacagaggacgaggcctgcagcttcttcaccgtgtccacgacggagccagagatttcctgtgatttctatgcttggacaagtgacaatgttgcctgcatgacttctgaccagaaacgagatgcactggggaactcaaaggccaccagctttggaagtcttcgctgccaggtgaaagtgaggagccatggtcaagattctccagctgtgtatttgaaaaagggccaaggatccaccacaacacttcagaaacgctttgaacccactggtttccaaaacatgctttctggattgtacaaccccattgtgttctcagcctcaggagccaatctaaccgatgctcacctcttctgtcttcttgcatgcgaccgtgatctgtgttgcgatggcttcgtcctcacacaggttcaaggaggtgccatcatctgtgggttgctgagctcacccagtgtcctgctttgtaatgtcaaagactggatggatccctctgaagcctgggctaatgctacatgtcctggtgtgacatatgaccaggagagccaccaggtgatattgcgtcttggagaccaggagttcatcaagagtctgacacccttagaaggaactcaagacacctttaccaattttcagcaggtttatctctggaaagattctgacatggggtctcggcctgagtctatgggatgtagaaaagacacagtgccaaggccagcatctccaacagaagcaggtttgacaacagaacttttctcccctgtggacctcaaccaggtcattgtcaatggaaatcaatcactatccagccagaagcactggcttttcaagcacctgttttcagcccagcaggcaaacctatggtgcctttctcgttgtgtgcaggagcactctttctgtcagctcgcagagataacagagagtgcatccttgtacttcacctgcaccctctacccagaggcacaggtgtgtgatgacatcatggagtccaatgcccagggctgcagactgatcctgcctcagatgccaaaggccctgttccggaagaaagttatactggaagataaagtgaagaacttttacactcgcctgccgttccaaaaactgatggggatatccattagaaataaagtgcccatgtctgaaaaatctatttctaatgggttctttgaatgtgaacgacggtgcgatgcggacccatgctgcactggctttggatttctaaatgtttcccagttaaaaggaggagaggtgacatgtctcactctgaacagcttgggaattcagatgtgcagtgaggagaatggaggagcctggcgcattttggactgtggctctcctgacattgaagtccacacctatcccttcggatggtaccagaagcccattgctcaaaataatgctcccagtttttgccctttggttgttctgccttccctcacagagaaagtgtctctggactcgtggcagtccctggccctctcttcagtggttgttgatccatccattaggcactttgatgttgcccatgtcagcactgctgccaccagcaatttctctgctgtccgagacctctgtttgtcggaatgttcccaacatgaggcctgtctcatcaccactctgcaaacccaacctggggctgtgagatgtatgttctatgctgatactcaaagctgcacacatagtctgcagggtcagaactgccgacttctgcttcgtgaagaggccacccacatctaccggaagccaggaatctctctgctcagctatgaggcatctgtaccttctgtgcccatttccacccatggccggctgctgggcaggtcccaggccatccaggtgggtacctcatggaagcaagtggaccagttccttggagttccatatgctgccccgcccctggcagagaggcgcttccaggcaccagagcccttgaactggacaggctcctgggatgccagcaagccaagggccagctgctggcagccaggcaccagaacatccacgtctcctggagtcagtgaagattgtttgtatctcaatgtgttcatccctcagaatgtggcccctaacgcgtctgtgctggtgttcttccacaacaccatggacagggaggagagtgaaggatggccggctatcgacggctccttcttggctgctgttggcaacctcatcgtggtcactgccagctaccgagtgggtgtcttcggcttcctgagttctgggtccggagaggtgagtggcaactgggggctgctggaccaggtggcggctctgacctgggtgcagacccacatccgaggatttggcggggaccctcggcgcgtgtccctggcagcagaccgtggcggggctgatgtggccagcatccaccttctcacggccagggccaccaactcccaacttttccggagagctgtgctgatgggaggctccgcactctccccggccgccgtcatcagccatgagagggctcagcagcaggcaattgctttggcaaaggaggtcagttgccccatgtcatccagccaagaagtggtgtcctgcctccgccagaagcctgccaatgtcctcaatgatgcccagaccaagctcctggccgtgagtggccctttccactactggggtcctgtgatcgatggccacttcctccgtgagcctccagccagagcactgaagaggtctttatgggtagaggtcgatctgctcattgggagttctcaggacgacgggctcatcaacagagcaaaggctgtgaagcaatttgaggaaagtcgaggccggaccagtagcaaaacagccttttaccaggcactgcagaattctctgggtggcgaggactcagatgcccgcgtcgaggctgctgctacatggtattactctctggagcactccacggatgactatgcctccttctcccgggctctggagaatgccacccgggactactttatcatctgccctataatcgacatggccagtgcctgggcaaagagggcccgaggaaacgtcttcatgtaccatgctcctgaaaactacggccatggcagcctggagctgctggcggatgttcagtttgccttggggcttcccttctacccagcctacgaggggcagttttctctggaggagaagagcctgtcgctgaaaatcatgcagtacttttcccacttcatcagatcaggaaatcccaactacccttatgagttctcacggaaagtacccacatttgcaaccccctggcctgactttgtaccccgtgctggtggagagaactacaaggagttcagtgagctgctccccaatcgacagggcctgaagaaagccgactgctccttctggtccaagtacatctcgtctctgaagacatctgcagatggagccaagggcgggcagtcagcagagagtgaagaggaggagttgacggctggatctgggctaagagaagatctcctaagcctccaggaaccaggctctaagacctacagcaagtgaccagcccttgagctccccaaaaacctcacccgaggctgcccactatggtcatctttttctctaaaatagccacttaccttcaataaagtatctacatgcggtg

SEQ ID NO: 31610 - DNA, 8282 bp, Homo sapiens
  source 1..8282: mol_type = unassigned DNA
gcagtggtttctcctccttcctcccaggaagggccaggaaaatggccctggtcctggagatcttcaccctgctggcctccatctgctgggtgtcggccaatatcttcgagtaccaggtggatgcccagccccttcgtccctgtgagctgcagagggaaacggcctttctgaagcaagcagactacgtgccccagtgtgcagaggatggcagcttccagactgtccagtgccagaacgacggccgctcctgctggtgtgtgggtgccaacggcagtgaagtgctgggcagcaggcagccaggacggcctgtggcttgtctgtcattttgtcagctacagaaacagcagatcttactgagtggctacattaacagcacagacacctcctacctccctcagtgtcaggattcaggggactacgcgcctgttcagtgtgatgtgcagcaggtccagtgctggtgtgtggacgcagaggggatggaggtgtatgggacccgccagctggggaggccaaagcgatgtccaaggagctgtgaaataagaaatcgtcgtcttctccacggggtgggagataagtcaccaccccagtgttctgcggagggagagtttatgcctgtccagtgcaaatttgtcaacaccacagacatgatgatttttgatctggtccacagctacaacaggtttccagatgcatttgtgaccttcagttccttccagaggaggttccctgaggtatctgggtattgccactgtgctgacagccaagggcgggaactggctgagacaggtttggagttgttactggatgaaatttatgacaccatttttgctggcctggaccttccttccaccttcactgaaaccaccctgtaccggatactgcagagacggttcctcgcagttcaatcagtcatctctggcagattccgatgccccacaaaatgtgaagtggagcggtttacagcaaccagctttggtcacccctatgttccaagctgccgccgaaatggcgactatcaggcggtgcagtgccagacggaagggccctgctggtgtgtggacgcccaggggaaggaaatgcatggaacccggcagcaaggggagccgccatcttgtgctgaaggccaatcttgtgcctccgaaaggcagcaggccttgtccagactctactttgggacctcaggctacttcagccagcacgacctgttctcttccccagagaaaagatgggcctctccaagagtagccagatttgccacatcctgcccacccacgatcaaggagctctttgtggactctgggcttctccgcccaatggtggagggacagagccaacagttttctgtctcagaaaatcttctcaaagaagccatccgagcaatttttccctcccgagggctggctcgtcttgcccttcagtttaccaccaacccaaagagactccagcaaaacctttttggagggaaatttttggtgaatgttggccagtttaacttgtctggagcccttggcacaagaggcacatttaacttcagtcaatttttccagcaacttggtcttgcaagcttcttgaatggagggagacaagaagatttggccaagccactctctgtgggattagattcaaattcttccacaggaacccctgaagctgctaagaaggatggtactatgaataagccaactgtgggcagctttggctttgaaattaacctacaagagaaccaaaatgccctcaaattccttgcttctctcctggagcttccagaattccttctcttcttgcaacatgctatctctgtgccagaagatgtggcaagagatttaggtgatgtgatggaaacggtactcagctcccagacctgtgagcagacacctgaaaggctatttgtcccatcatgcacgacagaaggaagctatgaggatgtccaatgcttttccggagagtgctggtgtgtgaattcctggggcaaagagcttccaggctcaagagtcagaggtggacagccaaggtgccccacagactgtgaaaagcaaagggctcgcatgcaaagcctcatgggcagccagcctgctggctccaccttgtttgtccctgcttgtactagtgagggacatttcctgcctgtccagtgcttcaactcagagtgctactgtgttgatgctgagggtcaggccattcctggaactcgaagtgcaatagggaagcccaagaaatgccccacgccctgtcaattacagtctgagcaagctttcctcaggacggtgcaggccctgctctctaactccagcatgctacccaccctttccgacacctacatcccacagtgcagcaccgatgggcagtggagacaagtgcaatgcaatgggcctcctgagcaggtcttcgagttgtaccaacgatgggaggctcagaacaagggccaggatctgacgcctgccaagctgctagtgaagatcatgagctacagagaagcagcttccggaaacttcagtctctttattcaaagtctgtatgaggctggccagcaagatgtcttcccggtgctgtcacaatacccttctctgcaagatgtcccactagcagcactggaagggaaacggccccagcccagggagaatatcctcctggagccctacctcttctggcagatcttaaatggccaactcagccaatacccggggtcctactcagacttcagcactcctttggcacattttgatcttcggaactgctggtgtgtggatgaggctggccaagaactggaaggaatgcggtctgagccaagcaagctcccaacatgtcctggctcctgtgaggaagcaaagctccgtgtactgcagttcattagggaaacggaagagattgtttcagcttccaacagttctcggttccctctgggggagagtttcctggtggccaagggaatccggctgaggaatgaggacctcggccttcctccgctcttcccgccccgggaggctttcgcggagcagtttctgcgtgggagtgattacgccattcgcctggcggctcagtctaccttaagcttctatcagagacgccgcttttccccggacgactcggctggagcatccgcccttctgcggtcgggcccctacatgccacagtgtgatgcgtttggaagttgggagcctgtgcagtgccacgctgggactgggcactgctggtgtgtagatgagaaaggagggttcatccctggctcactgactgcccgctctctgcagattccacagtgcccgacaacctgcgagaaatctcgaaccagtgggctgctttccagttggaaacaggctagatcccaagaaaacccatctccaaaagacctgttcgtcccagcctgcctagaaacaggagagtatgccaggctgcaggcatcgggggctggcacctggtgtgtggaccctgcatcaggagaagagttgcggcctggctcgagcagcagtgcccagtgcccaagcctctgcaatgtgctcaagagtggagtcctctccaggagagtcagcccaggctatgtcccagcctgcagggcagaggatgggggcttttccccagtgcaatgtgaccaggcccagggcagctgctggtgtgtcatggacagcggagaagaggtgcctgggacgcgcgtgaccgggggccagcccgcctgtgagagcccgcggtgtccgctgccattcaacgcgtcggaggtggttggtggaacaatcctgtgtgagacaatctcgggccccacaggctctgccatgcagcagtgccaattgctgtgccgccagggctcctggagcgtgtttccaccagggccattgatatgtagcctggagagcggacgctgggagtcacagctgcctcagccccgggcctgccaacggccccagctgtggcagaccatccagacccaagggcactttcagctccagctcccgccgggcaagatgtgcagtgctgactacgcggatttgctgcagactttccaggttttcatattggatgagctgacagcccgcggcttctgccagatccaggtgaagacttttggcaccctggtttccattcctgtctgcaacaactcctctgtgcaggtgggttgtctgaccagggagcgtttaggagtgaatgttacatggaaatcacggcttgaggacatcccagtggcttctcttcctgacttacatgacattgagagagccttggtgggcaaggatctccttgggcgcttcacagatctgatccagagtggctcattccagcttcatctggactccaagacgttcccagcggaaaccatccgcttcctccaaggggaccactttggcacctctcccaggacatggtttgggtgctcggaaggattctaccaagtcttgacaagtgaggccagtcaggacggactgggatgcgttaagtgtcctgaaggaagctattcccaagatgaggaatgcattccttgtcctgttggattctaccaagaacaggcagggagcttggcctgtgtcccatgtcctgtgggcagaacgaccatttctgctggagctttcagccagactcacttgatgcagaagtttgagaaggttccagaatcaaaggtgatcttcgacgccaatgctcctgtggctgtcagatccaaagttcctgattctgagttccccgtgatgcagtgcttgacagattgcacagaggacgaggcctgcagcttcttcaccgtgtccacgacggagccagagatttcctgtgatttctatgcttggacaagtgacaatgttgcctgcatgacttctgaccagaaacgagatgcactggggaactcaaaggccaccagctttggaagtcttcgctgccaggtgaaagtgaggagccatggtcaagattctccagctgtgtatttgaaaaagggccaaggatccaccacaacacttcagaaacgctttgaacccactggtttccaaaacatgctttctggattgtacaaccccattgtgttctcagcctcaggagccaatctaaccgatgctcacctcttctgtcttcttgcatgcgaccgtgatctgtgttgcgatggcttcgtcctcacacaggttcaaggaggtgccatcatctgtgggttgctgagctcacccagtgtcctgctttgtaatgtcaaagactggatggatccctctgaagcctgggctaatgctacatgtcctggtgtgacatatgaccaggagagccaccaggtgatattgcgtcttggagaccaggagttcatcaagagtctgacacccttagaaggaactcaagacacctttaccaattttcagcaggtttatctctggaaagattctgacatggggtctcggcctgagtctatgggatgtagaaaagacacagtgccaaggccagcatctccaacagaagcaggtttgacaacagaacttttctcccctgtggacctcaaccaggtcattgtcaatggaaatcaatcactatccagccagaagcactggcttttcaagcacctgttttcagcccagcaggcaaacctatggtgcctttctcgttgtgtgcaggagcactctttctgtcagctcgcagagataacagagagtgcatccttgtacttcacctgcaccctctacccagaggcacaggtgtgtgatgacatcatggagtccaatgcccagggctgcagactgatcctgcctcagatgccaaaggccctgttccggaagaaagttatactggaagataaagtgaagaacttttacactcgcctgccgttccaaaaactgatggggatatccattagaaataaagtgcccatgtctgaaaaatctatttctaatgggttctttgaatgtgaacgacggtgcgatgcggacccatgctgcactggctttggatttctaaatgtttcccagttaaaaggaggagaggtgacatgtctcactctgaacagcttgggaattcagatgtgcagtgaggagaatggaggagcctggcgcattttggactgtggctctcctgacattgaagtccacacctatcccttcggatggtaccagaagcccattgctcaaaataatgctcccagtttttgccctttggttgttctgccttccctcacagagaaagtgtctctggactcgtggcagtccctggccctctcttcagtggttgttgatccatccattaggcactttgatgttgcccatgtcagcactgctgccaccagcaatttctctgctgtccgagacctctgtttgtcggaatgttcccaacatgaggcctgtctcatcaccactctgcaaacccaacctggggctgtgagatgtatgttctatgctgatactcaaagctgcacacatagtctgcagggtcagaactgccgacttctgcttcgtgaagaggccacccacatctaccggaagccaggaatctctctgctcagctatgaggcatctgtaccttctgtgcccatttccacccatggccggctgctgggcaggtcccaggccatccaggtgggtacctcatggaagcaagtggaccagttccttggagttccatatgctgccccgcccctggcagagaggcgcttccaggcaccagagcccttgaactggacaggctcctgggatgccagcaagccaagggccagctgctggcagccaggcaccagaacatccacgtctcctggagtcagtgaagattgtttgtatctcaatgtgttcatccctcagaatgtggcccctaacgcgtctgtgctggtgttcttccacaacaccatggacagggaggagagtgaaggatggccggctatcgacggctccttcttggctgctgttggcaacctcatcgtggtcactgccagctaccgagtgggtgtcttcggcttcctgagttctgggtccggagaggtgagtggcaactgggggctgctggaccaggtggcggctctgacctgggtgcagacccacatccgaggatttggcggggaccctcggcgcgtgtccctggcagcagaccgtggcggggctgatgtggccagcatccaccttctcacggccagggccaccaactcccaacttttccggagagctgtgctgatgggaggctccgcactctccccggccgccgtcatcagccatgagagggctcagcagcaggcaattgctttggcaaaggaggtcagttgccccatgtcatccagccaagaagtggtgtcctgcctccgccagaagcctgccaatgtcctcaatgatgcccagaccaagctcctggccgtgagtggccctttccactactggggtcctgtgatcgatggccacttcctccgtgagcctccagccagagcactgaagaggtctttatgggtagaggtcgatctgctcattgggagttctcaggacgacgggctcatcaacagagcaaaggctgtgaagcaatttgaggaaagtcgaggccggaccagtagcaaaacagccttttaccaggcactgcagaattctctgggtggcgaggactcagatgcccgcgtcgaggctgctgctacatggtattactctctggagcactccacggatgactatgcctccttctcccgggctctggagaatgccacccgggactactttatcatctgccctataatcgacatggccagtgcctgggcaaagagggcccgaggaaacgtcttcatgtaccatgctcctgaaaactacggccatggcagcctggagctgctggcggatgttcagtttgccttggggcttcccttctacccagcctacgaggggcagttttctctggaggagaagagcctgtcgctgaaaatcatgcagtacttttcccacttcatcagatcaggaaatcccaactacccttatgagttctcacggaaagtacccacatttgcaaccccctggcctgactttgtaccccgtgctggtggagagaactacaaggagttcagtgagctgctccccaatcgacagggcctgaagaaagccgactgctccttctggtccaagtacatctcgtctctgaagacatctgcagatggagccaagggcgggcagtcagcagagagtgaagaggaggagttgacggctggatctgggctaagagaagatctcctaagcctccaggaaccaggctctaagacctacagcaagtgaccagcccttgagctccccaaaaacctcacccgaggctgcccactatggtcatctttttctctaaaatagccacttaccttcaataaagtatctacatgcggtgaa

SEQ ID NO: 31611 - DNA, 2664 bp, Homo sapiens
  source 1..2664: mol_type = unassigned DNA
atggccctggtcctggagatcttcaccctgctggcctccatctgctgggtgtcggccaatatcttcgagtaccaggtggatgcccagccccttcgtccctgtgagctgcagagggaaacggcctttctgaagcaagcagactacgtgccccagtgtgcagaggatggcagcttccagactgtccagtgccagaacgacggccgctcctgctggtgtgtgggtgccaacggcagtgaagtgctgggcagcaggcagccaggacggcctgtggcttgtctgtcattttgtcagctacagaaacagcagatcttactgagtggctacattaacagcacagacacctcctacctccctcagtgtcaggattcaggggactacgcgcctgttcagtgtgatgtgcagcaggtccagtgctggtgtgtggacgcagaggggatggaggtgtatgggacccgccagctggggaggccaaagcgatgtccaaggagctgtgaaataagaaatcgtcgtcttctccacggggtgggagataagtcaccaccccagtgttctgcggagggagagtttatgcctgtccagtgcaaatttgtcaacaccacagacatgatgatttttgatctggtccacagctacaacaggtttccagatgcatttgtgaccttcagttccttccagaggaggttccctgaggtatctgggtattgccactgtgctgacagccaagggcgggaactggctgagacaggtttggagttgttactggatgaaatttatgacaccatttttgctggcctggaccttccttccaccttcactgaaaccaccctgtaccggatactgcagagacggttcctcgcagttcaatcagtcatctctggcagattccgatgccccacaaaatgtgaagtggagcggtttacagcaaccagctttggtcacccctatgttccaagctgccgccgaaatggcgactatcaggcggtgcagtgccagacggaagggccctgctggtgtgtggacgcccaggggaaggaaatgcatggaacccggcagcaaggggagccgccatcttgtgctgaaggccaatcttgtgcctccgaaaggcagcaggccttgtccagactctactttgggacctcaggctacttcagccagcacgacctgttctcttccccagagaaaagatgggcctctccaagagtagccagatttgccacatcctgcccacccacgatcaaggagctctttgtggactctgggcttctccgcccaatggtggagggacagagccaacagttttctgtctcagaaaatcttctcaaagaagccatccgagcaatttttccctcccgagggctggctcgtcttgcccttcagtttaccaccaacccaaagagactccagcaaaacctttttggagggaaatttttggtgaatgttggccagtttaacttgtctggagcccttggcacaagaggcacatttaacttcagtcaatttttccagcaacttggtcttgcaagcttcttgaatggagggagacaagaagatttggccaagccactctctgtgggattagattcaaattcttccacaggaacccctgaagctgctaagaaggatggtactatgaataagccaactgtgggcagctttggctttgaaattaacctacaagagaaccaaaatgccctcaaattccttgcttctctcctggagcttccagaattccttctcttcttgcaacatgctatctctgtgccagaagatgtggcaagagatttaggtgatgtgatggaaacggtactcagctcccagacctgtgagcagacacctgaaaggctatttgtcccatcatgcacgacagaaggaagctatgaggatgtccaatgcttttccggagagtgctggtgtgtgaattcctggggcaaagagcttccaggctcaagagtcagaggtggacagccaaggtgccccacagactgtgaaaagcaaagggctcgcatgcaaagcctcatgggcagccagcctgctggctccaccttgtttgtccctgcttgtactagtgagggacatttcctgcctgtccagtgcttcaactcagagtgctactgtgttgatgctgagggtcaggccattcctggaactcgaagtgcaatagggaagcccaagaaatgccccacgccctgtcaattacagtctgagcaagctttcctcaggacggtgcaggccctgctctctaactccagcatgctacccaccctttccgacacctacgaggggcagttttctctggaggagaagagcctgtcgctgaaaatcatgcagtacttttcccacttcatcagatcaggaaatcccaactacccttatgagttctcacggaaagtacccacatttgcaaccccctggcctgactttgtaccccgtgctggtggagagaactacaaggagttcagtgagctgctccccaatcgacagggcctgaagaaagccgactgctccttctggtccaagtacatctcgtctctgaagacatctgcagatggagccaagggcgggcagtcagcagagagtgaagaggaggagttgacggctggatctgggctaagagaagatctcctaagcctccaggaaccaggctctaagacctacagcaagtga

SEQ ID NO: 31612 - DNA, 3706 bp, Homo sapiens
  source 1..3706: mol_type = unassigned DNA
ccaagaacaggcagggagcttggcctgtgtcccatgtcctgtgggcagaacgaccatttctgctggagctttcagccagactcactgtgtcactgactgtcagaggaacgaagcaggcctgcaatgtgaccagaatggccagtatcgagccagccagaaggacaggggcagtgggaaggccttctgtgtggacggcgaggggcggaggctgccatggtgggaaacagaggcccctcttgaggactcacagtgtttgatgatgcagaagtttgagaaggttccagaatcaaaggtgatcttcgacgccaatgctcctgtggctgtcagatccaaagttcctgattctgagttccccgtgatgcagtgcttgacagattgcacagaggacgaggcctgcagcttcttcaccgtgtccacgacggagccagagatttcctgtgatttctatgcttggacaagtgacaatgttgcctgcatgacttctgaccagaaacgagatgcactggggaactcaaaggccaccagctttggaagtcttcgctgccaggtgaaagtgaggagccatggtcaagattctccagctgtgtatttgaaaaagggtgccatcatctgtgggttgctgagctcacccagtgtcctgctttgtaatgtcaaagactggatggatccctctgaagcctgggctaatgctacatgtcctggtgtgacatatgaccaggagagccaccaggtgatattgcgtcttggagaccaggagttcatcaagagtctgacacccttagaaggaactcaagacacctttaccaattttcagcaggtttatctctggaaagattctgacatggggtctcggcctgagtctatgggatgtagaaaagacacagtgccaaggccagcatctccaacagaagcaggtttgacaacagaacttttctcccctgtggacctcaaccaggtcattgtcaatggaaatcaatcactatccagccagaagcactggcttttcaagcacctgttttcagcccagcaggcaaacctatggtgcctttctcgttgtgtgcaggagcactctttctgtcagctcgcagagataacagagagtgcatccttgtacttcacctgcaccctctacccagaggcacaggtgtgtgatgacatcatggagtccaatgcccagggctgcagactgatcctgcctcagatgccaaaggccctgttccggaagaaagttatactggaagataaagtgaagaacttttacactcgcctgccgttccaaaaactgatggggatatccattagaaataaagtgcccatgtctgaaaaatctatttctaatgggttctttgaatgtgaacgacggtgcgatgcggacccatgctgcactggctttggatttctaaatgtttcccagttaaaaggaggagaggtgacatgtctcactctgaacagcttgggaattcagatgtgcagtgaggagaatggaggagcctggcgcattttggactgtggctctcctgacattgaagtccacacctatcccttcggatggtaccagaagcccattgctcaaaataatgctcccagtttttgccctttggttgttctgccttccctcacagagaaagtgtctctggactcgtggcagtccctggccctctcttcagtggttgttgatccatccattaggcactttgatgttgcccatgtcagcactgctgccaccagcaatttctctgctgtccgagacctctgtttgtcggaatgttcccaacatgaggcctgtctcatcaccactctgcaaacccaacctggggctgtgagatgtatgttctatgctgatactcaaagctgcacacatagtctgcagggtcagaactgccgacttctgcttcgtgaagaggccacccacatctaccggaagccaggaatctctctgctcagctatgaggcatctgtaccttctgtgcccatttccacccatggccggctgctgggcaggtcccaggccatccaggtgggtacctcatggaagcaagtggaccagttccttggagttccatatgctgccccgcccctggcagagaggcgcttccaggcaccagagcccttgaactggacaggctcctgggatgccagcaagccaagggccagctgctggcagccaggcaccagaacatccacgtctcctggagtcagtgaagattgtttgtatctcaatgtgttcatccctcagaatgtggcccctaacgcgtctgtgctggtgttcttccacaacaccatggacagggaggagagtgaaggatggccggctatcgacggctccttcttggctgctgttggcaacctcatcgtggtcactgccagctaccgagtgggtgtcttcggcttcctgagttctgggtccggagaggtgagtggcaactgggggctgctggaccaggtggcggctctgacctgggtgcagacccacatccgaggatttggcggggaccctcggcgcgtgtccctggcagcagaccgtggcggggctgatgtggccagcatccaccttctcacggccagggccaccaactcccaacttttccggagagctgtgctgatgggaggctccgcactctccccggccgccgtcatcagccatgagagggctcagcagcaggcaattgctttggcaaaggaggtcagttgccccatgtcatccagccaagaagtggtgtcctgcctccgccagaagcctgccaatgtcctcaatgatgcccagaccaagctcctggccgtgagtggccctttccactactggggtcctgtgatcgatggccacttcctccgtgagcctccagccagagcactgaagaggtctttatgggtagaggtcgatctgctcattgggagttctcaggacgacgggctcatcaacagagcaaaggctgtgaagcaatttgaggaaagtcgaggccggaccagtagcaaaacagccttttaccaggcactgcagaattctctgggtggcgaggactcagatgcccgcgtcgaggctgctgctacatggtattactctctggagcactccacggatgactatgcctccttctcccgggctctggagaatgccacccgggactactttatcatctgccctataatcgacatggccagtgcctgggcaaagagggcccgaggaaacgtcttcatgtaccatgctcctgaaaactacggccatggcagcctggagctgctggcggatgttcagtttgccttggggcttcccttctacccagcctacgaggggcagttttctctggaggagaagagcctgtcgctgaaaatcatgcagtacttttcccacttcatcagatcaggaaatcccaactacccttatgagttctcacggaaagtacccacatttgcaaccccctggcctgactttgtaccccgtgctggtggagagaactacaaggagttcagtgagctgctccccaatcgacagggcctgaagaaagccgactgctccttctggtccaagtacatctcgtctctgaagacatctgcagatggagccaagggcgggcagtcagcagagagtgaagaggaggagttgacggctggatctgggctaagagaagatctcctaagcctccaggaaccaggctctaagacctacagcaagtgaccagcccttgagctccccaaaaacctcacccga

SEQ ID NO: 31613 - DNA, 8149 bp, Homo sapiens
  source 1..8149: mol_type = unassigned DNA
gcagtggtttctcctccttcctcccaggaagggccaggaaaatggccctggtcctggagatcttcaccctgctggcctccatctgctgggtgtcggccaatatcttcgagtaccaggtggatgcccagccccttcgtccctgtgagctgcagagggaaacggcctttctgaagcaagcagactacgtgccccagtgtgcagaggatggcagcttccagactgtccagtgccagaacgacggccgctcctgctggtgtgtgggtgccaacggcagtgaagtgctgggcagcaggcagccaggacggcctgtggcttgtctgtcattttgtcagctacagaaacagcagatcttactgagtggctacattaacagcacagacacctcctacctccctcagtgtcaggattcaggggactacgcgcctgttcagtgtgatgtgcagcaggtccagtgctggtgtgtggacgcagaggggatggaggtgtatgggacccgccagctggggaggccaaagcgatgtccaaggagctgtgaaataagaaatcgtcgtcttctccacggggtgggagataagtcaccaccccagtgttctgcggagggagagtttatgcctgtccagtgcaaatttgtcaacaccacagacatgatgatttttgatctggtccacagctacaacaggtttccagatgcatttgtgaccttcagttccttccagaggaggttccctgaggtatctgggtattgccactgtgctgacagccaagggcgggaactggctgagacaggtttggagttgttactggatgaaatttatgacaccatttttgctggcctggaccttccttccaccttcactgaaaccaccctgtaccggatactgcagagacggttcctcgcagttcaatcagtcatctctggcagattccgatgccccacaaaatgtgaagtggagcggtttacagcaaccagctttggtcacccctatgttccaagctgccgccgaaatggcgactatcaggcggtgcagtgccagacggaagggccctgctggtgtgtggacgcccaggggaaggaaatgcatggaacccggcagcaaggggagccgccatcttgtgctgaaggccaatcttgtgcctccgaaaggcagcaggccttgtccagactctactttgggacctcaggctacttcagccagcacgacctgttctcttccccagagaaaagatgggcctctccaagagtagccagatttgccacatcctgcccacccacgatcaaggagctctttgtggactctgggcttctccgcccaatggtggagggacagagccaacagttttctgtctcagaaaatcttctcaaagaagccatccgagcaatttttccctcccgagggctggctcgtcttgcccttcagtttaccaccaacccaaagagactccagcaaaacctttttggagggaaatttttggtgaatgttggccagtttaacttgtctggagcccttggcacaagaggcacatttaacttcagtcaatttttccagcaacttggtcttgcaagcttcttgaatggagggagacaagaagatttggccaagccactctctgtgggattagattcaaattcttccacaggaacccctgaagctgctaagaaggatggtactatgaataagccaactgtgggcagctttggctttgaaattaacctacaagagaaccaaaatgccctcaaattccttgcttctctcctggagcttccagaattccttctcttcttgcaacatgctatctctgtgccagaagatgtggcaagagatttaggtgatgtgatggaaacggtactcagctcccagacctgtgagcagacacctgaaaggctatttgtcccatcatgcacgacagaaggaagctatgaggatgtccaatgcttttccggagagtgctggtgtgtgaattcctggggcaaagagcttccaggctcaagagtcagaggtggacagccaaggtgccccacagactgtgaaaagcaaagggctcgcatgcaaagcctcatgggcagccagcctgctggctccaccttgtttgtccctgcttgtactagtgagggacatttcctgcctgtccagtgcttcaactcagagtgctactgtgttgatgctgagggtcaggccattcctggaactcgaagtgcaatagggaagcccaagaaatgccccacgccctgtcaattacagtctgagcaagctttcctcaggacggtgcaggccctgctctctaactccagcatgctacccaccctttccgacacctacatcccacagtgcagcaccgatgggcagtggagacaagtgcaatgcaatgggcctcctgagcaggtcttcgagttgtaccaacgatgggaggctcagaacaagggccaggatctgacgcctgccaagctgctagtgaagatcatgagctacagagaagcagcttccggaaacttcagtctctttattcaaagtctgtatgaggctggccagcaagatgtcttcccggtgctgtcacaatacccttctctgcaagatgtcccactagcagcactggaagggaaacggccccagcccagggagaatatcctcctggagccctacctcttctggcagatcttaaatggccaactcagccaatacccggggtcctactcagacttcagcactcctttggcacattttgatcttcggaactgctggtgtgtggatgaggctggccaagaactggaaggaatgcggtctgagccaagcaagctcccaacatgtcctggctcctgtgaggaagcaaagctccgtgtactgcagttcattagggaaacggaagagattgtttcagcttccaacagttctcggttccctctgggggagagtttcctggtggccaagggaatccggctgaggaatgaggacctcggccttcctccgctcttcccgccccgggaggctttcgcggagcagtttctgcgtgggagtgattacgccattcgcctggcggctcagtctaccttaagcttctatcagagacgccgcttttccccggacgactcggctggagcatccgcccttctgcggtcgggcccctacatgccacagtgtgatgcgtttggaagttgggagcctgtgcagtgccacgctgggactgggcactgctggtgtgtagatgagaaaggagggttcatccctggctcactgactgcccgctctctgcagattccacagtgcccgacaacctgcgagaaatctcgaaccagtgggctgctttccagttggaaacaggctagatcccaagaaaacccatctccaaaagacctgttcgtcccagcctgcctagaagcccgcggtgtccgctgccattcaacgcgtcggaggtggttggtggaacaatcctgtgtgagacaatctcgggccccacaggctctgccatgcagcagtgccaattgctgtgccgccagggctcctggagcgtgtttccaccagggccattgatatgtagcctggagagcggacgctgggagtcacagctgcctcagccccgggcctgccaacggccccagctgtggcagaccatccagacccaagggcactttcagctccagctcccgccgggcaagatgtgcagtgctgactacgcggatttgctgcagactttccaggttttcatattggatgagctgacagcccgcggcttctgccagatccaggtgaagacttttggcaccctggtttccattcctgtctgcaacaactcctctgtgcaggtgggttgtctgaccagggagcgtttaggagtgaatgttacatggaaatcacggcttgaggacatcccagtggcttctcttcctgacttacatgacattgagagagccttggtgggcaaggatctccttgggcgcttcacagatctgatccagagtggctcattccagcttcatctggactccaagacgttcccagcggaaaccatccgcttcctccaaggggaccactttggcacctctcccaggacatggtttgggtgctcggaaggattctaccaagtcttgacaagtgaggccagtcaggacggactgggatgcgttaagtgtcctgaaggaagctattcccaagatgaggaatgcattccttgtcctgttggattctaccaagaacaggcagggagcttggcctgtgtcccatgtcctgtgggcagaacgaccatttctgctggagctttcagccagactcactgtgtcactgactgtcagaggaacgaagcaggcctgcaatgtgaccagaatggccagtatcgagccagccagaaggacaggggcagtgggaaggccttctgtgtggacggcgaggggcggaggctgccatggtgggaaacagaggcccctcttgaggactcacagtgtttgatgatgcagaagtttgagaaggttccagaatcaaaggtgatcttcgacgccaatgctcctgtggctgtcagatccaaagttcctgattctgagttccccgtgatgcagtgcttgacagattgcacagaggacgaggcctgcagcttcttcaccgtgtccacgacggagccagagatttcctgtgatttctatgcttggacaagtgacaatgttgcctgcatgacttctgaccagaaacgagatgcactggggaactcaaaggccaccagctttggaagtcttcgctgccaggtgaaagtgaggagccatggtcaagattctccagctgtgtatttgaaaaagggccaaggatccaccacaacacttcagaaacgctttgaacccactggtttccaaaacatgctttctggattgtacaaccccattgtgttctcagcctcaggagccaatctaaccgatgctcacctcttctgtcttcttgcatgcgaccgtgatctgtgttgcgatggcttcgtcctcacacaggttcaaggaggtgccatcatctgtgggttgctgagctcacccagtgtcctgctttgtaatgtcaaagactggatggatccctctgaagcctgggctaatgctacatgtcctggtgtgacatatgaccaggagagccaccaggtgatattgcgtcttggagaccaggagttcatcaagagtctgacacccttagaaggaactcaagacacctttaccaattttcagcaggtttatctctggaaagattctgacatggggtctcggcctgagtctatgggatgtagaaaagacacagtgccaaggccagcatctccaacagaagcaggtttgacaacagaacttttctcccctgtggacctcaaccaggtcattgtcaatggaaatcaatcactatccagccagaagcactggcttttcaagcacctgttttcagcccagcaggcaaacctatggtgcctttctcgttgtgtgcaggagcactctttctgtcagctcgcagagataacagagagtgcatccttgtacttcacctgcaccctctacccagaggcacaggtgtgtgatgacatcatggagtccaatgcccagggctgcagactgatcctgcctcagatgccaaaggccctgttccggaagaaagttatactggaagataaagtgaagaacttttacactcgcctgccgttccaaaaactgatggggatatccattagaaataaagtgcccatgtctgaaaaatctatttctaatgggttctttgaatgtgaacgacggtgcgatgcggacccatgctgcactggctttggatttctaaatgtttcccagttaaaaggaggagaggtgacatgtctcactctgaacagcttgggaattcagatgtgcagtgaggagaatggaggagcctggcgcattttggactgtggctctcctgacattgaagtccacacctatcccttcggatggtaccagaagcccattgctcaaaataatgctcccagtttttgccctttggttgttctgccttccctcacagagaaagtgtctctggactcgtggcagtccctggccctctcttcagtggttgttgatccatccattaggcactttgatgttgcccatgtcagcactgctgccaccagcaatttctctgctgtccgagacctctgtttgtcggaatgttcccaacatgaggcctgtctcatcaccactctgcaaacccaacctggggctgtgagatgtatgttctatgctgatactcaaagctgcacacatagtctgcagggtcagaactgccgacttctgcttcgtgaagaggccacccacatctaccggaagccaggaatctctctgctcagctatgaggcatctgtaccttctgtgcccatttccacccatggccggctgctgggcaggtcccaggccatccaggtgggtacctcatggaagcaagtggaccagttccttggagttccatatgctgccccgcccctggcagagaggcgcttccaggcaccagagcccttgaactggacaggctcctgggatgccagcaagccaagggccagctgctggcagccaggcaccagaacatccacgtctcctggagtcagtgaagattgtttgtatctcaatgtgttcatccctcagaatgtggcccctaacgcgtctgtgctggtgttcttccacaacaccatggacagggaggagagtgaaggatggccggctatcgacggctccttcttggctgctgttggcaacctcatcgtggtcactgccagctaccgagtgggtgtcttcggcttcctgagttctgggtccggagaggtgagtggcaactgggggctgctggaccaggtggcggctctgacctgggtgcagacccacatccgaggatttggcggggaccctcggcgcgtgtccctggcagcagaccgtggcggggctgatgtggccagcatccaccttctcacggccagggccaccaactcccaacttttccggagagctgtgctgatgggaggctccgcactctccccggccgccgtcatcagccatgagagggctcagcagcaggcaattgctttggcaaaggaggtcagttgccccatgtcatccagccaagaagtggtgtcctgcctccgccagaagcctgccaatgtcctcaatgatgcccagaccaagctcctggccgtgagtggccctttccactactggggtcctgtgatcgatggccacttcctccgtgagcctccagccagagcactgaagaggtctttatgggtagaggtcgatctgctcattgggagttctcaggacgacgggctcatcaacagagcaaaggctgtgaagcaatttgaggaaagtcgaggccggaccagtagcaaaacagccttttaccaggcactgcagaattctctgggtggcgaggactcagatgcccgcgtcgaggctgctgctacatggtattactctctggagcactccacggatgactatgcctccttctcccgggctctggagaatgccacccgggactactttatcatctgccctataatcgacatggccagtgcctgggcaaagagggcccgaggaaacgtcttcatgtaccatgctcctgaaaactacggccatggcagcctggagctgctggcggatgttcagtttgccttggggcttcccttctacccagcctacgaggggcagttttctctggaggagaagagcctgtcgctgaaaatcatgcagtacttttcccacttcatcagatcaggaaatcccaactacccttatgagttctcacggaaagtacccacatttgcaaccccctggcctgactttgtaccccgtgctggtggagagaactacaaggagttcagtgagctgctccccaatcgacagggcctgaagaaagccgactgctccttctggtccaagtacatctcgtctctgaagacatctgcagatggagccaagggcgggcagtcagcagagagtgaagaggaggagttgacggctggatctgggctaagagaagatctcctaagcctccaggaaccaggctctaagacctacagcaagtgaccagcccttgagctccccaaaaacctcacccgaggctgcccactatggtcatctttttctctaaaatagccacttaccttcaataaagtatctacatgcggtgaa

SEQ ID NO: 31614 - DNA, 2421 bp, Homo sapiens
  source 1..2421: mol_type = unassigned DNA
gaggcggcctgcagggagcagccgcgagccggccgggcgcgccgagcccgagccccagccggagcggggcgggggagggaggagccagagcggccgccgcctctgccggaggagccgcggggccgccacactcgccccccgccccccccgcgctcactcgcactcacacccgggcgcaggaggcgggcggcccgggccccaccggccccccatggacgcccccagcacggggcgctgagacccccgcgtcgctgcccagcccggtccggcgcgccacgccgagggatctctggacaggacaagactccgaagctactcccccagcacacagcccgggacccacaaacccagcttgcccccagccctcccacctgccactccctggcccctcccaccgcccgccccccttggggcgcagggcatggtgtgaaaggccaagtgctgaggcgggtatcatgggtgctgtgccctagggcctgggtggcagggggtgggtggcctgtgggtgtgccgggggggccagtgtgcccaccccagtctcttggcgtgctggagggcatcctggatggaattgaagtgaatggaacagaagccaagcaaggtggagtgtgggtcagacccagaggagaacagtgccaggtcaccagatggaaagcgaaaaagaaagaacggccaatgttccctgaaaaccagcatgtcagggtatatccctagttacctggacaaagacgagcagtgtgtcgtgtgtggggacaaggcaactggttatcactaccgctgtatcacttgtgagggctgcaagggcttctttcgccgcacaatccagaagaacctccatcccacctattcctgcaaatatgacagctgctgtgtcattgacaagatcacccgcaatcagtgccagctgtgccgcttcaagaagtgcatcgccgtgggcatggccatggacttggttctagatgactcgaagcgggtggccaagcgtaagctgattgagcagaaccgggagcggcggcggaaggaggagatgatccgatcactgcagcagcgaccagagcccactcctgaagagtgggatctgatccacattgccacagaggcccatcgcagcaccaatgcccagggcagccattggaaacagaggcggaaattcctgcccgatgacattggccagtcacccattgtctccatgccggacggagacaaggtggacctggaagccttcagcgagtttaccaagatcatcaccccggccatcacccgtgtggtggactttgccaaaaaactgcccatgttctccgagctgccttgcgaagaccagatcatcctcctgaaggggtgctgcatggagatcatgtccctgcgggcggctgtccgctacgaccctgagagcgacaccctgacgctgagtggggagatggctgtcaagcgggagcagctcaagaatggcggcctgggcgtagtctccgacgccatctttgaactgggcaagtcactctctgcctttaacctggatgacacggaagtggctctgctgcaggctgtgctgctaatgtcaacagaccgctcgggcctgctgtgtgtggacaagatcgagaagagtcaggaggcgtacctgctggcgttcgagcactacgtcaaccaccgcaaacacaacattccgcacttctggcccaagctgctgatgaagggtccgcaggtccggcagcttgagcagcagcttggtgaagcgggaagtctccaagggccggttcttcagcaccagagcccgaagagcccgcagcagcgtctcctggagctgctccaccgaagcggaattctccatgcccgagcggtctgtggggaagacgacagcagtgaggcggactccccgagctcctctgaggaggaaccggaggtctgcgaggacctggcaggcaatgcagcctctccctgaagccccccagaaggccgatggggaaggagaaggagtgccataccttctcccaggcctctgccccaagagcaggaggtgcctgaaagctgggagcgtgggctcagcagggctggtcacctcccatcccgtaagaccaccttcccttcctcagcaggccaaacatggccagactcccttgctttttgctgtgtagttccctctgcctgggatgcccttccccctttctctgcctggcaacatcttacttgtcctttgaggccccaactcaagtgtcacctccttccccagctcccccaggcagaaatagttgtctgtgcttccttggttcatgcttctactgtgacacttatctcactgttttataattagtcgggcatgagtctgtttcccaagctagactgtgtctgaatcatgtctgtatccccagtgcccggtgcagggcctggcatagagtaggtactccataaaaggtgtgttgaattgaa

SEQ ID NO: 31615 - DNA, 9996 bp, Homo sapiens
  source 1..9996: mol_type = unassigned DNA
gatccgctgccgctttccgagcgagtgtcatggcggccggcgtcgagttggcaggagtaacccacggaactgaggaaagtcattagagctgagaaagaagtggcccaatctggacggtgggaattcgtgggaatgagcagaaggccctccgtaggtgactgtgtcactagaggcgggcccctggtaaaattccaggccaggcctctgcgtttctaggcagaacctggagtcggccttgcctgagaacccagctttgtgttatcgtatcctgtctcgcgaaggcaggcgttcaaggatatttggtcggatcgcccggcggcgctaaacgttttcttttttccgagcggaccgggtcgttctctaaactcgccgcgatgtcgtcctggcttgggggcctcggctccggattgggccagtctctgggtcaagtcgggggcagcctggcttccctcactggccagatatcaaactttacaaaggatatgctgatggagggcacggaggaagtggaagcagaattacctgattctaggacaaaggaaattgaagccattcatgcaatcttgagatcagagaatgaaaggcttaagaaactttgtactgatctagaagagaaacatgaagcatcagagattcaaataaagcagcaatctacaagttaccgaaatcaacttcaacaaaaagaggtagaaatcagccatcttaaagccagacagattgcactccaggatcagttgctgaaactgcagtcagctgctcagtcagtaccttcaggagctggtgtaccagcaaccactgcatcatcttcattcgcttatgggattagtcatcatccttcagctttccatgacgatgacatggactttggtgatataatttcatcccaacaagaaataaaccgactctcaaatgaagtttcaagacttgagtctgaagttggccattggaggcatattgctcagacttccaaagcacaaggaacagataactctgatcaaagtgaaatatgtaaactacaaaatatcattaaggaactaaaacagaaccgaagtcaggaaattgatgaccatcaacatgaaatgtcagtactgcagaatgcacaccaacagaaattgacagaaataagtcgacgacatcgagaagaattaagtgactatgaagaacgaattgaagaacttgaaaatctgttacaacaaggtggctctggagttatagaaactgatctctctaaaatctatgagatgcaaaaaactattcaagttctacaaatagaaaaagtggagtctaccaaaaaaatggaacaacttgaggataaaataaaagatataaataaaaaattatcttctgcagaaaatgacagagatattttgaggagagaacaagaacagctaaatgtggaaaagagacaaataatggaagaatgtgaaaacttgaaattggaatgtagtaaattgcagccttctgctgtgaagcaaagtgatactatgacagaaaaggaaagaattcttgcccagagtgcatcagtggaagaagtgttcagactacaacaagcactgtctgatgccgaaaatgaaataatgagattgagtagtttaaaccaggataacagtcttgctgaagacaatctgaaacttaaaatgcgtatcgaagttttagaaaaagagaagtcattactgagtcaagaaaaggaagaacttcagatgtcacttttaaaattgaacaatgaatatgaagtaattaaaagtacagctacaagagacataagtttggattcagaattacatgacttaagacttaatttggaggcaaaggaacaagaactcaatcagagtattagtgaaaaggaaacactgatagctgagatagaagaattggacagacagaatcaagaagctacaaagcacatgattttgataaaagatcagctatcaaaacaacaaaatgaaggagatagcatcatcagtaaactgaaacaagatctaaatgatgaaaaaaagagagttcatcaacttgaagatgataaaatggacattactaaagagttagatgtacagaaagaaaagctaattcaaagtgaagtggccctaaatgatttacatttaaccaagcagaaacttgaggacaaagtagaaaatttagtagatcagctaaataaatcacaagaaagtaatgtaagcatccagaaggagaatttagaacttaaggagcatattagacaaaatgaggaggagctttctagaataaggaatgagttaatgcagtctctaaatcaagactctaatagtaattttaaggataccttacttaaagaaagagaagctgaagttagaaacttaaagcaaaatctttcagaattagaacagctcaatgaaaatttaaagaaagttgcttttgatgtcaaaatggaaaatgaaaagttagttttagcatgtgaagatgtgaggcatcagttagaagaatgtcttgctggtaacaatcagctttctctggaaaaaaacactattgtggagactctaaaaatggaaaaaggagagatagaggcagaattgtgttgggctaaaaagaggctgttggaagaagcaaacaagtatgagaaaaccattgaagaactgtcaaatgcacgtaatttgaatacctctgccttacagctggaacatgagcatttaattaaactcaatcaaaagaaagacatggaaatagcagaactcaaaaagaatattgaacaaatggatactgaccataaagaaactaaggacgttttgtcatctagtttagaagagcagaagcagttgacacaacttataaacaagaaagaaatttttattgaaaagcttaaagaaagaagttcaaagctgcaggaggaattggataaatattctcaggccttaagaaaaaatgaaattttaagacagaccatagaggaaaaagaccgaagtcttggatccatgaaagaggaaaataatcatctgcaagaagaattggaacgactcagggaagagcagagtcgaaccgcacctgtggctgaccctaaaacccttgatagtgttactgaactagcatctgaggtatctcaactgaacacgatcaaggaacatcttgaagaggaaattaaacatcatcaaaagataattgaagatcaaaaccagagtaagatgcaactacttcagtctttacaagagcaaaagaaggaaatggatgagtttagataccagcatgagcaaatgaacgccacacacacccagctctttttagagaaggatgaggaaattaagagtttgcaaaaaacaattgaacaaatcaaaacccagttgcatgaagaaagacaggacattcaaacagataactctgatatttttcaagaaacaaaagttcagagccttaatatagaaaatggaagtgaaaagcatgatttatctaaagctgaaacggaaagattagtgaaaggaataaaagagcgagaactggagattaaacttctaaatgaaaagaatatatctttaactaaacagattgatcagttgtccaaagatgaagttggtaaactaactcagattattcagcagaaagatttggagatacaagctcttcatgctagaatttcttcaacttcccatactcaagatgttgtttaccttcaacagcaactgcaggcttatgctatggaaagagaaaaggtatttgctgttttgaatgagaagactagggaaaatagccatctaaaaacagaatatcacaaaatgatggatattgttgctgccaaggaagcagctcttatcaaactgcaagatgaaaataaaaaattgtccactagatttgaaagtagtggccaagatatgtttagagaaactattcagaatttatcacgtatcattcgagaaaaagacatcgaaatagatgcactaagtcagaaatgtcagactttattggcagttttacaaacatccagcactggtaatgaggctggaggtgttaatagtaatcaatttgaggagcttctacaggaacgtgacaagttaaaacagcaagtaaagaaaatggaagagtggaagcagcaggtgatgaccacagtacaaaatatgcaacacgagtcagcccagcttcaggaagagcttcaccaacttcaagcacaggttttggttgacagtgataataattctaaattacaagtggactatactggcctgatccaaagttatgagcagaatgaaaccaaactcaaaaattttgggcaggaattagcacaagttcagcacagcattgggcagctttgcaataccaaggatcttcttttaggaaaacttgatattatttcaccccagctgtcttctgcatcattgcttactccccagtctgcagagtgtcttagagcaagtaagtctgaagtattgagtgaatcttctgaattgcttcagcaagagttagaagagctaagaaaatcactacaggaaaaagatgcaacaattagaactctccaggaaaataaccacagattgtctgattcgattgctgccacctcagagctagaaagaaaagaacacgaacaaaccgattcagaaatcaagcagctaaaggagaaacaagatgttttgcaaaagttacttaaggaaaaagacctcttaatcaaagccaaaagtgatcaactactttcttccaatgaaaatttcactaacaaagtaaatgaaaacgaacttttgaggcaggcagtaacaaacctgaaggagagaatattaattctagagatggacattggcaaactaaaaggagaaaatgaaaaaatagtggaaacatacaggggaaaggaaacagaatatcaagcgttacaagagactaacatgaagttttctatgatgctgcgagaaaaagagtttgagtgccactcaatgaaggagaaggctcttgcttttgaacagctattgaaagagaaagaacagggcaagactggagagttaaatcagcttttaaatgcagttaaatcaatgcaggagaagacagttgtgtttcaacaggagagagaccaagtcatgttggccctgaaacaaaaacaaatggaaaatactgccctacagaatgaggttcaacgtttacgtgacaaagaatttcgttcaaaccaagagctagagagattgcgtaatcatcttttagaatcagaagattcttatacccgtgaagctttggctgcagaagatagagaggctaaactaagaaagaaagtcacagtattggaggaaaagctagtttcatcctctaatgcaatggaaaatgcaagccatcaagccagtgtgcaggtagagtcattgcaagaacagttgaatgtagtttccaagcaaagggatgaaactgcgctgcagctttctgtctctcaggaacaagtaaagcagtatgctctgtcactggccaacctgcagatggtactagagcatttccaacaagaggaaaaagctatgtattctgctgaactcgaaaagcaaaaacagcttatagctgaatggaagaaaaacgcagaaaatctggaaggaaaagtgatatcattacaggaatgtttggatgaagcaaatgctgcattggattcagcatcaagacttacagaacagttagatgtaaaagaagaacaaattgaagaacttaaaagacaaaatgagctccgacaagaaatgctggatgatgtacaaaagaaattgatgagcttagcaaacagctcagaaggaaaagtagacaaagtcctaatgagaaacctcttcattggtcatttccacacaccgaaaaatcagcgtcatgaagtgttacggttaatggggagcatcctgggcgtcagaagggaggagatggagcagttgtttcatgacgatcagggcggtgttaccaggtggatgactgggtggcttggaggaggatcaaaaagtgttcccaacacacctttgagaccaaatcagcaatctgtggttaatagttctttttcagaactttttgttaaatttctagaaacagaatctcatccatccattccaccaccaaagctttctgttcatgatatgaaacctctggattcaccaggaagaagaaaaagagatacaaatgcaccagaaagttttaaagatacagcagaatccaggtctggtagaagaacagatgtaaatccgtttttggctcctcgctcggcagctgtacctcttattaacccagctggacttggacctggtgggcccgggcatcttcttctgaaacccatctcagatgttttgcccacatttacacctttgccagcgttacctgacaacagtgctggggttgtgctgaaagaccttttaaagcaatagatgattctcaagccagagacaatctagcactttaaagaaaccatgaacactatatgtatgtactttatcacaaagtggcctttggggagaaagtcatgtatttgttcgcaattatgctttctctgaatttaataaaaatattcctaatgcttttagaaactgcaggtgtcaggagcaagtgtttgctatataatctgctttattccttctgatttgacctaatttaagctaggaacatttaatttatcttttaccttaatttacaaaaatacagacagacaaaaatactagtagctatatggcagctttttatttccttttgtgatttccaagctcatttaagctagagattgtggtttatcaagagagtgttttttttttttaaacgaagaataaaaaaatactagtagtggcttctctgcatagtgcagaaagttgatttgaagcatatattgatcatctttagaggactttgtggagacaggccaacaagattgttgctggaaggtcataggttccctgaggtgaagtatgtatttggtcctgtgcaatattatcatgtgtgtagattctttttttgtttgttttaaatagagatggggtctcactatgttgccaggctggcctcaaactcctgggctcaagtgatcctcccacctcagcctcccaaagtgctgggattaaggcatgagccactgcgcctggccctgtgtgtaaattcatgtgactaccaccacaggcaagacacggaagacttccattacaagcatccccctgtgttgccctctcataatcattgccacctctctccctggccctctccttaatccctgacaaccacttactgttctccatctcagtcattttgttattttgagaatgttatataaatggaatcaatatataccctcttgagactggctttttttcactcagcataattcccttgagatccatccaaggctttggatgtatcactagtttgttcctttttattgttgagcatatagtgcagatatatcacttagttttaacagctaaggtatctatttaaagataccatcttaaaactaaatgttacacaaattcatgcaactttcatataagcattaaaccatacagctgcatctacgtaagtataattagcaaaatcactgaacatgccacttcctgcctccgtctgcggtgttgacatatgaggtacagcaatccgagagtcaactgttatcacggtggccactgagggcagtgaaatcactttgatagcaccagtacccagatgtttgaaacttaagaaagtatttctttaatttttcataaacccatcataaaaaaaaaatcccgacttgaaacttaactgtatctggatgttcatatttttattagttgttgaagttgtacatttaaaaagatatttcttgcaaattttgtaaatttctatatgcttttaaaatagaaacatttgtataacaaggaaggatgaaaataaaacaaattcaaatatgtgaatagtcctggctgaggccagaactaaatttggttatttgcaagttttactgtgattaactgtactttctaatgtatttggaagactggaagtcttaattccatgttgatgggtgaaacttgtttttctgaaaaatgaagtaactgaaaatgctgcttcagaatgtcttgtatctccttagataactaatttatattgccattctttatttactatactttaaaggaagttgtcatgcaagttctatattagaactgtcaaactgcctcttggtttttgcctattattatttctctgtgagttgttactccttggtttttatatgctcctaacaaagatactttcactgactatcctacattatttgctgcttgccattgaaatttcatttcagtgtggagaaatgaaatactagtttctaagttaaaaaagacacatggtcctttatttttaagaaatagaatatgtaaaaagttttctcttttaatttgaaaaagagatgcatggttggtatttaagtagtatgtcatcatatttgaaatgccttttgtgacatttttgagtatttccttctctgaccaaaacaacttgtccgcctctcatcccatggtttaacgtaagtttaaaagctgttgtgggtggattgcatagctaaacatcacagagcatgatattaaatggctgctatttaaataaatatgtgaccttgtcctaaagctataatactggccgggcacagtggctcacgcctgtaatcccagaactttgggagggtgaggtgggtggatcacctgaggtcaggagttcaagaccagcctggccaacatggtgaaaccccatctctactaaaaatacaaaaattagctgggcatggtggcaggcgcctataatcccagctactcaggaggctgaggcaggagaattgcttgaccccgggaagtggaggttgcagttagcaaccactccactgcactccagcctgagcgacagagcgagactctgtctcaaaaaaaaaaaaaaaaaaaaaaaagctatagtacctaatgttttcattgtgtcattgaaactatagctgactggtatgtatactaagtgttcgttgatctaaaccagatataagtcattgacttttctgaaacttagttgtgtcagagatgaaccacctgctcactgaaccgtcttagtaaccagtgatgaagcatataattctaatgttggcaataggacattgctaacagtgcgtttaactgcaatattttaactacagtaatttttctgtttatttctctatccactcagtagaatttgtggttgaattccaccttcgctgccatagttttttaccacattcctaatggttttcaacctctatactgtagtagaaaattcatctaactactgaatttaattttagcataatactggatcaaattgtttgaattttcattcctgtcatttttgatttttaaaaaatgaaacaaaactaaacaacaaaaccctaggaaaagaatggcttctttccaactagtcaattaaaacgtccagtatctccccaaataaagccttaggtttcttttaacctcttaatggttaattgaaaagagtacagaaactatcaaaatacttatccaatcaatggggggaaaagctatgtcttcagggacagtagagtgatgagaattttttagaaaacactattatccatcaaacttaaaagcatttggacctgatatttaaagataatgaagttttccacatattgaagtattcaagacatcttccatccacaaaaatttatctttaagttttgtaaatatcaagtaagtatagatgatatttattttatatattcctatggaaaaaatgctactttaatgttctgacatttgtgattatttgccagtctttactttttaacttattaaaaagttaaatacttattaaggtttctctatgtaaaacaatttaaattgtcttttgatttttagggaaatatctaaacgtgggaaatttccaacgcaaccttaatattaggttgtgttatttatagagctaaagttaatgcatttttgaatttctcaggagcactgcaaggcaaaaaaatactccaaataaaaatgatatatgtaagttggcaatgtcttcagtcacaataaaaaaaatttttagcaaaca

SEQ ID NO: 31616 - DNA, 8001 bp, Homo sapiens
  source 1..8001: mol_type = unassigned DNA
gatccgctgccgctttccgagcgagtgtcatggcggccggcgtcgagttggcaggagtaacccacggaactgaggaaagtcattagagctgagaaagaagtggcccaatctggacggtgggaattcgtgggaatgagcagaaggccctccgtaggtgactgtgtcactagaggcgggcccctggtaaaattccaggccaggcctctgcgtttctaggcagaacctggagtcggccttgcctgagaacccagctttgtgttatcgtatcctgtctcgcgaaggcaggcgttcaaggatatttggtcggatcgcccggcggcgctaaacgttttcttttttccgagcggaccgggtcgttctctaaactcgccgcgatgtcgtcctggcttgggggcctcggctccggattgggccagtctctgggtcaagtcgggggcagcctggcttccctcactggccagatatcaaactttacaaaggatatgctgatggagggcacggaggaagtggaagcagaattacctgattctaggacaaaggaaattgaagccattcatgcaatcttgagatcagagaatgaaaggcttaagaaactttgtactgatctagaagagaaacatgaagcatcagagattcaaataaagcagcaatctacaagttaccgaaatcaacttcaacaaaaagaggtagaaatcagccatcttaaagccagacagattgcactccaggatcagttgctgaaactgcagtcagctgctcagtcagtaccttcaggagctggtgtaccagcaaccactgcatcatcttcattcgcttatgggattagtcatcatccttcagctttccatgacgatgacatggactttggtgatataatttcatcccaacaagaaataaaccgactctcaaatgaagtttcaagacttgagtctgaagttggccattggaggcatattgctcagacttccaaagcacaaggaacagataactctgatcaaagtgaaatatgtaaactacaaaatatcattaaggaactaaaacagaaccgaagtcaggaaattgatgaccatcaacatgaaatgtcagtactgcagaatgcacaccaacagaaattgacagaaataagtcgacgacatcgagaagaattaagtgactatgaagaacgaattgaagaacttgaaaatctgttacaacaaggtggctctggagttatagaaactgatctctctaaaatctatgagatgcaaaaaactattcaagttctacaaatagaaaaagtggagtctaccaaaaaaatggaacaacttgaggataaaataaaagatataaataaaaaattatcttctgcagaaaatgacagagatattttgaggagagaacaagaacagctaaatgtggaaaagagacaaataatggaagaatgtgaaaacttgaaattggaatgtagtaaattgcagccttctgctgtgaagcaaagtgatactatgacagaaaaggaaagaattcttgcccagagtgcatcagtggaagaagtgttcagactacaacaagcactgtctgatgccgaaaatgaaataatgagattgagtagtttaaaccaggaagaacttcagatgtcacttttaaaattgaacaatgaatatgaagtaattaaaagtacagctacaagagacataagtttggattcagaattacatgacttaagacttaatttggaggcaaaggaacaagaactcaatcagagtattagtgaaaaggaaacactgatagctgagatagaagaattggacagacagaatcaagaagctacaaagcacatgattttgataaaagatcagctatcaaaacaacaaaatgaaggagatagcatcatcagtaaactgaaacaagatctaaatgatgaaaaaaagagagttcatcaacttgaagatgataaaatggacattactaaagagttagatgtacagaaagaaaagctaattcaaagtgaagtggccctaaatgatttacatttaaccaagcagaaacttgaggacaaagtagaaaatttagtagatcagctaaataaatcacaagaaagtaatgtaagcatccagaaggagaatttagaacttaaggagcatattagacaaaatgaggaggagctttctagaataaggaatgagttaatgcagtctctaaatcaagactctaatagtaattttaaggataccttacttaaagaaagagaagctgaagttagaaacttaaagcaaaatctttcagaattagaacagctcaatgaaaatttaaagaaagttgcttttgatgtcaaaatggaaaatgaaaagttagttttagcatgtgaagatgtgaggcatcagttagaagaatgtcttgctggtaacaatcagctttctctggaaaaaaacactattgtggagactctaaaaatggaaaaaggagagatagaggcagaattgtgttgggctaaaaagaggctgttggaagaagcaaacaagtatgagaaaaccattgaagaactgtcaaatgcacgtaatttgaatacctctgccttacagctggaacatgagcatttaattaaactcaatcaaaagaaagacatggaaatagcagaactcaaaaagaatattgaacaaatggatactgaccataaagaaactaaggacgttttgtcatctagtttagaagagcagaagcagttgacacaacttataaacaagaaagaaatttttattgaaaagcttaaagaaagaagttcaaagctgcaggaggaattggataaatattctcaggccttaagaaaaaatgaaattttaagacagaccatagaggaaaaagaccgaagtcttggatccatgaaagaggaaaataatcatctgcaagaagaattggaacgactcagggaagagcagagtcgaaccgcacctgtggctgaccctaaaacccttgatagtgttactgaactagcatctgaggtatctcaactgaacacgatcaaggaacatcttgaagaggaaattaaacatcatcaaaagataattgaagatcaaaaccagagtaagatgcaactacttcagtctttacaagagcaaaagaaggaaatggatgagtttagataccagcatgagcaaatgaacgccacacacacccagctctttttagagaaggatgaggaaattaagagtttgcaaaaaacaattgaacaaatcaaaacccagttgcatgaagaaagacaggacattcaaacagataactctgatatttttcaagaaacaaaagttcagagccttaatatagaaaatggaagtgaaaagcatgatttatctaaagctgaaacggaaagattagtgaaaggaataaaagagcgagaactggagattaaacttctaaatgaaaagaatatatctttaactaaacagattgatcagttgtccaaagatgaagttggtaaactaactcagattattcagcagaaagatttggagatacaagctcttcatgctagaatttcttcaacttcccatactcaagatgttgtttaccttcaacagcaactgcaggcttatgctatggaaagagaaaaggtatttgctgttttgaatgagaagactagggaaaatagccatctaaaaacagaatatcacaaaatgatggatattgttgctgccaaggaagcagctcttatcaaactgcaagatgaaaataaaaaattgtccactagatttgaaagtagtggccaagatatgtttagagaaactattcagaatttatcacgtatcattcgagaaaaagacatcgaaatagatgcactaagtcagaaatgtcagactttattggcagttttacaaacatccagcactggtaatgaggctggaggtgttaatagtaatcaatttgaggagcttctacaggaacgtgacaagttaaaacagcaagtaaagaaaatggaagagtggaagcagcaggtgatgaccacagtacaaaatatgcaacacgagtcagcccagcttcaggaagagcttcaccaacttcaagcacaggttttggttgacagtgataataattctaaattacaagtggactatactggcctgatccaaagttatgagcagaatgaaaccaaactcaaaaattttgggcaggaattagcacaagttcagcacagcattgggcagctttgcaataccaaggatcttcttttaggaaaacttgatattatttcaccccagctgtcttctgcatcattgcttactccccagtctgcagagtgtcttagagcaagtaagtctgaagtattgagtgaatcttctgaattgcttcagcaagagttagaagagctaagaaaatcactacaggaaaaagatgcaacaattagaactctccaggaaaataaccacagattgtctgattcgattgctgccacctcagagctagaaagaaaagaacacgaacaaaccgattcagaaatcaagcagctaaaggagaaacaagatgttttgcaaaagttacttaaggaaaaagacctcttaatcaaagccaaaagtgatcaactactttcttccaatgaaaatttcactaacaaagtaaatgaaaacgaacttttgaggcaggcagtaacaaacctgaaggagagaatattaattctagagatggacattggcaaactaaaaggagaaaatgaaaaaatagtggaaacatacaggggaaaggaaacagaatatcaagcgttacaagagactaacatgaagttttctatgatgctgcgagaaaaagagtttgagtgccactcaatgaaggagaaggctcttgcttttgaacagctattgaaagagaaagaacagggcaagactggagagttaaatcagcttttaaatgcagttaaatcaatgcaggagaagacagttgtgtttcaacaggagagagaccaagtcatgttggccctgaaacaaaaacaaatggaaaatactgccctacagaatgaggttcaacgtttacgtgacaaagaatttcgttcaaaccaagagctagagagattgcgtaatcatcttttagaatcagaagattcttatacccgtgaagctttggctgcagaagatagagaggctaaactaagaaagaaagtcacagtattggaggaaaagctagtttcatcctctaatgcaatggaaaatgcaagccatcaagccagtgtgcaggtagagtcattgcaagaacagttgaatgtagtttccaagcaaagggatgaaactgcgctgcagctttctgtctctcaggaacaagtaaagcagtatgctctgtcactggccaacctgcagatggtactagagcatttccaacaagaggaaaaagctatgtattctgctgaactcgaaaagcaaaaacagcttatagctgaatggaagaaaaacgcagaaaatctggaaggaaaagtgatatcattacaggaatgtttggatgaagcaaatgctgcattggattcagcatcaagacttacagaacagttagatgtaaaagaagaacaaattgaagaacttaaaagacaaaatgagctccgacaagaaatgctggatgatgtacaaaagaaattgatgagcttagcaaacagctcagaaggaaaagtagacaaagtcctaatgagaaacctcttcattggtcatttccacacaccgaaaaatcagcgtcatgaagtgttacggttaatggggagcatcctgggcgtcagaagggaggagatggagcagttgtttcatgacgatcagggcggtgttaccaggtggatgactgggtggcttggaggaggatcaaaaagtgttcccaacacacctttgagaccaaatcagcaatctgtggttaatagttctttttcagaactttttgttaaatttctagaaacagaatctcatccatccattccaccaccaaagctttctgttcatgatatgaaacctctggattcaccaggaagaagaaaaagagatacaaatgcaccagaaagttttaaagatacagcagaatccaggtctggtagaagaacagatgtaaatccgtttttggctcctcgctcggcagctgtacctcttattaacccagctggacttggacctggtgggcccgggcatcttcttctgaaacccatctcagatgttttgcccacatttacacctttgccagcgttacctgacaacagtgctggggttgtgctgaaagaccttttaaagcaatagatgattctcaagccagagacaatctagcactttaaagaaaccatgaacactatatgtatgtactttatcacaaagtggcctttggggagaaagtcatgtatttgttcgcaattatgctttctctgaatttaataaaaatattcctaatgcttttagaaactgcaggtgtcaggagcaagtgtttgctatataatctgctttattccttctgatttgacctaatttaagctaggaacatttaatttatcttttaccttaatttacaaaaatacagacagacaaaaatactagtagctatatggcagctttttatttccttttgtgatttccaagctcatttaagctagagattgtggtttatcaagagagtgttttttttttttaaacgaagaataaaaaaatactagtagtggcttctctgcatagtgcagaaagttgatttgaagcatatattgatcatctttagaggactttgtggagacaggccaacaagattgttgctggaaggtcataggttccctgaggtgaagtatgtatttggtcctgtgcaatattatcatgtgtgtagattctttttttgtttgttttaaatagagatggggtctcactatgttgccaggctggcctcaaactcctgggctcaagtgatcctcccacctcagcctcccaaagtgctgggattaaggcatgagccactgcgcctggccctgtgtgtaaattcatgtgactaccaccacaggcaagacacggaagacttccattacaagcatccccctgtgttgccctctcataatcattgccacctctctccctggccctctccttaatccctgacaaccacttactgttctccatctcagtcattttgttattttgagaatgttatataaatggaatcaatatataccctcttgagactggctttttttcactcagcataattcccttgagatccatccaaggctttggatgtatcactagtttgttcctttttattgttgagcatatagtgcagatatatcacttagttttaacagctaaggtatctatttaaagataccatcttaaaactaaatgttacacaaattcatgcaactttcatataagcattaaaccatacagctgcatctacgtaagtataattagcaaaatcactgaacatgccacttcctgcctccgtctgcggtgttgacatatgaggtacagcaatccgagagtcaactgttatcacggtggccactgagggcagtgaaatcactttgatagcaccagtacccagatgtttgaaacttaagaaagtatttctttaatttttcataaacccatcataaaaaaaaaatcccgacttgaaacttaactgtatctggatgttcatatttttattagttgttgaagttgtacatttaaaaagatatttcttgcaaattttgtaaatttctatatgcttttaaaatagaaacatttgtataacaaggaaggatgaaaataaaacaaattcaaatatgtgaatagtcctggctgaggccagaactaaatttggttatttgcaagttttactgtgattaactgtactttctaatgtatttggaagactggaagtcttaattccatgttgatgggtgaaacttgtttttctgaaaaatgaagtaactgaaaatgctgcttcagaatgtcttgtatctccttagataactaatttatattgccattctttatttactatactttaaaggaagttgtcatgcaagttctatattagaactgtcaaactgcc

SEQ ID NO: 31617 - DNA, 6498 bp, Homo sapiens
  source 1..6498: mol_type = unassigned DNA
gctgcggctcagctgataattgaaggaacccggagccgccgccgccgcgccgctggggggggtggggggagctagtggaagttactgccgcgccaccgagtccggaccggagactttggggcctaactagtgaatggtagtgtctagaaagggtatgtcccttcaagagagaggtgccaatgtccaaccggcctaataacaatccaggggggtcactgcgacgttcacagaggaacactgccggggcccaaccacaagacgactcaataggaggaagaagctgcagttcatcatctgctgtgatagttccacaaccagaggatccagacagagccaatacttcagaaagacaaaaaacggggcaggtgcctaagaaagacaattctcgaggagtgaagcgcagtgctagtccagactacaacaggaccaattctcctagctctgcaaaaaaaccaaaagcacttcagcatactgaatctccctcagaaacaaataagccacatagtaagtcaaagaagagacatttagaccaggagcaacaactgaaatctgcacaatcaccatcaacaagcaaggctcataccaggaagagtggggccactggcggttcacggagtcagaaaagaaaaaggacagagagttcttgtgtaaagagtggctccgggtctgaatcaactggtgcagaagagagatctgcgaaacctaccaagctggcttcaaaatcagccacctcagccaaagctgggtgtagcaccatcactgattcttcttctgctgcctctacttcctcctcgtcttctgctgtagcctcggcctcctccactgtaccaccaggtgccagagtgaaacaaggaaaagatcagaacaaggccaggcgttcccgttcagcgtccagtcccagccccagaagaagtagcagggaaaaggaacagagtaaaactggtggctcttcaaaatttgattgggctgctcgtttcagccctaaagttagccttcctaaaacaaaactgtctcttccagggtcttctaagtcagagacatcaaaacctggaccttctggattacaggccaaattagcaagtttaagaaaatctacgaagaaacgcagtgagtctccacctgctgagctccccagtttgaggcggagcacacgccaaaagaccacgggctcctgtgctagtaccagtcggcgaggctctggcctgggcaaaagaggagcagctgaagctcgtcgacaggagaaaatggcagaccctgaaagcaaccaggaggcagtaaattcttcagctgctcggacagatgaagctccccaaggagctgcaggggctgttggcatgaccacctctggggagagtgaatcagatgattccgagatgggacgtttgcaagctttgttagaggcaaggggtcttccccctcacctatttggtcctcttggtcctcggatgtcacagcttttccatagaacaattggaagtggagctagttctaaggcccagcagctactacaaggattgcaagccagtgatgaaagtcaacagcttcaggcagttattgagatgtgtcagttactggtcatgggaaatgaggagacactgggagggtttcctgtcaagagtgttgttccagctttgattacgttacttcagatggagcacaattttgatattatgaaccatgcttgtcgagccttaacatacatgatggaagcacttcctcgatcttctgctgttgtagtagatgctattcctgtctttttagaaaagctgcaagttattcagtgtattgatgtggcagagcaggccttgactgccttggagatgttgtcacggagacatagtaaagccattctacaggcgggtggtttggcagactgcttgctgtacctagaattcttcagcataaatgcccaaagaaatgcattagcaattgcagctaattgctgccagagtatcacgccagatgaatttcattttgtggcagattcactcccattgctaacccaaaggctaacacatcaggataaaaagtcagtagaaagcacttgcctttgttttgcacgcctagtggacaacttccagcatgaggagaatttactccagcaggttgcttccaaagatctgcttacaaatgttcaacagctgttggtagtgactccacccattttaagttctgggatgtttataatggtggttcgcatgttttctctgatgtgttccaactgtccaactttagctgttcaacttatgaaacaaaacattgcagaaacgcttcactttctcctgtgtggtgcctccaatggaagttgtcaggaacagattgatcttgttccacgaagccctcaagagttgtatgaactgacatctctgatttgtgaacttatgccatgtttaccaaaagaaggcatttttgcagttgataccatgttgaagaagggaaatgcacagaacacagatggtgcgatatggcagtggcgtgatgatcggggcctctggcatccatataacaggattgacagccggatcattgagcaaatcaatgaggacacgggaacagcacgtgccattcagagaaaacctaacccgttagccaatagtaacactagtggatattcagagtcaaagaaggatgatgctcgagcacagcttatgaaagaggatccggaactggctaagtcttttattaagacattatttggtgttctttatgaagtgtatagttcctcagcaggacctgcggtcagacataagtgccttagagcaattcttaggataatttattttgcggatgctgaacttctgaaggatgttctgaaaaatcatgctgtttcaagtcacattgcttccatgctgtcaagccaagacctgaagatagtagtgggagcacttcagatggcagaaattttaatgcagaagttacctgatatttttagtgtttacttcagaagagaaggtgtaatgcatcaagtaaaacacttagcagaatcagagtctttgttgacaagtccaccaaaggcatgtacgaatggatcgggatccatgggatccacaacttcagtcagcagtgggacagccacagctgccactcatgctgcagctgacttgggatcacccagcttgcagcacagcagggatgattctttagatctcagccctcaaggtcgattaagtgatgttctaaagagaaaacgactgccaaaacgagggccaagaaggccaaagtactcacctccaagagatgatgacaaagtagacaatcaagctaaaagccccaccactactcagtcacctaaatcttctttcctggcaagcttgaatccaaaaacatggggaaggttaagtacacagtccaacagcaacaacattgagccagcacggactgcgggaggtagtggccttgccagggctgcctcaaaggataccatctccaataatagagaaaaaattaaaggttggattaaggagcaggcacataaatttgtagaacgttatttcagttctgagaatatggatggaagcaaccctgcattgaatgtccttcagagactttgtgctgcaaccgaacaactcaacctccaggtggatggtggagctgagtgccttgtagaaatccgtagcatagtctcagagtcagatgtttcatcatttgaaatccaacatagtggatttgtgaagcagctgttgctttatttgacatctaaaagtgaaaaggatgctgtgagcagagagatcagattaaagcgatttcttcatgtatttttttcttctccacttcctggagaagagcccattggaagagtggaaccagtgggtaatgcacctttgttggcattagttcacaagatgaacaactgcctcagccagatggaacaatttccagtcaaagtacatgatttccctagtggaaatgggacaggaggcagcttttctctcaacagaggatcacaggctttaaaatttttcaacacacatcaattaaaatgccagttacaaaggcatccagactgtgcaaatgtgaagcagtggaagggtggacctgtcaagattgaccctctggctttggtacaagccatcgagagataccttgtagttagagggtatggaagagtaagagaagatgatgaagacagcgatgacgatggatcagatgaggaaatagatgagtctctggctgctcagttcctaaattcaggaaatgtaagacacaggctgcagttttatattggagaacatttgctgccgtataacatgactgtgtatcaggcagtacggcagtttagtatacaggctgaagatgaaagagaatccacagatgatgagagcaatcctctaggcagagctggtatttggacaaagactcatacaatatggtataaacctgtgagagaggatgaagaaagtaataaagattgtgttggtggtaaaagaggaagagcccaaacagctccaacgaaaacttcccctagaaatgcaaaaaagcatgatgagttatggcacgatggagtgtgcccatcagtatcaaatcctttagaagtttacctcattcccacaccacctgaaaatataacatttgaagacccgtcattagatgtgatccttcttttaagagttttacatgctatcagtcgatactggtattacttgtatgataatgcaatgtgcaaggaaattattccaactagtgaatttattaacagtaagttaacagcaaaagcaaataggcaacttcaagatcctttagtaatcatgacaggaaacatcccaacatggcttactgagctaggaaaaacctgcccatttttctttccttttgatacccggcaaatgcttttttatgtaactgcatttgatcgggaccgagcaatgcaaagattacttgataccaacccagaaatcaaccagtctgattctcaagatagcagagttgcacctagattggatagaaaaaaacgtactgtgaaccgagaggagctgctgaaacaggcggagtctgtgatgcaggacctcggcagctcacgggccatgttagaaatccagtatgaaaatgaggttggtacaggtcttgggcctacactggagttttatgcgcttgtatctcaggaactacagagagctgacttgggtctttggagaggtgaagaagtaactcttagcaatccaaaagggagccaagaagggaccaagtatattcaaaacctccagggcctgtttgcgcttccctttggtaggacagcaaagccagctcatatcgcaaaggttaagatgaagtttcgcttcttaggaaaattaatggccaaggctatcatggatttcagattggtggaccttccccttggcttacccttttataaatggatgctacggcaagaaacttcactgacatcacacgatttgtttgacatcgacccagttgtagccagatcagtttatcacctagaagacattgtcagacagaagaaaagacttgaacaagataaatcccagaccaaagagagtctacagtatgcattagaaaccttgactatgaatggctgctcagttgaagatctaggactggatttcactctgccagggtttcccaatatcgaactgaagaaaggagggaaggatataccagtcactatccacaatttagaggagtatctaagactggttatattctgggcactaaatgaaggcgtttctaggcaatttgattcgttcagagatggatttgaatcagtcttcccactcagtcatcttcagtacttctacccggaggaactggatcagctcctttgtggcagtaaagcagacacttgggatgcaaagacactgatggaatgctgtaggcctgatcatggttatactcatgacagtcgggctgtgaagtttttgtttgagattctcagtagttttgataatgagcagcagaggttatttctccagtttgtgactggtagcccaagattgcctgttggaggattccggagtttgaatccacctttgacaattgtccgaaagacgtttgaatcaacagaaaacccagatgacttcttgccctctgtaatgacttgtgtgaactatcttaagttgccggactattcaagcattgagataatgcgtgaaaaactgttgatagcagcaagagaagggcagcagtcgttccatctttcctgatcatagcaagaaatgcagtgtctgcctgttacagcaaaagaaacaaatcatgatttcttttctaatgttatcacctgagtcaaggaaacatgttacgccttcttgttgtaggaaaaacggcttgcagattataaagagacatttggttgatattcattaatggccccatggacttaaagtgatcaggccctaaaacgttgttgtgatgaggtttctttagcaagttcttgtttaaattatcatttatttgatgagtgaagtttttaacatgctttgctgtgtgaaatttaaaaaagggatgtttttccaggctggaacaataaatgtggctgtgcagttt

SEQ ID NO: 31618 - DNA, 583 bp, Homo sapiens
  source 1..583: mol_type = unassigned DNA
ataattgaaggaacccggagccgccgccgccgcgccgctggggggggtggggggagctagtggaagttactgccgcgccaccgagtccggaccggagactttggggcctaactagacagagtctccctctgttgcccaggctggagtgcagtggcgcggtctcagctcactgcaacctctgcctcccgggttcaagcgattcccctgccgcagcctccagagcagctgggactacagtgaatggtagtgtctagaaagggtatgtcccttcaagagagaggtgccaatgtccaaccggcctaataacaatccaggggggtcactgcgacgttcacagaggaacactgccggggcccaaccacaagacgactcaataggaggaagaagctgcagttcatcatctgctgtgatagttccacaaccagaggatccagacagagccaatacttcagaaagacaaaaaacggggcaggtgcctaagaaagacaattctcgaggagtgaagcgcagtgctagtccagactacaacaggaccaattctcctagctctgcaaaaaaaccaaaagcacttcagcatactgaa

SEQ ID NO: 31619 - DNA, 6405 bp, Homo sapiens
  source 1..6405: mol_type = unassigned DNA
agctgataattgaaggaacccggagccgccgccgccgcgccgctggggggggtggggggagctagtggaagttactgccgcgccaccgagtccggaccggagactttggggcctaactagtgaatggtagtgtctagaaagggtatgtcccttcaagagagaggtgccaatgtccaaccggcctaataacaatccaggggggtcactgcgacgttcacagaggaacactgccggggcccaaccacaagacgactcaataggaggaaggtcacatttagggcaggcaaaacataagggatatagccctcctgagagtagaaaatctaattctaaggcacccaaagtgcagtctaatactacttctgaactgtcaaggggacacctttctaaaagaagctgcagttcatcatctgctgtgatagttccacaaccagaggatccagacagagccaatacttcagaaagacaaaaaacggggcaggtgcctaagaaagacaattctcgaggagtgaagcgcagtgctagtccagactacaacaggaccaattctcctagctctgcaaaaaaaccaaaagcacttcagcatactgaatctccctcagaaacaaataagccacatagtaagtcaaagaagagacatttagaccaggagcaacaactgaaatctgcacaatcaccatcaacaagcaaggctcataccaggaagagtggggccactggcggttcacggagtcagaaaagaaaaaggacagagagttcttgtgtaaagagtggctccgggtctgaatcaactggtgcagaagagagatctgcgaaacctaccaagctggcttcaaaatcagccacctcagccaaagctgggtgtagcaccatcactgattcttcttctgctgcctctacttcctcctcgtcttctgctgtagcctcggcctcctccactgtaccaccaggtgccagagtgaaacaaggaaaagatcagaacaaggccaggcgttcccgttcagcgtccagtcccagccccagaagaagtagcagggaaaaggaacagagtaaaactggtggctcttcaaaatttgattgggctgctcgtttcagccctaaagttagccttcctaaaacaaaactgtctcttccagggtcttctaagtcagagacatcaaaacctggaccttctggattacaggccaaattagcaagtttaagaaaatctacgaagaaacgcagtgagtctccacctgctgagctccccagtttgaggcggagcacacgccaaaagaccacgggctcctgtgctagtaccagtcggcgaggctctggcctgggcaaaagaggagcagctgaagctcgtcgacaggagaaaatggcagaccctgaaagcaaccaggaggcagtaaattcttcagctgctcggacagatgaagctccccaaggagctgcagcctctagttctgttgcaggggctgttggcatgaccacctctggggagagtgaatcagatgattccgagatgggacgtttgcaagctttgttagaggcaaggggtcttccccctcacctatttggtcctcttggtcctcggatgtcacagcttttccatagaacaattggaagtggagctagttctaaggcccagcagctactacaaggattgcaagccagtgatgaaagtcaacagcttcaggcagttattgagatgtgtcagttactggtcatgggaaatgaggagacactgggagggtttcctgtcaagagtgttgttccagctttgattacgttacttcagatggagcacaattttgatattatgaaccatgcttgtcgagccttaacatacatgatggaagcacttcctcgatcttctgctgttgtagtagatgctattcctgtctttttagaaaagctgcaagttattcagtgtattgatgtggcagagcaggccttgactgccttggagatgttgtcacggagacatagtaaagccattctacaggcgggtggtttggcagactgcttgctgtacctagaattcttcagcataaatgcccaaagaaatgcattagcaattgcagctaattgctgccagagtatcacgccagatgaatttcattttgtggcagattcactcccattgctaacccaaaggctaacacatcaggataaaaagtcagtagaaagcacttgcctttgttttgcacgcctagtggacaacttccagcatgaggagaatttactccagcaggttgcttccaaagatctgcttacaaatgttcaacagctgttggtagtgactccacccattttaagttctgggatgtttataatggtggttcgcatgttttctctgatgtgttccaactgtccaactttagctgttcaacttatgaaacaaaacattgcagaaacgcttcactttctcctgtgtggtgcctccaatggaagttgtcaggaacagattgatcttgttccacgaagccctcaagagttgtatgaactgacatctctgatttgtgaacttatgccatgtttaccaaaagaaggcatttttgcagttgataccatgttgaagaagggaaatgcacagaacacagatggtgcgatatggcagtggcgtgatgatcggggcctctggcatccatataacaggattgacagccggatcattgagcaaatcaatgaggacacgggaacagcacgtgccattcagagaaaacctaacccgttagccaatagtaacactagtggatattcagagtcaaagaaggatgatgctcgagcacagcttatgaaagaggatccggaactggctaagtcttttattaagacattatttggtgttctttatgaagtgtatagttcctcagcaggacctgcggtcagacataagtgccttagagcaattcttaggataatttattttgcggatgctgaacttctgaaggatgttctgaaaaatcatgctgtttcaagtcacattgcttccatgctgtcaagccaagacctgaagatagtagtgggagcacttcagatggcagaaattttaatgcagaagttacctgatatttttagtgtttacttcagaagagaaggtgtaatgcatcaagtaaaacacttagcagaatcagagtctttgttgacaagtccaccaaaggcatgtacgaatggatcgggatccatgggatccacaacttcagtcagcagtgggacagccacagctgccactcatgctgcagctgacttgggatcacccagcttgcagcacagcagggatgattctttagatctcagccctcaaggtcgattaagtgatgttctaaagagaaaacgactgccaaaacgagggccaagaaggccaaagtactcacctccaagagatgatgacaaagtagacaatcaagctaaaagccccaccactactcagtcacctaaatcttctttcctggcaagcttgaatccaaaaacatggggaaggttaagtacacagtccaacagcaacaacattgagccagcacggactgcgggaggtagtggccttgccagggctgcctcaaaggataccatctccaataatagagaaaaaattaaaggttggattaaggagcaggcacataaatttgtagaacgttatttcagttctgagaatatggatggaagcaaccctgcattgaatgtccttcagagactttgtgctgcaaccgaacaactcaacctccaggtggatggtggagctgagtgccttgtagaaatccgtagcatagtctcagagtcagatgtttcatcatttgaaatccaacatagtggatttgtgaagcagctgttgctttatttgacatctaaaagtgaaaaggatgctgtgagcagagagatcagattaaagcgatttcttcatgtatttttttcttctccacttcctggagaagagcccattggaagagtggaaccagtgggtaatgcacctttgttggcattagttcacaagatgaacaactgcctcagccagatggaacaatttccagtcaaagtacatgatttccctagtggaaatgggacaggaggcagcttttctctcaacagaggatcacaggctttaaaatttttcaacacacatcaattaaaatgccagttacaaaggcatccagactgtgcaaatgtgaagcagtggaagggtggacctgtcaagattgaccctctggctttggtacaagccatcgagagataccttgtagttagagggtatggaagagtaagagaagatgatgaagacagcgatgacgatggatcagatgaggaaatagatgagtctctggctgctcagttcctaaattcaggaaatgtaagacacaggctgcagttttatattggagaacatttgctgccgtataacatgactgtgtatcaggcagtacggcagtttagtatacaggctgaagatgaaagagaatccacagatgatgagagcaatcctctaggcagagctggtatttggacaaagactcatacaatatggtataaacctgtgagagaggatgaagaaagtaataaagattgtgttggtggtaaaagaggaagagcccaaacagctccaacgaaaacttcccctagaaatgcaaaaaagcatgatgagttatggcacgatggagtgtgcccatcagtatcaaatcctttagaagtttacctcattcccacaccacctgaaaatataacatttgaagacccgtcattagatgtgatccttcttttaagagttttacatgctatcagtcgatactggtattacttgtatgataatgcaatgtgcaaggaaattattccaactagtgaatttattaacagtaagttaacagcaaaagcaaataggcaacttcaagatcctttagtaatcatgacaggaaacatcccaacatggcttactgagctaggaaaaacctgcccatttttctttccttttgatacccggcaaatgcttttttatgtaactgcatttgatcgggaccgagcaatgcaaagattacttgataccaacccagaaatcaaccagtctgattctcaagatagcagagttgcacctagattggatagaaaaaaacgtactgtgaaccgagaggagctgctgaaacaggcggagtctgtgatgcaggacctcggcagctcacgggccatgttagaaatccagtatgaaaatgaggttggtacaggtcttgggcctacactggagttttatgcgcttgtatctcaggaactacagagagctgacttgggtctttggagaggtgaagaagtaactcttagcaatccaaaagggagccaagaagggaccaagtatattcaaaacctccagggcctgtttgcgcttccctttggtaggacagcaaagccagctcatatcgcaaaggttaagatgaagtttcgcttcttaggaaaattaatggccaaggctatcatggatttcagattggtggaccttccccttggcttacccttttataaatggatgctacggcaagaaacttcactgacatcacacgatttgtttgacatcgacccagttgtagccagatcagtttatcacctagaagacattgtcagacagaagaaaagacttgaacaagataaatcccagaccaaagagagtctacagtatgcattagaaaccttgactatgaatggctgctcagttgaagatctaggactggatttcactctgccagggtttcccaatatcgaactgaagaaaggagggaaggatataccagtcactatccacaatttagaggagtatctaagactggttatattctgggcactaaatgaaggcgtttctaggcaatttgattcgttcagagatggatttgaatcagtcttcccactcagtcatcttcagtacttctacccggaggaactggatcagctcctttgtggcagtaaagcagacacttgggatgcaaagacactgatggaatgctgtaggcctgatcatggttatactcatgacagtcgggctgtgaagtttttgtttgagattctcagtagttttgataatgagcagcagaggttatttctccagtttgtgactggtagcccaagattgcctgttggaggattccggagtttgaatccacctttgacaattgtccgaaagacgtttgaatcaacagaaaacccagatgacttcttgccctctgtaatgacttgtgtgaactatcttaagttgccggactattcaagcattgagataatgcgtgaaaaactgttgatagcagcaagagaagggcagcagtcgttccatctttcctgatcatagcaagaaatgcagtgtctgcctgttacagcaaaagaaacaaatcatgatttcttttctaatgttatcacctgagtcaaggaaacatgttacgccttcttgttgtagga

SEQ ID NO: 31620 - DNA, 5355 bp, Homo sapiens
  source 1..5355: mol_type = unassigned DNA
ccggagactttggggcctaactagtgaatggtagtgtctagaaagggtatgtcccttcaagagagaggtgccaatgtccaaccggcctaataacaatccaggggggtcactgcgacgttcacagaggaacactgccggggcccaaccacaagacgactcaataggaggaagtcggcgaggctctggcctgggcaaaagaggagcagctgaagctcgtcgacaggagaaaatggcagaccctgaaagcaaccaggaggcagtaaattcttcagctgctcggacagatgaagctccccaaggagctgcagcctctagttctgttgcaggggctgttggcatgaccacctctggggagagtgaatcagatgattccgagatgggacgtttgcaagctttgttagaggcaaggggtcttccccctcacctatttggtcctcttggtcctcggatgtcacagcttttccatagaacaattggaagtggagctagttctaaggcccagcagctactacaaggattgcaagccagtgatgaaagtcaacagcttcaggcagttattgagatgtgtcagttactggtcatgggaaatgaggagacactgggagggtttcctgtcaagagtgttgttccagctttgattacgttacttcagatggagcacaattttgatattatgaaccatgcttgtcgagccttaacatacatgatggaagcacttcctcgatcttctgctgttgtagtagatgctattcctgtctttttagaaaagctgcaagttattcagtgtattgatgtggcagagcaggccttgactgccttggagatgttgtcacggagacatagtaaagccattctacaggcgggtggtttggcagactgcttgctgtacctagaattcttcagcataaatgcccaaagaaatgcattagcaattgcagctaattgctgccagagtatcacgccagatgaatttcattttgtggcagattcactcccattgctaacccaaaggctaacacatcaggataaaaagtcagtagaaagcacttgcctttgttttgcacgcctagtggacaacttccagcatgaggagaatttactccagcaggttgcttccaaagatctgcttacaaatgttcaacagctgttggtagtgactccacccattttaagttctgggatgtttataatggtggttcgcatgttttctctgatgtgttccaactgtccaactttagctgttcaacttatgaaacaaaacattgcagaaacgcttcactttctcctgtgtggtgcctccaatggaagttgtcaggaacagattgatcttgttccacgaagccctcaagagttgtatgaactgacatctctgatttgtgaacttatgccatgtttaccaaaagaaggcatttttgcagttgataccatgttgaagaagggaaatgcacagaacacagatggtgcgatatggcagtggcgtgatgatcggggcctctggcatccatataacaggattgacagccggatcattgaggcagcccatcaggtcggtgaggatgagataagcttgtccactctgggacgagtttatactattgattttaattctatgcagcaaatcaatgaggacacgggaacagcacgtgccattcagagaaaacctaacccgttagccaatagtaacactagtggatattcagagtcaaagaaggatgatgctcgagcacagcttatgaaagaggatccggaactggctaagtcttttattaagacattatttggtgttctttatgaagtgtatagttcctcagcaggacctgcggtcagacataagtgccttagagcaattcttaggataatttattttgcggatgctgaacttctgaaggatgttctgaaaaatcatgctgtttcaagtcacattgcttccatgctgtcaagccaagacctgaagatagtagtgggagcacttcagatggcagaaattttaatgcagaagttacctgatatttttagtgtttacttcagaagagaaggtgtaatgcatcaagtaaaacacttagcagaatcagagtctttgttgacaagtccaccaaaggcatgtacgaatggatcgggatccatgggatccacaacttcagtcagcagtgggacagccacagctgccactcatgctgcagctgacttgggatcacccagcttgcagcacagcagggatgattctttagatctcagccctcaaggtcgattaagtgatgttctaaagagaaaacgactgccaaaacgagggccaagaaggccaaagtactcacctccaagagatgatgacaaagtagacaatcaagctaaaagccccaccactactcagtcacctaaatcttctttcctggcaagcttgaatccaaaaacatggggaaggttaagtacacagtccaacagcaacaacattgagccagcacggactgcgggaggtagtggccttgccagggctgcctcaaaggataccatctccaataatagagaaaaaattaaaggttggattaaggagcaggcacataaatttgtagaacgttatttcagttctgagaatatggatggaagcaaccctgcattgaatgtccttcagagactttgtgctgcaaccgaacaactcaacctccaggtggatggtggagctgagtgccttgtagaaatccgtagcatagtctcagagtcagatgtttcatcatttgaaatccaacatagtggatttgtgaagcagctgttgctttatttgacatctaaaagtgaaaaggatgctgtgagcagagagatcagattaaagcgatttcttcatgtatttttttcttctccacttcctggagaagagcccattggaagagtggaaccagtgggtaatgcacctttgttggcattagttcacaagatgaacaactgcctcagccagatggaacaatttccagtcaaagtacatgatttccctagtggaaatgggacaggaggcagcttttctctcaacagaggatcacaggctttaaaatttttcaacacacatcaattaaaatgccagttacaaaggcatccagactgtgcaaatgtgaagcagtggaagggtggacctgtcaagattgaccctctggctttggtacaagccatcgagagataccttgtagttagagggtatggaagagtaagagaagatgatgaagacagcgatgacgatggatcagatgaggaaatagatgagtctctggctgctcagttcctaaattcaggaaatgtaagacacaggctgcagttttatattggagaacatttgctgccgtataacatgactgtgtatcaggcagtacggcagtttagtatacaggctgaagatgaaagagaatccacagatgatgagagcaatcctctaggcagagctggtatttggacaaagactcatacaatatggtataaacctgtgagagaggatgaagaaagtaataaagattgtgttggtggtaaaagaggaagagcccaaacagctccaacgaaaacttcccctagaaatgcaaaaaagcatgatgagttatggcacgatggagtgtgcccatcagtatcaaatcctttagaagtttacctcattcccacaccacctgaaaatataacatttgaagacccgtcattagatgtgatccttcttttaagagttttacatgctatcagtcgatactggtattacttgtatgataatgcaatgtgcaaggaaattattccaactagtgaatttattaacagtaagttaacagcaaaagcaaataggcaacttcaagatcctttagtaatcatgacaggaaacatcccaacatggcttactgagctaggaaaaacctgcccatttttctttccttttgatacccggcaaatgcttttttatgtaactgcatttgatcgggaccgagcaatgcaaagattacttgataccaacccagaaatcaaccagtctgattctcaagatagcagagttgcacctagattggatagaaaaaaacgtactgtgaaccgagaggagctgctgaaacaggcggagtctgtgatgcaggacctcggcagctcacgggccatgttagaaatccagtatgaaaatgaggttggtacaggtcttgggcctacactggagttttatgcgcttgtatctcaggaactacagagagctgacttgggtctttggagaggtgaagaagtaactcttagcaatccaaaagggagccaagaagggaccaagtatattcaaaacctccagggcctgtttgcgcttccctttggtaggacagcaaagccagctcatatcgcaaaggttaagatgaagtttcgcttcttaggaaaattaatggccaaggctatcatggatttcagattggtggaccttccccttggcttacccttttataaatggatgctacggcaagaaacttcactgacatcacacgatttgtttgacatcgacccagttgtagccagatcagtttatcacctagaagacattgtcagacagaagaaaagacttgaacaagataaatcccagaccaaagagagtctacagtatgcattagaaaccttgactatgaatggctgctcagttgaagatctaggactggatttcactctgccagggtttcccaatatcgaactgaagaaaggagggaaggatataccagtcactatccacaatttagaggagtatctaagactggttatattctgggcactaaatgaaggcgtttctaggcaatttgattcgttcagagatggatttgaatcagtcttcccactcagtcatcttcagtacttctacccggaggaactggatcagctcctttgtggcagtaaagcagacacttgggatgcaaagacactgatggaatgctgtaggcctgatcatggttatactcatgacagtcgggctgtgaagtttttgtttgagattctcagtagttttgataatgagcagcagaggttatttctccagtttgtgactggtagcccaagattgcctgttggaggattccggagtttgaatccacctttgacaattgtccgaaagacgtttgaatcaacagaaaacccagatgacttcttgccctctgtaatgacttgtgtgaactatcttaagttgccggactattcaagcattgagataatgcgtgaaaaactgttgatagcagcaagagaagggcagcagtcgttccatctttcctgatcatagcaagaaatgcagtgtctgcctgttacagcaaaagaaacaaatcatgatttcttttctaatgttatcacctgagtcaaggaaacatgttacgccttcttgttgtagga

SEQ ID NO: 31621 - DNA, 584 bp, Homo sapiens
  source 1..584: mol_type = unassigned DNA
aaatggaaactaggaagcagctccagtgacaacagttgtgggaagcgagggtcagagaagggagaggccagagagactttagaccgcatgaatggtagtgtctagaaagggtatgtcccttcaagagagaggtgccaatgtccaaccggcctaataacaatccaggggggtcactgcgacgttcacagaggaacactgccggggcccaaccacaagacgactcaataggaggaagaagctgcagttcatcatctgctgtgatagttccacaaccagaggatccagacagagccaatacttcagaaagacaaaaaacggggcaggtgcctaagaaagacaattctcgaggagtgaagcgcagtgctagtccagactacaacaggaccaattctcctagctctgcaaaaaaaccaaaagcacttcagcatactgaatctccctcagaaacaaataagccacatagtaagtcaaagaagagacatttagaccaggagcaacaactgaaatctgcacaatcaccatcaacaagcaaggctcataccaggaagagtggggccactggcggttcacggagtcagaaaaga

SEQ ID NO: 31622 - DNA, 603 bp, Homo sapiens
  source 1..603: mol_type = unassigned DNA
gtcattatgggtggggctgaagcgcagagcagctgaaacatttttataccaccacccgcacactttcaatgggatagaagggactccaaaagtgaatggtagtgtctagaaagggtatgtcccttcaagagagaggtgccaatgtccaaccggcctaataacaatccaggggggtcactgcgacgttcacagaggaacactgccggggcccaaccacaagacgactcaataggaggaagaagctgcagttcatcatctgctgtgatagttccacaaccagaggatccagacagagccaatacttcagaaagacaaaaaacggggcaggtgcctaagaaagacaattctcgaggagtgaagcgcagtgctagtccagactacaacaggaccaattctcctagctctgcaaaaaaaccaaaagcacttcagcatactgaatctccctcagaaacaaataagccacatagtaagtcaaagaagagacatttagaccaggagcaacaactgaaatctgcacaatcaccatcaacaagcaaggctcataccaggaagagtggggccactggcggttcacggagtcagaaaagaaaaaggacagagagt

SEQ ID NO: 31623 - DNA, 1642 bp, Homo sapiens
  source 1..1642: mol_type = unassigned DNA
gcgccgctggggggggtggggggagctagtggaagttactgccgcgccaccgagtccggaccggagactttggggcctaactagtgaatggtagtgtctagaaagggtatgtcccttcaagagagaggtgccaatgtccaaccggcctaataacaatccaggggggtcactgcgacgttcacagaggaacactgccggggcccaaccacaagacgactcaataggaggaaggtcacatttagggcaggcaaaacataagggatatagccctcctgagagtagaaaatctaattctaaggcacccaaagtgcagtctaatactacttctgaactgtcaaggggacacctttctaaaagaagctgcagttcatcatctgctgtgatagttccacaaccagaggatccagacagagccaatacttcagaaagacaaaaaacggggcaggtgcctaagaaagacaattctcgaggagtgaagcgcagtgctagtccagactacaacaggaccaattctcctagctctgcaaaaaaaccaaaagcacttcagcatactgaatctccctcagaaacaaataagccacatagtaagtcaaagaagagacatttagaccaggagcaacaactgaaatctgcacaatcaccatcaacaagcaaggctcataccaggaagagtggggccactggcggttcacggagtcagaaaagaaaaaggacagagagttcttgtgtaaagagtggctccgggtctgaatcaactggtgcagaagagagatctgcgaaacctaccaagctggcttcaaaatcagccacctcagccaaagctgggtgtagcaccatcactgattcttcttctgctgcctctacttcctcctcgtcttctgctgtagcctcggcctcctccactgtaccaccaggtgccagagtgaaacaaggaaaagatcagaacaaggccaggcgttcccgttcagcgtccagtcccagccccagaagaagtagcagggaaaaggaacagagtaaaactggtggctcttcaaaatttgattgggctgctcgtttcagccctaaagttagccttcctaaaacaaaactgtctcttccagggtcttctaagtcagagacatcaaaacctggaccttctggattacaggccaaagtactcacctccaagagatgatgacaaagtagacaatcaagctaaaagccccaccactactcagtcacctaaatcttctttcctggcaagcttgaatccaaaaacatggggaaggttaagtacacagtccaacagcaacaacattgagccagcacggactgcgggaggtagtggccttgccagggctgcctcaaaggataccatctccaataatagagaaaaaattaaaggttggattaaggagcaggcacataaatttgtagaacgttatttcagttctgagaatatggatggaagcaaccctgcattgaatgtccttcagagactttgtgctgcaaccgaacaactcaacctccaggtggatggtggagctgagtgccttgtagaaatccgtagcatagtctcagagtcagatgtttcatcatttgaaatccaacatagtggatttgtgaagcagctgttgctttatttgacatctaaaagtgaaaa

SEQ ID NO: 31624 - DNA, 2045 bp, Homo sapiens
  source 1..2045: mol_type = unassigned DNA
ggaactagtccggtgcaggacgtggggcttttgcagctcagctggttccggctggggaagatggcggtggctggggcggtgtccggggagccgctggtgcactggtgcacccagcagttgcggaagactttcggcctggatgtcagcgaggagatcattcagtacgttttgtcaattgagagtgctgaagagatacgagaatatgttactgatctcctccagggaaatgaaggcaaaaaaggtcaattcatagaagaacttataaccaaatggcaaaagaatgatcaggagttgatttcggatcctttgcagcagtgcttcaaaaaagatgaaattttagatgggcagaaatcaggcgaccatctaaagcggggtaggaagaaagggagaaacagacaggaagttcctgcatttactgaacctgacacgactgcagaggttaaaacaccttttgatttggccaaggcacaagagaacagcaactccgtaaagaagaagacaaagtttgtcaatttatacacaagagagggacaggacaggcttgcagtcctgctccctggtcgtcacccttgtgattgcctgggccagaagcacaagctcatcaataactgtctgatctgtgggcgcattgtctgtgaacaagaaggctcaggcccttgcttattctgtggcactctggtgtgtactcatgaggaacaagatattttacagcgtgactcaaacaagagccagaaactgctaaagaaactcatgtcaggagtggagaattctggaaaggtggacatctctaccaaggaccttcttcctcatcaagaattgcgaattaagtctggtctggagaaggctatcaagcataaagacaaactgttagagtttgacagaactagtattcgaaggacccaagtcattgatgatgagtcagattactttgccagtgattctaaccaatggttgtccaaacttgagcgggaaaccttgcagaagcgagaggaggagctgagagaacttcgacacgcctctcgactttctaagaaggtcaccattgactttgcaggaaggaagatcctggaagaagaaaattcactagcagagtatcatagcagactagatgagacaatacaggccattgccaatggaaccttgaaccagccactgaccaaattggatagatcttctgaagagcctttgggagttctggtaaatcccaacatgtaccagtcccctccccagtgggttgaccacacaggtgcagcctcacagaagaaggctttccgttcttcaggatttggactagagttcaactcatttcagcaccagttgcgaatccaggatcaagaatttcaggaaggctttgatggtggctggtgcctctctgtacatcagccctgggcttctctgcttgtcagagggattaaaagggtggagggcagatcctggtacaccccccacagaggacgactttggatagcagccacagctaaaaaaccctcccctcaagaagtctcagaactccaggctacatatcgtcttcttcgtgggaaagatgtggaatttcctaatgactatccgtcaggttgtcttctgggctgtgtggacctaattgactgcttgtcccagaagcaatttaaggagcagtttccagacatcagtcaagagtctgattctccatttgttttcatctgcaaaaatcctcaggaaatggttgtgaagtttcctattaaaggaaatccaaaaatctggaaattggattccaagatccatcaaggagcaaagaaggggttaatgaagcagaataaagctgtctgacccaggagaaaaggaactatacagcatagtggagttttgtgtactaaaattgctatctactggtcctttggaattgaagtagtagaaacctaaaggcttggcgtcaggcttgaatatctcagaacttaaactcttaccaaaatctgtatatttttcttaaggagtgggattcctactttatgtaatggggtcgaaatctttgaacacattatttataaaaacctgtttaaaaattctaa

SEQ ID NO: 31625 - DNA, 1942 bp, Homo sapiens
  source 1..1942: mol_type = unassigned DNA
cggggcccggacgcatccgtggacttggaggctggctcgggcccgcacctcccatccccagctgcccgcaacccccagtgactcgggatcccccggagagccctcccctctcggcaggagggggctgactcagggagaaatggcagtttagggcctagggggccacgtgaccctcccccaggaatgtggtgacgtcatcggaggcgtggtcgtccccaaaattagggaggaagaggaaaaaaaaaagccagaaaaagttttcttttctggagtcccaaacgaggtgcgggacggaagagggggtgaaggccagaggctcggggcttcaagaccgctgtctggagtccccctttccaggccatgtcggggcccacctggctgcccccgaagcagccggagcccgccagagcccctcaggggagggcgatcccccgcggcaccccggggccaccaccggcccacggagcagcactccagccccaccccagggtcaatttttgcccccttccatctgagcagtgttaccaggccccagggggaccggaggatcgggggccggcgtgggtggggtcccatggagtactccagcacacgcaggggctccctgcagacagggggggccttcgccctggaagcctggacgccgagatagacttgctgagcagcacgctggccgagctgaatgggggtcggggtcatgcgtcacggcgaccagaccgacaggcatatgagcccccgccacctcctgcctaccgcacgggctccctgaagccaaatccagcctcgccgctcccagcgtctccctatgggggccccactccagcctcttacactaccgccagcaccccggctggcccagccttccccgtgcaagtgaaggtggcacagccagtgaggggctgcggcccacccaggcggggagcctctcaggcctctgggcccctcccgggcccccactttcctctcccaggccgaggtgaagtctgggggcctggctataggagccagagagagccagggccaggggccaaagaggaagctgctggggtctctggccctgcaggaagaggaagaggaggcgagcacgggccccaggtgcccctgagccagcctccagaggatgagctggataggctgacgaagaagctggttcacgacatgaaccacccgcccagcggggagtactttggccagtgtggtggctgcggagaagatgtggttggggatggggctggggttgtggcccttgatcgcgtctttcacgtgggctgctttgtatgttctacatgccgggcccagcttcgcggccagcatttctacgccgtggagaggagggcatattgcgagggctgctacgtggccaccctggagaaatgtgccacgtgctcccagcccatcctggaccggatcctgcgggctatggggaaggcctaccaccctggctgcttcacctgcgtggtgtgtcaccgcggcctcgacggcatccccttcacagtggatgctacgagccagatccactgcattgaggactttcacaggaagtttgccccaagatgctcagtgtgcggtggggccataatgcctgagccaggtcaggaggagactgtgagaattgttgctctggatcgaagttttcacattggctgttacaagtgcgaggagtgtgggctgctgctctcctctgagggcgagtgtcagggctgctacccgctggatgggcacatcttgtgcaaggcctgcagcgcctggcgcatccaggagctctcagccaccgtcaccactgactgctgagtcttcctagaagtacctgctgggttctcagttccagttcccatcctttgattgatcactctccctgacatccacctgtatgactttgtcaccaaatgctgtcttctctttctccaatcaagaaataataatccctcgagtttacaaaaca

SEQ ID NO: 31626 - DNA, 2538 bp, Homo sapiens
  source 1..2538: mol_type = unassigned DNA
gaggcggcctgcagggagcagccgcgagccggccgggcgcgccgagcccgagccccagccggagcggggcgggggagggaggagccagagcggccgccgcctctgccggaggagccgcggggccgccacactcgccccccgccccccccgcgctcactcgcactcacacccgggcgcaggaggcgggcggcccgggccccaccggccccccatggacgcccccagcacggggcgctgagacccccgcgtcgctgcccagcccggtccggcgcgccacgccgagggatctctggacaggacaagactccgaagctactcccccagcacacagcccgggacccacaaacccagcttgcccccagccctcccacctgccactccctggcccctcccaccgcccgccccccttggggcgcagggcatggtgtgaaaggccaagtgctgaggcgggtatcatgggtgctgtgccctagggcctgggtggcagggggtgggtggcctgtgggtgtgccgggggggccagtgtgcccaccccagtctcttggcgtgctggagggcatcctggatggaattgaagtgaatggaacagaagccaagcaaggtggagtgtgggtcagacccagaggagaacagtgccaggtcaccagatggaaagcgaaaaagaaagaacggccaatgttccctgaaaaccagcatgtcagggtatatccctagttacctggacaaagacgagcagtgtgtcgtgtgtggggacaaggcaactggttatcactaccgctgtatcacttgtgagggctgcaagggcttctttcgccgcacaatccagaagaacctccatcccacctattcctgcaaatatgacagctgctgtgtcattgacaagatcacccgcaatcagtgccagctgtgccgcttcaagaagtgcatcgccgtgggcatggccatggacttggttctagatgactcgaagcgggtggccaagcgtaagctgattgagcagaaccgggagcggcggcggaaggaggagatgatccgatcactgcagcagcgaccagagcccactcctgaagagtgggatctgatccacattgccacagaggcccatcgcagcaccaatgcccagggcagccattggaaacagaggcggaaattcctgcccgatgacattggccagtcacccattgtctccatgccggacggagacaaggtggacctggaagccttcagcgagtttaccaagatcatcaccccggccatcacccgtgtggtggactttgccaaaaaactgcccatgttctccgagctgccttgcgaagaccagatcatcctcctgaaggggtgctgcatggagatcatgtccctgcgggcggctgtccgctacgaccctgagagcgacaccctgacgctgagtggggagatggctgtcaagcgggagcagctcaagaatggcggcctgggcgtagtctccgacgccatctttgaactgggcaagtcactctctgcctttaacctggatgacacggaagtggctctgctgcaggctgtgctgctaatgtcaacagaccgctcgggcctgctgtgtgtggacaagatcgagaagagtcaggaggcgtacctgctggcgttcgagcactacgtcaaccaccgcaaacacaacattccgcacttctggcccaagctgctgatgaaggagagagaagtgcagagttcgattctgtacaagggggcagcggcagaaggccggccgggcgggtcactgggcgtccacccggaaggacagcagcttctcggaatgcatgttgttcagggtccgcaggtccggcagcttgagcagcagcttggtgaagcgggaagtctccaagggccggttcttcagcaccagagcccgaagagcccgcagcagcgtctcctggagctgctccaccgaagcggaattctccatgcccgagcggtctgtggggaagacgacagcagtgaggcggactccccgagctcctctgaggaggaaccggaggtctgcgaggacctggcaggcaatgcagcctctccctgaagccccccagaaggccgatggggaaggagaaggagtgccataccttctcccaggcctctgccccaagagcaggaggtgcctgaaagctgggagcgtgggctcagcagggctggtcacctcccatcccgtaagaccaccttcccttcctcagcaggccaaacatggccagactcccttgctttttgctgtgtagttccctctgcctgggatgcccttccccctttctctgcctggcaacatcttacttgtcctttgaggccccaactcaagtgtcacctccttccccagctcccccaggcagaaatagttgtctgtgcttccttggttcatgcttctactgtgacacttatctcactgttttataattagtcgggcatgagtctgtttcccaagctagactgtgtctgaatcatgtctgtatccccagtgcccggtgcagggcctggcatagagtaggtactccataaaaggtgtgttgaattgaa

SEQ ID NO: 31627 - DNA, 2512 bp, Homo sapiens
  source 1..2512: mol_type = unassigned DNA
agcagattgttgggggaaatggctggtgacagagaatagaaagagcctatatggagaagggtgacgttggaaaagggaggcagtggatcggtattgatgttagaaatgagaggggagggaggtaacagggaatgaacccccacaaggatgaaaaacgtaagatgattgaagttaaaaggacatcaggggtcacctgcccagccctcgcagctgaagcttgaggaagctctgcccccgacagcagtggcgatttgtcaagggatctctggacaggacaagactccgaagctactcccccagcacacagcccgggacccacaaacccagcttgcccccagccctcccacctgccactccctggcccctcccaccgcccgccccccttggggcgcagggcatggtgtgaaaggccaagtgctgaggcgggtatcatgggtgctgtgccctagggcctgggtggcagggggtgggtggcctgtgggtgtgccgggggggccagtgtgcccaccccagtctcttggcgtgctggagggcatcctggatggaattgaagtgaatggaacagaagccaagcaaggtggagtgtgggtcagacccagaggagaacagtgccaggtcaccagatggaaagcgaaaaagaaagaacggccaatgttccctgaaaaccagcatgtcagggtatatccctagttacctggacaaagacgagcagtgtgtcgtgtgtggggacaaggcaactggttatcactaccgctgtatcacttgtgagggctgcaagggcttctttcgccgcacaatccagaagaacctccatcccacctattcctgcaaatatgacagctgctgtgtcattgacaagatcacccgcaatcagtgccagctgtgccgcttcaagaagtgcatcgccgtgggcatggccatggacttggttctagatgactcgaagcgggtggccaagcgtaagctgattgagcagaaccgggagcggcggcggaaggaggagatgatccgatcactgcagcagcgaccagagcccactcctgaagagtgggatctgatccacattgccacagaggcccatcgcagcaccaatgcccagggcagccattggaaacagaggcggaaattcctgcccgatgacattggccagtcacccattgtctccatgccggacggagacaaggtggacctggaagccttcagcgagtttaccaagatcatcaccccggccatcacccgtgtggtggactttgccaaaaaactgcccatgttctccgagctgccttgcgaagaccagatcatcctcctgaaggggtgctgcatggagatcatgtccctgcgggcggctgtccgctacgaccctgagagcgacaccctgacgctgagtggggagatggctgtcaagcgggagcagctcaagaatggcggcctgggcgtagtctccgacgccatctttgaactgggcaagtcactctctgcctttaacctggatgacacggaagtggctctgctgcaggctgtgctgctaatgtcaacagaccgctcgggcctgctgtgtgtggacaagatcgagaagagtcaggaggcgtacctgctggcgttcgagcactacgtcaaccaccgcaaacacaacattccgcacttctggcccaagctgctgatgaaggagagagaagtgcagagttcgattctgtacaagggggcagcggcagaaggccggccgggcgggtcactgggcgtccacccggaaggacagcagcttctcggaatgcatgttgttcagggtccgcaggtccggcagcttgagcagcagcttggtgaagcgggaagtctccaagggccggttcttcagcaccagagcccgaagagcccgcagcagcgtctcctggagctgctccaccgaagcggaattctccatgcccgagcggtctgtggggaagacgacagcagtgaggcggactccccgagctcctctgaggaggaaccggaggtctgcgaggacctggcaggcaatgcagcctctccctgaagccccccagaaggccgatggggaaggagaaggagtgccataccttctcccaggcctctgccccaagagcaggaggtgcctgaaagctgggagcgtgggctcagcagggctggtcacctcccatcccgtaagaccaccttcccttcctcagcaggccaaacatggccagactcccttgctttttgctgtgtagttccctctgcctgggatgcccttccccctttctctgcctggcaacatcttacttgtcctttgaggccccaactcaagtgtcacctccttccccagctcccccaggcagaaatagttgtctgtgcttccttggttcatgcttctactgtgacacttatctcactgttttataattagtcgggcatgagtctgtttcccaagctagactgtgtctgaatcatgtctgtatccccagtgcccggtgcagggcctggcatagagtaggtactccataaaaggtgtgttgaattg

SEQ ID NO: 31628 - DNA, 4895 bp, Homo sapiens
  source 1..4895: mol_type = unassigned DNA
gcggccgccgcctctgccggaggagccgcggggccgccacactcgccccccgccccccccgcgctcactcgcactcacacccgggcgcaggaggcgggcggcccgggccccaccggccccccatggacgcccccagcacggggcgctgagacccccgcgtcgctgcccagcccggtccggcgcgccacgccgagggatctctggacaggacaagactccgaagctactcccccagcacacagcccgggacccacaaacccagcttgcccccagccctcccacctgccactccctggcccctcccaccgcccgccccccttggggcgcagggcatggtgtgaaaggccaagtgctgaggcgggtatcatgggtgctgtgccctagggcctgggtggcagggggtgggtggcctgtgggtgtgccgggggggccagtgtgcccaccccagtctcttggcgtgctggagggcatcctggatggaattgaagtgaatggaacagaagccaagcaaggtggagtgtgggtcagacccagaggagaacagtgccaggtcaccagatggaaagcgaaaaagaaagaacggccaatgttccctgaaaaccagcatgtcagggtatatccctagttacctggacaaagacgagcagtgtgtcgtgtgtggggacaaggcaactggttatcactaccgctgtatcacttgtgagggctgcaagggcttctttcgccgcacaatccagaagaacctccatcccacctattcctgcaaatatgacagctgctgtgtcattgacaagatcacccgcaatcagtgccagctgtgccgcttcaagaagtgcatcgccgtgggcatggccatggacttggttctagatgactcgaagcgggtggccaagcgtaagctgattgagcagaaccgggagcggcggcggaaggaggagatgatccgatcactgcagcagcgaccagagcccactcctgaagagtgggatctgatccacattgccacagaggcccatcgcagcaccaatgcccagggcagccattggaaacagaggcggaaattcctgcccgatgacattggccagtcacccattgtctccatgccggacggagacaaggtggacctggaagccttcagcgagtttaccaagatcatcaccccggccatcacccgtgtggtggactttgccaaaaaactgcccatgttctccgagctgccttgcgaagaccagatcatcctcctgaaggggtgctgcatggagatcatgtccctgcgggcggctgtccgctacgaccctgagagcgacaccctgacgctgagtggggagatggctgtcaagcgggagcagctcaagaatggcggcctgggcgtagtctccgacgccatctttgaactgggcaagtcactctctgcctttaacctggatgacacggaagtggctctgctgcaggctgtgctgctaatgtcaacagaccgctcgggcctgctgtgtgtggacaagatcgagaagagtcaggaggcgtacctgctggcgttcgagcactacgtcaaccaccgcaaacacaacattccgcacttctggcccaagctgctgatgaaggtgactgacctccgcatgatcggggcctgccacgccagccgcttcctccacatgaaagtcgagtgccccaccgaactcttccccccactcttcctcgaggtctttgaggatcaggaagtctaaagcctcaggcggccagagggtgtgcggagctggtggggaggagcctggagagaaggggcagagctgggggctgagggagacccccccacaccccttctctccttcctctcgtccttggatagattcagctcccacacacacacccgcactgcccaggtccctcctcagacctccagccctgggacagggcaaacaactgaacttgctatggaaaggacagtgtgggaggctgggggagctgtgtcctgcagttcccaggaccccatcctctcagaaggtaggggaagggcgggaggattgagaagggacaagccaccttgaccgtaggggaaggaggaatgtgggctgggggaagatgccctcaactcaccccctacacacacatgagagagagcccccacccagttccttggcctaggtctcccctccaggctgagggcctctctacttccccagatgcctgggtgcaaagaacggcttggcttggctcctcctctggaggttaaaatttatagtcattctaactgcactttggaaaccaagcaaggggagaagacaaatgaagaaaaactagacagagagaaaaatacaaaaaagagagagcgagcgatagagagagatgatattaagttattaactgaggctgaccagaggggaggaccccccctttaccaccccatgcactttgcgagctgccccttcttcccccacatcagagagaaatgcccccacaccagagccccaagggtagggctgccgatcagagctgtgagttaacacaacagggtcctggccaccccccttgccataccccgccctctgtgcccctttggcaccccccaaccctagtatgtcctctgctttctgccactcgtgcccgctgagttccatctacctctcatgctggatgccagctggcccctcaccagcctgccctgctgcccacacagctcccctttaagtgcccagccctaggggcctctccccatccacctcctccttccacaccttggcacccacccaggaaaaaactgtggctccaactcctaccctccttatatcctgcagtattagctagaaaccggatgctgctgcattggttgggtcgggggtaggagggctgtgcgtgagcgtctcccagaaccctccacccctttagcactctgtttccctgtttcccatctgtcttctgggctctctctaacctctgccctcctccccagctcctactcactgcactaactctgggcgggcaggtaccagaatgggggtgtttagataagtgacacttagttggggccccaggggaggggtggtcggtgctcctttttctttaaagctcttttggccagctgcccctctgccccgggaccccttcccctcttcttttctctaattcagggactttggcttgagcccctctcgccctcctggtgagggtgctctgttggtctgcacttgggtgagctgtcctcctccccctccctgtggctgccgcccactcctcaggggagagagggagagaggaggtggtcctcccatgggagcaggaggtggggtgggacagagcagaccagagggtgctgggctcagggctgcatgtcggcagggatggatgggtggacacagatgcccccggaagccatggggattggggcagggggtggggggaggggtgccagggcttcctgcgctttgcactattggggcaaaaatgtcttaagcagtggggaacctgccaccccaccctgaccctcagcctgccacagccccctacacacacacacacacacacacacacacacacacacacacggacatgcacacacggacatgggaaggcaatgctatgctgcccgtcagggcactgtccttccccaatcgttcaggtgttccaacaggggtggagggcctggaggagcacccgctgtcacctgtgcatgtgcctgtcccaccctgctggggcctcgggctgcccgcgctgtctttgtctctatcctctctctctctcctggagtactgaatcctgtattactccagtcccatgggtaggccctcttgtaccttcctaccacgcctgggggcccagtggaattcctgacctgtctgctgtcttccccatccctccatccccaccccaacccctccatccccattctcagccatggacacggcagagaaaaggccttgaagagccttagcctcttataggcacttgggactcccccaccctccccaatcatatgagctgtgatcccatcctccccggacccctcccttccccctcggtgatgtggggtgtatgtgtgcgttcctctgcgtgaatgtgtgagtgagtacacatggtaggggaggagccagggcgactcaggagtgccacgcacctgctctagagcggcagctgtcccagtccctgctgtggaagtgggggacagggccctctcctgggggccattggtgctaatgagggggatggccttgatgtgggtgctcagcatgcctcccccagtattggcccggggcactagggcaggcagggtggagcagcaggtgcagtatcggtgggaggacgggttgctgggaataggacgagggggccaggccaggacaaggggttgccagagccatgaccactaccccgcccccaccacccgcctctccatctcagtattgcccctcccatcactcataacacacatacctcatccagcctcctccctgctcagacttggggagggtgggggaggagcccctaccccttctcctggtggcgggtctgcagggctgggagagggcagggcgttgtgagagagagaccgtccataaggaggacagtaactcctgccctgggaactcctgggcgggggggagggggacactgcccagaggcgctactgaatgtatgagaagctggtgctgggctggggggaggggggttgtggccagaaacagggaaggaggtaggtctcttccccagggaggggtgggaccggcaggggtgacttgaggggctcctactcctgccccacgttgacaatcagtatgtctgttatgtgcgatttttcaccccgttgtgttttgggtcaggattttaaagaaagatatttttatggtaattgttgctcgtctattttactatatatttatgtaataaatatatgatgaaaataa

SEQ ID NO: 31629 - DNA, 1909 bp, Homo sapiens
  source 1..1909: mol_type = unassigned DNA
gtgcacgcatccatgtgagagtgtttttgtgcatgtgtgggctggggagggctctgaatatctcctggaacggtacccagagccctgtggctctgcgcatgcgggggatctctggacaggacaagactccgaagctactcccccagcacacagcccgggacccacaaacccagcttgcccccagccctcccacctgccactccctggcccctcccaccgcccgccccccttggggcgcagggcatggtgtgaaaggccaagtgctgaggcgggtatcatgggtgctgtgccctagggcctgggtggcagggggtgggtggcctgtgggtgtgccgggggggccagtgtgcccaccccagtctcttggcgtgctggagggcatcctggatggaattgaagtgaatggaacagaagccaagcaaggtggagtgtgggtcagacccagaggagaacagtgccaggtcaccagatggaaagcgaaaaagaaagaacggccaatgttccctgaaaaccagcatgtcagggtatatccctagttacctggacaaagacgagcagtgtgtcgtgtgtggggacaaggcaactggttatcactaccgctgtatcacttgtgagggctgcaagggcttctttcgccgcacaatccagaagaacctccatcccacctattcctgcaaatatgacagctgctgtgtcattgacaagatcacccgcaatcagtgccagctgtgccgcttcaagaagtgcatcgccgtgggcatggccatggacttggttctagatgactcgaagcgggtggccaagcgtaagctgattgagcagaaccgggagcggcggcggaaggaggagatgatccgatcactgcagcagcgaccagagcccactcctgaagagtgggatctgatccacattgccacagaggcccatcgcagcaccaatgcccagggcagccattggaaacagaggcggaaattcctgcccgatgacattggccagtcacccattgtctccatgccggacggagacaaggtggacctggaagccttcagcgagtttaccaagatcatcaccccggccatcacccgtgtggtggactttgccaaaaaactgcccatgttctccgagctgccttgcgaagaccagatcatcctcctgaaggggtgctgcatggagatcatgtccctgcgggcggctgtccgctacgaccctgagagcgacaccctgacgctgagtggggagatggctgtcaagcgggagcagctcaagaatggcggcctgggcgtagtctccgacgccatctttgaactgggcaagtcactctctgcctttaacctggatgacacggaagtggctctgctgcaggctgtgctgctaatgtcaacagaccgctcgggcctgctgtgtgtggacaagatcgagaagagtcaggaggcgtacctgctggcgttcgagcactacgtcaaccaccgcaaacacaacattccgcacttctggcccaagctgctgatgaaggtgactgacctccgcatgatcggggcctgccacgccagccgcttcctccacatgaaagtcgagtgccccaccgaactcttccccccactcttcctcgaggtctttgaggatcaggaagtctaaagcctcaggcggccagagggtgtgcggagctggtggggaggagcctggagagaaggggcagagctgggggctgagggagacccccccacaccccttctctccttcctctcgtccttggatagattcagctcccacacacacacccgcactgcccaggtccctcctcagacctccagccctgggacagggcaaacaactgaacttgctatggaaaggacagtgtgggaggctgggggagctgtgtcctgcagttcccaggaccccatcctctcag

SEQ ID NO: 31630 - DNA, 6341 bp, Homo sapiens
  source 1..6341: mol_type = unassigned DNA
cggcggggattaactttgcatgaataatgtgagtgcgcttggaaaagagacctcctgctccgcgggctcggggcaagagcccgcaggctaccttccccgggcaggggcgctcaacccaaccggctccagggcactggtaatttggctagaggaccgcgcggaggcagcgggatctgcgatttccttctggttggctgtcctgcgtgggtgccaagttccacacatgatttaatgaataagaaggagatgtcagtgaaaaaagggatccagaatgattactaacctatgactcccaacagtatgacagaaaatggccttacagcctgggacaaaccgaagcactgtccagaccgagaacacgactggaagctagtaggaatgtctgaagcctgcctacataggaagagccattcagagaggcgcagcacgttgaaaaatgaacagtcgtcgccacatctcatccagaccacttggactagctcaatattccatctggaccatgatgatgtgaacgaccagagtgtctcaagtgcccagaccttccaaacggaggagaagaaatgtaaagggtacatccccagttacttagacaaggacgagctctgtgtagtgtgtggtgacaaagccaccgggtatcactaccgctgtatcacgtgtgaaggctgcaagggtttctttagaagaaccattcagaaaaatctccatccatcctattcctgtaaatatgaaggaaaatgtgtcatagacaaagtcacgcgaaatcagtgccaggaatgtcgctttaagaaatgcatctatgttggcatggcaacagatttggtgctggatgacagcaagaggctggccaagaggaagctgatagaggagaaccgggagaaaagacggcgggaagagctgcagaagtccatcgggcacaagccagagcccacagacgaggaatgggagctcatcaaaactgtcaccgaagcccatgtggcgaccaacgcccaaggcagccactggaagcaaaaacggaaattcctgccagaagacattggacaagcaccaatagtcaatgccccagaaggtggaaaggttgacttggaagccttcagccattttacaaaaatcatcacaccagcaattaccagagtggtggattttgccaaaaagttgcctatgttttgtgagctgccatgtgaagaccagatcatcctcctcaaaggctgctgcatggagatcatgtcccttcgcgctgctgtgcgctatgacccagaaagtgagactttaaccttgaatggggaaatggcagtgacacggggccagctgaaaaatgggggtcttggggtggtgtcagacgccatctttgacctgggcatgtctctgtcttctttcaacctggatgacactgaagtagccctccttcaggccgtcctgctgatgtcttcagatcgcccggggcttgcctgtgttgagagaatagaaaagtaccaagatagtttcctgctggcctttgaacactatatcaattaccgaaaacaccacgtgacacacttttggccaaaactcctgatgaaggtgacagatctgcggatgataggagcctgccatgccagccgcttcctgcacatgaaggtggaatgccccacagaactcttcccccctttgttcttggaagtgttcgaggattagactgactggattcattctcataattcctacagcactactgggtgtcatttcattccattgcctagctcttttttgtttgtttctttgtgttgggagggattatttgggagggaaaagggaagtagtccttggcatagacatggatgaaattgccccttgaatgcgggtacttgaaactattgcatttcgttctccggtcctgtgatgtgaatgctctgaaggttttatggttgtggaggtggggtgggggacaatcattaactcaccagcaccaagcatcaccagctcccacccgtccctggtccaagacttgagtcagcaaaatggcgccacaggacactaaagaagccttaaaaccaagataatacgaccacctccacccaatcctgatgttcgcagggctgaagttaacagagcacagaccacctttagttagatgtggctttcagccttttagggaaagactcgaacaaattttcatctattcaagagcatgctgtttgcagcactctttatggtctcctaggagcataacttggaatgtacaggaatatttgtgtcctaaaaaaatcagctgcccttccaatatcatttttataacgttatggtttaattcaagttatacaaaggtgtgactcaaggatgtgcaggtattgactgatggaggccaacaaggaaaatattttttttcagtgagcccagagaaattagaaatcttcaccaatgtcagtgactgcatggtttccaaaaattcacatagtattacctcacagtaggaaggcttctttcccatttaggctcagagaacacttttacagaaatcaaacctatttacagggtggcaccccttttctgtggcatctgatctgtcatctcccaagctcctgaagttctttatccaggttgtatctttgctgagctgacaacagatttctctatggatcaaatattctaatcaaggaaagatacggtgaaacttcagtcttcttctggagaaatgctgaggcgagattagtgcagctacattctgagttgaaggaaatgcagtgttctgagggcccctttgtgtcctgatggctggaggacgcttcctcctggttagatcctcaagctccttgcctcattgacaaatgtctcctagtcccctttttccctctgactctgaggaactaaatagcttgactatctctaaacagagactggccctgccactgaccctcctgtccctctcatagcataccctgacagatactcaatagaaaacacctgcagaccatgtgcacacttaactttcctgcccaacctgcctccccaacggcccatgctagaatagcttgtgcccagaaaacaaacagtgacacttcatctcttcagcgtcagaaaatgggcatagaatgtacccatgcaattgaatgtatctcattctccactggcatagtagatataaactattcctttgcctaccttttactgccttatcctggaaatattggggaaaataagccatatcagtgagatttacctaaaaacaaaggaaggaaagtcactatggaaaccaagtagatgctttttgtaagtttggtggagcataactggcccagaagtctgggtgcctgagttctagttcgtgctctgtcaactggtagatttgtaattctaggtcttggttttcttacctggtgaataagtcatgatctctaaaacccttcctgcccttaatattgtctgaatttcaaggggaaaaaaaaaatctggttcctttaattatttttttttaacacttaaattcctaactttattagacaagaagtatggcccacttaacagttaaggaacgtaaatttgttattggctcgaaataataatttgacacaatactagtcaaccatttagaggccttggaaaaagaagaggaacagcactgaaaattccaagtatgattggaaattatctgggagcggggaattaaatattcaatgcatgaaagcaattgtactggcttctgggaaaaaggaaacaagaacattgctatggaacttgttacccagagaaaggaagtgaaaagatttacaattataagcacgaaattcattggcagattacctgctttatctacagacagattgttttggggtttggttttgtctaggcagcctctggccaggctccttaattgcttgctctgctaatatttcagcttcctctcttgactccttgaggaaccaaccgctctttggaagacaaacacttagccacctctgtgctccagggtaaccctgagaagctctgctgtctggggcaagctttctttccaaagggaatgagaggaaggcaagcaggcagggtcctgcagcgtcaggccttctggggaaagtttcctcattttgtttgacagggtcctcagtacatcagacacccagatttgaatataagttcagagcctgatctcaagctaaatcagaatgctttggggactaaccatgatcgagaattggccaaatagtatggcatataaacagccatccagccagccgcaagtaaaggaacgtttgatccttggcaccttaaatgattgattgccttcaataggcaaactgctggtctggaaatctcgttgaaggctgaatacttcatgcggagtaggacaagccttagcccaccttcaggttgaaaggaaaggccataggactcaaaagataatgactctgaaactaaactccttccttctgaagctgacagaggtacttagtgcatctcaagactccatctcataaaactcatttgtgagggatttgctctagatttttctaaacattttttcatctattgtccagacttgcaaatccagtgtggacctgatggagatacccttcacacctgcgctcccaccccctcggcagggagacgtctcagtagaggagaacacacccattatgctgggatttgtatttataaatcacttcccttttagggatgagcggtgtggggcgtgtgtgcgtgtgagtgtatgcgcgtgcgtgtgtgaccctcaagtgtactttgctcaatttagacgtgcagtatttccagaaacaatgaaaaaagtaagatgttttcttctttatgattctgctcaaaacaccacgtgccgcctcagagctttttctagagcctcggtcctcaatgacgcgcttgacctgttgatgcctcagcccagcgaagcccctcacctgtgccccgggcgacagctcttcagtgtgcagtgcaggcctggggtggactgccaggccttcgctctgtgccagcaacgccgttcttgttgctcctccatgaacaggggtacaagccctggcccctcctcgacactaagccccccacagactcagcctccaaggaaccgctgagcacccttgaagcatgtcattgtcagtgatacctttttattctatggaactctaacctattcgtgtcatattgaccttttgctgcatgagtcataaattatgaaatcagtcttacagtttttgaaatgtagccagcatttgtaaggctaaacctttttcatgaactgaatttaagtgaataaccaagccacagttcctcctcaaatggagagtgatgatcgacatttgaatctctttgccctttccaacggctatggcatcaggttctaaaataagctcgtaatttttcctgttattttaataatatggaaatattagcatagtgtttcttttgatagtgatagactataatccatatttaaattttatagagaagaaattttattgtactgtgatgtagatatttattatccaggtaaggatttgcccggtgtgtattttttacaattgagacattttactttaatctttaaaaaaaatgcattaaaaacacactcaaaaaaaaaaaaaaaaaaaaaaaaaaaaaaccagactgggggaaaaaaggtttggccttatcacagaatttttactgtgctgtataaatgtttgcaaatgcgaaaagtgtgcatttatagtgtgtttccacattaattaatgccgccttcaagagcaatattgtgcaggtaaaacgctgtttgtggctttctgttgcacagttaaagctgacccaccctatgcacaagacaatcaaatataaatctgtcctcctcaggatgcagataatactcatgtaaattatggagcacaatgtaagacaaaaggagacactttacatatgtattgttgatacagaaattatcagggcatgaatgagctgatgtgacattatgccacttctttcttttggttctcccttattaacttggcatttttaatttgaccatagagccaaattagttctccatgctttcttcgtagaaaatccttttttttcccataatgttttcatgccctgagaatcagaaaaatactacagaatagaaaaagatttacagtcattggaagatttgtgttttgcaaacagtgttaagtgatattgctagatggtgatatttttttcagcctaaaactctgttgaaatctgtgatcaaaatgttttaaactatccaaaaaaaatttgtatatttgggaaaaatggatttttacatagcttttgtatgcagatataaaactgtaattatgaatatagtgggcgtagataaactcataagcttaaattctaaaaaagaaaaagcttataacaga

SEQ ID NO: 31631 - DNA, 7459 bp, Homo sapiens
  source 1..7459: mol_type = unassigned DNA
agacctcctgctccgcgggctcggggcaagagcccgcaggctaccttccccgggcaggggcgctcaacccaaccggctccagggcactgatctgcgatttccttctggttggctgtcctgcgtgggtgccaagttccacacatgatttaatgaataagaagctcgccagagaggcaaactccagcattttatatttcatctgcccccagtgacttcactgtaggaagaggaaatgcagaaaaacaaacgtcttgaagactgaaagcctgttattcaaagaggttagcagtagactgttggaagtaaggagatgtcagtgaaaaaagggatccagaatgattactaacctatgactcccaacagtatgacagaaaatggccttacagcctgggacaaaccgaagcactgtccagaccgagaacacgactggaagctagtaggaatgtctgaagcctgcctacataggaagagccattcagagaggcgcagcacgttgaaaaatgaacagtcgtcgccacatctcatccagaccacttggactagctcaatattccatctggaccatgatgatgtgaacgaccagagtgtctcaagtgcccagaccttccaaacggaggagaagaaatgtaaagggtacatccccagttacttagacaaggacgagctctgtgtagtgtgtggtgacaaagccaccgggtatcactaccgctgtatcacgtgtgaaggctgcaagggtttctttagaagaaccattcagaaaaatctccatccatcctattcctgtaaatatgaaggaaaatgtgtcatagacaaagtcacgcgaaatcagtgccaggaatgtcgctttaagaaatgcatctatgttggcatggcaacagatttggtgctggatgacagcaagaggctggccaagaggaagctgatagaggagaaccgggagaaaagacggcgggaagagctgcagaagtccatcgggcacaagccagagcccacagacgaggaatgggagctcatcaaaactgtcaccgaagcccatgtggcgaccaacgcccaaggcagccactggaagcaaaaacggaaattcctgccagaagacattggacaagcaccaatagtcaatgccccagaaggtggaaaggttgacttggaagccttcagccattttacaaaaatcatcacaccagcaattaccagagtggtggattttgccaaaaagttgcctatgttttgtgagctgccatgtgaagaccagatcatcctcctcaaaggctgctgcatggagatcatgtcccttcgcgctgctgtgcgctatgacccagaaagtgagactttaaccttgaatggggaaatggcagtgacacggggccagctgaaaaatgggggtcttggggtggtgtcagacgccatctttgacctgggcatgtctctgtcttctttcaacctggatgacactgaagtagccctccttcaggccgtcctgctgatgtcttcagatcgcccggggcttgcctgtgttgagagaatagaaaagtaccaagatagtttcctgctggcctttgaacactatatcaattaccgaaaacaccacgtgacacacttttggccaaaactcctgatgaaggtgacagatctgcggatgataggagcctgccatgccagccgcttcctgcacatgaaggtggaatgccccacagaactcttcccccctttgttcttggaagtgttcgaggattagactgactggattcattctcataattcctacagcactactgggtgtcatttcattccattgcctagctcttttttgtttgtttctttgtgttgggagggattatttgggagggaaaagggaagtagtccttggcatagacatggatgaaattgccccttgaatgcgggtacttgaaactattgcatttcgttctccggtcctgtgatgtgaatgctctgaaggttttatggttgtggaggtggggtgggggacaatcattaactcaccagcaccaagcatcaccagctcccacccgtccctggtccaagacttgagtcagcaaaatggcgccacaggacactaaagaagccttaaaaccaagataatacgaccacctccacccaatcctgatgttcgcagggctgaagttaacagagcacagaccacctttagttagatgtggctttcagccttttagggaaagactcgaacaaattttcatctattcaagagcatgctgtttgcagcactctttatggtctcctaggagcataacttggaatgtacaggaatatttgtgtcctaaaaaaatcagctgcccttccaatatcatttttataacgttatggtttaattcaagttatacaaaggtgtgactcaaggatgtgcaggtattgactgatggaggccaacaaggaaaatattttttttcagtgagcccagagaaattagaaatcttcaccaatgtcagtgactgcatggtttccaaaaattcacatagtattacctcacagtaggaaggcttctttcccatttaggctcagagaacacttttacagaaatcaaacctatttacagggtggcaccccttttctgtggcatctgatctgtcatctcccaagctcctgaagttctttatccaggttgtatctttgctgagctgacaacagatttctctatggatcaaatattctaatcaaggaaagatacggtgaaacttcagtcttcttctggagaaatgctgaggcgagattagtgcagctacattctgagttgaaggaaatgcagtgttctgagggcccctttgtgtcctgatggctggaggacgcttcctcctggttagatcctcaagctccttgcctcattgacaaatgtctcctagtcccctttttccctctgactctgaggaactaaatagcttgactatctctaaacagagactggccctgccactgaccctcctgtccctctcatagcataccctgacagatactcaatagaaaacacctgcagaccatgtgcacacttaactttcctgcccaacctgcctccccaacggcccatgctagaatagcttgtgcccagaaaacaaacagtgacacttcatctcttcagcgtcagaaaatgggcatagaatgtacccatgcaattgaatgtatctcattctccactggcatagtagatataaactattcctttgcctaccttttactgccttatcctggaaatattggggaaaataagccatatcagtgagatttacctaaaaacaaaggaaggaaagtcactatggaaaccaagtagatgctttttgtaagtttggtggagcataactggcccagaagtctgggtgcctgagttctagttcgtgctctgtcaactggtagatttgtaattctaggtcttggttttcttacctggtgaataagtcatgatctctaaaacccttcctgcccttaatattgtctgaatttcaaggggaaaaaaaaaatctggttcctttaattatttttttttaacacttaaattcctaactttattagacaagaagtatggcccacttaacagttaaggaacgtaaatttgttattggctcgaaataataatttgacacaatactagtcaaccatttagaggccttggaaaaagaagaggaacagcactgaaaattccaagtatgattggaaattatctgggagcggggaattaaatattcaatgcatgaaagcaattgtactggcttctgggaaaaaggaaacaagaacattgctatggaacttgttacccagagaaaggaagtgaaaagatttacaattataagcacgaaattcattggcagattacctgctttatctacagacagattgttttggggtttggttttgtctaggcagcctctggccaggctccttaattgcttgctctgctaatatttcagcttcctctcttgactccttgaggaaccaaccgctctttggaagacaaacacttagccacctctgtgctccagggtaaccctgagaagctctgctgtctggggcaagctttctttccaaagggaatgagaggaaggcaagcaggcagggtcctgcagcgtcaggccttctggggaaagtttcctcattttgtttgacagggtcctcagtacatcagacacccagatttgaatataagttcagagcctgatctcaagctaaatcagaatgctttggggactaaccatgatcgagaattggccaaatagtatggcatataaacagccatccagccagccgcaagtaaaggaacgtttgatccttggcaccttaaatgattgattgccttcaataggcaaactgctggtctggaaatctcgttgaaggctgaatacttcatgcggagtaggacaagccttagcccaccttcaggttgaaaggaaaggccataggactcaaaagataatgactctgaaactaaactccttccttctgaagctgacagaggtacttagtgcatctcaagactccatctcataaaactcatttgtgagggatttgctctagatttttctaaacattttttcatctattgtccagacttgcaaatccagtgtggacctgatggagatacccttcacacctgcgctcccaccccctcggcagggagacgtctcagtagaggagaacacacccattatgctgggatttgtatttataaatcacttcccttttagggatgagcggtgtggggcgtgtgtgcgtgtgagtgtatgcgcgtgcgtgtgtgaccctcaagtgtactttgctcaatttagacgtgcagtatttccagaaacaatgaaaaaagtaagatgttttcttctttatgattctgctcaaaacaccacgtgccgcctcagagctttttctagagcctcggtcctcaatgacgcgcttgacctgttgatgcctcagcccagcgaagcccctcacctgtgccccgggcgacagctcttcagtgtgcagtgcaggcctggggtggactgccaggccttcgctctgtgccagcaacgccgttcttgttgctcctccatgaacaggggtacaagccctggcccctcctcgacactaagccccccacagactcagcctccaaggaaccgctgagcacccttgaagcatgtcattgtcagtgatacctttttattctatggaactctaacctattcgtgtcatattgaccttttgctgcatgagtcataaattatgaaatcagtcttacagtttttgaaatgtagccagcatttgtaaggctaaacctttttcatgaactgaatttaagtgaataaccaagccacagttcctcctcaaatggagagtgatgatcgacatttgaatctctttgccctttccaacggctatggcatcaggttctaaaataagctcgtaatttttcctgttattttaataatatggaaatattagcatagtgtttcttttgatagtgatagactataatccatatttaaattttatagagaagaaattttattgtactgtgatgtagatatttattatccaggtaaggatttgcccggtgtgtattttttacaattgagacattttactttaatctttaaaaaaaatgcattaaaaacacactcaaaaaaaaaaaaaaaaaaaaaaaaaaaaaaccagactgggggaaaaaaggtttggccttatcacagaatttttactgtgctgtataaatgtttgcaaatgcgaaaagtgtgcatttatagtgtgtttccacattaattaatgccgccttcaagagcaatattgtgcaggtaaaacgctgtttgtggctttctgttgcacagttaaagctgacccaccctatgcacaagacaatcaaatataaatctgtcctcctcaggatgcagataatactcatgtaaattatggagcacaatgtaagacaaaaggagacactttacatatgtattgttgatacagaaattatcagggcatgaatgagctgatgtgacattatgccacttctttcttttggttctcccttattaacttggcatttttaatttgaccatagagccaaattagttctccatgctttcttcgtagaaaatccttttttttcccataatgttttcatgccctgagaatcagaaaaatactacagaatagaaaaagatttacagtcattggaagatttgtgttttgcaaacagtgttaagtgatattgctagatggtgatatttttttcagcctaaaactctgttgaaatctgtgatcaaaatgttttaaactatccaaaaaaaatttgtatatttgggaaaaatggatttttacatagcttttgtatgcagatataaaactgtaattatgaatatagtgggcgtagataaactcataagcttaaattctaaaaaagaaaaagcttataacagatatattttcctgtctctttctttaaatattattattttctacataggcaaagagttgcctgctcttctcacttcagctgctgccaaaagacggaaccacggatgtaaggacatttatttcataaataaacatctactagaataagcaaatttacttgagaagaaactatggagggagagaagaaactaagtaaaatgctgatggggggttacctctttggaaggggccacaaagatgaagggaggagagaggtgaagttttgcagctcaaggacaacattcatcttctcatctcaaattattcaggaatattactaatggaattatgttaacatcagctgccaacatatatctcaatctctgttgccctgaacacatgttaattgagattctttctatgacaagtaacaaaaagctaactcaaactggcttaagcagaaagctaattattgactttaatatctgggatctagggtattgcataccaaagcttcaggcatggctggatctgggtgcacttactcagtattctcaggaagctcctttttttgtcattcatgtagacttaacattcacatggcctttcaccttacggtggcctccaatagctccaggatgagctttacagctccaaatatagtgaaaggagaatttcttttctccaacaattctaatgaaaattctggcctaattctcactggcccaagttcagtcatgtgcccattcctgagccaatcactgtggtgaggaaaacagatgcataaccaaccttatcctcaggaatcctggaactgggtgaggggaaagagggacagtcagcttcatctaaactatggactgagagttgaggcaagatgattcctgaaagaaaattctaagtcttgctgctataagtggaagagaatggtgggcaagcaaaagcaaccagtgcccacaccaaaggtaaatctaaaacaacatcccatttcagtacagcaagcggttctccttcacacagaggaagctcatctccaagtttttatttggccaggacatgaaccaaataaacaccttcc

SEQ ID NO: 31632 - DNA, 2571 bp, Homo sapiens
  source 1..2571: mol_type = unassigned DNA
aactttgcatgaataatgtgagtgcgcttggaaaagagacctcctgctccgcgggctcggggcaagagcccgcaggctaccttccccgggcaggggcgctcaacccaaccggctccagggcactggtaatttggctagaggaccgcgcggaggcagcgggatctgcgatttccttctggttggctgtcctgcgtgggtgccaagttccacacatgatttaatgaataagaagggggcttggaggctcatagcaaaggtccttgaagagagcaagaaaaagtcttcccaggaaaagtggacacctgagtgagtgttacaacgagaaggggggcatcccaggcaaggcagctaccaagcacaggtgtgaagtgacttcactgtaggaagaggaaatgcagaaaaacaaacgtcttgaagactgaaagcctgttattcaaagaggttagcagtagactgttggaagtaaggagatgtcagtgaaaaaagggatccagaatgattactaacctatgactcccaacagtatgacagaaaatggccttacagcctgggacaaaccgaagcactgtccagaccgagaacacgactggaagctagtaggaatgtctgaagcctgcctacataggaagagccattcagagaggcgcagcacgttgaaaaatgaacagtcgtcgccacatctcatccagaccacttggactagctcaatattccatctggaccatgatgatgtgaacgaccagagtgtctcaagtgcccagaccttccaaacggaggagaagaaatgtaaagggtacatccccagttacttagacaaggacgagctctgtgtagtgtgtggtgacaaagccaccgggtatcactaccgctgtatcacgtgtgaaggctgcaagggtttctttagaagaaccattcagaaaaatctccatccatcctattcctgtaaatatgaaggaaaatgtgtcatagacaaagtcacgcgaaatcagtgccaggaatgtcgctttaagaaatgcatctatgttggcatggcaacagatttggtgctggatgacagcaagaggctggccaagaggaagctgatagaggagaaccgggagaaaagacggcgggaagagctgcagaagtccatcgggcacaagccagagcccacagacgaggaatgggagctcatcaaaactgtcaccgaagcccatgtggcgaccaacgcccaaggcagccactggaagcaaaaacggaaattcctgccagaagacattggacaagcaccaatagtcaatgccccagaaggtggaaaggttgacttggaagccttcagccattttacaaaaatcatcacaccagcaattaccagagtggtggattttgccaaaaagttgcctatgttttgtgagctgccatgtgaagaccagatcatcctcctcaaaggctgctgcatggagatcatgtcccttcgcgctgctgtgcgctatgacccagaaagtgagactttaaccttgaatggggaaatggcagtgacacggggccagctgaaaaatgggggtcttggggtggtgtcagacgccatctttgacctgggcatgtctctgtcttctttcaacctggatgacactgaagtagccctccttcaggccgtcctgctgatgtcttcagatcgcccggggcttgcctgtgttgagagaatagaaaagtaccaagatagtttcctgctggcctttgaacactatatcaattaccgaaaacaccacgtgacacacttttggccaaaactcctgatgaaggtgacagatctgcggatgataggagcctgccatgccagccgcttcctgcacatgaaggtggaatgccccacagaactcttcccccctttgttcttggaagtgttcgaggattagactgactggattcattctcataattcctacagcactactgggtgtcatttcattccattgcctagctcttttttgtttgtttctttgtgttgggagggattatttgggagggaaaagggaagtagtccttggcatagacatggatgaaattgccccttgaatgcgggtacttgaaactattgcatttcgttctccggtcctgtgatgtgaatgctctgaaggttttatggttgtggaggtggggtgggggacaatcattaactcaccagcaccaagcatcaccagctcccacccgtccctggtccaagacttgagtcagcaaaatggcgccacaggacactaaagaagccttaaaaccaagataatacgaccacctccacccaatcctgatgttcgcagggctgaagttaacagagcacagaccacctttagttagatgtggctttcagccttttagggaaagactcgaacaaattttcatctattcaagagcatgctgtttgcagcactctttatggtctcctaggagcataacttggaatgtacaggaatatttgtgtcctaaaaaaatcagctgcccttccaatatcatttttataacgttatggtttaattcaagttatacaaaggtgtgactcaaggatgtgcaggtattgactgatggaggccaacaagg

SEQ ID NO: 31633 - DNA, 539 bp, Homo sapiens
  source 1..539: mol_type = unassigned DNA
gtaatttggctagaggaccgcgcggaggcagcgggatctgcgatttccttctggttggctgtcctgcgtgggtgccaagttccacacatgatttaatgaataagaaggagatgtcagtgaaaaaagggatccagaatgattactaacctatgactcccaacagtatgacagaaatggccttacagcctgggacaaaccgaagcactgtccagaccgagaacacgactggaagctagtaggaatgtctgaagcctgcctacataggaagagccattcagagaggcgcagcacgttgaaaaatgaacagtcgtcgccacatctcatccagaccacttggactagctcaatattccatctggaccatgatgatgtgaacgaccagagtgtctcaagtgcccagaccttccaaacggaggagaagaaatgtaaaggtaaccagatttttattagcccattatcatgtgtttcaacaagaaaaaaaatatccctgttgtagctgtgtacttcatctacatttctcttccaatgtatggtgtccc

SEQ ID NO: 31634 - DNA, 703 bp, Homo sapiens
  source 1..703: mol_type = unassigned DNA
tgacattttgcaggactcgcgcgacgcccagtcgccggcgctccccgggaccccgccgccgggaggagggggcggaggagggtggagactgcggggcttggccaaggaaggcgcacatcctcgggcgggcggccgtgacgcggcggggattaactttgcatgaataatgtcctagaaaggaaagcacagcacatcgtgcagaaggccgcatgggaaaagggccagatctgcgatttccttctggttggctgtcctgcgtgggtgccaagttccacacatgatttaatgaataagaaggagatgtcagtgaaaaaagggatccagaatgattactaacctatgactcccaacagtatgacagaaaatggccttacagcctgggacaaaccgaagcactgtccagaccgagaacacgactggaagctagtaggaatgtctgaagcctgcctacataggaagagccattcagagaggcgcagcacgttgaaaaatgaacagtcgtcgccacatctcatccagaccacttggactagctcaatattccatctggaccatgatgatgtgaacgaccagagtgtctcaagtgcccagaccttccaaacggaggagaagaaatgtaaagggtacatccccagttacttagacaaggacgagctctgtgtagtgtgtggtgacaaagccaccgggtatcactaccgctgta

SEQ ID NO: 31635 - DNA, 1174 bp, Homo sapiens
  source 1..1174: mol_type = unassigned DNA
attgtgtcagaggaagcaaccatgcaggtgctaaccaagcgttaccccaagaactgcctgctgaccgtcatggaccggtatgcagccgaggtgcacaacatggagcaggtggtgatgatccccagccttctgcgggacgtgcagctgagtgggcctgggggccaggcccaggctgaggcccctgatctctacacctacttcaccatgctcaaggccatctgtgtggatgtggaccatgggctgctgccgcgggaggagtggcaggccaaggtggcaggcagcgaagagaatggaaccgcagagacagaggaagtcgaggacgagagtgcctcaggagagctggacctggaagcccagttccacctgcacttctccagcctccatcacatcctcatgcacctcaccgagaaagcccaggaggtgacaaggaaataccaggaaatgacgggacaagtttggtagaccttggacactagggaagatcccttcacatgatagaagacagactctttgatgaggtcggcggagcagttcactagccaatgatgagagcagaaaggcctagacctgcagccagaagtgaaggcggctcagttctccgggatgcttctctacctcctgagcaccaattcctggattccagtcactggctcacctttagaatgtctgttgctattcactgctcccctcgctcctcttaacagcttggggaggtgaccagtggttcaggagggactagacaattacctgtccagtgtggtatggtaggaagagtgtaggtgttggcacgtgaccaaaattcacatccctcctcatggcagtcattcagtatgtgtacttgtacaagttatttaacccattggagcctaaattccctcatctataaaatggggataatattatctacctcacaagcttatgaaaactaaacatgatgaatcaaaagcacttggcatgtgagggctattaaaatagcctgattttttttttctccccctctccccaatgtatttgctctggcccttgctttttaccctccagagctaagaggtagcagagtctcttgggatgagtgattcaccctcttacttggcgaccactgatgagatcaacaacaggtgaactataaacctattatttattgcagaactaataaaaaatccaaagccttgta

SEQ ID NO: 31636 - DNA, 3138 bp, Homo sapiens
  source 1..3138: mol_type = unassigned DNA
aggcaattaaggcgcccatttcagaagagttacagccgtgaaaattactcagcagtgcagttggctgagaagaggaaaaaagaatgagagcgctcgctgtgctgtctgtcacgctggttatggcctgcacagaagccttcttccccttcatctcgagagggaaagaactcctttggggaaagcctgaggagtctcgtgtctctagcgtcttggaggaaagcaagcgcctggtggacaccgccatgtacgccacgatgcagagaaacctcaagaaaagaggaatcctttctccagctcagcttctgtctttttccaaacttcctgagccaacaagcggagtgattgcccgagcagcagagataatggaaacatcaatacaagcgatgaaaagaaaagtcaacctgaaaactcaacaatcacagcatccaacggatgctttatcagaagatctgctgagcatcattgcaaacatgtctggatgtctcccttacatgctgcccccaaaatgcccaaacacttgcctggcgaacaaatacaggcccatcacaggagcttgcaacaacagagaccaccccagatggggcgcctccaacacggccctggcacgatggctccctccagtctatgaggacggcttcagtcagccccgaggctggaaccccggcttcttgtacaacgggttcccactgcccccggtccgggaggtgacaagacatgtcattcaagtttcaaatgaggttgtcacagatgatgaccgctattctgacctcctgatggcatggggacaatacatcgaccacgacatcgcgttcacaccacagagcaccagcaaagctgccttcgggggaggggctgactgccagatgacttgtgagaaccaaaacccatgttttcccatacaactcccggaggaggcccggccggccgcgggcaccgcctgtctgcccttctaccgctcttcggccgcctgcggcaccggggaccaaggcgcgctctttgggaacctgtccacggccaacccgcggcagcagatgaacgggttgacctcgttcctggacgcgtccaccgtgtatggcagctccccggccctagagaggcagctgcggaactggaccagtgccgaagggctgctccgcgtccacgcgcgcctccgggactccggccgcgcctacctgcccttcgtgccgccacgcgcgcctgcggcctgtgcgcccgagcccggcatccccggagagacccgcgggccctgcttcctggccggagacggccgcgccagcgaggtcccctccctgacggcactgcacacgctgtggctgcgcgagcacaaccgcctggccgcggcgctcaaggccctcaatgcgcactggagcgcggacgccgtgtaccaggaggcgcgcaaggtcgtgggcgctctgcaccagatcatcaccctgagggattacatccccaggatcctgggacccgaggccttccagcagtacgtgggtccctatgaaggctatgactccaccgccaaccccactgtgtccaacgtgttctccacagccgccttccgcttcggccatgccacgatccacccgctggtgaggaggctggacgccagcttccaggagcaccccgacctgcccgggctgtggctgcaccaggctttcttcagcccatggacattactccgtggaggtggtttggacccactaatacgaggccttcttgcaagaccagccaaactgcaggtgcaggatcagctgatgaacgaggagctgacggaaaggctctttgtgctgtccaattccagcaccttggatctggcgtccatcaacctgcagaggggccgggaccacgggctgccaggttacaatgagtggagggagttctgcggcctgcctcgcctggagacccccgctgacctgagcacagccatcgccagcaggagcgtggccgacaagatcctggacttgtacaagcatcctgacaacatcgatgtctggctgggaggcttagctgaaaacttcctccccagggctcggacagggcccctgtttgcctgtctcattgggaagcagatgaaggctctgcgggacggtgactggttttggtgggagaacagccacgtcttcacggatgcacagaggcgtgagctggagaagcactccctgtctcgggtcatctgtgacaacactggcctcaccagggtgcccatggatgccttccaagtcggcaaattccccgaagactttgagtcttgtgacagcatcactggcatgaacctggaggcctggagggaaacctttcctcaagacgacaagtgtggcttcccagagagcgtggagaatggggactttgtgcactgtgaggagtctgggaggcgcgtgctggtgtattcctgccggcacgggtatgagctccaaggccgggagcagctcacttgcacccaggaaggatgggatttccagcctcccctctgcaaagatgtgaacgagtgtgcagacggtgcccaccccccctgccacgcctctgcgaggtgcagaaacaccaaaggcggcttccagtgtctctgcgcggacccctacgagttaggagacgatgggagaacctgcgtagactccgggaggctccctcgggtgacttggatctccatgtcgctggctgctctgctgatcggaggcttcgcaggtctcacctcgacggtgatttgcaggtggacacgcactggcactaaatccacactgcccatctcggagacaggcggaggaactcccgagctgagatgcggaaagcaccaggccgtagggacctcaccgcagcgggccgcagctcaggactcggagcaggagagtgctgggatggaaggccgggatactcacaggctgccgagagccctctgagggcaaagtggcaggacactgcagaacagcttcatgttcccaaaatcaccgtacgactcttttccaaacacaggcaaatccgaaatcagcaggacgactgttttcccaacacgggtaaatctagtaccatgtcgtagttactctcaggcatggatgaataaatgttatagctgcatttgtctggccttttcttgtaaacattgcctgatttgttccttctggggctttgccattaaaatgtatttacagatta

SEQ ID NO: 31637 - DNA, 3015 bp, Homo sapiens
  source 1..3015: mol_type = unassigned DNA
ggaaggcaattaaggcgcccatttcagaagagttacagccgtgaaaattactcagcagtgcagttggctgagaagaggaaaaaaggtcagaatgagagcgctcgctgtgctgtctgtcacgctggttatggcctgcacagaagccttcttccccttcatctcgagagggaaagaactcctttggggaaagcctgaggagtctcgtgtctctagcgtcttggaggaaagcaagcgcctggtggacaccgccatgtacgccacgatgcagagaaacctcaagaaaagaggaatcctttctccagctcagcttctgtctttttccaaacttcctgagccaacaagcggagtgattgcccgagcagcagagataatggaaacatcaatacaagcgatgaaaagaaaagtcaacctgaaaactcaacaatcacagcatccaacggatgctttatcagaagatctgctgagcatcattgcaaacatgtctggatgtctcccttacatgctgcccccaaaatgcccaaacacttgcctggcgaacaaatacaggcccatcacaggagcttgcaacaacagagaccaccccagatggggcgcctccaacacggccctggcacgatggctccctccagtctatgaggacggcttcagtcagccccgaggctggaaccccggcttcttgtacaacgggttcccactgcccccggtccgggaggtgacaagacatgtcattcaagtttcaaatgaggttgtcacagatgatgaccgctattctgacctcctgatggcatggggacaatacatcgaccacgacatcgcgttcacaccacagagcaccagcaaagctgccttcgggggaggggctgactgccagatgacttgtgagaaccaaaacccatgttttcccatacaactcccggaggaggcccggccggccgcgggcaccgcctgtctgcccttctaccgctcttcggccgcctgcggcaccggggaccaaggcgcgctctttgggaacctgtccacggccaacccgcggcagcagatgaacgggttgacctcgttcctggacgcgtccaccgtgtatggcagctccccggccctagagaggcagctgcggaactggaccagtgccgaagggctgctccgcgtccacgcgcgcctccgggactccggccgcgcctacctgcccttcgtgccgccacgcgcgcctgcggcctgtgcgcccgagcccggcatccccggagagacccgcgggccctgcttcctggccggagacggccgcgccagcgaggtcccctccctgacggcactgcacacgctgtggctgcgcgagcacaaccgcctggccgcggcgctcaaggccctcaatgcgcactggagcgcggacgccgtgtaccaggaggcgcgcaaggtcgtgggcgctctgcaccagatcatcaccctgagggattacatccccaggatcctgggacccgaggccttccagcagtacgtgggtccctatgaaggctatgactccaccgccaaccccactgtgtccaacgtgttctccacagccgccttccgcttcggccatgccacgatccacccgctggtgaggaggctggacgccagcttccaggagcaccccgacctgcccgggctgtggctgcaccaggctttcttcagcccatggacattactccgtggaggtggtttggacccactaatacgaggccttcttgcaagaccagccaaactgcaggtgcaggatcagctgatgaacgaggagctgacggaaaggctctttgtgctgtccaattccagcaccttggatctggcgtccatcaacctgcagaggggccgggaccacgggctgccaggttacaatgagtggagggagttctgcggcctgcctcgcctggagacccccgctgacctgagcacagccatcgccagcaggagcgtggccgacaagatcctggacttgtacaagcatcctgacaacatcgatgtctggctgggaggcttagctgaaaacttcctccccagggctcggacagggcccctgtttgcctgtctcattgggaagcagatgaaggctctgcgggacggtgactggttttggtgggagaacagccacgtcttcacggatgcacagaggcgtgagctggagaagcactccctgtctcgggtcatctgtgacaacactggcctcaccagggtgcccatggatgccttccaagtcggcaaattccccgaagactttgagtcttgtgacagcatcactggcatgaacctggaggcctggagggaaacctttcctcaagacgacaagtgtggcttcccagagagcgtggagaatggggactttgtgcactgtgaggagtctgggaggcgcgtgctggtgtattcctgccggcacgggtatgagctccaaggccgggagcagctcacttgcacccaggaaggatgggatttccagcctcccctctgcaaagatgtgaacgagtgtgcagacggtgcccaccccccctgccacgcctctgcgaggtgcagaaacaccaaaggcggcttccagtgtctctgcgcggacccctacgagttaggagacgatgggagaacctgcgtagactccgggaggctccctcgggtgacttggatctccatgtcgctggctgctctgctgatcggaggcttcgcaggtctcacctcgacggtgatttgcaggtggagagtgctgggatggaaggccgggatactcacaggctgccgagagccctctgagggcaaagtggcaggacactgcagaacagcttcatgttcccaaaatcaccgtacgactcttttccaaacacaggcaaatccgaaatcagcaggacgactgttttcccaacacgggtaaatctagtaccatgtcgtagttactctcaggcatggatgaataaatgttatagctgcatttgtctggccttttcttgtaaacattgcctgatttgttccttctggggctttgccattaaaatgtatttacagatt

SEQ ID NO: 31638 - DNA, 3145 bp, Homo sapiens
  source 1..3145: mol_type = unassigned DNA
ggaaggcaattaaggcgcccatttcagaagagttacagccgtgaaaattactcagcagtgcagttggctgagaagaggaaaaaaggtcagaatgagagcgctcgctgtgctgtctgtcacgctggttatggcctgcacagaagccttcttccccttcatctcgagagggaaagaactcctttggggaaagcctgaggagtctcgtgtctctagcgtcttggaggaaagcaagcgcctggtggacaccgccatgtacgccacgatgcagagaaacctcaagaaaagaggaatcctttctccagctcagcttctgtctttttccaaacttcctgagccaacaagcggagtgattgcccgagcagcagagataatggaaacatcaatacaagcgatgaaaagaaaagtcaacctgaaaactcaacaatcacagcatccaacggatgctttatcagaagatctgctgagcatcattgcaaacatgtctggatgtctcccttacatgctgcccccaaaatgcccaaacacttgcctggcgaacaaatacaggcccatcacaggagcttgcaacaacagagaccaccccagatggggcgcctccaacacggccctggcacgatggctccctccagtctatgaggacggcttcagtcagccccgaggctggaaccccggcttcttgtacaacgggttcccactgcccccggtccgggaggtgacaagacatgtcattcaagtttcaaatgaggttgtcacagatgatgaccgctattctgacctcctgatggcatggggacaatacatcgaccacgacatcgcgttcacaccacagagcaccagcaaagctgccttcgggggaggggctgactgccagatgacttgtgagaaccaaaacccatgttttcccatacaactcccggaggaggcccggccggccgcgggcaccgcctgtctgcccttctaccgctcttcggccgcctgcggcaccggggaccaaggcgcgctctttgggaacctgtccacggccaacccgcggcagcagatgaacgggttgacctcgttcctggacgcgtccaccgtgtatggcagctccccggccctagagaggcagctgcggaactggaccagtgccgaagggctgctccgcgtccacgcgcgcctccgggactccggccgcgcctacctgcccttcgtgccgccacgcgcgcctgcggcctgtgcgcccgagcccggcatccccggagagacccgcgggccctgcttcctggccggagacggccgcgccagcgaggtcccctccctgacggcactgcacacgctgtggctgcgcgagcacaaccgcctggccgcggcgctcaaggccctcaatgcgcactggagcgcggacgccgtgtaccaggaggcgcgcaaggtcgtgggcgctctgcaccagatcatcaccctgagggattacatccccaggatcctgggacccgaggccttccagcagtacgtgggtccctatgaaggctatgactccaccgccaaccccactgtgtccaacgtgttctccacagccgccttccgcttcggccatgccacgatccacccgctggtgaggaggctggacgccagcttccaggagcaccccgacctgcccgggctgtggctgcaccaggctttcttcagcccatggacattactccgtggaggtggtttggacccactaatacgaggccttcttgcaagaccagccaaactgcaggtgcaggatcagctgatgaacgaggagctgacggaaaggctctttgtgctgtccaattccagcaccttggatctggcgtccatcaacctgcagaggggccgggaccacgggctgccaggttacaatgagtggagggagttctgcggcctgcctcgcctggagacccccgctgacctgagcacagccatcgccagcaggagcgtggccgacaagatcctggacttgtacaagcatcctgacaacatcgatgtctggctgggaggcttagctgaaaacttcctccccagggctcggacagggcccctgtttgcctgtctcattgggaagcagatgaaggctctgcgggacggtgactggttttggtgggagaacagccacgtcttcacggatgcacagaggcgtgagctggagaagcactccctgtctcgggtcatctgtgacaacactggcctcaccagggtgcccatggatgccttccaagtcggcaaattccccgaagactttgagtcttgtgacagcatcactggcatgaacctggaggcctggagggaaacctttcctcaagacgacaagtgtggcttcccagagagcgtggagaatggggactttgtgcactgtgaggagtctgggaggcgcgtgctggtgtattcctgccggcacgggtatgagctccaaggccgggagcagctcacttgcacccaggaaggatgggatttccagcctcccctctgcaaagatgtgaacgagtgtgcagacggtgcccaccccccctgccacgcctctgcgaggtgcagaaacaccaaaggcggcttccagtgtctctgcgcggacccctacgagttaggagacgatgggagaacctgcgtagactccgggaggctccctcgggtgacttggatctccatgtcgctggctgctctgctgatcggaggcttcgcaggtctcacctcgacggtgatttgcaggtggacacgcactggcactaaatccacactgcccatctcggagacaggcggaggaactcccgagctgagatgcggaaagcaccaggccgtagggacctcaccgcagcgggccgcagctcaggactcggagcaggagagtgctgggatggaaggccgggatactcacaggctgccgagagccctctgagggcaaagtggcaggacactgcagaacagcttcatgttcccaaaatcaccgtacgactcttttccaaacacaggcaaatccgaaatcagcaggacgactgttttcccaacacgggtaaatctagtaccatgtcgtagttactctcaggcatggatgaataaatgttatagctgcatttgtctggccttttcttgtaaacattgcctgatttgttccttctggggctttgccattaaaatgtatttacagatt

SEQ ID NO: 31639 - DNA, 3013 bp, Homo sapiens
  source 1..3013: mol_type = unassigned DNA
ggaaggcaattaaggcgcccatttcagaagagttacagccgtgaaaattactcagcagtgcagttggctgagaagaggaaaaaaggtcagaatgagagcgctcgctgtgctgtctgtcacgctggttatggcctgcacagaagccttcttccccttcatctcgagagggaaagaactcctttggggaaagcctgaggagtctcgtgtctctagcgtcttggaggaaagcaagcgcctggtggacaccgccatgtacgccacgatgcagagaaacctcaagaaaagaggaatcctttctccagctcagcttctgtctttttccaaacttcctgagccaacaagcggagtgattgcccgagcagcagagataatggaaacatcaatacaagcgatgaaaagaaaagtcaacctgaaaactcaacaatcacagcatccaacggatgctttatcagaagatctgctgagcatcattgcaaacatgtctggatgtctcccttacatgctgcccccaaaatgcccaaacacttgcctggcgaacaaatacaggcccatcacaggagcttgcaacaacagagaccaccccagatggggcgcctccaacacggccctggcacgatggctccctccagtctatgaggacggcttcagtcagccccgaggctggaaccccggcttcttgtacaacgggttcccactgcccccggtccgggaggtgacaagacatgtcattcaagtttcaaatgaggttgtcacagatgatgaccgctattctgacctcctgatggcatggggacaatacatcgaccacgacatcgcgttcacaccacagagcaccagcaaagctgccttcgggggaggggctgactgccagatgacttgtgagaaccaaaacccatgttttcccatacaactcccggaggaggcccggccggccgcgggcaccgcctgtctgcccttctaccgctcttcggccgcctgcggcaccggggaccaaggcgcgctctttgggaacctgtccacggccaacccgcggcagcagatgaacgggttgacctcgttcctggacgcgtccaccgtgtatggcagctccccggccctagagaggcagctgcggaactggaccagtgccgaagggctgctccgcgtccacgcgcgcctccgggactccggccgcgcctacctgcccttcgtgccgccacgcgcgcctgcggcctgtgcgcccgagcccggcatccccggagagacccgcgggccctgcttcctggccggagacggccgcgccagcgaggtcccctccctgacggcactgcacacgctgtggctgcgcgagcacaaccgcctggccgcggcgctcaaggccctcaatgcgcactggagcgcggacgccgtgtaccaggaggcgcgcaaggtcgtgggcgctctgcaccagatcatcaccctgagggattacatccccaggatcctgggacccgaggccttccagcagtacgtgggtccctatgaaggctatgactccaccgccaaccccactgtgtccaacgtgttctccacagccgccttccgcttcggccatgccacgatccacccgctggtgaggaggctggacgccagcttccaggagcaccccgacctgcccgggctgtggctgcaccaggctttcttcagcccatggacattactccgtggaggtggtttggacccactaatacgaggccttcttgcaagaccagccaaactgcaggtgcaggatcagctgatgaacgaggagctgacggaaaggctctttgtgctgtccaattccagcaccttggatctggcgtccatcaacctgcagaggggccgggaccacgggctgccaggttacaatgagtggagggagttctgcggcctgcctcgcctggagacccccgctgacctgagcacagccatcgccagcaggagcgtggccgacaagatcctggacttgtacaagcatcctgacaacatcgatgtctggctgggaggcttagctgaaaacttcctccccagggctcggacagggcccctgtttgcctgtctcattgggaagcagatgaaggctctgcgggacggtgactggttttggtgggagaacagccacgtcttcacggatgcacagaggcgtgagctggagaagcactccctgtctcgggtcatctgtgacaacactggcctcaccagggtgcccatggatgccttccaagtcggcaaattccccgaagactttgagtcttgtgacagcatcactggcatgaacctggaggcctggagggaaacctttcctcaagacgacaagtgtggcttcccagagagcgtggagaatggggactttgtgcactgtgaggagtctgggaggcgcgtgctggtgtattcctgccggcacgggtatgagctccaaggccgggagcagctcacttgcacccaggaaggatgggatttccagcctcccctctgcaaagactccgggaggctccctcgggtgacttggatctccatgtcgctggctgctctgctgatcggaggcttcgcaggtctcacctcgacggtgatttgcaggtggacacgcactggcactaaatccacactgcccatctcggagacaggcggaggaactcccgagctgagatgcggaaagcaccaggccgtagggacctcaccgcagcgggccgcagctcaggactcggagcaggagagtgctgggatggaaggccgggatactcacaggctgccgagagccctctgagggcaaagtggcaggacactgcagaacagcttcatgttcccaaaatcaccgtacgactcttttccaaacacaggcaaatccgaaatcagcaggacgactgttttcccaacacgggtaaatctagtaccatgtcgtagttactctcaggcatggatgaataaatgttatagctgcatttgtctggccttttcttgtaaacattgcctgatttgttccttctggggctttgccattaaaatgtatttacagatt

SEQ ID NO: 31640 - DNA, 2626 bp, Homo sapiens
  source 1..2626: mol_type = unassigned DNA
ggaaggcaattaaggcgcccatttcagaagagttacagccgtgaaaattactcagcagtgcagttggctgagaagaggaaaaaaggtcagaatgagagcgctcgctgtgctgtctgtcacgctggttatggcctgcacagaagccttcttccccttcatctcgagagggaaagaactcctttggggaaagcctgaggagtctcgtgtctctagcgtcttggaggaaagcaagcgcctggtggacaccgccatgtacgccacgatgcagagaaacctcaagaaaagaggaatcctttctccagctcagcttctgtctttttccaaacttcctgagccaacaagcggagtgattgcccgagcagcagagataatggaaacatcaatacaagcgatgaaaagaaaagtcaacctgaaaactcaacaatcacagcatccaacggatgctttatcagaagatctgctgagcatcattgcaaacatgtctggatgtctcccttacatgctgcccccaaaatgcccaaacacttgcctggcgaacaaatacaggcccatcacaggagcttgcaacaacagagaccaccccagatggggcgcctccaacacggccctggcacgatggctccctccagtctatgaggacggcttcagtcagccccgaggctggaaccccggcttcttgtacaacgggttcccactgcccccggtccgggaggtgacaagacatgtcattcaagtttcaaatgaggttgtcacagatgatgaccgctattctgacctcctgatggcatggggacaatacatcgaccacgacatcgcgttcacaccacagagcaccagcaaagctgccttcgggggaggggctgactgccagatgacttgtgagaaccaaaacccatgttttcccatacaaatcatcaccctgagggattacatccccaggatcctgggacccgaggccttccagcagtacgtgggtccctatgaaggctatgactccaccgccaaccccactgtgtccaacgtgttctccacagccgccttccgcttcggccatgccacgatccacccgctggtgaggaggctggacgccagcttccaggagcaccccgacctgcccgggctgtggctgcaccaggctttcttcagcccatggacattactccgtggaggtggtttggacccactaatacgaggccttcttgcaagaccagccaaactgcaggtgcaggatcagctgatgaacgaggagctgacggaaaggctctttgtgctgtccaattccagcaccttggatctggcgtccatcaacctgcagaggggccgggaccacgggctgccaggttacaatgagtggagggagttctgcggcctgcctcgcctggagacccccgctgacctgagcacagccatcgccagcaggagcgtggccgacaagatcctggacttgtacaagcatcctgacaacatcgatgtctggctgggaggcttagctgaaaacttcctccccagggctcggacagggcccctgtttgcctgtctcattgggaagcagatgaaggctctgcgggacggtgactggttttggtgggagaacagccacgtcttcacggatgcacagaggcgtgagctggagaagcactccctgtctcgggtcatctgtgacaacactggcctcaccagggtgcccatggatgccttccaagtcggcaaattccccgaagactttgagtcttgtgacagcatcactggcatgaacctggaggcctggagggaaacctttcctcaagacgacaagtgtggcttcccagagagcgtggagaatggggactttgtgcactgtgaggagtctgggaggcgcgtgctggtgtattcctgccggcacgggtatgagctccaaggccgggagcagctcacttgcacccaggaaggatgggatttccagcctcccctctgcaaagatgtgaacgagtgtgcagacggtgcccaccccccctgccacgcctctgcgaggtgcagaaacaccaaaggcggcttccagtgtctctgcgcggacccctacgagttaggagacgatgggagaacctgcgtagactccgggaggctccctcgggtgacttggatctccatgtcgctggctgctctgctgatcggaggcttcgcaggtctcacctcgacggtgatttgcaggtggacacgcactggcactaaatccacactgcccatctcggagacaggcggaggaactcccgagctgagatgcggaaagcaccaggccgtagggacctcaccgcagcgggccgcagctcaggactcggagcaggagagtgctgggatggaaggccgggatactcacaggctgccgagagccctctgagggcaaagtggcaggacactgcagaacagcttcatgttcccaaaatcaccgtacgactcttttccaaacacaggcaaatccgaaatcagcaggacgactgttttcccaacacgggtaaatctagtaccatgtcgtagttactctcaggcatggatgaataaatgttatagctgcatttgtctggccttttcttgtaaacattgcctgatttgttccttctggggctttgccattaaaatgtatttacagatt

SEQ ID NO: 31641 - DNA, 2283 bp, Homo sapiens
  source 1..2283: mol_type = unassigned DNA
atgagagcgctcgctgtgctgtctgtcacgctggttatggcctgcacagaagccttcttccccttcatctcgagagggaaagaactcctttggggaaagcctgaggagtctcgtgtctctagcgtcttggaggaaagcaagcgcctggtggacaccgccatgtacgccacgatgcagagaaacctcaagaaaagaggaatcctttctccagctcagcttctgtctttttccaaacttcctgagccaacaagcggagtgattgcccgagcagcagagataatggaaacatcaatacaagcgatgaaaagaaaagtcaacctgaaaactcaacaatcacagcatccaacggatgctttatcagaagatctgctgagcatcattgcaaacatgtctggatgtctcccttacatgctgcccccaaaatgcccaaacacttgcctggcgaacaaatacaggcccatcacaggagcttgcaacaacagagaccaccccagatggggcgcctccaacacggccctggcacgatggctccctccagtctatgaggacggcttcagtcagccccgaggctggaaccccggcttcttgtacaacgggttcccactgcccccggtccgggaggtgacaagacatgtcattcaagtttcaaatgaggttgtcacagatgatgaccgctattctgacctcctgatggcatggggacaatacatcgaccacgacatcgcgttcacaccacagagcaccagcaaagctgccttcgggggaggggctgactgccagatgacttgtgagaaccaaaacccatgttttcccatacaaatcatcaccctgagggattacatccccaggatcctgggacccgaggccttccagcagtacgtgggtccctatgaaggctatgactccaccgccaaccccactgtgtccaacgtgttctccacagccgccttccgcttcggccatgccacgatccacccgctggtgaggaggctggacgccagcttccaggagcaccccgacctgcccgggctgtggctgcaccaggctttcttcagcccatggacattactccgtggaggtggtttggacccactaatacgaggccttcttgcaagaccagccaaactgcaggtgcaggatcagctgatgaacgaggagctgacggaaaggctctttgtgctgtccaattccagcaccttggatctggcgtccatcaacctgcagaggggccgggaccacgggctgccaggttacaatgagtggagggagttctgcggcctgcctcgcctggagacccccgctgacctgagcacagccatcgccagcaggagcgtggccgacaagatcctggacttgtacaagcatcctgacaacatcgatgtctggctgggaggcttagctgaaaacttcctccccagggctcggacagggcccctgtttgcctgtctcattgggaagcagatgaaggctctgcgggacggtgactggttttggtgggagaacagccacgtcttcacggatgcacagaggcgtgagctggagaagcactccctgtctcgggtcatctgtgacaacactggcctcaccagggtgcccatggatgccttccaagtcggcaaattccccgaagactttgagtcttgtgacagcatcactggcatgaacctggaggcctggagggaaacctttcctcaagacgacaagtgtggcttcccagagagcgtggagaatggggactttgtgcactgtgaggagtctgggaggcgcgtgctggtgtattcctgccggcacgggtatgagctccaaggccgggagcagctcacttgcacccaggaaggatgggatttccagcctcccctctgcaaagatgtgaacgagtgtgcagacggtgcccaccccccctgccacgcctctgcgaggtgcagaaacaccaaaggcggcttccagtgtctctgcgcggacccctacgagttaggagacgatgggagaacctgcgtagactccgggaggctccctcgggtgacttggatctccatgtcgctggctgctctgctgatcggaggcttcgcaggtctcacctcgacggtgatttgcaggtggacacgcactggcactaaatccacactgcccatctcggagacaggcggaggaactcccgagctgagatgcggaaagcaccaggccgtagggacctcaccgcagcgggccgcagctcaggactcggagcaggagagtgctgggatggaaggccgggatactcacaggctgccgagagccctctga

SEQ ID NO: 31642 - DNA, 2956 bp, Homo sapiens
  source 1..2956: mol_type = unassigned DNA
catttcagaagagttacagccgtgaaaattactcagcagtgcagttggctgagaagaggaaaaaaggtcagaatgagagcgctcgctgtgctgtctgtcacgctggttatggcctgcacagaagccttcttccccttcatctcgagagggaaagaactcctttggggaaagcctgaggagtctcgtgtctctagcgtcttggaggaaagcaagcgcctggtggacaccgccatgtacgccacgatgcagagaaacctcaagaaaagaggaatcctttctccagctcagcttctgtctttttccaaacttcctgagccaacaagcggagtgattgcccgagcagcagagataatggaaacatcaatacaagcgatgaaaagaaaagtcaacctgaaaactcaacaatcacagcatccaacggatgctttatcagaagatctgctgagcatcattgcaaacatgtctggatgtctcccttacatgctgcccccaaaatgcccaaacacttgcctggcgaacaaatacaggcccatcacaggagcttgcaacaacagagaccaccccagatggggcgcctccaacacggccctggcacgatggctccctccagtctatgaggacggcttcagtcagccccgaggctggaaccccggcttcttgtacaacgggttcccactgcccccggtccgggaggtgacaagacatgtcattcaagtttcaaatgaggttgtcacagatgatgaccgctattctgacctcctgatggcatggggacaatacatcgaccacgacatcgcgttcacaccacagagcaccagcaaagctgccttcgggggaggggctgactgccagatgacttgtgagaaccaaaacccatgttttcccatacaactcccggaggaggcccggccggccgcgggcaccgcctgtctgcccttctaccgctcttcggccgcctgcggcaccggggaccaaggcgcgctctttgggaacctgtccacggccaacccgcggcagcagatgaacgggttgacctcgttcctggacgcgtccaccgtgtatggcagctccccggccctagagaggcagctgcggaactggaccagtgccgaagggctgctccgcgtccacgcgcgcctccgggactccggccgcgcctacctgcccttcgtgccgccacgcgcgcctgcggcctgtgcgcccgagcccggcatccccggagagacccgcgggccctgcttcctggccggagacggccgcgccagcgaggtcccctccctgacggcactgcacacgctgtggctgcgcgagcacaaccgcctggccgcggcgctcaaggccctcaatgcgcactggagcgcggacgccgtgtaccaggaggcgcgcaaggtcgtgggcgctctgcaccagatcatcaccctgagggattacatccccaggatcctgggacccgaggccttccagcagtacgtgggtccctatgaaggctatgactccaccgccaaccccactgtgtccaacgtgttctccacagccgccttccgcttcggccatgccacgatccacccgctggtgaggaggctggacgccagcttccaggagcaccccgacctgcccgggctgtggctgcaccaggctttcttcagcccatggacattactccgtggaggttacaatgagtggagggagttctgcggcctgcctcgcctggagacccccgctgacctgagcacagccatcgccagcaggagcgtggccgacaagatcctggacttgtacaagcatcctgacaacatcgatgtctggctgggaggcttagctgaaaacttcctccccagggctcggacagggcccctgtttgcctgtctcattgggaagcagatgaaggctctgcgggacggtgactggttttggtgggagaacagccacgtcttcacggatgcacagaggcgtgagctggagaagcactccctgtctcgggtcatctgtgacaacactggcctcaccagggtgcccatggatgccttccaagtcggcaaattccccgaagactttgagtcttgtgacagcatcactggcatgaacctggaggcctggagggaaacctttcctcaagacgacaagtgtggcttcccagagagcgtggagaatggggactttgtgcactgtgaggagtctgggaggcgcgtgctggtgtattcctgccggcacgggtatgagctccaaggccgggagcagctcacttgcacccaggaaggatgggatttccagcctcccctctgcaaagatgtgaacgagtgtgcagacggtgcccaccccccctgccacgcctctgcgaggtgcagaaacaccaaaggcggcttccagtgtctctgcgcggacccctacgagttaggagacgatgggagaacctgcgtagactccgggaggctccctcgggtgacttggatctccatgtcgctggctgctctgctgatcggaggcttcgcaggtctcacctcgacggtgatttgcaggtggacacgcactggcactaaatccacactgcccatctcggagacaggcggaggaactcccgagctgagatgcggaaagcaccaggccgtagggacctcaccgcagcgggccgcagctcaggactcggagcaggagagtgctgggatggaaggccgggatactcacaggctgccgagagccctctgagggcaaagtggcaggacactgcagaacagcttcatgttcccaaaatcaccgtacgactcttttccaaacacaggcaaatccgaaatcagcaggacgactgttttcccaacacgggtaaatctagtaccatgtcgtagttactctcaggcatggatgaataaatgttatagctgcatttgtctggccttttcttgtaaacattgcctgatttgttccttctggggctttgccattaaaatgtatttacagatta

SEQ ID NO: 31643 - DNA, 542 bp, Homo sapiens
  source 1..542: mol_type = unassigned DNA
actctgtctccttccgttaattttagaatgagagcgctcgctgtgctgtctgtcacgctggttatggcctgcacagaagccttcttccccttcatctcgagagggaaagaactcctttggggaaagcctgaggagtctcgtgtctctagcgtcttggaggaaagcaagcgcctggtggacaccgccatgtacgccacgatgcagagaaacctcaagaaaagaggaatcctttctccagctcagcttctgtctttttccaaacttcctgagccaacaagcggagtgattgcccgagcagcagagataatggaaacatcaatacaagcgatgaaaagaaaagtcaacctgaaaactcaacaatcacagcatccaacggatgctttatcagaagatctgctgagcatcattgcaaacatgtctggatgtctcccttacatgctgcccccaaaatgcccaaacacttgcctggcgaacaaatacaggcccatcacaggagcttgcaacaacagagaccaccccagatggggcgcctccaacacggc

SEQ ID NO: 31644 - DNA, 3143 bp, Homo sapiens
  source 1..3143: mol_type = unassigned DNA
ggaaggcaattaaggcgcccatttcagaagagttacagccgtgaaaattactcagcagtgcagttggctgagaagaggaaaaaaggtcagaatgagagcgctcgctgtgctgtctgtcacgctggttatggcctgcacagaagccttcttccccttcatctcgagagggaaagaactcctttggggaaagcctgaggagtctcgtgtctctagcgtcttggaggaaagcaagcgcctggtggacaccgccatgtacgccacgatgcagagaaacctcaagaaaagaggaatcctttctccagctcagcttctgtctttttccaaacttcctgagccaacaagcggagtgattgcccgagcagcagagataatggaaacatcaatacaagcgatgaaaagaaaagtcaacctgaaaactcaacaatcacagcatccaacggatgctttatcagaagatctgctgagcatcattgcaaacatgtctggatgtctcccttacatgctgcccccaaaatgcccaaacacttgcctggcgaacaaatacaggcccatcacaggagcttgcaacaacagagaccaccccagatggggcgcctccaacacggccctggcacgatggctccctccagtctatgaggacggcttcagtcagccccgaggctggaaccccggcttcttgtacaacgggttcccactgcccccggtccgggaggtgacaagacatgtcattcaagtttcaaatgaggttgtcacagatgatgaccgctattctgacctcctgatggcatggggacaatacatcgaccacgacatcgcgttcacaccacagagcaccagcaaagctgccttcgggggaggggctgactgccagatgacttgtgagaaccaaaacccatgttttcccatacaactcccggaggaggcccggccggccgcgggcaccgcctgtctgcccttctaccgctcttcggccgcctgcggcaccggggaccaaggcgcgctctttgggaacctgtccacggccaacccgcggcagcagatgaacgggttgacctcgttcctggacgcgtccaccgtgtatggcagctccccggccctagagaggcagctgcggaactggaccagtgccgaagggctgctccgcgtccacgcgcgcctccgggactccggccgcgcctacctgcccttcgtgccgccacgcgcgcctgcggcctgtgcgcccgagcccggcatccccggagagacccgcgggccctgcttcctggccggagacccgcgccagcgaggtcccctccctgacggcactgcacacgctgtggctgcgcgagcacaaccgcctggccgcggcgctcaaggccctcaatgcgcactggagcgcggacgccgtgtaccaggaggcgcgcaaggtcgtgggcgctctgcaccagatcatcaccctgagggattacatccccaggatcctgggacccgaggccttccagcagtacgtgggtccctatgaaggctatgactccaccgccaaccccactgtgtccaacgtgttctccacagccgccttccgcttcggccatgccacgatccacccgctggtgaggaggctggacgccagcttccaggagcaccccgacctgcccgggctgtggctgcaccaggctttcttcagcccatggacattactccgtggaggtggtttggacccactaatacgaggccttcttgcaagaccagccaaactgcaggtgcaggatcagctgatgaacgaggagctgacggaaaggctctttgtgctgtccaattccagcaccttggatctggcgtccatcaacctgcagaggggccgggaccacgggctgccaggttacaatgagtggagggagttctgcggcctgcctcgcctggagacccccgctgacctgagcacagccatcgccagcaggagcgtggccgacaagatcctggacttgtacaagcatcctgacaacatcgatgtctggctgggaggcttagctgaaaacttcctccccagggctcggacagggcccctgtttgcctgtctcattgggaagcagatgaaggctctgcgggacggtgactggttttggtgggagaacagccacgtcttcacggatgcacagaggcgtgagctggagaagcactccctgtctcgggtcatctgtgacaacactggcctcaccagggtgcccatggatgccttccaagtcggcaaattccccgaagactttgagtcttgtgacagcatcactggcatgaacctggaggcctggagggaaacctttcctcaagacgacaagtgtggcttcccagagagcgtggagaatggggactttgtgcactgtgaggagtctgggaggcgcgtgctggtgtattcctgccggcacgggtatgagctccaaggccgggagcagctcacttgcacccaggaaggatgggatttccagcctcccctctgcaaagatgtgaacgagtgtgcagacggtgcccaccccccctgccacgcctctgcgaggtgcagaaacaccaaaggcggcttccagtgtctctgcgcggacccctacgagttaggagacgatgggagaacctgcgtagactccgggaggctccctcgggtgacttggatctccatgtcgctggctgctctgctgatcggaggcttcgcaggtctcacctcgacggtgatttgcaggtggacacgcactggcactaaatccacactgcccatctcggagacaggcggaggaactcccgagctgagatgcggaaagcaccaggccgtagggacctcaccgcagcgggccgcagctcaggactcggagcaggagagtgctgggatggaaggccgggatactcacaggctgccgagagccctctgagggcaaagtggcaggacactgcagaacagcttcatgttcccaaaatcaccgtacgactcttttccaaacacaggcaaatccgaaatcagcaggacgactgttttcccaacacgggtaaatctagtaccatgtcgtagttactctcaggcatggatgaataaatgttatagctgcatttgtctggccttttcttgtaaacattgcctgatttgttccttctggggctttgccattaaaatgtatttacagatt

SEQ ID NO: 31645 - DNA, 1157 bp, Homo sapiens
  source 1..1157: mol_type = unassigned DNA
ggaaggcaattaaggcgcccatttcagaagagttacagccgtgaaaattactcagcagtgcagttggctgagaagaggaaaaaaggtcagaatgagagcgctcgctgtgctgtctgtcacgctggttatggcctgcacagaagccttcttccccttcatctcgagagggaaagaactcctttggggaaagcctgaggagtctcgtgtctctagcgtcttggaggaaagcaagcgcctggtggacaccgccatgtacgccacgatgcagagaaacctcaagaaaagaggaatcctttctccagctcagcttctgtctttttccaaacttcctgagccaacaagcggagtgattgcccgagcagcagagataatggaaacatcaatacaagcgatgaaaagaaaagtcaacctgaaaactcaacaatcacagcatccaacggatgctttatcagaagatctgctgagcatcattgcaaacatgtctggatgtctcccttacatgctgcccccaaaatgcccaaacacttgcctggcgaacaaatacaggcccatcacaggagcttgcaacaacagaaaaatgaaatataagcccgaccattccgaaactgccaactaacctgtttaactaggaaccttccagcaggacagaccaaataatgcgaaactgaagccagtcaaagcttttctccaatgacgtctacatccacctgcaaagcctgcccctgggtcctgcagtagagcctgaacctttctttggtttgatgcttcctgattcataaatcatgatcactcaaaaaaaactctttaaaaaatgtattgtgcctaagtttacattttaacaacctcaagaccagggcctcagccggcagcagtgagttcctgctcggcccttctgaaaggccctgctgctgtcttgggcgcctctgccccagctgctgggcgggctccactgacgctcctgggagaatctctgctgaccacacaatgacattggcactgggagctgtgatctggggacacttagatctgagctggtttctctccttctgtggtaacagctacagttttcattaagaattcacagcatctggatctaaaatctcctacgttcaaggcttcacacattgtattccaccaaaaataaaacatctgctcag

SEQ ID NO: 31646 - DNA, 4400 bp, Homo sapiens
  source 1..4400: mol_type = unassigned DNA
cctcctccacagtggtgaggtcacagccccttggagccctccctcttcccacccctcccgctcccgggtctcctttggcctggggtaacccgaggtgcagagctgagaatgaggcgatttcggaggatggagaaatagccccgagtcccgtggaaaatgaggccggcggacttgctgcagctggtgctgctgctcgacctgcccagggacctgggcggaatggggtgttcgtctccaccctgcgagtgccatcaggaggaggacttcagagtcacctgcaaggatattcaacgcatccccagcttaccgcccagtacgcagactctgaagcttattgagactcacctgagaactattccaagtcatgcattttctaatctgcccaatatttccagaatctacgtatctatagatgtgactctgcagcagctggaatcacactccttctacaatttgagtaaagtgactcacatagaaattcggaataccaggaacttaacttacatagaccctgatgccctcaaagagctccccctcctaaagttccttggcattttcaacactggacttaaaatgttccctgacctgaccaaagtttattccactgatatattctttatacttgaaattacagacaacccttacatgacgtcaatccctgtgaatgcttttcagggactatgcaatgaaaccttgacactgaagctgtacaacaatggctttacttcagtccaaggatatgctttcaatgggacaaagctggatgctgtttacctaaacaagaataaatacctgacagttattgacaaagatgcatttggaggagtatacagtggaccaagcttgctggacgtgtctcaaaccagtgtcactgcccttccatccaaaggcctggagcacctgaaggaactgatagcaagaaacacctggactcttaagaaacttccactttccttgagtttccttcacctcacacgggctgacctttcttacccaagccactgctgtgcttttaagaatcagaagaaaatcagaggaatccttgagtccttgatgtgtaatgagagcagtatgcagagcttgcgccagagaaaatctgtgaatgccttgaatagccccctccaccaggaatatgaagagaatctgggtgacagcattgttgggtacaaggaaaagtccaagttccaggatactcataacaacgctcattattacgtcttctttgaagaacaagaggatgagatcattggttttggccaggagctcaaaaacccccaggaagagactctacaagcttttgacagccattatgactacaccatatgtggggacagtgaagacatggtgtgtacccccaagtccgatgagttcaacccgtgtgaagacataatgggctacaagttcctgagaattgtggtgtggttcgttagtctgctggctctcctgggcaatgtctttgtcctgcttattctcctcaccagccactacaaactgaacgtcccccgctttctcatgtgcaacctggcctttgcggatttctgcatggggatgtacctgctcctcatcgcctctgtagacctctacactcactctgagtactacaaccatgccatcgactggcagacaggccctgggtgcaacacggctggtttcttcactgtctttgcaagcgagttatcggtgtatacgctgacggtcatcaccctggagcgctggtatgccatcaccttcgccatgcgcctggaccggaagatccgcctcaggcacgcatgtgccatcatggttgggggctgggtttgctgcttccttctcgccctgcttcctttggtgggaataagtagctatgccaaagtcagtatctgcctgcccatggacaccgagacccctcttgctctggcatatattgtttttgttctgacgctcaacatagttgccttcgtcatcgtctgctgctgttatgtgaagatctacatcacagtccgaaatccgcagtacaacccaggggacaaagataccaaaattgccaagaggatggctgtgttgatcttcaccgacttcatatgcatggccccaatctcattctatgctctgtcagcaattctgaacaagcctctcatcactgttagcaactccaaaatcttgctggtactcttctatccacttaactcctgtgccaatccattcctctatgctattttcaccaaggccttccagagggatgtgttcatcctactcagcaagtttggcatctgtaaacgccaggctcaggcataccgggggcagagggttcctccaaagaacagcactgatattcaggttcaaaaggttacccacgagatgaggcagggtctccacaacatggaagatgtctatgaactgattgaaaactcccatctaaccccaaagaagcaaggccaaatctcagaagagtatatgcaaacggttttgtaagttaacactacactactcacaatggtaggggaacttacaaaataatagtttcttgaatatgcattccaatcccatgacacccccaacacatagctgccctcactcttgtgcaggcgatgtttcaatgtttcatggggcaagagtttatctctggagagtgattagtattaacctaatcattgcccccaagaaggaagttaggctaccagcatatttgaatgccaggtgaaatcaaaataatctacactatctagaagactttcttgatgccaagtccagagatgtcattgtgtaggatgttcagtaaatattaactgagctatgtcaatatagagcttctcagttttgtataacatttcatactaaagattcagcaaatggaaaatgctattaatttggttggtgaccacaagataaaatcagtcccacgttggctcagttcaactagatgttccctgatacaaagagaacttgatttccttaaaactgaaaagccaaacacagctagctgtcatacaagaaacagctattatgagacatgaaggagggtaagaattagctttaagttttgttttgctttgttttgttttttaactcaacctattaatcatctcttcacaagaatccacctgatgtgaccaagctattatgtgttgcctggaaaaactggcaagatttcagcttatgtggcctagcaaactaagaattgctcttcttggccagcctcatagcataaaagatgtgaactctaggaagtctttctgagtagcaataagtgggaattatgggcagagcacactcaatcccctgttgattaataaaacaggctggacactaattaactatgggacttaaatctgtagaaatgaaggagtccaatagcttcttccaattttaaaactctagtacatccctttccctcaaatatatatttctaagataaagagaaagaagagcactaagtaagtagaatctgtttttcctattttgtagggctgctgactcctagtccttgaagcctagacacatgacccaggaaatttttcctttgtttcacttttgattatgatgtctgagccaaaaattcaattaagtaaacatactcgcctggatctgaatcattcatttaattactagatctacccagctgttatatcaggccaaaaacagattcgtgtttatataaaagagtaaacgatggttgcaaattttggctatttagagttgctacttcactatgaagagtcacttcaaaacacttcgcttgtctttagggatgatttttgccatttccagtccacggtatgatactaaagctgtcaagagaggtttcttcttttctgaaactgccagctctttccagccctgttgatcactggacataaagcttcttttccccaataattcttctttacttaaaatagtcaggatctttatctacagatgtactctccaggttacctgtgatgatagccccctaatgtcctgctagaaaagtctccaagcagagatgacattacttctgaatgctcataaaccacaccatgaaataaaagctctttgttgttttaagattgtgaagtgtcgttaatgggtccccacagatggtccctgctggactcacctggaatctctccacagccatacccactcatcactatcattgagacctgcacatcttaatagaaatattataaacatcgaaaatcatgacttacctagaagttcgcttgtaactaatgaaattaaacaaatgtgttgccttttgtcatgtgtttctctcctgtgacatttcaaaatatcacatcttgataaataatgtgtttcatcttgaatagctgaactaattgctttggaaacagagtcctagaaaagtgacttcaacagaattgttactaaaatttgcactcacaacatgaaataaattttcttcctatggaataatcgtg

SEQ ID NO: 31647 - DNA, 1281 bp, Homo sapiens
  source 1..1281: mol_type = unassigned DNA
gtccagccaaggaaagtgaagcaagcagacttgtttgggtcaaggttgcctagggaagcggagcacttaagtgcctctttttccccttctccagcctcctccacagtggtgaggtcacagccccttggagccctccctcttcccacccctcccgctcccgggtctcctttggcctggggtaacccgaggtgcagagctgagaatgaggcgatttcggaggatggagaaatagccccgagtcccgtggaaaatgaggccggcggacttgctgcagctggtgctgctgctcgacctgcccagggacctgggcggaatggggtgttcgtctccaccctgcgagtgccatcaggaggaggacttcagagtcacctgcaaggatattcaacgcatccccagcttaccgcccagtacgcagactctgaagcttattgagactcacctgagaactattccaagtcatgcattttctaatctgcccaatatttccagaatctacgtatctatagatgtgactctgcagcagctggaatcacactccttctacaatttgagtaaagtgactcacatagaaattcggaataccaggaacttaacttacatagaccctgatgccctcaaagagctccccctcctaaagttccttggcattttcaacactggacttaaaatgttccctgacctgaccaaagtttattccactgatatattctttatacttgaaattacagacaacccttacatgacgtcaatccctgtgaatgcttttcagggactatgcaatgaaaccttgacactgaagctgtacaacaatggctttacttcagtccaaggatatgctttcaatgggacaaagctggatgctgtttacctaaacaagaataaatacctgacagttattgacaaagatgcatttggaggagtatacagtggaccaagcttgctgctacctcttggaagaaagtccttgtcctttgagactcagaaggccccacgctccagtatgccatcatgatgcctgctaaggcagccaccttggtgtacatgctcacagaggctctgttcatggagcagctgctgtttgaaaaattttgaaatgcaagatccacaactagatggaaggcactctagtctttgcagaaaaaaatgtacctgaatgtacattgcacaatgcctggcacaaagaaggaagaatataaatgatagttcgactcgtctgtggaagaacttacaatcatggggaaagatggaataaaaacattttttaaacagcatgaaaacata

SEQ ID NO: 31648 - DNA, 1664 bp, Homo sapiens
  source 1..1664: mol_type = unassigned DNA
ggaaaacagaggggacagccaggactggtgttgggtgtcagggaacagacggagcggactgcgtgggtccagccaaggaaagtgaagcaagcagacttgtttgggtcaaggttgcctagggaagcggagcacttaagtgcctctttttccccttctccagcctcctccacagtggtgaggtcacagccccttggagccctccctcttcccacccctcccgctcccgggtctcctttggcctggggtaacccgaggtgcagagctgagaatgaggcgatttcggaggatggagaaatagccccgagtcccgtggaaaatgaggccggcggacttgctgcagctggtgctgctgctcgacctgcccagggacctgggcggaatggggtgttcgtctccaccctgcgagtgccatcaggaggaggacttcagagtcacctgcaaggatattcaacgcatccccagcttaccgcccagtacgcagactctgaagcttattgagactcacctgagaattgtggtgtggttcgttagtctgctggctctcctgggcaatgtctttgtcctgcttattctcctcaccagccactacaaactgaacgtcccccgctttctcatgtgcaacctggcctttgcggatttctgcatggggatgtacctgctcctcatcgcctctgtagacctctacactcactctgagtactacaaccatgccatcgactggcagacaggccctgggtgcaacacggctggtttcttcactgtctttgcaagcgagttatcggtgtatacgctgacggtcatcaccctggagcgctggtatgccatcaccttcgccatgcgcctggaccggaagatccgcctcaggcacgcatgtgccatcatggttgggggctgggtttgctgcttccttctcgccctgcttcctttggtgggaataagtagctatgccaaagtcagtatctgcctgcccatggacaccgagacccctcttgctctggcatatattgtttttgttctgacgctcaacatagttgccttcgtcatcgtctgctgctgttatgtgaagatctacatcacagtccgaaatccgcagtacaacccaggggacaaagataccaaaattgccaagaggatggctgtgttgatcttcaccgacttcatatgcatggccccaatctcattctatgctctgtcagcaattctgaacaagcctctcatcactgttagcaactccaaaatcttgctggtactcttctatccacttaactcctgtgccaatccattcctctatgctattttcaccaaggccttccagagggatgtgttcatcctactcagcaagtttggcatctgtaaacgccaggctcaggcataccgggggcagagggttcctccaaagaacagcactgatattcaggttcaaaaggttacccacgagatgaggcagggtctccacaacatggaagatgtctatgaactgattgaaaactcccatctaaccccaaagaagcaaggccaaatctcagaagagtatatgcaaacggttttgtaagttaacactacactactcacaatggtaggggaacttacaaaataatagtttcttgaatatgcattccaatcccatgacacccccaacacatagctgccctcactcttgtgca

SEQ ID NO: 31649 - DNA, 4566 bp, Homo sapiens
  source 1..4566: mol_type = unassigned DNA
caggggtgcagggcgacggcttcggccgcaccgcgggctagccagggctgcgtgcccgcctctgaccctcagcagaggtgtctctggccaggaggagctgaagttctgcaggacattggtccgcccgcggacagtccactccgcggggactttctctggataaggacctcctccacagtggtgaggtcacagccccttggagccctccctcttcccacccctcccgctcccgggtctcctttggcctggggtaacccgaggtgcagagctgagaatgaggcgatttcggaggatggagaaatagccccgagtcccgtggaaaatgaggccggcggacttgctgcagctggtgctgctgctcgacctgcccagggacctgggcggaatggggtgttcgtctccaccctgcgagtgccatcaggaggaggacttcagagtcacctgcaaggatattcaacgcatccccagcttaccgcccagtacgcagactctgaagcttattgagactcacctgagaactattccaagtcatgcattttctaatctgcccaatatttccagaatctacgtatctatagatgtgactctgcagcagctggaatcacactccttctacaatttgagtaaagtgactcacatagaaattcggaataccaggaacttaacttacatagaccctgatgccctcaaagagctccccctcctaaagttccttggcattttcaacactggacttaaaatgttccctgacctgaccaaagtttattccactgatatattctttatacttgaaattacagacaacccttacatgacgtcaatccctgtgaatgcttttcagggactatgcaatgaaaccttgacactgaagctgtacaacaatggctttacttcagtccaaggatatgctttcaatgggacaaagctggatgctgtttacctaaacaagaataaatacctgacagttattgacaaagatgcatttggaggagtatacagtggaccaagcttgctggacgtgtctcaaaccagtgtcactgcccttccatccaaaggcctggagcacctgaaggaactgatagcaagaaacacctggactcttaagaaacttccactttccttgagtttccttcacctcacacgggctgacctttcttacccaagccactgctgtgcttttaagaatcagaagaaaatcagaggaatccttgagtccttgatgtgtaatgagagcagtatgcagagcttgcgccagagaaaatctgtgaatgccttgaatagccccctccaccaggaatatgaagagaatctgggtgacagcattgttgggtacaaggaaaagtccaagttccaggatactcataacaacgctcattattacgtcttctttgaagaacaagaggatgagatcattggttttggccaggagctcaaaaacccccaggaagagactctacaagcttttgacagccattatgactacaccatatgtggggacagtgaagacatggtgtgtacccccaagtccgatgagttcaacccgtgtgaagacataatgggctacaagttcctgagaattgtggtgtggttcgttagtctgctggctctcctgggcaatgtctttgtcctgcttattctcctcaccagccactacaaactgaacgtcccccgctttctcatgtgcaacctggcctttgcggatttctgcatggggatgtacctgctcctcatcgcctctgtagacctctacactcactctgagtactacaaccatgccatcgactggcagacaggccctgggtgcaacacggctggtttcttcactgtctttgcaagcgagttatcggtgtatacgctgacggtcatcaccctggagcgctggtatgccatcaccttcgccatgcgcctggaccggaagatccgcctcaggcacgcatgtgccatcatggttgggggctgggtttgctgcttccttctcgccctgcttcctttggtgggaataagtagctatgccaaagtcagtatctgcctgcccatggacaccgagacccctcttgctctggcatatattgtttttgttctgacgctcaacatagttgccttcgtcatcgtctgctgctgttatgtgaagatctacatcacagtccgaaatccgcagtacaacccaggggacaaagataccaaaattgccaagaggatggctgtgttgatcttcaccgacttcatatgcatggccccaatctcattctatgctctgtcagcaattctgaacaagcctctcatcactgttagcaactccaaaatcttgctggtactcttctatccacttaactcctgtgccaatccattcctctatgctattttcaccaaggccttccagagggatgtgttcatcctactcagcaagtttggcatctgtaaacgccaggctcaggcataccgggggcagagggttcctccaaagaacagcactgatattcaggttcaaaaggttacccacgagatgaggcagggtctccacaacatggaagatgtctatgaactgattgaaaactcccatctaaccccaaagaagcaaggccaaatctcagaagagtatatgcaaacggttttgtaagttaacactacactactcacaatggtaggggaacttacaaaataatagtttcttgaatatgcattccaatcccatgacacccccaacacatagctgccctcactcttgtgcaggcgatgtttcaatgtttcatggggcaagagtttatctctggagagtgattagtattaacctaatcattgcccccaagaaggaagttaggctaccagcatatttgaatgccaggtgaaatcaaaataatctacactatctagaagactttcttgatgccaagtccagagatgtcattgtgtaggatgttcagtaaatattaactgagctatgtcaatatagagcttctcagttttgtataacatttcatactaaagattcagcaaatggaaaatgctattaatttggttggtgaccacaagataaaatcagtcccacgttggctcagttcaactagatgttccctgatacaaagagaacttgatttccttaaaactgaaaagccaaacacagctagctgtcatacaagaaacagctattatgagacatgaaggagggtaagaattagctttaagttttgttttgctttgttttgttttttaactcaacctattaatcatctcttcacaagaatccacctgatgtgaccaagctattatgtgttgcctggaaaaactggcaagatttcagcttatgtggcctagcaaactaagaattgctcttcttggccagcctcatagcataaaagatgtgaactctaggaagtctttctgagtagcaataagtgggaattatgggcagagcacactcaatcccctgttgattaataaaacaggctggacactaattaactatgggacttaaatctgtagaaatgaaggagtccaatagcttcttccaattttaaaactctagtacatccctttccctcaaatatatatttctaagataaagagaaagaagagcactaagtaagtagaatctgtttttcctattttgtagggctgctgactcctagtccttgaagcctagacacatgacccaggaaatttttcctttgtttcacttttgattatgatgtctgagccaaaaattcaattaagtaaacatactcgcctggatctgaatcattcatttaattactagatctacccagctgttatatcaggccaaaaacagattcgtgtttatataaaagagtaaacgatggttgcaaattttggctatttagagttgctacttcactatgaagagtcacttcaaaacacttcgcttgtctttagggatgatttttgccatttccagtccacggtatgatactaaagctgtcaagagaggtttcttcttttctgaaactgccagctctttccagccctgttgatcactggacataaagcttcttttccccaataattcttctttacttaaaatagtcaggatctttatctacagatgtactctccaggttacctgtgatgatagccccctaatgtcctgctagaaaagtctccaagcagagatgacattacttctgaatgctcataaaccacaccatgaaataaaagctctttgttgttttaagattgtgaagtgtcgttaatgggtccccacagatggtccctgctggactcacctggaatctctccacagccatacccactcatcactatcattgagacctgcacatcttaatagaaatattataaacatcgaaaatcatgacttacctagaagttcgcttgtaactaatgaaattaaacaaatgtgttgccttttgtcatgtgtttctctcctgtgacatttcaaaatatcacatcttgataaataatgtgtttcatcttgaatagctgaactaattgctttggaaacagagtcctagaaaagtgacttcaacagaattgttactaaaatttgcactcacaacatgaaataaattttcttcctatggaataatcgtg

SEQ ID NO: 31650 - DNA, 1089 bp, Homo sapiens
  source 1..1089: mol_type = unassigned DNA
agaaatagccccgagtcccgtggaaaatgaggccggcggacttgctgcagctggtgctgctgctcgacctgcccagggacctgggcggaatggggtgttcgtctccaccctgcgagtgccatcaggaggaggacttcagagtcacctgcaaggatattcaacgcatccccagcttaccgcccagtacgcagactctgaagcttattgagactcacctgagaactattccaagtcatgcattttctaatctgcccaatatttccagaatctacgtatctatagatgtgactctgcagcagctggaatcacactccttctacaatttgagtaaagtgactcacatagaaattcggaataccaggaacttaacttacatagaccctgatgccctcaaagagctccccctcctaaagttccttggcattttcaacactggacttaaaatgttccctgacctgaccaaagtttattccactgatatattctttatacttgaaattacagacaacccttacatgacgtcaatccctgtgaatgcttttcagggactatgcaatgaaaccttgacactgaagctgtacaacaatggctttacttcagtccaaggatatgctttcaatgggacaaagctggatgctgtttacctaaacaagaataaatacctgacagttattgacaaagatgcatttggaggagtatacagtggaccaagcttgctggtagaaaatgttgctgtctcgggtaaaggcttctgcaagtccctcttttcctggctgtataggctacctcttggaagaaagtccttgtcctttgagactcagaaggccccacgctccagtatgccatcatgatgcctgctaaggcagccaccttggtgtacatgctcacagaggctctgttcatggagcagctgctgtttgaaaaattttgaaatgcaagatccacaactagatggaaggcactctagtctttgcagaaaaaaatgtacctgaatgtacattgcacaatgcctggcacaaagaaggaagaatataaatgatagttcgactcgtctgtggaagaacttacaatcatggggaaagatggaat

SEQ ID NO: 31651 - DNA, 4394 bp, Homo sapiens
  source 1..4394: mol_type = unassigned DNA
attgggcgcctgcgcagtagctgcccgtgtcggcagctgcagcgggtcgcacggctccggcccatctcggggggcgggcgggggaggcgaggtgcgcgagccgagtccggggcacgatgtccgacgcgggcggcggaaagaagccgcctgtggacccgcaggcaggacccggtccggggccggggcgcgcagctggggaaaggggcctgtcggggtccttccccctggtcctgaagaagctgatggagaaccccccgcgcgaggcgcgcctcgataaggaaaaggggaaggaaaagctggaggaggacgaggccgcagccgccagcaccatggctgtctcagcctccctcatgccacccatctgggacaagaccatcccatatgatggcgaatctttccacctggagtacatggacctggatgagttcctgctggagaatggcatccccgccagccccacccacctggcccacaacctgctgctgcctgtagcagagctagaagggaaggagtctgccagctcttccacagcatccccaccatcctcctccactgccatctttcagccctctgaaaccgtgtccagcacagaatcttccctggagaaggagagggagactcccagtcccatcgaccccaattgtgtggaagtggatgtgaacttcaatccggaccccgccgacctggtgctctccagtgtgccaggcggggagctcttcaaccctcggaagcacaagtttgctgaggaggacctgaagccccagcctatgatcaaaaaggccaagaaggtctttgtccccgacgagcagaaggatgaaaagtactggacaagacgcaagaagaacaacgtggcagctaaacggtcacgggatgcccggcgcctgaaagagaatcagatcaccatccgggcagccttcctggagaaggagaacacagccctgcggacggaggtggccgagctacgcaaggaggtgggcaagtgcaagaccatcgtgtccaagtatgagaccaaatacgggcccttgtaacccgtgccccccgcccgggcggggtactgcctgcacctcagacctctgcctgggggctccctgtaacccctcacacgcgtggagacttatgactcgtcgtgggcgcatggcggcgcacctgctgcaggagcggccacgtctcagcttcattataccatggcctgcgcacgtggcgacgtccctgaggggccagtctcctcactggtggggaacgcaagagaatctgcgtagatgggtgactcagccttagtttctattcttggatgtcccagttgaatcagaaggggacctctggagtacacacctctctcctgggcgctcagggtccctggactctccctcagtctccagcctgggctgccgagggctatctctgcagaatgagttgtgatcattgtcaccctatgtcttctcaggtagcagggcgcgtttccacttaaggtgtgtctgtcacgcacctcattctccccagacagtctttgagtaacatctgttcccatcttccttggaagcaggacacaccagctcctccgtcagtgtctgcatgggtagcaggctgcaggagtggggtctctgcacagcctgggatggggcttggggctggggcctgcagcagaagtgtgcccagcgtttctcggctcccgcaccccttttcccttatggctctgaggccatcggctgtctctgcatttcattggctgtggaggagagactcctaggatggctgctgtctgagccatgagtgccagggctgagagaggcctcttcatttcctctccaggctactcagaggccatgtgaagctcgtttgtcccactagaccaggcctctgggcctgctctttctttccacccaatgtccagtcttggatcatagatttaaaaggaaaacccctcttatctaggaggctttaacttcctggaccccaggattcaccttcctagtggtgtttagaaaatgcctccacagcccccttccaccatgggcatgagagctggggtgtgtttcttgagaagctcccttttttcttgctctgctcaccggtgtggcctgggctggagtgcactctccctgggggcagctggggcctcgcaattcttgcttcaggatctctcccatgcgagctgcccggagggtgtcagcagggcaagacacctagtctagagtcaccaaggtcacagtgccactttcacgggatagcaggctcttgggacttttacacaggcctagggtcccctcagtcttggtcccaggagatgggggccactcgtgaggctggccatgctgtggcttctcacagctgtggtctcccctgcctcacaacgactcctttctcttgtgtggcgggactcgcccttttgctgtgctcagaagattcactgaggaaactcatggaagcctctgctcatttgggtcactgggacacccctgagatgggtgtgtttatttgctcagggcgggcagcctatggtgaagaggagacagaggcgatgggcgtgcttcgtcctccgtaacactggctttatttaccgtggtggttcagagtcccaggccctgacctctaaagacttttcataacagacgttaagaccaagccgtggacctcaccccaggggaatgccacggccctttggggacctgcacacccacctctccgggggacttgacaaggggccctgaggccaagggaggtcactcctccctccaggcccctgacttttactttgtggttctctaaaaaccatgtacacactttcactctattgtaaccacacagggcaggcgcatccagcatgtcagtgtcctgccccgggcagctctccctcccgggcacgctccctctggcctggtggatcaccaagagggcggttctcattttgttattagtggaagagccttgagcttaaaagctcttcattttctttgccggaaagtatatggtttgtgtttttgcagttttatttttttaaggatggacactaaatctctggtgtccatgttccgagcccggtggctgggatggtggctcgatgtgtctcctctttatcccgccctctgcctgtttggtgccctcccttctttcccccaggcagtgggtatcgggttctttcccaaagtgcttacttggaaagagtgtggctgctggactcttttcgaaatgcccctctgagtcaggagcctggtggggacaagatggaggatgtccacagaggctgacctgtgggggaaaagaagtgctcaggtaaggttgtctcctctcctgtcctaaaaaaatccatgcttgcaggagagggttggtgcctgctcagtttctgtcgagggaatgggagtctcctcggctccctcctgggccctctgcttcttggaggccgaccgctggagactgcggctcctgtgcttggatctttgacatctgtcagtcactggaggctagagaagttgactttaccttggctttctgtgggttcccgatgggcttggaagtgccgtctacttcctaagcatcctgtctaaagctttgtggcaccctcagtgcaacctcagaacagacaaatcatgaatgagctggaactttgcaagaatattcatattataaatgtctcatctgatggaggaacgtgtgcatttagagagagggagagttttcaaggtttatggcaactttgtggaggacctgggtaactcttacccttggccaaaggaagaggttttcctgtctggcttctgaggttggagggggcacttagcagtgaaccttaagtctgggtacatgtaaccctgctgaggggctgtgcaggccgctcctacggtcctttggcctgaggcagggcgggaggcatgcaagccagtgggggaaaacccctctgaagctgggcagccctctacctgggccccgggagccgtgctccttggaacgcaaagggccgaggagcatctggttttcatggcaaagctctactccagagctcctttaacatctgctaattaagtgcaataaatttttctagaaaatggcaaagatgacttccaggtggatattgctctcttacggtgttggggatgccagaacaccacttggttttatttttctaagtgcatgtgatgtgatagagtgtgtggggctctgtgtccttccctgggagctggcattccagcgggcccctctctttacctttgttgggggaaggaggcaagagagaaattccttcttcccagccagagagggcagaagcagaccgtagcccattggccttatgtgcgtgtgtgcgtgcgagtgtgtcactgctggtgggccggagtgatgtggtgggagggaagccgggaatgtatccttttcagacaaaattaaatattttgaaatgagaa

SEQ ID NO: 31652 - DNA, 551 bp, Homo sapiens
  source 1..551: mol_type = unassigned DNA
gcttcatctttttgcctaggccaggaacgtcactggggcgtatacggaaagcagataaggaaaaggggaaggaaaagctggaggaggacgaggccgcagccgccagcaccatggctgtctcagcctccctcatgccacccatctgggacaagaccatcccatatgatggcgaatctttccacctggagtacatggacctggatgagttcctgctggagaatggcatccccgccagccccacccacctggcccacaacctgctgctgcctgtagcagagctagaagggaaggagtctgccagctcttccacagcatccccaccatcctcctccactgccatctttcagccctctgaaaccgtgtccagcacagaatcttccctggagaaggagagggagactcccagtcccatcgaccccaattgtgtggaagtggatgtgaacttcaatccggaccccgccgacctggtgctctccagtgtgccaggcggggagctcttcaaccctcggaagcacaagtttgctgaggaggacctgaagccccagcctatg

SEQ ID NO: 31653 - DNA, 2810 bp, Homo sapiens
  source 1..2810: mol_type = unassigned DNA
agctgcctctgaactccctggagcaagcacctcctgctgggctgtgtgagctgcgactggttctcagtggcccctgccatggacatgcctgaggtcctcaagtccctgctggagcactctctgccttggccagagaagagaacagataaggaaaaggggaaggaaaagctggaggaggacgaggccgcagccgccagcaccatggctgtctcagcctccctcatgccacccatctgggacaagaccatcccatatgatggcgaatctttccacctggagtacatggacctggatgagttcctgctggagaatggcatccccgccagccccacccacctggcccacaacctgctgctgcctgtagcagagctagaagggaaggagtctgccagctcttccacagcatccccaccatcctcctccactgccatctttcagccctctgaaaccgtgtccagcacagaatcttccctggagaaggagagggagactcccagtcccatcgaccccaattgtgtggaagtggatgtgaacttcaatccggaccccgccgacctggtgctctccagtgtgccaggcggggagctcttcaaccctcggaagcacaagtttgctgaggaggacctgaagccccagcctatgatcaaaaaggccaagaaggtctttgtccccgacgagcagaaggatgaaaagtactggacaagacgcaagaagaacaacgtggcagctaaacggtcacgggatgcccggcgcctgaaagagaatcagatcaccatccgggcagccttcctggagaaggagaacacagccctgcggacggaggtggccgagctacgcaaggaggtgggcaagtgcaagaccatcgtgtccaagtatgagaccaaatacgggcccttgtaacccgtgccccccgcccgggcggggtactgcctgcacctcagacctctgcctgggggctccctgtaacccctcacacgcgtggagacttatgactcgtcgtgggcgcatggcggcgcacctgctgcaggagcggccacgtctcagcttcattataccatggcctgcgcacgtggcgacgtccctgaggggccagtctcctcactggtggggaacgcaagagaatctgcgtagatgggtgactcagccttagtttctattcttggatgtcccagttgaatcagaaggggacctctggagtacacacctctctcctgggcgctcagggtccctggactctccctcagtctccagcctgggctgccgagggctatctctgcagaatgagttgtgatcattgtcaccctatgtcttctcaggtagcagggcgcgtttccacttaaggtgtgtctgtcacgcacctcattctccccagacagtctttgagtaacatctgttcccatcttccttggaagcaggacacaccagctcctccgtcagtgtctgcatgggtagcaggctgcaggagtggggtctctgcacagcctgggatggggcttggggctggggcctgcagcagaagtgtgcccagcgtttctcggctcccgcaccccttttcccttatggctctgaggccatcggctgtctctgcatttcattggctgtggaggagagactcctaggatggctgctgtctgagccatgagtgccagggctgagagaggcctcttcatttcctctccaggctactcagaggccatgtgaagctcgtttgtcccactagaccaggcctctgggcctgctctttctttccacccaatgtccagtcttggatcatagatttaaaaggaaaacccctcttatctaggaggctttaacttcctggaccccaggattcaccttcctagtggtgtttagaaaatgcctccacagcccccttccaccatgggcatgagagctggggtgtgtttcttgagaagctcccttttttcttgctctgctcaccggtgtggcctgggctggagtgcactctccctgggggcagctggggcctcgcaattcttgcttcaggatctctcccatgcgagctgcccggagggtgtcagcagggcaagacacctagtctagagtcaccaaggtcacagtgccactttcacgggatagcaggctcttgggacttttacacaggcctagggtcccctcagtcttggtcccaggagatgggggccactcgtgaggctggccatgctgtggcttctcacagctgtggtctcccctgcctcacaacgactcctttctcttgtgtggcgggactcgcccttttgctgtgctcagaagattcactgaggaaactcatggaagcctctgctcatttgggtcactgggacacccctgagatgggtgtgtttatttgctcagggcgggcagcctatggtgaagaggagacagaggcgatgggcgtgcttcgtcctccgtaacactggctttatttaccgtggtggttcagagtcccaggccctgacctctaaagacttttcataacagacgttaagaccaagccgtggacctcaccccaggggaatgccacggccctttggggacctgcacacccacctctccgggggacttgacaaggggccctgaggccaagggaggtcactcctccctccaggcccctgacttttactttgtggttctctaaaaaccatgtacacactttcactctattgtaaccacacagaagcagaccgtagcccattggccttatgtgcgtgtgtgcgtgcgagtgtgtcactgctggtgggccggagtgatgtggtgggagggaagccgggaatgtatccttttcagacaaaattaaatattttgaaatg

SEQ ID NO: 31654 - DNA, 4386 bp, Homo sapiens
  source 1..4386: mol_type = unassigned DNA
agctggcaggtggccgagccgggggtggacgggcgggctgggactggtgctggccattggctgcctcaaggctcccaccccgcctgcctccctagcctgcggctggcggcccctgcctctccagctgcctctgaactccctggagcaagcacctcctgctgggctgtgtgagctgcgactggttctcagtggcccctgccatggacatgcctgaggtcctcaagtccctgctggagcactctctgccttggccagagaagagaacagataaggaaaaggggaaggaaaagctggaggaggacgaggccgcagccgccagcaccatggctgtctcagcctccctcatgccacccatctgggacaagaccatcccatatgatggcgaatctttccacctggagtacatggacctggatgagttcctgctggagaatggcatccccgccagccccacccacctggcccacaacctgctgctgcctgtagcagagctagaagggaaggagtctgccagctcttccacagcatccccaccatcctcctccactgccatctttcagccctctgaaaccgtgtccagcacagaatcttccctggagaaggagagggagactcccagtcccatcgaccccaattgtgtggaagtggatgtgaacttcaatccggaccccgccgacctggtgctctccagtgtgccaggcggggagctcttcaaccctcggaagcacaagtttgctgaggaggacctgaagccccagcctatgatcaaaaaggccaagaaggtctttgtccccgacgagcagaaggatgaaaagtactggacaagacgcaagaagaacaacgtggcagctaaacggtcacgggatgcccggcgcctgaaagagaatcagatcaccatccgggcagccttcctggagaaggagaacacagccctgcggacggaggtggccgagctacgcaaggaggtgggcaagtgcaagaccatcgtgtccaagtatgagaccaaatacgggcccttgtaacccgtgccccccgcccgggcggggtactgcctgcacctcagacctctgcctgggggctccctgtaacccctcacacgcgtggagacttatgactcgtcgtgggcgcatggcggcgcacctgctgcaggagcggccacgtctcagcttcattataccatggcctgcgcacgtggcgacgtccctgaggggccagtctcctcactggtggggaacgcaagagaatctgcgtagatgggtgactcagccttagtttctattcttggatgtcccagttgaatcagaaggggacctctggagtacacacctctctcctgggcgctcagggtccctggactctccctcagtctccagcctgggctgccgagggctatctctgcagaatgagttgtgatcattgtcaccctatgtcttctcaggtagcagggcgcgtttccacttaaggtgtgtctgtcacgcacctcattctccccagacagtctttgagtaacatctgttcccatcttccttggaagcaggacacaccagctcctccgtcagtgtctgcatgggtagcaggctgcaggagtggggtctctgcacagcctgggatggggcttggggctggggcctgcagcagaagtgtgcccagcgtttctcggctcccgcaccccttttcccttatggctctgaggccatcggctgtctctgcatttcattggctgtggaggagagactcctaggatggctgctgtctgagccatgagtgccagggctgagagaggcctcttcatttcctctccaggctactcagaggccatgtgaagctcgtttgtcccactagaccaggcctctgggcctgctctttctttccacccaatgtccagtcttggatcatagatttaaaaggaaaacccctcttatctaggaggctttaacttcctggaccccaggattcaccttcctagtggtgtttagaaaatgcctccacagcccccttccaccatgggcatgagagctggggtgtgtttcttgagaagctcccttttttcttgctctgctcaccggtgtggcctgggctggagtgcactctccctgggggcagctggggcctcgcaattcttgcttcaggatctctcccatgcgagctgcccggagggtgtcagcagggcaagacacctagtctagagtcaccaaggtcacagtgccactttcacgggatagcaggctcttgggacttttacacaggcctagggtcccctcagtcttggtcccaggagatgggggccactcgtgaggctggccatgctgtggcttctcacagctgtggtctcccctgcctcacaacgactcctttctcttgtgtggcgggactcgcccttttgctgtgctcagaagattcactgaggaaactcatggaagcctctgctcatttgggtcactgggacacccctgagatgggtgtgtttatttgctcagggcgggcagcctatggtgaagaggagacagaggcgatgggcgtgcttcgtcctccgtaacactggctttatttaccgtggtggttcagagtcccaggccctgacctctaaagacttttcataacagacgttaagaccaagccgtggacctcaccccaggggaatgccacggccctttggggacctgcacacccacctctccgggggacttgacaaggggccctgaggccaagggaggtcactcctccctccaggcccctgacttttactttgtggttctctaaaaaccatgtacacactttcactctattgtaaccacacagggcaggcgcatccagcatgtcagtgtcctgccccgggcagctctccctcccgggcacgctccctctggcctggtggatcaccaagagggcggttctcattttgttattagtggaagagccttgagcttaaaagctcttcattttctttgccggaaagtatatggtttgtgtttttgcagttttatttttttaaggatggacactaaatctctggtgtccatgttccgagcccggtggctgggatggtggctcgatgtgtctcctctttatcccgccctctgcctgtttggtgccctcccttctttcccccaggcagtgggtatcgggttctttcccaaagtgcttacttggaaagagtgtggctgctggactcttttcgaaatgcccctctgagtcaggagcctggtggggacaagatggaggatgtccacagaggctgacctgtgggggaaaagaagtgctcaggtaaggttgtctcctctcctgtcctaaaaaaatccatgcttgcaggagagggttggtgcctgctcagtttctgtcgagggaatgggagtctcctcggctccctcctgggccctctgcttcttggaggccgaccgctggagactgcggctcctgtgcttggatctttgacatctgtcagtcactggaggctagagaagttgactttaccttggctttctgtgggttcccgatgggcttggaagtgccgtctacttcctaagcatcctgtctaaagctttgtggcaccctcagtgcaacctcagaacagacaaatcatgaatgagctggaactttgcaagaatattcatattataaatgtctcatctgatggaggaacgtgtgcatttagagagagggagagttttcaaggtttatggcaactttgtggaggacctgggtaactcttacccttggccaaaggaagaggttttcctgtctggcttctgaggttggagggggcacttagcagtgaaccttaagtctgggtacatgtaaccctgctgaggggctgtgcaggccgctcctacggtcctttggcctgaggcagggcgggaggcatgcaagccagtgggggaaaacccctctgaagctgggcagccctctacctgggccccgggagccgtgctccttggaacgcaaagggccgaggagcatctggttttcatggcaaagctctactccagagctcctttaacatctgctaattaagtgcaataaatttttctagaaaatggcaaagatgacttccaggtggatattgctctcttacggtgttggggatgccagaacaccacttggttttatttttctaagtgcatgtgatgtgatagagtgtgtggggctctgtgtccttccctgggagctggcattccagcgggcccctctctttacctttgttgggggaaggaggcaagagagaaattccttcttcccagccagagagggcagaagcagaccgtagcccattggccttatgtgcgtgtgtgcgtgcgagtgtgtcactgctggtgggccggagtgatgtggtgggagggaagccgggaatgtatccttttcagacaaaattaaatattttgaaatgag

SEQ ID NO: 31655 - DNA, 1978 bp, Homo sapiens
  source 1..1978: mol_type = unassigned DNA
tctgcggccgtgtccctttcgtgtgtgtctgccctgtgtttctccgtcgtctccgtgtggatctcggtctttgtctcgccctctagctctctcgtgcgcctgtgtttaatcgtgcgcttctctcaatctctctgtccctccctttgccccctacacgcgtgttctcgtcaacagatctccagaggtggtgcagaaacgaccccgcgccggcgccccatcctgcggccagtgcctccgcgccccggctccggtccccaccgtccccgccccagatttccggaggagcaggcgggcggggtcccgcggggccggctgccgtcagcgccccttcccggcggccgcgacccctccccgctgacctcactcgagccgccgcctggcgcagatataagcggcggcccatctgaagagggctcggcaggcgcccggggtcctcagcgctgcagactcctgacctgccgactgcggatcccgagtccccggatcccggacccatcctgtggagcccactcctggcagacgccgcgatgcccggcccttggttgctgctcgctctggctttgaccctgaacctgaccggtgtccccggcggccgtgctcagccagaggcggcccagcaggaggcagtgacggccgcggagcatccgggcctggatgacttcctgcgccaggtggagcgcctcctcttcctccgggaaaacatccagcggctgcaaggggaccagggtgagcactccgcgtcccagatctttcaatctgactggctctccaaacgtcagcatccaggcaaaagagaggaggaggaggaagagggagttgaagaagaggaagaggaagaagggggggctgtgggaccccacaaacggcagcaccctggccgacgagaagatgaggcttcatggtcagtcgatgtaacccagcacaagcggcagcatcctggccggcgctccccctggcttgcatatgctgtcccgaagcggcagcacccaggcagaaggctggcagatcccaaggctcaaaggagctgggaagaagaggaggaggaggaagagagagaggaagacctgatgcctgaaaaacgccagcatccgggcaagagggccctgggaggcccctgtgggccccagggagcctatggtcaagcgggccttctgctggggctcctggatgacctgagtaggagccagggagctgaggaaaagcggcagcaccctggtcggcgggcagcctgggtcagagagcccctggaggagtgaacccagttttccctgaagtcgagtttgtggtctaaggatgtcttgagccctgtgtgccccaccattcatgacctctgtattctctagttagatccctgaccataagcctgagcccctccctcccagccccatattcacacacatcccagcccctggccttgccctcttcctttaggcatgtgagaaaatcagcctagcagtttaaaccccactttcctccacttagcaccataggcaagggggcagatcccagagcccctctcaccccccccaccacaggcctgctccttccttagccttggctaagatggtccttctgtgtcttgcaaagactccccaagtgggacagggagcccctgggagggcagccagtgagggtggggtgggactgaagcgttgtgtgcaaatccagcttccatcccctccccaacctggcaggattctccatgtgtaaacttcacccccaggacccaggatcttctcctttctgggcatccctttgtgggtgggcagagccctgacccacagctgtgttactgcttggagaagcatatgtaggggcataccctgtggtgttgtgctgtgtctggctgtgggataaatgtgtgtgggaatattgaaacatcgcctaggaattgtggtttgtatataaccctctaagcccctatcccttgtcgatgacagtcatcctaatgataataaaacctgcatccagataatca

SEQ ID NO: 31656 - DNA, 5618 bp, Homo sapiens
  source 1..5618: mol_type = unassigned DNA
aagaaaaagaagaagaaaaagaagaggaagaagaagaaggaggaggaggaggaggaggagggggccgagaagagcagctcacccttcgcagccgcgatgggggaagacgacgccgcgcttcgggctggcagcagggggctctccgacccgtgggcagactcagtgggagtgcgaccccgcaccacggagcgccacatcgccgtacacaagcggcttgtgctggccttcgctgtgtccctcgtggcattgctcgcggtcacaatgctcgctgtgctgctcagcctgcgcttcgacgagtgcggggcgagtgccacgccaggcgccgacggtggcccctcaggctttccggagcgcggcggcaacgggagcctccctggatcggcccggcgcaaccaccacgcaggcggggactcctggcagcccgaggcgggtggggtggccagtccggggaccacgtcggcccagccgccgtcggaggaggagcgggagccgtgggagccgtggacgcagctgcgcctgtcgggccacctgaagccgctgcactacaatctgatgctcaccgccttcatggagaacttcaccttctccggggaggtcaacgtggagatcgcgtgccggaacgccacccgctacgtagtgctgcacgcttcccgagtggcggtggagaaagtgcagctggccgaggaccgggcgttcggggctgtccctgtagccggttttttcctctacccgcaaacccaggtcttagtggtggtgctgaataggacactggacgcgcagaggaattacaatctgaagattatctacaacgcgctcatcgagaatgagctcctgggcttcttccgcagctcctatgtgctccacggggagagaagattccttggtgttactcagttttcgcctacacatgccagaaaggcatttccttgttttgatgagccaatctacaaggctactttcaaaatcagcatcaagcatcaagcaacctatttatctttatctaatatgccagtggaaacttccgtgtttgaggaagatggatgggttacggatcacttttcacagacccctctcatgtccacatattatttagcctgggcaatttgcaacttcacatacagagaaactaccaccaagagtggggttgtagtacgattatatgcaagacctgatgctatcagaagaggatccggggactatgctctccatataacaaagagattaatagaattttatgaagactactttaaagtgccctattccttgccaaaactagatcttttagctgtgcctaagcatccgtatgctgctatggagaactggggactaagtatttttgtggaacaaagaatactgctggatcccagtgtttcatctatttcttatttgctggatgtcaccatggtcattgttcatgagatatgtcaccagtggtttggtgaccttgtgacgcctgtgtggtgggaagacgtgtggctgaaggaagggtttgctcactactttgaatttgttggtacagactacctctatcctggctggaacatggaaaagcagaggtttctgaccgatgttctgcatgaagtgatgctgctggacggtttggccagttcccatccagtatcacaggaagtgctgcaggcaacagatattgacagggtgtttgactggatcgcatataaaaagggtgctgctttaataagaatgctggctaattttatgggccattcagttttccagaggggtttgcaagattatttaaccattcataagtatggtaatgcagccagaaatgatctctggaatacattatcggaggctttaaaaagaaatgggaaatatgtaaatatacaagaagtaatggatcagtggacactccagatgggttatcctgttatcaccatcttgggaaacacaacagcagaaaatagaataataattacccaacagcattttatctatgatatcagtgctaaaactaaagcacttaaacttcagaataacagttacctgtggcagattccattaactattgtggtaggaaatagaagccatgtgtcttcagaagcaattatttgggtgtctaacaaatcagagcaccacagaataacttatttggacaaaggaagctggctgctggggaacatcaatcaaactggctattttagagtcaactatgacctaaggaactggagattattaattgatcaattaatccggaatcatgaggttctttctgtcagtaaccgagcgggcttgatcgatgatgccttcagcctagccagggctggctatttgcctcagaatattcctctggagattatcagatacctgtctgaggagaaggattttcttccttggcatgctgccagccgagctctttatcctctagataaattactggaccgcatggaaaactacaacattttcaatgaatatattttaaagcaagttgcaacaacatatatcaagcttgggtggccgaaaaataattttaatggatctcttgttcaagcatcctaccaacatgaagaactacgtagagaagttataatgctggcctgcagttttggcaacaagcactgtcaccaacaggcatcaacacttatttcagattggatttccagcaacaggaacagaataccactaaatgttagagacatcgtatactgtacaggagtgtcactactggatgaggatgtctgggaattcatatggatgaaattccattccaccacagcagtttctgagaagaaaatattattggaagccttaacttgcagtgatgacaggaatttattaaacaggcttctaaatctgtcactgaattctgaggtggtgctggatcaagatgcaattgatgtcataatccatgtagctcgaaatccacatggtcgagaccttgcctggaagtttttcagggataaatggaagatattaaataccaggtatggagaagcattgtttatgaattccaaactcatcagtggtgtcacagaatttcttaatactgaaggtgaactcaaagagctcaagaacttcatgaaaaactatgatggggtagctgctgcttctttctcacgagctgtggaaactgtcgaagccaatgtgcgctggaaaatgctttaccaagacgagcttttccaatggttaggaaaagctctaagacactaatatatgtatcttataaacaaacaattcaactcagaagtttatgagaagacacgctttttgtggaatgaggaaaatgtactacctagaaaatggccagattttcagtgttaacgtgtgggaggaattttttttttagtttttattttttggttttgggggatattttttatttgtttcattcattctgttctgtttctctactgggtgttcctctctaaagaaactcttgcaagtgaaactagccatgattgcttcagctgtacattccttgctgtacaggaccaaatatgatagtgatgcatgttgatgttacagtcaatttggaaaaacatattcagaatatctgtgcatggatatattgtcctgcctgtgttccagcatgcttatttcaaacgtccagtgttgtgtgtgaatatgtgttacacctaggatgggcattatgcaaaagcacaaagattatatatgacaatcagtattgcaatgaaagaaaaactaaaaacagaaatgatattctcaattttgggcaatgtgagaggtaaaatagcccttgacatgatgaacatcacttatttcagcacttggattgtctggcaatgattactgtgttgctaactcattttctttgagttaaagctgtgtatacattttaaaaggcatatagatagtgtatgcatatgtatatgtacatagggaagccccatatgtatatagtatgttgtacactgcacatgtacaaagaatgtcttcagatcaaagaaaatttatctctttttataaacttaaggacagttgcaaaaggcttcaaggaatttatctcaacattattctttctatgtcctaactaaatttctcaactgttatgaatttttcatctacttcttgaacagtggtctattctgctacatgaagatgaatacaaacaaaatttttgtataaactactattccagttctcctgtgtcagtcttgcctatagattttgccatcgttttctgtcaaagttccttttgcatgaaacaattatgcaaacttataattattagtgctgaaaaagagtttattttccatcttgtttgttttcctaccttatgctgagtagtccagagagttaaaaaaattctctgcatgttggtcttttaagtctgttttgctctaatcctccattaagcgagcatacctcaagtgggtctattagcatttaatgaccttttgtgccagttgtgccatcccttaagatgaaaagttccttttcttgtgttaatgtacaaagcttttcttttggcactgacaactgtgttctacctgggaattttgaatagccattttcatggctgtgtgttgtgtaacacaaatgtttttaaatggtattctcacccagtaggccagctctccaaacgttgcttagatgcttcaaaattagcatattttaagtttaccagtataaaataccaatgcaactactctacatagccaaatgtttgtaaatcacgtcttattttcctgaggtttttcactccaccaaatcttacaaatcattgaaagaaatatattctaacagtacgcactgaatagtgaaaataattagacattttaagaaccagagccatagaattattttaaattagtagaaaagaggagctatttccgaatctatagaataaagtaccacctaaaactgaattttatcatataagcaagtaatacctattagtcatacctaaatttttcagcacttcattcaattaaaatacatgaattttaaatattttacatgatgtgaataggcatgataatacttttagtataaaatctaaactttttccatttatcagaaatgataaaatccagttaccacatatcacgtttataaaatccttaattaaatgagtaacttctaaaatataacaatactaaatatcacactgcgatggaggtcccaaatatgtggtctatcaccactgaattcatgtaatagataagaaaaaaattagaggtggatgtcttgttttgtgtcatgaattactaaaatctcttagtagttgtggtatatttttgagtaaaattaccatttccagatttgagtttgaagggcttttatagttgtattttcctcctcactgttaataatcataatcctttttcagtattttagtggccttgaacaactggtttatctacaatctcaaatcctaagtgtataattatgtgcaatgttcaatacctcatataatacttgctcaacagtatagtggtaccaatggcattaagatggtgtttttgttctacatatttttcaataatttattctttctaatgttgaaattatatcaggctttaccggtttttttagttgtttaaataagtaatattttcaaaagaataaaataaccaatgatatctcttggaataatctgtaaaacgtagttataaaattctattttctactta

SEQ ID NO: 31657 - DNA, 1415 bp, Homo sapiens
  source 1..1415: mol_type = unassigned DNA
gggggatggaactgctgcaataaaggtgggcgctggaaagaagatgttttgagaagtcagtgtttccgagaaactttaagcttctaaagatggaaaacgagacagtcagtgaactgaaccaaacacagcttcagccacgagcagtggtggccttagaataccaggtggtcaccatcttacttgtactcattatttgtggcctgggcattgtaggcaacatcatggtagtcctggttgtcatgagaaccaagcacatgaggacccccacaaactgctacctggtgagcctggcagtagctgatctcatggtcttggtggccgcaggcctccccaacataacagacagtatctacggttcctgggtctatggctatgttggatgcctctgcattacttacctccagtatttgggaattaatgcatcctcttgttcaataacagcctttaccattgagaggtacatagcaatctgtcaccccatcaaagcccagtttctctgcacattttccagagccaaaaagattatcatctttgtctgggctttcacatctctttactgtatgctctggttcttcttgctggatctcaatattagcacctacaaagatgctattgtgatatcctgtggctacaagatctccaggaattactactcacctatttacctaatggactttggtgtcttttatgttgtgccaatgatcctggctaccgtcctctatggattcatagctagaatccttttcttaaatcccattccttcagatcctaaagaaaactctaagacatggaaaaatgattcaacccatcagaacacaaatctgaatgtaaatacctctaatagatgtttcaacagcacagtatcttcaaggaagcaggtcaccaagatgctggcagtggttgtaattctgtttgcccttttatggatgccctacaggactctagtggttgtcaactcatttctctccagtcctttccaagaaaattggtttttgctcttttgcagaatttgcatttatctcaacagtgccatcaacccggtgatttacaatctcatgtcccagaaattccgtgcagccttcagaaagctctgcaactgcaagcagaagccaacagagaaacctgctaactacagtgtggccctaaattacagcgtcatcaaggagtcagaccatttcagcacagagcttgatgatatcactgtcactgacacttacctgtctgccacaaaagtgtcttttgatgacacctgcttggcttctgaggtatcctttagccaaagttgattcatgaattagaagaaaatggatgacaaagaaaatgagaatctgtgcagtcatcaacaaaagggagaacatggccaatagtcatatgtgaagacagagcagatcagtctttgtcaatgctctaacaaa

SEQ ID NO: 31658 - DNA, 1660 bp, Homo sapiens
  source 1..1660: mol_type = unassigned DNA
tgttctcattaggggacgatctatgatttgacagcctcactgctgctgctcctgctgctgcttctgcttctgccgcggctgtatggtttgtcattagttggaaagggctgtgagggtttggagaaactgcagttttaaagactgagcactgctaagtggtctccctctcaaatagagtagacaagattttctgcaagattagaaacttggaactattaccacttcatctacccagaaaatcaggcagcgctacagaggataagggggatggaactgctgcaataaaggtgggcgctggaaagaagatgttttgagaagtcagtgtttccgagaaactttaagcttctaaagatggaaaacgagacagtcagtgaactgaaccaaacacagcttcagccacgagcagtggtggccttagaataccaggtggtcaccatcttacttgtactcattatttgtggcctgggcattgtaggcaacatcatggtagtcctggttgtcatgagaaccaagcacatgaggacccccacaaactgctacctggtgagcctggcagtagctgatctcatggtcttggtggccgcaggcctccccaacataacagacagtatctacggttcctgggtctatggctatgttggatgcctctgcattacttacctccagtatttgggaattaatgcatcctcttgttcaataacagcctttaccattgagaggtacatagcaatctgtcaccccatcaaagcccagtttctctgcacattttccagagccaaaaagattatcatctttgtctgggctttcacatctctttactgtatgctctggttcttcttgctggatctcaatattagcacctacaaagatgctattgtgatatcctgtggctacaagatctccaggaattactactcacctatttacctaatggactttggtgtcttttatgttgtgccaatgatcctggctaccgtcctctatggattcatagctagaatccttttcttaaatcccattccttcagatcctaaagaaaactctaagacatggaaaaatgattcaacccatcagaacacaaatctgaatgtaaatacctctaatagatgtttcaacagcacagtatcttcaaggaagcaggtcaccaagatgctggcagtggttgtaattctgtttgcccttttatggatgccctacaggactctagtggttgtcaactcatttctctccagtcctttccaagaaaattggtttttgctcttttgcagaatttgcatttatctcaacagtgccatcaacccggtgatttacaatctcatgtcccagaaattccgtgcagccttcagaaagctctgcaactgcaagcagaagccaacagagaaacctgctaactacagtgtggccctaaattacagcgtcatcaaggagtcagaccatttcagcacagagcttgatgatatcactgtcactgacacttacctgtctgccacaaaagtgtcttttgatgacacctgcttggcttctgaggtatcctttagccaaagttgattcatgaattagaagaaaatggatgacaaagaaaatgagaatctgtgcagtcatcaacaaaagggagaacatggccaatagtcatatgtgaagacagagcagatcagtcttt

SEQ ID NO: 31659 - DNA, 4633 bp, Homo sapiens
  source 1..4633: mol_type = unassigned DNA
aactttgctggctgctcctaggctcccggctcgccgccatcttgtattggggtttcattgttcccgctgggccgggcggtttagtgtaattgccgccggaggaggaggcggagtaacctctggtcagccgagaaaccccactatcctgtagccataaccgcttaaacgatttgggaggtagtgaagggcagggagctggacctggaggcgccgccgcgacagcagcagccatggaggacgagatgcccaagactctatacgtcggtaacctttccagagatgtgacagaagctctaattctgcaactctttagccagattggaccttgtaaaaactgcaaaatgattatggatacagctggaaatgatccctattgttttgtggagtttcatgagcatcgtcatgcagctgcagcattagctgctatgaatggacggaagataatgggtaaggaagtcaaagtgaattgggcaacaacccctagcagtcaaaagaaagatacaagcaatcatttccatgtctttgttggtgatctcagcccagaaattacaactgaagatataaaagctgcttttgcaccatttggaagaatatcagatgcccgagtggtaaaagacatggcaacaggaaagtctaagggatatggctttgtctcctttttcaacaaatgggatgctgaaaacgccattcaacagatgggtggccagtggcttggtggaagacaaatcagaactaactgggcaacccgaaagcctcccgctccaaagagtacatatgagtcaaataccaaacagctatcatatgatgaggttgtaaatcagtctagtccaagcaactgtactgtatactgtggaggtgttacttctgggctaacagaacaactaatgcgtcagactttttcaccatttggacaaataatggaaattcgagtctttccagataaaggatattcatttgttcggttcaattcccatgaaagtgcagcacatgcaattgtttctgttaatggtactaccattgaaggtcatgttgtgaaatgctattggggcaaagaaactcttgatatgataaatcccgtgcaacagcagaatcaaattggatatccccaaccttatggccagtggggccagtggtatggaaatgcacaacaaattggccagtatatgcctaatggttggcaagttcctgcatatggaatgtatggccaggcatggaaccagcaaggatttaatcagacacagtcttctgcaccatggatgggaccaaattatggagtgcaaccgcctcaagggcaaaatggcagcatgttgcccaatcagccttctgggtatcgagtggcagggtatgaaacccagtgaataaggactccagaatctaaagccagtggcttgaggctacagggagtgtagtaaagccgttgtttacttaaagatttatcaaatcagtcagtgcaaatgtcagatacaatgtatttatttaaaagattcatttttaatcatgaaattacttatcatccacattgttttaaaaagaaacaagatgctggatgtctgccaatttttgccttcattaccttttttgataaagtttctcagatccttgtttcaaacacaaatgcagggattgctgccactttttaactattaagaggcagaaaattgcacaatattgaacttttttccactgaagtagtgtgcagttctagtttgcattcctgatatgatttaaaacatgtaatataaagatgttaaaaaaaaaaaccaaaactgtgcagagtctagaagttgtttgtcatcttcagcttgtgcacaattctgttttaggttaaaaaaaggcattgtttgagctgtcccatctccactgttatccctttggggttttttaatataaattattagtttacatcatttttgtatctacatcttttttcacaaatttgtcttgccttattaaagttctgtaaaatatacttaaatggaaaaaatgatgttcatttagattgaaaacttttctcagatggattgataattgcattcatcttgtgttttatatgagaaggtgcctcaagaatttcctgttggatttgtttaaaaggatttttatctttcgtgataaactttgctgtgtaccaggaactataaaaacaaaaacttgttactaaagaaaatatctgaaatgtgataagttcttatgccatgttaatttcatgtgtcaacttcaacatttacatgtattatttcattatgtaaaatgttttagcaatttaatattttgcacagttagcaaactttgtatgtcatttccttcaaggcatcatgcagagttgacatgagatttataaggttttaagttgtttgcatgtgaaaatcaaatacatactttggtagtctttgaatacaaagtcatctgctcttgtttttcaagaattttgagacacaaagttgtatgtaaaggaatatattaatttgccgttttctaggtagatttgctcaaaaagagtgaatcaacttaatatgtacaaatgatagctgtgaaactgtagaatatctttgtgtcaggcttggagttcattgtgacctccaaattttgcctgaaggaccagctgggcaaagcatcttttaaatgttcagaggccaaaagataaacaaaaaaaaaaccttaaaatcctacctctttaaacagccttcagataagagaatcctcagtgcaatcattattttgattcgtttggtacctgttttcctggagttcccgattttattattttggggtggctccaagcattaagaggtttaatctttgatggcattgttctagttttgaaatttctagtatatttcagagtctcttagaagacttgtgtgggaagtttcactttgttttcagtgaagatcacaaacctccttcttcctttactcaagaggaaaggtcccagtatacatatttgaatggttgatggttttcaagaccttcagggagctccctgcattttacctagaaacagaaaaggcccgcaaaatcttaagtttcctggcctgcatttcccgggtaggggcaaatgactccaagctggtctctaagccaatacccttataaaccagagcccaggaaagacagctcgagtgtataattctctggagctcaattctatgcagttgtgctgatatttcattaagtcactgtgtatttttaagtgttgatacattaaaagtcgctttatggaagatgagtaaattttttaaatacttggaaattttatttccttgttaacttctacagatcagggcatgcaaccaaaagcagcttaaatgaaatattttaaaataaaatatcaggaagctatttttagatttcttctggcttatgtttctactttaggaccctcattgttctcttattaaaaaaaattatttcctgtgcatctcatggactgcagggtaaattatttgggcataaataatttaaatagttttctttcattttgactatctccagtaataacagtttttattatccagcatattggcttattgcacaaatcttaaaatgtacattgactactttctgagaagaaagtggtatcagtactcatgatgaaaaggttactactgaacaaattcacatttcaggaacacctctatctttggtttaaatcttactcttagtttttccgtctaaaaatcatactggtattagtatcaggtaaggaaattaaagtttttaaaatggtttcattctctgcaatatgcaaaatttagattttactttctggtactgtaaagaacctgaagtgatttacacttaatgggtgattaatccagtattctttaccctgaatgtttggatattaaagttcctttatgttttctataacctgtgggatcttcttgcagtgattattgtgtgtgagattttttttctttttggtctatccatattgttatattcactcaggtattttttttttaatcttattccagaatcagtggtttatattgggttactgtttaacaccaaatggaattggcattctgcagatttaattaattatgaaaccagggtctcattttccttgctgatacttgttgaaaatgagattcacattctagtctttattttcctcctgttttgtccctgtgcttgtacatcttccttttatttgtgtgttatagttctattccatttgagaaggcagttggtaagaactagattgcatgtacaaagacaggtttactaagtgctgtacagtggtcctgaggttacagttgaattagaaaaacgaaatgtacttacaggaaataagaaagcaaacctttcaaatgagagtgatgatttctttaaaaaaaatcagtttttttctctcaaataatgttctttatttcacgaaatcgtcaatcttaagcatgagcagggataaacaactcctagaaggaactcaattcattcttcctggattttctctgttgttaaatcacaaaaatgatagtccccaatcgtttctttataggaggttattacatttcattacagtcactgcattttgactgttgtgtttagaatttgaatgtacatccaaaatgatgagtttcaatttaagagccttaataaaatgtgtgagtgtgtctcaattgaa

SEQ ID NO: 31660 - DNA, 4647 bp, Homo sapiens
  source 1..4647: mol_type = unassigned DNA
aggctcccggctcgccgccatcttgtattggggtttcattgttcccgctgggccgggcggtttagtgtaattgccgccggaggaggaggcggagtaacctctggtcagccgagaaaccccactatcctgtagccataaccgcttaaacgatttgggaggtagtgaagggcagggagctggacctggaggcgccgccgcgacagcagcagccatggaggacgagatgcccaagactctatacgtcggtaacctttccagagatgtgacagaagctctaattctgcaactctttagccagattggaccttgtaaaaactgcaaaatgattatggatacagctggaaatgatccctattgttttgtggagtttcatgagcatcgtcatgcagctgcagcattagctgctatgaatggacggaagataatgggtaaggaagtcaaagtgaattgggcaacaacccctagcagtcaaaagaaagatacaagcagtagtaccgttgtcagcacacagcgttcacaagatcatttccatgtctttgttggtgatctcagcccagaaattacaactgaagatataaaagctgcttttgcaccatttggaagaatatcagatgcccgagtggtaaaagacatggcaacaggaaagtctaagggatatggctttgtctcctttttcaacaaatgggatgctgaaaacgccattcaacagatgggtggccagtggcttggtggaagacaaatcagaactaactgggcaacccgaaagcctcccgctccaaagagtacatatgagtcaaataccaaacagctatcatatgatgaggttgtaaatcagtctagtccaagcaactgtactgtatactgtggaggtgttacttctgggctaacagaacaactaatgcgtcagactttttcaccatttggacaaataatggaaattcgagtctttccagataaaggatattcatttgttcggttcaattcccatgaaagtgcagcacatgcaattgtttctgttaatggtactaccattgaaggtcatgttgtgaaatgctattggggcaaagaaactcttgatatgataaatcccgtgcaacagcagaatcaaattggatatccccaaccttatggccagtggggccagtggtatggaaatgcacaacaaattggccagtatatgcctaatggttggcaagttcctgcatatggaatgtatggccaggcatggaaccagcaaggatttaatcagacacagtcttctgcaccatggatgggaccaaattatggagtgcaaccgcctcaagggcaaaatggcagcatgttgcccaatcagccttctgggtatcgagtggcagggtatgaaacccagtgaataaggactccagaatctaaagccagtggcttgaggctacagggagtgtagtaaagccgttgtttacttaaagatttatcaaatcagtcagtgcaaatgtcagatacaatgtatttatttaaaagattcatttttaatcatgaaattacttatcatccacattgttttaaaaagaaacaagatgctggatgtctgccaatttttgccttcattaccttttttgataaagtttctcagatccttgtttcaaacacaaatgcagggattgctgccactttttaactattaagaggcagaaaattgcacaatattgaacttttttccactgaagtagtgtgcagttctagtttgcattcctgatatgatttaaaacatgtaatataaagatgttaaaaaaaaaaaccaaaactgtgcagagtctagaagttgtttgtcatcttcagcttgtgcacaattctgttttaggttaaaaaaaggcattgtttgagctgtcccatctccactgttatccctttggggttttttaatataaattattagtttacatcatttttgtatctacatcttttttcacaaatttgtcttgccttattaaagttctgtaaaatatacttaaatggaaaaaatgatgttcatttagattgaaaacttttctcagatggattgataattgcattcatcttgtgttttatatgagaaggtgcctcaagaatttcctgttggatttgtttaaaaggatttttatctttcgtgataaactttgctgtgtaccaggaactataaaaacaaaaacttgttactaaagaaaatatctgaaatgtgataagttcttatgccatgttaatttcatgtgtcaacttcaacatttacatgtattatttcattatgtaaaatgttttagcaatttaatattttgcacagttagcaaactttgtatgtcatttccttcaaggcatcatgcagagttgacatgagatttataaggttttaagttgtttgcatgtgaaaatcaaatacatactttggtagtctttgaatacaaagtcatctgctcttgtttttcaagaattttgagacacaaagttgtatgtaaaggaatatattaatttgccgttttctaggtagatttgctcaaaaagagtgaatcaacttaatatgtacaaatgatagctgtgaaactgtagaatatctttgtgtcaggcttggagttcattgtgacctccaaattttgcctgaaggaccagctgggcaaagcatcttttaaatgttcagaggccaaaagataaacaaaaaaaaaaccttaaaatcctacctctttaaacagccttcagataagagaatcctcagtgcaatcattattttgattcgtttggtacctgttttcctggagttcccgattttattattttggggtggctccaagcattaagaggtttaatctttgatggcattgttctagttttgaaatttctagtatatttcagagtctcttagaagacttgtgtgggaagtttcactttgttttcagtgaagatcacaaacctccttcttcctttactcaagaggaaaggtcccagtatacatatttgaatggttgatggttttcaagaccttcagggagctccctgcattttacctagaaacagaaaaggcccgcaaaatcttaagtttcctggcctgcatttcccgggtaggggcaaatgactccaagctggtctctaagccaatacccttataaaccagagcccaggaaagacagctcgagtgtataattctctggagctcaattctatgcagttgtgctgatatttcattaagtcactgtgtatttttaagtgttgatacattaaaagtcgctttatggaagatgagtaaattttttaaatacttggaaattttatttccttgttaacttctacagatcagggcatgcaaccaaaagcagcttaaatgaaatattttaaaataaaatatcaggaagctatttttagatttcttctggcttatgtttctactttaggaccctcattgttctcttattaaaaaaaattatttcctgtgcatctcatggactgcagggtaaattatttgggcataaataatttaaatagttttctttcattttgactatctccagtaataacagtttttattatccagcatattggcttattgcacaaatcttaaaatgtacattgactactttctgagaagaaagtggtatcagtactcatgatgaaaaggttactactgaacaaattcacatttcaggaacacctctatctttggtttaaatcttactcttagtttttccgtctaaaaatcatactggtattagtatcaggtaaggaaattaaagtttttaaaatggtttcattctctgcaatatgcaaaatttagattttactttctggtactgtaaagaacctgaagtgatttacacttaatgggtgattaatccagtattctttaccctgaatgtttggatattaaagttcctttatgttttctataacctgtgggatcttcttgcagtgattattgtgtgtgagattttttttctttttggtctatccatattgttatattcactcaggtattttttttttaatcttattccagaatcagtggtttatattgggttactgtttaacaccaaatggaattggcattctgcagatttaattaattatgaaaccagggtctcattttccttgctgatacttgttgaaaatgagattcacattctagtctttattttcctcctgttttgtccctgtgcttgtacatcttccttttatttgtgtgttatagttctattccatttgagaaggcagttggtaagaactagattgcatgtacaaagacaggtttactaagtgctgtacagtggtcctgaggttacagttgaattagaaaaacgaaatgtacttacaggaaataagaaagcaaacctttcaaatgagagtgatgatttctttaaaaaaaatcagtttttttctctcaaataatgttctttatttcacgaaatcgtcaatcttaagcatgagcagggataaacaactcctagaaggaactcaattcattcttcctggattttctctgttgttaaatcacaaaaatgatagtccccaatcgtttctttataggaggttattacatttcattacagtcactgcattttgactgttgtgtttagaatttgaatgtacatccaaaatgatgagtttcaatttaagagccttaataaaatgtgtgagtgtgtctcaattgaa

SEQ ID NO: 31661 - DNA, 4770 bp, Homo sapiens
  source 1..4770: mol_type = unassigned DNA
gctcctaggctcccggctcgccgccatcttgtattggggtttcattgttcccgctgggccgggcggtttagtgtaattgccgccggaggaggaggcggagtaacctctggtcagccgagaaaccccactatcctgtagccataaccgcttaaacgatttgggaggtagtgaagggcagggagctggacctggaggcgccgccgcgacagcagcagccatggaggacgagatgcccaagactctatacgtcggtaacctttccagagatgtgacagaagctctaattctgcaactctttagccagattggaccttgtaaaaactgcaaaatgattatggatacagctggaaatgatccctattgttttgtggagtttcatgagcatcgtcatgcagctgcagcattagctgctatgaatggacggaagataatgggtaaggaagtcaaagtgaattgggcaacaacccctagcagtcaaaagaaagatacaagcagtagtaccgttgtcagcacacagcgttcacaagatcatttccatgtctttgttggtgatctcagcccagaaattacaactgaagatataaaagctgcttttgcaccatttggaagaatatcagatgcccgagtggtaaaagacatggcaacaggaaagtctaagggatatggctttgtctcctttttcaacaaatgggatgctgaaaacgccattcaacagatgggtggccagtggcttggtggaagacaaatcagaactaactgggcaacccgaaagcctcccgctccaaagagtacatatgagtgtaggtgtattggagaagaaaaggaaatgtggaattttggagaaaaatacgctagattttgttcccggagacttattgcagaaatagatgagaagcaaatcaagactactattcaaaaatcaaataccaaacagctatcatatgatgaggttgtaaatcagtctagtccaagcaactgtactgtatactgtggaggtgttacttctgggctaacagaacaactaatgcgtcagactttttcaccatttggacaaataatggaaattcgagtctttccagataaaggatattcatttgttcggttcaattcccatgaaagtgcagcacatgcaattgtttctgttaatggtactaccattgaaggtcatgttgtgaaatgctattggggcaaagaaactcttgatatgataaatcccgtgcaacagaatcaaattggatatccccaaccttatggccagtggggccagtggtatggaaatgcacaacaaattggccagtatatgcctaatggttggcaagttcctgcatatggaatgtatggccaggcatggaaccagcaaggatttaatcagacacagtcttctgcaccatggatgggaccaaattatggagtgcaaccgcctcaagggcaaaatggcagcatgttgcccaatcagccttctgggtatcgagtggcagggtatgaaacccagtgaataaggactccagaatctaaagccagtggcttgaggctacagggagtgtagtaaagccgttgtttacttaaagatttatcaaatcagtcagtgcaaatgtcagatacaatgtatttatttaaaagattcatttttaatcatgaaattacttatcatccacattgttttaaaaagaaacaagatgctggatgtctgccaatttttgccttcattaccttttttgataaagtttctcagatccttgtttcaaacacaaatgcagggattgctgccactttttaactattaagaggcagaaaattgcacaatattgaacttttttccactgaagtagtgtgcagttctagtttgcattcctgatatgatttaaaacatgtaatataaagatgttaaaaaaaaaaaccaaaactgtgcagagtctagaagttgtttgtcatcttcagcttgtgcacaattctgttttaggttaaaaaaaggcattgtttgagctgtcccatctccactgttatccctttggggttttttaatataaattattagtttacatcatttttgtatctacatcttttttcacaaatttgtcttgccttattaaagttctgtaaaatatacttaaatggaaaaaatgatgttcatttagattgaaaacttttctcagatggattgataattgcattcatcttgtgttttatatgagaaggtgcctcaagaatttcctgttggatttgtttaaaaggatttttatctttcgtgataaactttgctgtgtaccaggaactataaaaacaaaaacttgttactaaagaaaatatctgaaatgtgataagttcttatgccatgttaatttcatgtgtcaacttcaacatttacatgtattatttcattatgtaaaatgttttagcaatttaatattttgcacagttagcaaactttgtatgtcatttccttcaaggcatcatgcagagttgacatgagatttataaggttttaagttgtttgcatgtgaaaatcaaatacatactttggtagtctttgaatacaaagtcatctgctcttgtttttcaagaattttgagacacaaagttgtatgtaaaggaatatattaatttgccgttttctaggtagatttgctcaaaaagagtgaatcaacttaatatgtacaaatgatagctgtgaaactgtagaatatctttgtgtcaggcttggagttcattgtgacctccaaattttgcctgaaggaccagctgggcaaagcatcttttaaatgttcagaggccaaaagataaacaaaaaaaaaaccttaaaatcctacctctttaaacagccttcagataagagaatcctcagtgcaatcattattttgattcgtttggtacctgttttcctggagttcccgattttattattttggggtggctccaagcattaagaggtttaatctttgatggcattgttctagttttgaaatttctagtatatttcagagtctcttagaagacttgtgtgggaagtttcactttgttttcagtgaagatcacaaacctccttcttcctttactcaagaggaaaggtcccagtatacatatttgaatggttgatggttttcaagaccttcagggagctccctgcattttacctagaaacagaaaaggcccgcaaaatcttaagtttcctggcctgcatttcccgggtaggggcaaatgactccaagctggtctctaagccaatacccttataaaccagagcccaggaaagacagctcgagtgtataattctctggagctcaattctatgcagttgtgctgatatttcattaagtcactgtgtatttttaagtgttgatacattaaaagtcgctttatggaagatgagtaaattttttaaatacttggaaattttatttccttgttaacttctacagatcagggcatgcaaccaaaagcagcttaaatgaaatattttaaaataaaatatcaggaagctatttttagatttcttctggcttatgtttctactttaggaccctcattgttctcttattaaaaaaaattatttcctgtgcatctcatggactgcagggtaaattatttgggcataaataatttaaatagttttctttcattttgactatctccagtaataacagtttttattatccagcatattggcttattgcacaaatcttaaaatgtacattgactactttctgagaagaaagtggtatcagtactcatgatgaaaaggttactactgaacaaattcacatttcaggaacacctctatctttggtttaaatcttactcttagtttttccgtctaaaaatcatactggtattagtatcaggtaaggaaattaaagtttttaaaatggtttcattctctgcaatatgcaaaatttagattttactttctggtactgtaaagaacctgaagtgatttacacttaatgggtgattaatccagtattctttaccctgaatgtttggatattaaagttcctttatgttttctataacctgtgggatcttcttgcagtgattattgtgtgtgagattttttttctttttggtctatccatattgttatattcactcaggtattttttttttaatcttattccagaatcagtggtttatattgggttactgtttaacaccaaatggaattggcattctgcagatttaattaattatgaaaccagggtctcattttccttgctgatacttgttgaaaatgagattcacattctagtctttattttcctcctgttttgtccctgtgcttgtacatcttccttttatttgtgtgttatagttctattccatttgagaaggcagttggtaagaactagattgcatgtacaaagacaggtttactaagtgctgtacagtggtcctgaggttacagttgaattagaaaaacgaaatgtacttacaggaaataagaaagcaaacctttcaaatgagagtgatgatttctttaaaaaaaatcagtttttttctctcaaataatgttctttatttcacgaaatcgtcaatcttaagcatgagcagggataaacaactcctagaaggaactcaattcattcttcctggattttctctgttgttaaatcacaaaaatgatagtccccaatcgtttctttataggaggttattacatttcattacagtcactgcattttgactgttgtgtttagaatttgaatgtacatccaaaatgatgagtttcaatttaagagccttaataaaatgtgtgagtgtgtctcaattgaa

SEQ ID NO: 31662 - DNA, 490 bp, Homo sapiens
  source 1..490: mol_type = unassigned DNA
ttatacttcagttgttcagtcagattggaccctgtaaaagctgtaaaatgataacagagcatacaagcaatgacccatattgctttgtggaattttatgaacacagagatgcagctgctgcattagctgctatgaatgggagaaaaattttgggaaaggaggtcaaagtaaactgggcaaccacaccaagtagccagaaaaaagatacttccaatcacttccatgtgtttgttggggatttgagtccagaaattacaacagaagatatcaaatcagcatttgccccctttggtaaaatatcgtaagtatcataatcagtactacactcagtcatgataggcagaattgtatatgattaacttgtaattgaattaagattttctttctctagttagtatggttttgttttgtttcttatttttcatttatttattttggtttgttttgagtagtggatgttgttgaaaatgttaatgtcatttcagtgtct

SEQ ID NO: 31663 - DNA, 2317 bp, Homo sapiens
  source 1..2317: mol_type = unassigned DNA
tcttcacgtcccagcgcgggtgggcgccggcggctcctcttaaccacaggttccagaagtcctctgcagaagtgcttccctctctcatttccaggaccacaattcccagagacttcggcttcacgacgtttctctttttgcccgatctctcccggagctggctgggcttcggccggccagaggcccacagcgacgacgtgatccgtcgtgagcgggtcccagggtttcctcggcggcccttttttctctcccctcggtcgtcccccttgcaggctgtcgcggctggcctgagcggtgacctggcgggtcgcgcctgcgctctgccctgtttcctgcctggctggtggcggcggccattttgttcatcctcctcctcctcctgctcctcctggttggagcgcagtgtccggagcgggctggggggagagagcccgagagcagggttcggtgccttttcctctgtccccagccggtgcccagagcccccctccccttcctccccaccccctcccctccccaaccctgccctcccccttgtcccgggatcgctccgtcgcacccaccatgatggaagacgacgggcagccccggactctatacgtaggtaacctttccagagatgtgacagaagtccttatacttcagttgttcagtcagattggaccctgtaaaagctgtaaaatgataacagagcatacaagcaatgacccatattgctttgtggaattttatgaacacagagatgcagctgctgcattagctgctatgaatgggagaaaaattttgggaaaggaggtcaaagtaaactgggcaaccacaccaagtagccagaaaaaagatacttccaatcacttccatgtgtttgttggggatttgagtccagaaattacaacagaagatatcaaatcagcatttgccccctttggtaaaatatcaattgctcataagaatggacaggatcttgaaggctaactgcaaggaactgtgcacactggaactcagttgtagattttttttctcatttctatttattcttattatacattatttatatatacatattttagtatttacattttaacattctatattcagtggagttctatatttccaatcatttaacttactcactaaaatttctgtgtaaatttgttgttttcgtactggtgtgcttagcattgttgttagttttttattctcctttcttaaatttctgaaaatgtcaatttttcaaaatttacagctgcccaaactccaaaatgatggtagagaattgaccaagaaaaataaagaaatctgttaacaggccatggatgcccgggtagttaaagacatggcaactggaaaatccaaaggctatggttttgtatctttttataacaaactggatgcagaaaatgcgattgtgcatatgggcggtcagtggttgggtggtcgtcaaatccgaaccaattgggccactcgtaaaccacctgcacctaaaagtacacaagaaaacaacactaagcagttgagatttgaagatgtagtaaaccagtcaagtccaaaaaattgtactgtgtactgtggaggaattgcgtctgggttaacagatcagcttatgagacagacattctcaccatttggacaaattatggaaataagagttttcccagaaaagggctattcatttgtcagattttcaacccatgaaagtgcagcccatgccattgtttcggtgaacggtactacgattgaaggacatgtggttaaatgctattggggtaaagaatctcctgatatgactaaaaacttccaacaggttgactatagtcaatggggccaatggagccaagtgtatggaaacccacaacagtatggacagtatatggcaaatgggtggcaagtaccgccttatggagtatacgggcaaccatggaatcaacaaggatttggagtagatcaatcaccttctgctgcttggatgggtggatttggtgctcagcctccccaaggacaagctcctccccctgtaatacctcctcctaaccaagccggatatggtatggcaagttaccaaacacagtgagccgggactctaaaaaaaaattgtaattcatgataggcttcgatttcctgtgacactctgaagacatgaaagtagacatcggaaaatgaaaatatttattttaaaaattgaaatgtttggaacctttagcacagatttgctttggtgaaggacacgtgtcttctagttctgcctttttaagtttttgttcatgatggatatgaacatgatttttctttatgtacaaaaactaaaataaagtcaataaag

SEQ ID NO: 31664 - DNA, 2187 bp, Homo sapiens
  source 1..2187: mol_type = unassigned DNA
ttgtcccgggatcgctccgtcgcacccaccatgatggaagacgacgggcagccccggactctatacgtaggtaacctttccagagatgtgacagaagtccttatacttcagttgttcagtcagattggaccctgtaaaagctgtaaaatgataacagagcaacccgatagcagaagggtcaactcttctgttggattttctgttttgcagcatacaagcaatgacccatattgctttgtggaattttatgaacacagagatgcagctgctgcattagctgctatgaatgggagaaaaattttgggaaaggaggtcaaagtaaactgggcaaccacaccaagtagccagaaaaaagatacttccaatcacttccatgtgtttgttggggatttgagtccagaaattacaacagaagatatcaaatcagcatttgccccctttggtaaaatatcggatgcccgggtagttaaagacatggcaactggaaaatccaaaggctatggttttgtatctttttataacaaactggatgcagaaaatgcgattgtgcatatgggcggtcagtggttgggtggtcgtcaaatccgaaccaattgggccactcgtaaaccacctgcacctaaaagtacacaagaaaacaacactaagcagttgagatttgaagatgtagtaaaccagtcaagtccaaaaaattgtactgtgtactgtggaggaattgcgtctgggttaacagatcagcttatgagacagacattctcaccatttggacaaattatggaaataagagttttcccagaaaagggctattcatttgtcagattttcaacccatgaaagtgcagcccatgccattgtttcggtgaacggtactacgattgaaggacatgtggttaaatgctattggggtaaagaatctcctgatatgactaaaaacttccaacaggttgactatagtcaatggggccaatggagccaagtgtatggaaacccacaacagtatggacagtatatggcaaatgggtggcaagtaccgccttatggagtatacgggcaaccatggaatcaacaaggatttggagtagatcaatcaccttctgctgcttggatgggtggatttggtgctcagcctccccaaggacaagctcctccccctgtaatacctcctcctaaccaagccggatatggtatggcaagttaccaaacacagtgagccgggactctaaaaaaaaattgtaattcatgataggcttcgatttcctgtgacactctgaagacatgaaagtagacatcggaaaatgaaaatatttattttaaaaattgaaatgtttggaacctttagcacagatttgctttggtgaaggacacgtgtcttctagttctgcctttttaagtttttgttcatgatggatatgaacatgatttttctttatgtacaaaaactaaaataaagtcaataaagacaattctgactacaaattttgatataataggaaaaatggctaatacattttgattcttagatactattccatttttatcttgctgttcagtattttaactcactgtgtttttaaaagagcaaaaaagggaggatcgtgaaaacctgggaatcacatataagttcatcctgaatcctgatactcccctccccttccctgaggtggaccacatttgaagtcagcagagaaaaagtgtgatattcagaagaaatgcgtgattttggagtcgctttggaggaaatattttctttctctatgcctaaagaaactgaagccagactgaagttttgcaccctaaaaaaggaacagcattgtttgagttacttgagcaaatgttggtggtccacgttaagacatatttttaaaacttccaaaagtgtcgattattaaaattgtagtattttacatttcattttggggggaaatccaagtatggtgtttgtattgaagtcagacagtcatacttgtgcttttacatgaagtttaaatgatacatattgtaaatattcaataactacagtgtttaaaaagcatgcttcaacatagaagtagcagcaatgtaattatttgaagtaacacttaacacactccgctgcattgaatgcagtggattgatcagaatgttaagactgacatttccaaggttggctactatgtaaaattaaaattacacaaattgtgcagaaaaa

SEQ ID NO: 31665 - DNA, 515 bp, Homo sapiens
  source 1..515: mol_type = unassigned DNA
aaaaaagaaagaaagaaagaaagaaagaaaagatacgtaggtaacctttccagagatgtgacagaagtccttatacttcagttgttcagtcagattggaccctgtaaaagctgtaaaatgataacagagcatacaagcaatgacccatattgctttgtggaattttatgaacacagagatgcagctgctgcattagctgctatgaatgggagaaaaattttgggaaaggaggtcaaagtaaactgggcaaccacaccaagtagccagaaaaaagatacttccaatcacttccatgtgtttgttggggatttgagtccagaaattacaacagaagatatcaaatcagcatttgccccctttggtaaaatatcggatgcccgggtagttaaagacatggcaactggaaaatccaaaggctatggttttgtatctttttataacaaactggatgcagaaaatgcgattgtgcatatgggcggtcagtggttgggtggtcgtcaaatccgaaccaattg

SEQ ID NO: 31666 - DNA, 1401 bp, Homo sapiens
  source 1..1401: mol_type = unassigned DNA
accctgccctcccccttgtcccgggatcgctccgtcgcacccaccatgatggaagacgacgggcagccccggactctatacgtaggtaacctttccagagatgtgacagaagtccttatacttcagttgttcagtcagattggaccctgtaaaagctgtaaaatgataacagagcatacaagcaatgacccatattgctttgtggaattttatgaacacagagatgcagctgctgcattagctgctatgaatgggagaaaaattttgggaaaggaggtcaaagtaaactgggcaaccacaccaagtagccagaaaaaagatacttccaatcacttccatgtgtttgttggggatttgagtccagaaattacaacagaagatatcaaatcagcatttgccccctttggtaaaatatcggatgcccgggtagttaaagacatggcaactggaaaatccaaaggctatggttttgtatctttttataacaaactggatgcagaaaatgcgattgtgcatatgggcggtcagtggttgggtggtcgtcaaatccgaaccaattgggccactcgtaaaccacctgcacctaaaagtacacaagaaaacaacactaagcagttgagatttgaagatgtagtaaaccagtcaagtccaaaaaattgtactgtgtactgtggaggaattgcgtctgggttaacagatcagcttatgagacagacattctcaccatttggacaaattatggaaataagagttttcccagaaaagggctattcatttgtcagattttcaacccatgaaagtgcagcccatgccattgtttcggtgaacggtactacgattgaaggacatgtggttaaatgctattggggtaaagaatctcctgatatgactaaaaacttccaacaggttgactatagtcaatggggccaatggagccaagtgtatggaaacccacaacagtatggacagtatatggcaaatgggtggcaagtaccgccttatggagtatacgggcaaccatggaatcaacaaggatttggagtagatcaatcaccttctgctgcttggatgggtggatttggtgctcagcctccccaaggacaagctcctccccctgtaatacctcctcctaaccaagccggatatggtatggcaagttaccaaacacagtgagccgggactctaaaaaaaaattgtaattcatgataggcttcgatttcctgtgacactctgaagacatgaaagtagacatcggaaaatgaaaatatttattttaaaaattgaaatgtttggaacctttagcacagatttgctttggtgaaggacacgtgtcttctagttctgcctttttaagtttttgttcatgatggatatgaacatgatttttctttatgtacaaaa

SEQ ID NO: 31667 - DNA, 2448 bp, Homo sapiens
  source 1..2448: mol_type = unassigned DNA
agttctgcctctgtccaggtccttgtgacccgcccgctctcctaagggagcgtgtcctggccccctcccgcagcggctcggaaaaaaggcagcaccgcgtcgttgacggcgcgggctctggactcgctgcttggtaaaaaccttcctcttcctccagtgcgggacgcactctctggtatctcttttgacctcccggaggctttcctttgtcggtcgcggcgccactgtactatggcatacctcgttttattacgcttcgcagatagggcattctgaaaacaaatggagggtttgtggcagccctgagtccagcaattgtatcagcgccatttttccaacagcatgtgctcacttggtgtctctgtgttacattttggtaattctcaaaatatttaaaactttttcatgatttctgtgtctgttatggtgatctatgatcagtgatctttgatgttgctattgtcattgttttggggtgccacatacagcgtcttttataagacgtggaacttaatgttgtgtgtgttctgaccgctccacccacagaccgttccccatctctctccctcttcttgggcctccctattccctgagacacaacaatattgagattaggcgaattaatgactctgcaatggcctctaagtgctcaagtgaaaggaagagtcgcacatctctcactttaaatcaaaaactagaaatgattaaactgagtgaggaaggtatgtcaaaagccgagataggccgaaggctaggcctcctgcggcaaacagttagccaagttgtaaatgcaaaggaaaagttcttgaaggaagttaaaagtgctactccaatgaacacacgaatgataagaaagcgaaacagccttattgctgatatggagaaggttttagtggtctggatagaagatcagaccagccgcaacattcccttaagccaaagcctaatccagaacaaagccctaactctcttcaactctatgaaagctgagagaggtgtggaagctgcagaagaaaagtttgaagctagcagaggttggttcatgaggtttaaggaaagaagccatttccataacataaaagcacaaggtgaagcagcaagtgctgatgtagaagctgcagcaagttatccagaagctttagctaagatcattgacgaaggtggctacactaaacaacagattttcaatgtagatgaaacagccttctattggaagaagatgccatctagaactttcatagctagagaggagaagtcagtgcctggcttcaaagcttcaaaggacaggctgactctcttgttaggggctaatgcagctggtgactttaagttgaagccaatgcttatttaccattctgaaaatcctagggcccttaagaattatactaaatctactctacccgtgctatataaatggaacagcaaagcccggatgacagcacatctgtttacagcgtggtttactgaatattttaaacccactgttgagacctactgctcagaaaagaagattcctttcaaaatattactgctcattgacaatgcccctagtcatccaagagctctgatggagatatacgaggagattaatgttattttcatgcctgctaacacaacatccattctgcagcccatggatcaaggggtaatttcgaccttcaagtcttattatttgagaaatacatttcataaggctctagctgccatggatagtgatgtctctgatggatctgggcaaagcaaattgaaaaccttctggaaaggattcaccattttagatgccattaaaaacattcgtgattcatgggaggaggtcaaattgtcaacattaacaggagtttggaagaagttgattcccaccctcattgatgactatgaggggttcaagacttcagtggaggaagtaagtgcagatgtggtggaaatagcaaaagaactagaattagaagtagagcctgaagatgtaactgaattgctgcaatctcatgataaaactttaacagatgaggagttgtttcttatggatgcgcaaagaaagtggtttcttgagatggaatctacacctggtgaagatgctgtgaacattgttgaaatgacaacaaaggatttagaatattacataaacttagttgataaagcagcagcagggtttgagaggattgactccaattttgaaagaagctctactgtgggcaaaatgctatcaaacagcatcgcatgctacagagaaatctttcatgaaaggaagagtcaactcatgcgaaaagcttcaccgatgtcttattttaggaaattgccacagccaccccaaccttcagcagccaccaccctgaccagtcagcaaccatcaacctcgaggcaagaccctccaccagcaaaaagagtacgactcaccgaaggctcagattgataatcagcattttttagcaataaagtatttttaaattt

SEQ ID NO: 31668 - DNA, 2083 bp, Homo sapiens
  source 1..2083: mol_type = unassigned DNA
gattcacgtagaccttgtcaggaaattggtcactatccatctaggccctagaagtgagaggaggaatcttacgaactcattttctagttgctttgtattcaaatcttagttgttaattatcttgttctagtaatcacctaaaatattagacacttaaaatgttggggaaacgtaagcgtgtggtgttgacaattaaggacaagcttgacattattaagaaacttgaggaaggcatctctttcaaaaaactttccgtggtgtacggaattggtgaatccacagttcgtgatattaaaaagaacaaagaaaggattataaactatgcaaacagttcagatcctaccagtggagtatccaaacgtaaatctatgaagtcatcaacatacgaggagcttgatagagttatgatagagtggtttaaccaacagaaaacagatgggattccagtgtccggaacgatttgtgcaaaacaagccaagttcttttttgatgctttgggaatggaaggtgattttaatgcatcgtcaggctggctaactcgatttaagcagcgccatggtattccaaaggctgctggtaaaggaacaaaattaaaaggagatgaaactgctgccagagaattttgtggtagctttcaggaatttgttgaaaaagagaatctacaaccagagcaaatttatggtgctgatcaaactggattgttttggaaatgtctaccatcaaggacattaactcttgaaactgaccaaagtacttctgggtgtaggtcaagcagagagagaatcatcattatgtgttgcgcaaatgccacaggtttacacaaacttaatctttgtgttgtggggaaggccaaaaagccccgagcattcaaaggcactgacctttcaaaccttcctgtgacatattacagtcaaaaaggtgcatggatagaacagtctgttttcagacagtggtttgaaaagtactttgtgccacaggtacagaagcatttgaaatccaagggacttttagaaaaagcagtgcttcttttagatttccccccagcacgtccaaatgaagaaatgttgagttcagatgatggcagaataattgtgaagtatttgccaccaaatgtcacaagtctgattcaaccaatgagccagggagttctagccactgtaaaaagatactatcgagcaggacttctccagaaatacatggatgaaggaaatgacccaaaaatattttggaagaacttgacagtgttggatgcaatttatgaagtgtcaagagcttggaacatggtaaaatcaagtaccataaccaaagcatggaaaaaacttttccctggcaatgaagagaattcaggtatgaacattgatgaaggagccattttagcagctaatttagcaacagttttacagaacacagaagaatgtgaacatgttgacattgagaatattgatcagtggttcgactctcggagcagtgactcaagctgtcaggtgctgactgacagtgaaagtgctgaggaccagaccaaggctgctgagcaaaagccttccagtaagagtagaaaaacagaactgaatccagagaagcatattagccataaagcggcacttgaatggactgaaaatttactggattatcttgaacaacaagatgacatgcttctgtctgataaattggtattaaggaggcttcggaccataataagaaaaaaacagaagatccaaaataacaaaaatcattaataaggctcttaagtatttcagtgtatctgcatctttgtgactatctgcagtgaaactttgcttgtttgaagtcctgtggattccaaagccaaatacattttataaatgattttggaattagatgtcagtttggattacttaaattacaactctttaatgttgactctagtcattgggcattgacgtgtaacttgtctttctactgtttctaatatctattaattagatcataaggtacctgaggccagggatcttgtgtctgttgtgcctgaatttggcgtgtctaataaaggcccatgcacactataggcactcaataaaacttacatttttatgatttttctttg

SEQ ID NO: 31669 - DNA, 1650 bp, Homo sapiens
  source 1..1650: mol_type = unassigned DNA
atgaataagagagggaaatatacaacactgaatttggaggagaaaatgaaggttctaagtagaattgaagctggacgatcacttaaaagtgtaatggatgaatttggaatcagtaagtcaacattttatgacattaaaaaaaataagaagttaattctggactttgtactgaagcaggacatgccattagtaggggctgagaagagaaagaggacaacgggagccaaatatggtgatgtagatgatgcggtctacatgtggtaccaacagaaacgctcagccggtgttccggtaagaggcgtggagcttcaggctgctgcagagagatttgcacggtgttttgggcgaacagatttcaaagctagcactggttggctttttagatttcgaaatcggcatgcaattgggaaccgaaaaggatgtggggaacaagtcctaagttcagtttctgaaaatgttgagccatttcgacaaaaactgtccatgataatcaaagaggagaaactgtgtctagctcagctatacagtggggatgaaacagacctcttttggaagtcaatgccagaaaattctcaggcaagtaggaaagatatctgcctaccagggaagaaaataaacaaagaaaggttgtctgcctttttatgtgcaaatgcagacggaactcataaattaaagtcaatcattattggaaaatcaaaactgcccaaaagtgtgaaagaggacacaagtacattgcctgtgatatataaacccagtaaagatgtttggttcaccagagaattgttttcagaatggttttttcaaaactttgttcctgaggtccgacattttcaacttaatgttctaagatttcatgacgaggacgtcagggcattgttacttctggacagttgcccggctcatccttcctctgaatccctaaccagtgaggatggtcgaataaaatgtatgttcttcccccataacacttcaaccttgattcaaccaatgaatcaaggtgtgatcttgagctgcaaacggctgtatagatggaagcaacttgaagagagtcttgtaatatttgaagaaagtgatgatgagcaagagaaaggagataaaggagtttccaaaattaaaatctacaatataaaaagtgcaatttttaactgggcaaaaagttgggaagaagtaaaacaaataaccatagcaaatgcatgggaaaatcttctttacaaaaaggaacctgaatatgattttcaaggcttagaacatggggattatagagaaattcttgaaaaatgtggggagttggaaactaagttggatgatgatagggtgtggttaaatggagatgaagaaaagggttgtctcctaaaaaccaaaggtggaataacaaaggaagttgttcaaaaaggaggagaagctgagaagcagactgctgaatttaaattatctgctgtaagagagagtttggactaccttcttgactttgttgatgccacacctgagtttcagagattccacttcacactgaaagagatgcaacaagaaatagtcaagaaacagttccagagtaaaatccattctagaattggtagctttttgaaacctaggcctcataatattaaggactccttcagtgggccttcaacttctggttctaatcattag

SEQ ID NO: 31670 - DNA, 3612 bp, Homo sapiens
  source 1..3612: mol_type = unassigned DNA
acctcggccagcttggcttccgtggaggccgctcctcgctttctgaggctcaaacgcaagccaccgcccgaaaggccgccgatctgaggagcgcaaccgccagcccaccgctggcctaccgcagccctgtccaggtacagagccagagcgccggccggaagtggaagtgacgctttccgagggtggcgcaggcccgccctctggctaaggcgcctgagcccggcctacttcctcgccagagaaactgctgtcttccccggcggtagggaagggttaatgccaccgagtatccagacccgctgaagcctagagggccttgtaccggctcaccgcgtggctgtcgctgtctcgtgtccccagtgggggaggcgtcgcactgccgcgtctgttctgcgtggctgtcgggcggcgtttggtcccgggagcctcgccggcacctggaatggataaaagtggcagtttttgtttcttcccatgaggttgtgtatctggactgagaaccaggaaattaatctagactaagacatttctaaggacctggaatggctttggggagcaccaggaggacccgaaaagagtatttgagggcctagagggacagaagagtttgccagtaggatttatgagaaacaattgatcagaaacagcagcagagaaaccttttagatttcttctgtggaaaagttgagtcttggttcaaattaagtaaaataaacactgaagagaaatcaaaatctcaaatataaaaagtatgttacttatagtgtaaatttaggaaaacaaatgaaaggacagatctttaaaaatttttaactatggtgaaatatttgtaaaacttttgggctcatctctgagaattgctgtgattctgaaacttgataatatctcaaatagagaacagtttcagtgaaaaatagcacttgagaataaatcagatgttcccaagaaagaagatctgagaatggtaaagtgccactgacaaataaattatttacatacttacatattaccttggcaaacacaagagacattcaagttaaagcacggtgcttgacaatactatattgaatgcaataaaagttggatttcattcatatgtacaacaaactactttcttcttcacttcaagattcggtacaactgttcctgaattccaactctccatacatcccaatgtcagggtccctgtagctcggagcccttatccaggtagatgaactgctgcccagtgaacactatgtacaaagcaatttgagcaccattctcttttctggcagtgaggtaaaatcaggtctttttggaaggggagaagccacattgcatctctgctacacacaagattactctgtcattgcctttgagtctttcacgctcccttcttctgaagcatcagtttttatggaaacttatcacacctgtcttgtgggcacatcttgctccatccctcctctcttcatattgtccgttttccggtattgagttagggaaagtatgcaggtattcctgtcattcctgactgaggctgttgtatctgtcaaaagagaggagaggtagggggcattctgaaaaatgatcactcatggcttgcaggagcaagagccagacaggactttgcaactggcagctttctgagtgcataagacctccacctctagactagctcttcagtcatggttagccccttcagtccattatcctccaatacaatgcccatgccttctggggctttcagctaagttttgtttaaaaaatgtgggttttttttttgccaattcattaaggcttttccctttgttttctcctgttggtggttcagagttaaattcagtatgaataagagagggaaatatacaacactgaatttggaggagaaaatgaaggttctaagtagaattgaagctggacgatcacttaaaagtgtaatggatgaatttggaatcagtaagtcaacattttatgacattaaaaaaaataagaagttaattctggactttgtactgaagcaggacatgccattagtaggggctgagaagagaaagaggacaacgggagccaaatatggtgatgtagatgatgcggtctacatgtggtaccaacagaaacgctcagccggtgttccggtaagaggcgtggagcttcaggctgctgcagagagatttgcacggtgttttgggcgaacagatttcaaagctagcactggttggctttttagatttcgaaatcggcatgcaattgggaaccgaaaaggatgtggggaacaagtcctaagttcagtttctgaaaatgttgagccatttcgacaaaaactgtccatgataatcaaagaggagaaactgtgtctagctcagctatacagtggggatgaaacagacctcttttggaagtcaatgccagaaaattctcaggcaagtaggaaagatatctgcctaccagggaagaaaataaacaaagaaaggttgtctgcctttttatgtgcaaatgcagacggaactcataaattaaagtcaatcattattggaaaatcaaaactgcccaaaagtgtgaaagaggacacaagtacattgcctgtgatatataaacccagtaaagatgtttggttcaccagagaattgttttcagaatggttttttcaaaactttgttcctgaggtccgacattttcaacttaatgttctaagatttcatgacgaggacgtcagggcattgttacttctggacagttgcccggctcatccttcctctgaatccctaaccagtgaggatggtcgaataaaatgtatgttcttcccccataacacttcaaccttgattcaaccaatgaatcaaggtgtgatcttgagctgcaaacggctgtatagatggaagcaacttgaagagagtcttgtaatatttgaagaaagtgatgatgagcaagagaaaggagataaaggagtttccaaaattaaaatctacaatataaaaagtgcaatttttaactgggcaaaaagttgggaagaagtaaaacaaataaccatagcaaatgcatgggaaaatcttctttacaaaaaggaacctgaatatgattttcaaggcttagaacatggggattatagagaaattcttgaaaaatgtggggagttggaaactaagttggatgatgatagggtgtggttaaatggagatgaagaaaagggttgtctcctaaaaaccaaaggtggaataacaaaggaagttgttcaaaaaggaggagaagctgagaagcagactgctgaatttaaattatctgctgtaagagagagtttggactaccttcttgactttgttgatgccacacctgagtttcagagattccacttcacactgaaagagatgcaacaagaaatagtcaagaaacagttccagagtaaaatccattctagaattggtagctttttgaaacctaggcctcataatattaaggactccttcagtgggccttcaacttctggttctaatcattagattttgtgtttaaagatttctgccattatatgatgtaggccagctgtgaattgtcttgttttagcaactgacattattttgtatatcagtgcccatttatataatggttataaaatttacagtttgaaaataa

SEQ ID NO: 31671 - DNA, 1536 bp, Homo sapiens
  source 1..1536: mol_type = unassigned DNA
atgaataagagagggaaatatacaacactgaatttggaggagaaaatgaaggttctaagtagaattgaagctggacgatcacttaaaagtgtaatggatgaatttggaatcagtaagtcaacattttatgacattaaaaaaaataagaagttaattctggactttgtactgaagcaggacatgccattagtaggggctgagaagagaaagaggacaacgggagccaaatatggtgatgtagatgatgcggtctacatgtggtaccaacagaaacgctcagccggtgttccggtaagaggcgtggagcttcaggctgctgcagagagatttgcacggtgttttgggcgaacagatttcaaagctagcactggttggctttttagatttcgaaatcggcatgcaattgggaaccgaaaaggatgtggggaacaagtcctaagttcagtttctgaaaatgttgagccatttcgacaaaaactgtccatgataatcaaagaggagaaactgtgtctagctcagctatacagtggggatgaaacagacctcttttggaagtcaatgccagaaaattctcaggcaagtaggaaagatatctgcctaccagggaagaaaataaacaaagaaaggttgtctgcctttttatgtgcaaatgcagacggaactcataaattaaagtcaatcattattggaaaatcaaaactgcccaaaagtgtgaaagaggacacaagtacattgcctgtgatatataaacccagtaaagatgtttggttcaccagagaattgttttcagaatggttttttcaaaactttgttcctgaggtccgacattttcaacttaatgttctaagatttcatgacgaggacgtcagggcattgttacttctggacagttgcccggctcatccttcctctgaatccctaaccagtgaggatggtcgaataaaatgtatgttcttcccccataacacttcaaccttgattcaaccaatgaatcaaggtgtgatcttgagctgcaaacggctgtatagatggaagcaacttgaagagagtcttgtaatatttgaagaaagtgatgatgagcaagagaaaggagataaaggagtttccaaaattaaaatctacaatataaaaagtgcaatttttaactgggcaaaaagttgggaagaagtaaaacaaataaccatagcaaatgcatgggaaaatcttctttacaaaaaggaacctgaatatgattttcaaggcttagaacatggggattatagagaaattcttgaaaaatgtggggagttggaaactaagttggatgatgatagggtgtggttaaatggagatgaagaaaagggttgtctcctaaaaaccaaaggtggaataacaaaggaagttgttcaaaaaggaggagaagctgagaagcagactgctgaatttaaattatctgctgtaagagagagtttggactaccttcttgactttgttgatgccacacctgagtttcagagattccacttcacactgtgtgagttctctgatgactcataa

SEQ ID NO: 31672 - DNA, 2720 bp, Homo sapiens
  source 1..2720: mol_type = unassigned DNA
acccggcctgccccgcggcaagatggcggcctgaacgcagctggcagcggcggaaagcttagatcagcctttccacagctgttagcagcatctgccccaatttcagctgaagattcaggtgccccagggactggaagaaattacagtgcctacttggaaagaagaagagatagcgacttgccccagtccaaccccagagcgggagctgtggctaaaggaagtggaggggccgtgggatgcggagagccgagggctaactcccggacagcggaacagagagagctgccgacaaacagacgtccagagtccttctggccacatctctgagcctgcctccttcttgcttctcagcaggcggaggagccgtcacctcccagaatgactagtgccgcccctgctaagaaaccctaccgtaaggcaccaccagagcatcgggagctgcgtttggaaattcctggatcccggcttgagcaggaggaacccctgactgatgcagaaaggatgaagctcttacaggaggagaatgaagagcttcgccggcgcctggcctccgccaccagacgcactgaggccctggaacgtgagctggaaattgggcaggactgcctggagctggagctgggccagagccgcgaggagctggacaaatttaaggataagttccgcaggctgcagaacagctacacggcttcccagcggaccaaccaggagttggaggacaagctgcacacactgatcaagaaggctgagatggataggaagacgctggactgggagattgtggagctgaccaacaagctgctggatgccaagaacaccatcaacaagctggaagagctcaatgagcggtaccggctggactgcaacctggctgtacagctcctcaagtgcaacaagtcccacttccgaaaccacaagtttgccgatctgccctgtgagctacaggacatggttcggaaacatttgcacagtggtcaagaggccgccagcccaggtcctgctcccagcctagccccaggggctgtggtgcctacctcagtcattgcccgagtgttagagaagccggagtctctactgctcaattcagcccagtcaggcagcgccgggcgccccttggctgaggatgtctttgtgcatgtggacatgagtgagggtgtcccaggtgatccagccagtcccccggcccctggcagccccaccccacaacccaatggggagtgccactctctgggtactgccaggggctccccggaggaagagctgcccctgccagcctttgagaagctgaacccctacccaaccccgtctccaccacacccactgtatcctggccgcagggtaatagagttctctgaggataaggttcggatcccccgcaacagccccctgcccaactgcacttacgctacccgccaggccatttccctgagcctggtagaggaggggagtgagcgggcccgccccagcccagtgcccagcacccctgcctcagcccaggcctcaccccaccaccagcccagcccagcacccctaacactcagtgccccagctagctctgccagctctgaagaggacctgctggtcagctggcagcgggcatttgtggaccgtactccaccacctgctgctgtggcccagcgcacagcctttggacgcgatgccctccctgagctgcagcgccattttgcccatagccccgctgacagagatgaggtggtccaggcaccttctgcccgacccgaagagagtgagcttttgctacccacagaacctgactctggctttcccagggaggaagaagagctgaacctgcctatcagtcctgaggaagagcgccagagcctgctgcccattaacaggggcacagaggaggggccaggcacttcccacaccgagggcagggcctggccactccccagctccagtcgcccccagcgcagccccaagaggatgggggttcaccacctgcaccgcaaggacagcctgacccaggcccaggagcagggcaacctgctcaactagggcccctgctggccttcctgccattgctgcaccaggactgcaaggagtccccacaccttggcagctcagggtccccagtccaagcccttgacctctcctctatccagacccgcacagctgtttcctgtgtggatggggtcaggttgtgggccatgccaggcctgtcagctgcgttgactgactgcagcagcttgcctcatggttttccctttttcttagaatatttattcttcagaggtaacatgcagttgggtctcaagacctttcctccaatcagcccaacccagcccagactgggcttttctggggagctgaggagtttatcagtattcatcttccatcctttcatagtcacaagttttgttattttgtttttttttgggggtgatggtgtaattgttaacctcatttccgtttcctacctgtttgcttccccccccagtcctccgcatgagctgttgccctccaggggcctggcacagctggccttggggacgagggagaggactgattcagggccccctcagctgtctcctccctccctctggaaaggagggtggggctcaggggcctcaagctgggctctgtgtgaggcctggcccccactcccaaccttggctctagactgttactcttaagctttgagaaattttcacattgatgactattttaaaatcaaataaaactattttactggt

SEQ ID NO: 31673 - DNA, 2778 bp, Homo sapiens
  source 1..2778: mol_type = unassigned DNA
agatgacgcgacacgccaagtgcgtggggattcccgcggccctggccactacccggcctgccccgcggcaagatggcggcctgaacgcagctggcagcggcggaaagcttagatcagcctttccacagctgttagcagcatctgccccaatttcagctgaagattcaggtgccccagggactggaagaaattacagtgcctacttggaaagaagaagagatagcgacttgccccagtccaaccccagagcgggtacctgctgtcactgactcctgaattcattctcgctgtgtgtctacttttgcttttttggagctgtggctaaaggaagtggaggggccgtgggatgcggagagccgagggctaactcccggacagcggaacagagagagctgccgacaaacagacggcggaggagccgtcacctcccagaatgactagtgccgcccctgctaagaaaccctaccgtaaggcaccaccagagcatcgggagctgcgtttggaaattcctggatcccggcttgagcaggaggaacccctgactgatgcagaaaggatgaagctcttacaggaggagaatgaagagcttcgccggcgcctggcctccgccaccagacgcactgaggccctggaacgtgagctggaaattgggcaggactgcctggagctggagctgggccagagccgcgaggagctggacaaatttaaggataagttccgcaggctgcagaacagctacacggcttcccagcggaccaaccaggagttggaggacaagctgcacacactgatcaagaaggctgagatggataggaagacgctggactgggagattgtggagctgaccaacaagctgctggatgccaagaacaccatcaacaagctggaagagctcaatgagcggtaccggctggactgcaacctggctgtacagctcctcaagtgcaacaagtcccacttccgaaaccacaagtttgccgatctgccctgtgagctacaggacatggttcggaaacatttgcacagtggtcaagaggccgccagcccaggtcctgctcccagcctagccccaggggctgtggtgcctacctcagtcattgcccgagtgttagagaagccggagtctctactgctcaattcagcccagtcaggcagcgccgggcgccccttggctgaggatgtctttgtgcatgtggacatgagtgagggtgtcccaggtgatccagccagtcccccggcccctggcagccccaccccacaacccaatggggagtgccactctctgggtactgccaggggctccccggaggaagagctgcccctgccagcctttgagaagctgaacccctacccaaccccgtctccaccacacccactgtatcctggccgcagggtaatagagttctctgaggataaggttcggatcccccgcaacagccccctgcccaactgcacttacgctacccgccaggccatttccctgagcctggtagaggaggggagtgagcgggcccgccccagcccagtgcccagcacccctgcctcagcccaggcctcaccccaccaccagcccagcccagcacccctaacactcagtgccccagctagctctgccagctctgaagaggacctgctggtcagctggcagcgggcatttgtggaccgtactccaccacctgctgctgtggcccagcgcacagcctttggacgcgatgccctccctgagctgcagcgccattttgcccatagccccgctgacagagatgaggtggtccaggcaccttctgcccgacccgaagagagtgagcttttgctacccacagaacctgactctggctttcccagggaggaagaagagctgaacctgcctatcagtcctgaggaagagcgccagagcctgctgcccattaacaggggcacagaggaggggccaggcacttcccacaccgagggcagggcctggccactccccagctccagtcgcccccagcgcagccccaagaggatgggggttcaccacctgcaccgcaaggacagcctgacccaggcccaggagcagggcaacctgctcaactagggcccctgctggccttcctgccattgctgcaccaggactgcaaggagtccccacaccttggcagctcagggtccccagtccaagcccttgacctctcctctatccagacccgcacagctgtttcctgtgtggatggggtcaggttgtgggccatgccaggcctgtcagctgcgttgactgactgcagcagcttgcctcatggttttccctttttcttagaatatttattcttcagaggtaacatgcagttgggtctcaagacctttcctccaatcagcccaacccagcccagactgggcttttctggggagctgaggagtttatcagtattcatcttccatcctttcatagtcacaagttttgttattttgtttttttttgggggtgatggtgtaattgttaacctcatttccgtttcctacctgtttgcttccccccccagtcctccgcatgagctgttgccctccaggggcctggcacagctggccttggggacgagggagaggactgattcagggccccctcagctgtctcctccctccctctggaaaggagggtggggctcaggggcctcaagctgggctctgtgtgaggcctggcccccactcccaaccttggctctagactgttactcttaagctttgagaaattttcacattgatgactattttaaaatcaaataaaactattttactggtatg

SEQ ID NO: 31674 - DNA, 2751 bp, Homo sapiens
  source 1..2751: mol_type = unassigned DNA
agatgacgcgacacgccaagtgcgtggggattcccgcggccctggccactacccggcctgccccgcggcaagatggcggcctgaacgcagctggcagcggcggaaagcttagatcagcctttccacagctgttagcagcatctgccccaatttcagctgaagattcaggtgccccagggactggaagaaattacagtgcctacttggaaagaagaagagatagcgacttgccccagtccaaccccagagcgggagctgtggctaaaggaagtggaggggccgtgggatgcggagagccgagggctaactcccggacagcggaacagagagagctgccgacaaacagacgcaggcggaggagccgtcacctcccagaatgactagtgccgcccctgctaagaaaccctaccgtaaggcaccaccagagcatcgggagctgcgtttggaaattcctggatcccggcttgagcaggaggaacccctgactgatgcagaaaggatgaagctcttacaggaggagaatgaagagcttcgccggcgcctggcctccgccaccagacgcactgaggccctggaacgtgagctggaaattgggcaggactgcctggagctggagctgggccagagccgcgaggagctggacaaatttaaggataagttccgcaggctgcagaacagctacacggcttcccagcggaccaaccaggagttggaggacaagctgcacacactggcctctcttagccacagctggatttttgcaatcaagaaggctgagatggataggaagacgctggactgggagattgtggagctgaccaacaagctgctggatgccaagaacaccatcaacaagctggaagagctcaatgagcggtaccggctggactgcaacctggctgtacagctcctcaagtgcaacaagtcccacttccgaaaccacaagtttgccgatctgccctgtgagctacaggacatggttcggaaacatttgcacagtggtcaagaggccgccagcccaggtcctgctcccagcctagccccaggggctgtggtgcctacctcagtcattgcccgagtgttagagaagccggagtctctactgctcaattcagcccagtcaggcagcgccgggcgccccttggctgaggatgtctttgtgcatgtggacatgagtgagggtgtcccaggtgatccagccagtcccccggcccctggcagccccaccccacaacccaatggggagtgccactctctgggtactgccaggggctccccggaggaagagctgcccctgccagcctttgagaagctgaacccctacccaaccccgtctccaccacacccactgtatcctggccgcagggtaatagagttctctgaggataaggttcggatcccccgcaacagccccctgcccaactgcacttacgctacccgccaggccatttccctgagcctggtagaggaggggagtgagcgggcccgccccagcccagtgcccagcacccctgcctcagcccaggcctcaccccaccaccagcccagcccagcacccctaacactcagtgccccagctagctctgccagctctgaagaggacctgctggtcagctggcagcgggcatttgtggaccgtactccaccacctgctgctgtggcccagcgcacagcctttggacgcgatgccctccctgagctgcagcgccattttgcccatagccccgctgacagagatgaggtggtccaggcaccttctgcccgacccgaagagagtgagcttttgctacccacagaacctgactctggctttcccagggaggaagaagagctgaacctgcctatcagtcctgaggaagagcgccagagcctgctgcccattaacaggggcacagaggaggggccaggcacttcccacaccgagggcagggcctggccactccccagctccagtcgcccccagcgcagccccaagaggatgggggttcaccacctgcaccgcaaggacagcctgacccaggcccaggagcagggcaacctgctcaactagggcccctgctggccttcctgccattgctgcaccaggactgcaaggagtccccacaccttggcagctcagggtccccagtccaagcccttgacctctcctctatccagacccgcacagctgtttcctgtgtggatggggtcaggttgtgggccatgccaggcctgtcagctgcgttgactgactgcagcagcttgcctcatggttttccctttttcttagaatatttattcttcagaggtaacatgcagttgggtctcaagacctttcctccaatcagcccaacccagcccagactgggcttttctggggagctgaggagtttatcagtattcatcttccatcctttcatagtcacaagttttgttattttgtttttttttgggggtgatggtgtaattgttaacctcatttccgtttcctacctgtttgcttccccccccagtcctccgcatgagctgttgccctccaggggcctggcacagctggccttggggacgagggagaggactgattcagggccccctcagctgtctcctccctccctctggaaaggagggtggggctcaggggcctcaagctgggctctgtgtgaggcctggcccccactcccaaccttggctctagactgttactcttaagctttgagaaattttcacattgatgactattttaaaatcaaataaaactattttactggtatg

SEQ ID NO: 31675 - DNA, 2695 bp, Homo sapiens
  source 1..2695: mol_type = unassigned DNA
acccggcctgccccgcggcaagatggcggcctgaacgcagctggcagcggcggaaagcttagatcagcctttccacagctgttagcagcatctgccccaatttcagctgaagattcaggtgccccagggactggaagaaattacagtgcctacttggaaagaagaagagatagcgacttgccccagtccaaccccagagcgggagctgtggctaaaggaagtggaggggccgtgggatgcggagagccgagggctaactcccggacagcggaacagagagagctgccgacaaacagacggcggaggagccgtcacctcccagaatgactagtgccgcccctgctaagaaaccctaccgtaaggcaccaccagagcatcgggagctgcgtttggaaattcctggatcccggcttgagcaggaggaacccctgactgatgcagaaaggatgaagctcttacaggaggagaatgaagagcttcgccggcgcctggcctccgccaccagacgcactgaggccctggaacgtgagctggaaattgggcaggactgcctggagctggagctgggccagagccgcgaggagctggacaaatttaaggataagttccgcaggctgcagaacagctacacggcttcccagcggaccaaccaggagttggaggacaagctgcacacactggcctctcttagccacagctggatttttgcaatcaagaaggctgagatggataggaagacgctggactgggagattgtggagctgaccaacaagctgctggatgccaagaacaccatcaacaagctggaagagctcaatgagcggtaccggctggactgcaacctggctgtacagctcctcaagtgcaacaagtcccacttccgaaaccacaagtttgccgatctgccctgtgagctacaggacatggttcggaaacatttgcacagtggtcaagaggccgccagcccaggtcctgctcccagcctagccccaggggctgtggtgcctacctcagtcattgcccgagtgttagagaagccggagtctctactgctcaattcagcccagtcaggcagcgccgggcgccccttggctgaggatgtctttgtgcatgtggacatgagtgagggtgtcccaggtgatccagccagtcccccggcccctggcagccccaccccacaacccaatggggagtgccactctctgggtactgccaggggctccccggaggaagagctgcccctgccagcctttgagaagctgaacccctacccaaccccgtctccaccacacccactgtatcctggccgcagggtaatagagttctctgaggataaggttcggatcccccgcaacagccccctgcccaactgcacttacgctacccgccaggccatttccctgagcctggtagaggaggggagtgagcgggcccgccccagcccagtgcccagcacccctgcctcagcccaggcctcaccccaccaccagcccagcccagcacccctaacactcagtgccccagctagctctgccagctctgaagaggacctgctggtcagctggcagcgggcatttgtggaccgtactccaccacctgctgctgtggcccagcgcacagcctttggacgcgatgccctccctgagctgcagcgccattttgcccatagccccgctgacagagatgaggtggtccaggcaccttctgcccgacccgaagagagtgagcttttgctacccacagaacctgactctggctttcccagggaggaagaagagctgaacctgcctatcagtcctgaggaagagcgccagagcctgctgcccattaacaggggcacagaggaggggccaggcacttcccacaccgagggcagggcctggccactccccagctccagtcgcccccagcgcagccccaagaggatgggggttcaccacctgcaccgcaaggacagcctgacccaggcccaggagcagggcaacctgctcaactagggcccctgctggccttcctgccattgctgcaccaggactgcaaggagtccccacaccttggcagctcagggtccccagtccaagcccttgacctctcctctatccagacccgcacagctgtttcctgtgtggatggggtcaggttgtgggccatgccaggcctgtcagctgcgttgactgactgcagcagcttgcctcatggttttccctttttcttagaatatttattcttcagaggtaacatgcagttgggtctcaagacctttcctccaatcagcccaacccagcccagactgggcttttctggggagctgaggagtttatcagtattcatcttccatcctttcatagtcacaagttttgttattttgtttttttttgggggtgatggtgtaattgttaacctcatttccgtttcctacctgtttgcttccccccccagtcctccgcatgagctgttgccctccaggggcctggcacagctggccttggggacgagggagaggactgattcagggccccctcagctgtctcctccctccctctggaaaggagggtggggctcaggggcctcaagctgggctctgtgtgaggcctggcccccactcccaaccttggctctagactgttactcttaagctttgagaaattttcacattgatgactattttaaaatcaaataaaactattttactggt

SEQ ID NO: 31676 - DNA, 2665 bp, Homo sapiens
  source 1..2665: mol_type = unassigned DNA
acccggcctgccccgcggcaagatggcggcctgaacgcagctggcagcggcggaaagcttagatcagcctttccacagctgttagcagcatctgccccaatttcagctgaagattcaggtgccccagggactggaagaaattacagtgcctacttggaaagaagaagagatagcgacttgccccagtccaaccccagagcgggagctgtggctaaaggaagtggaggggccgtgggatgcggagagccgagggctaactcccggacagcggaacagagagagctgccgacaaacagacggcggaggagccgtcacctcccagaatgactagtgccgcccctgctaagaaaccctaccgtaaggcaccaccagagcatcgggagctgcgtttggaaattcctggatcccggcttgagcaggaggaacccctgactgatgcagaaaggatgaagctcttacaggaggagaatgaagagcttcgccggcgcctggcctccgccaccagacgcactgaggccctggaacgtgagctggaaattgggcaggactgcctggagctggagctgggccagagccgcgaggagctggacaaatttaaggataagttccgcaggctgcagaacagctacacggcttcccagcggaccaaccaggagttggaggacaagctgcacacactgatcaagaaggctgagatggataggaagacgctggactgggagattgtggagctgaccaacaagctgctggatgccaagaacaccatcaacaagctggaagagctcaatgagcggtaccggctggactgcaacctggctgtacagctcctcaagtgcaacaagtcccacttccgaaaccacaagtttgccgatctgccctgtgagctacaggacatggttcggaaacatttgcacagtggtcaagaggccgccagcccaggtcctgctcccagcctagccccaggggctgtggtgcctacctcagtcattgcccgagtgttagagaagccggagtctctactgctcaattcagcccagtcaggcagcgccgggcgccccttggctgaggatgtctttgtgcatgtggacatgagtgagggtgtcccaggtgatccagccagtcccccggcccctggcagccccaccccacaacccaatggggagtgccactctctgggtactgccaggggctccccggaggaagagctgcccctgccagcctttgagaagctgaacccctacccaaccccgtctccaccacacccactgtatcctggccgcagggtaatagagttctctgaggataaggttcggatcccccgcaacagccccctgcccaactgcacttacgctacccgccaggccatttccctgagcctggtagaggaggggagtgagcgggcccgccccagcccagtgcccagcacccctgcctcagcccaggcctcaccccaccaccagcccagcccagcacccctaacactcagtgccccagctagctctgccagctctgaagaggacctgctggtcagctggcagcgggcatttgtggaccgtactccaccacctgctgctgtggcccagcgcacagcctttggacgcgatgccctccctgagctgcagcgccattttgcccatagccccgctgacagagatgaggtggtccaggcaccttctgcccgacccgaagagagtgagcttttgctacccacagaacctgactctggctttcccagggaggaagaagagctgaacctgcctatcagtcctgaggaagagcgccagagcctgctgcccattaacaggggcacagaggaggggccaggcacttcccacaccgagggcagggcctggccactccccagctccagtcgcccccagcgcagccccaagaggatgggggttcaccacctgcaccgcaaggacagcctgacccaggcccaggagcagggcaacctgctcaactagggcccctgctggccttcctgccattgctgcaccaggactgcaaggagtccccacaccttggcagctcagggtccccagtccaagcccttgacctctcctctatccagacccgcacagctgtttcctgtgtggatggggtcaggttgtgggccatgccaggcctgtcagctgcgttgactgactgcagcagcttgcctcatggttttccctttttcttagaatatttattcttcagaggtaacatgcagttgggtctcaagacctttcctccaatcagcccaacccagcccagactgggcttttctggggagctgaggagtttatcagtattcatcttccatcctttcatagtcacaagttttgttattttgtttttttttgggggtgatggtgtaattgttaacctcatttccgtttcctacctgtttgcttccccccccagtcctccgcatgagctgttgccctccaggggcctggcacagctggccttggggacgagggagaggactgattcagggccccctcagctgtctcctccctccctctggaaaggagggtggggctcaggggcctcaagctgggctctgtgtgaggcctggcccccactcccaaccttggctctagactgttactcttaagctttgagaaattttcacattgatgactattttaaaatcaaataaaactattttactggt

SEQ ID NO: 31677 - DNA, 2752 bp, Homo sapiens
  source 1..2752: mol_type = unassigned DNA
acccggcctgccccgcggcaagatggcggcctgaacgcagctggcagcggcggaaagtttctgaagattcaggtgccccagggactggaagaaattacagtgcctacttggaaagaagaagagatagcgacttgccccagtccaaccccagagcggctccggagttgggctgctcacaaaccaagctgtctgtttatatggagtgcctggagggcatctgccatgagtctgtcgctaactgcactaaccaggagagctggctggttggggagaagacactaaccctgagctgtggctaaaggaagtggaggggccgtgggatgcggagagccgagggctaactcccggacagcggaacagagagagctgccgacaaacagacgcaggcggaggagccgtcacctcccagaatgactagtgccgcccctgctaagaaaccctaccgtaaggcaccaccagagcatcgggagctgcgtttggaaattcctggatcccggcttgagcaggaggaacccctgactgatgcagaaaggatgaagctcttacaggaggagaatgaagagcttcgccggcgcctggcctccgccaccagacgcactgaggccctggaacgtgagctggaaattgggcaggactgcctggagctggagctgggccagagccgcgaggagctggacaaatttaaggataagttccgcaggctgcagaacagctacacggcttcccagcggaccaaccaggagttggaggacaagctgcacacactgatcaagaaggctgagatggataggaagacgctggactgggagattgtggagctgaccaacaagctgctggatgccaagaacaccatcaacaagctggaagagctcaatgagcggtaccggctggactgcaacctggctgtacagctcctcaagtgcaacaagtcccacttccgaaaccacaagtttgccgatctgccctgtgagctacaggacatggttcggaaacatttgcacagtggtcaagaggccgccagcccaggtcctgctcccagcctagccccaggggctgtggtgcctacctcagtcattgcccgagtgttagagaagccggagtctctactgctcaattcagcccagtcaggcagcgccgggcgccccttggctgaggatgtctttgtgcatgtggacatgagtgagggtgtcccaggtgatccagccagtcccccggcccctggcagccccaccccacaacccaatggggagtgccactctctgggtactgccaggggctccccggaggaagagctgcccctgccagcctttgagaagctgaacccctacccaaccccgtctccaccacacccactgtatcctggccgcagggtaatagagttctctgaggataaggttcggatcccccgcaacagccccctgcccaactgcacttacgctacccgccaggccatttccctgagcctggtagaggaggggagtgagcgggcccgccccagcccagtgcccagcacccctgcctcagcccaggcctcaccccaccaccagcccagcccagcacccctaacactcagtgccccagctagctctgccagctctgaagaggacctgctggtcagctggcagcgggcatttgtggaccgtactccaccacctgctgctgtggcccagcgcacagcctttggacgcgatgccctccctgagctgcagcgccattttgcccatagccccgctgacagagatgaggtggtccaggcaccttctgcccgacccgaagagagtgagcttttgctacccacagaacctgactctggctttcccagggaggaagaagagctgaacctgcctatcagtcctgaggaagagcgccagagcctgctgcccattaacaggggcacagaggaggggccaggcacttcccacaccgagggcagggcctggccactccccagctccagtcgcccccagcgcagccccaagaggatgggggttcaccacctgcaccgcaaggacagcctgacccaggcccaggagcagggcaacctgctcaactagggcccctgctggccttcctgccattgctgcaccaggactgcaaggagtccccacaccttggcagctcagggtccccagtccaagcccttgacctctcctctatccagacccgcacagctgtttcctgtgtggatggggtcaggttgtgggccatgccaggcctgtcagctgcgttgactgactgcagcagcttgcctcatggttttccctttttcttagaatatttattcttcagaggtaacatgcagttgggtctcaagacctttcctccaatcagcccaacccagcccagactgggcttttctggggagctgaggagtttatcagtattcatcttccatcctttcatagtcacaagttttgttattttgtttttttttgggggtgatggtgtaattgttaacctcatttccgtttcctacctgtttgcttccccccccagtcctccgcatgagctgttgccctccaggggcctggcacagctggccttggggacgagggagaggactgattcagggccccctcagctgtctcctccctccctctggaaaggagggtggggctcaggggcctcaagctgggctctgtgtgaggcctggcccccactcccaaccttggctctagactgttactcttaagctttgagaaattttcacattgatgactattttaaaatcaaataaaactattttactggt

SEQ ID NO: 31678 - DNA, 2572 bp, Homo sapiens
  source 1..2572: mol_type = unassigned DNA
agatgacgcgacacgccaagtgcgtggggattcccgcggccctggccactacccggcctgccccgcggcaagatggcggcctgaacgcagctggcagcggcggaaagagctgtggctaaaggaagtggaggggccgtgggatgcggagagccgagggctaactcccggacagcggaacagagagagctgccgacaaacagacggcggaggagccgtcacctcccagaatgactagtgccgcccctgctaagaaaccctaccgtaaggcaccaccagagcatcgggagctgcgtttggaaattcctggatcccggcttgagcaggaggaacccctgactgatgcagaaaggatgaagctcttacaggaggagaatgaagagcttcgccggcgcctggcctccgccaccagacgcactgaggccctggaacgtgagctggaaattgggcaggactgcctggagctggagctgggccagagccgcgaggagctggacaaatttaaggataagttccgcaggctgcagaacagctacacggcttcccagcggaccaaccaggagttggaggacaagctgcacacactgatcaagaaggctgagatggataggaagacgctggactgggagattgtggagctgaccaacaagctgctggatgccaagaacaccatcaacaagctggaagagctcaatgagcggtaccggctggactgcaacctggctgtacagctcctcaagtgcaacaagtcccacttccgaaaccacaagtttgccgatctgccctgtgagctacaggacatggttcggaaacatttgcacagtggtcaagaggccgccagcccaggtcctgctcccagcctagccccaggggctgtggtgcctacctcagtcattgcccgagtgttagagaagccggagtctctactgctcaattcagcccagtcaggcagcgccgggcgccccttggctgaggatgtctttgtgcatgtggacatgagtgagggtgtcccaggtgatccagccagtcccccggcccctggcagccccaccccacaacccaatggggagtgccactctctgggtactgccaggggctccccggaggaagagctgcccctgccagcctttgagaagctgaacccctacccaaccccgtctccaccacacccactgtatcctggccgcagggtaatagagttctctgaggataaggttcggatcccccgcaacagccccctgcccaactgcacttacgctacccgccaggccatttccctgagcctggtagaggaggggagtgagcgggcccgccccagcccagtgcccagcacccctgcctcagcccaggcctcaccccaccaccagcccagcccagcacccctaacactcagtgccccagctagctctgccagctctgaagaggacctgctggtcagctggcagcgggcatttgtggaccgtactccaccacctgctgctgtggcccagcgcacagcctttggacgcgatgccctccctgagctgcagcgccattttgcccatagccccgctgacagagatgaggtggtccaggcaccttctgcccgacccgaagagagtgagcttttgctacccacagaacctgactctggctttcccagggaggaagaagagctgaacctgcctatcagtcctgaggaagagcgccagagcctgctgcccattaacaggggcacagaggaggggccaggcacttcccacaccgagggcagggcctggccactccccagctccagtcgcccccagcgcagccccaagaggatgggggttcaccacctgcaccgcaaggacagcctgacccaggcccaggagcagggcaacctgctcaactagggcccctgctggccttcctgccattgctgcaccaggactgcaaggagtccccacaccttggcagctcagggtccccagtccaagcccttgacctctcctctatccagacccgcacagctgtttcctgtgtggatggggtcaggttgtgggccatgccaggcctgtcagctgcgttgactgactgcagcagcttgcctcatggttttccctttttcttagaatatttattcttcagaggtaacatgcagttgggtctcaagacctttcctccaatcagcccaacccagcccagactgggcttttctggggagctgaggagtttatcagtattcatcttccatcctttcatagtcacaagttttgttattttgtttttttttgggggtgatggtgtaattgttaacctcatttccgtttcctacctgtttgcttccccccccagtcctccgcatgagctgttgccctccaggggcctggcacagctggccttggggacgagggagaggactgattcagggccccctcagctgtctcctccctccctctggaaaggagggtggggctcaggggcctcaagctgggctctgtgtgaggcctggcccccactcccaaccttggctctagactgttactcttaagctttgagaaattttcacattgatgactattttaaaatcaaataaaactattttactggtatg

SEQ ID NO: 31679 - DNA, 2716 bp, Homo sapiens
  source 1..2716: mol_type = unassigned DNA
agctttcagagtcctggtgcagcctggcagcagtgtttggggaacaggcgagatagaggagctgagccccttctccaacagccgtcctctctttctgttgaccaaccagagaggctttttgcctgaggtcagcaagctggcctccctggttggcagggggagtgcttggcttccatctggcatggtttccggatgggagaaagcccctgagggtctggtggagctgtggctaaaggaagtggaggggccgtgggatgcggagagccgagggctaactcccggacagcggaacagagagagctgccgacaaacagacggcggaggagccgtcacctcccagaatgactagtgccgcccctgctaagaaaccctaccgtaaggcaccaccagagcatcgggagctgcgtttggaaattcctggatcccggcttgagcaggaggaacccctgactgatgcagaaaggatgaagctcttacaggaggagaatgaagagcttcgccggcgcctggcctccgccaccagacgcactgaggccctggaacgtgagctggaaattgggcaggactgcctggagctggagctgggccagagccgcgaggagctggacaaatttaaggataagttccgcaggctgcagaacagctacacggcttcccagcggaccaaccaggagttggaggacaagctgcacacactggcctctcttagccacagctggatttttgcaatcaagaaggctgagatggataggaagacgctggactgggagattgtggagctgaccaacaagctgctggatgccaagaacaccatcaacaagctggaagagctcaatgagcggtaccggctggactgcaacctggctgtacagctcctcaagtgcaacaagtcccacttccgaaaccacaagtttgccgatctgccctgtgagctacaggacatggttcggaaacatttgcacagtggtcaagaggccgccagcccaggtcctgctcccagcctagccccaggggctgtggtgcctacctcagtcattgcccgagtgttagagaagccggagtctctactgctcaattcagcccagtcaggcagcgccgggcgccccttggctgaggatgtctttgtgcatgtggacatgagtgagggtgtcccaggtgatccagccagtcccccggcccctggcagccccaccccacaacccaatggggagtgccactctctgggtactgccaggggctccccggaggaagagctgcccctgccagcctttgagaagctgaacccctacccaaccccgtctccaccacacccactgtatcctggccgcagggtaatagagttctctgaggataaggttcggatcccccgcaacagccccctgcccaactgcacttacgctacccgccaggccatttccctgagcctggtagaggaggggagtgagcgggcccgccccagcccagtgcccagcacccctgcctcagcccaggcctcaccccaccaccagcccagcccagcacccctaacactcagtgccccagctagctctgccagctctgaagaggacctgctggtcagctggcagcgggcatttgtggaccgtactccaccacctgctgctgtggcccagcgcacagcctttggacgcgatgccctccctgagctgcagcgccattttgcccatagccccgctgacagagatgaggtggtccaggcaccttctgcccgacccgaagagagtgagcttttgctacccacagaacctgactctggctttcccagggaggaagaagagctgaacctgcctatcagtcctgaggaagagcgccagagcctgctgcccattaacaggggcacagaggaggggccaggcacttcccacaccgagggcagggcctggccactccccagctccagtcgcccccagcgcagccccaagaggatgggggttcaccacctgcaccgcaaggacagcctgacccaggcccaggagcagggcaacctgctcaactagggcccctgctggccttcctgccattgctgcaccaggactgcaaggagtccccacaccttggcagctcagggtccccagtccaagcccttgacctctcctctatccagacccgcacagctgtttcctgtgtggatggggtcaggttgtgggccatgccaggcctgtcagctgcgttgactgactgcagcagcttgcctcatggttttccctttttcttagaatatttattcttcagaggtaacatgcagttgggtctcaagacctttcctccaatcagcccaacccagcccagactgggcttttctggggagctgaggagtttatcagtattcatcttccatcctttcatagtcacaagttttgttattttgtttttttttgggggtgatggtgtaattgttaacctcatttccgtttcctacctgtttgcttccccccccagtcctccgcatgagctgttgccctccaggggcctggcacagctggccttggggacgagggagaggactgattcagggccccctcagctgtctcctccctccctctggaaaggagggtggggctcaggggcctcaagctgggctctgtgtgaggcctggcccccactcccaaccttggctctagactgttactcttaagctttgagaaattttcacattgatgactattttaaaatcaaataaaactattttactggtatg

SEQ ID NO: 31680 - DNA, 909 bp, Homo sapiens
  source 1..909: mol_type = unassigned DNA
acccggcctgccccgcggcaagatggcggcctgaacgcagctggcagcggcggaaagtttgcttagatcagcctttccacagctgttagcagcatctgccccaatttcagctgaagattcaggtgccccagggactggaagaaattacagtgcctacttggaaagaagaagagatagcgacttgccccagtccaaccccagagcgggagctgtggctaaaggaagtggaggggccgtgggatgcggagagccgagggctaactcccggacagcggaacagagagagctgccgacaaacagacgcaggcggaggagccgtcacctcccagaatgactagtgccgcccctgctaagaaaccctaccgtaaggcaccaccagagcatcgggagctgcgtttggaaattcctggatcccggcttgagcaggaggaacccctgactgatgcagaaaggatgaagctcttacaggaggagaatgaagagcttcgccggcgcctggcctccgccaccagacgcactgaggccctggaacgtgagctggaaattgggcaggactgcctggagctggagctgggccagagccgcgaggagctggacaaatttaaggataagttccgcaggctgcagaacagctacacggcttcccagcggaccaaccaggagttggaggacaagctgcacacactggcctctcttagccacagctggatttttgcaatcaagaaggctgagatggataggaagacgctggactgggagattgtggagctgaccaacaagctgctggatgccaagaacaccatcaacaagctggaagagctcaatgagcggtaccggctggactgcaacctggctgtacagctcctcaagtgcaacaagtcccacttccgaaaccacaagtttgccgat

SEQ ID NO: 31681 - DNA, 3268 bp, Homo sapiens
  source 1..3268: mol_type = unassigned DNA
gctcttacaggaggagaatgaagagcttcgccggcgcctggcctccgccaccagacgcactgaggccctggaacgtgagctggaaattgggcaggactgcctggagctggagctgggccagagccgcgaggagctggacaaatttaaggataagttccgcaggctgcagaacagctacacggcttcccagcggaccaaccaggagttggaggacaagctgcacacactgatcaagaaggctgagatggataggaagacgctggactgggagattgtggagctgaccaacaagctgctggatgccaagaacaccatcaacaagctggaagagctcaatgagcggtaccggctggactgcaacctggctgtacagctcctcaagtgcaacaagtcccacttccgaaaccacaagtttgccgatgtgagtagaactcaccccctccctgcccacatagaccattccggccactgtaggactcctctaactccagtttctgcacctctctctgtcctcctcttcccactttgccctcctcttgcctccatgtcacctctcaagccagtcaactctgccactggttggtgtcccgtgtactgtccagggcccatcactagttctggggggccagccctgttggtttctgtaacagagacagagagagaagatcctgggcaggaaggagagggtagtcagagctatctgcccaaagagtactaagagaggattaggcccatctgatcatgttaccccaaggggtaaactctagaccccacagcttcaggcccaaggtttatgtggcctgcagaagtagaagaagtagaggtatttctttttttttttttttttgagacggagtcttgctctgtcacctaggctggagtgcagtggcacaatctcggctcactgcaacctccgcctcccggcttcaagcaattctcctgcttcagcctcccaagtagctggaattataggcgcccaccaccacgcctggctaatttttttgtctttttagtagagatggggtttcatcgtgttagccaggatggtctcgatctcctgacctcgtgatccacccgcctcggcctcccaaagtgctgggattacaggcatgagccactgtgcccggcccagaagtagaggtatttctaaggctactggtctatgcagattctccaaacttaagtatggtttgggcagaagctgggagatagaagtttgagaacatgctggctgcagcagcagatccgggtttaaatcttggccaagttaaccaaagctttgagttgtcttcccctctccaggcctatgtgtctgtgaagtgagggtatacacactggcatgctgtaagaacaggagatagcagagtgctgagtacacagaggtacttaaaggtgggagccattactttcgccatgagtcaagttatctttggctgcgatcattgatgtctctctttcctgctcttttacctcagctgccctgtgagctacaggacatggttcggaaacatttgcacagtggtcaagaggccgccagcccaggtcctgctcccagcctagccccaggggctgtggtgcctacctcagtcattgcccgagtgttagagaagccggagtctctactgctcaattcagcccagtcaggcagcgccgggcgccccttggctgaggatgtctttgtgcatgtggacatgagtgagggtgtcccaggtgatccagccagtcccccggcccctggcagccccaccccacaacccaatggggagtgccactctctgggtactgccaggggctccccggaggaagagctgcccctgccagcctttgagaagctgaacccctacccaaccccgtctccaccacacccactgtatcctggccgcagggtaatagagttctctgaggataaggttcggatcccccgcaacagccccctgcccaactgcacttacgctacccgccaggccatttccctgagcctggtagaggaggggagtgagcgggcccgccccagcccagtgcccagcacccctgcctcagcccaggcctcaccccaccaccagcccagcccagcacccctaacactcagtgccccagctagctctgccagctctgaagaggacctgctggtcagctggcagcgggcatttgtggaccgtactccaccacctgctgctgtggcccagcgcacagcctttggacgcgatgccctccctgagctgcagcgccattttgcccatagccccgctgacagagatgaggtggtccaggcaccttctgcccgacccgaagagagtgagcttttgctacccacagaacctgactctggctttcccagggaggaagaagagctgaacctgcctatcagtcctgaggaagagcgccagagcctgctgcccattaacaggggcacagaggaggggccaggcacttcccacaccgagggcagggcctggccactccccagctccagtcgcccccagcgcagccccaagaggatgggggttcaccacctgcaccgcaaggacagcctgacccaggcccaggagcagggcaacctgctcaactagggcccctgctggccttcctgccattgctgcaccaggactgcaaggagtccccacaccttggcagctcagggtccccagtccaagcccttgacctctcctctatccagacccgcacagctgtttcctgtgtggatggggtcaggttgtgggccatgccaggcctgtcagctgcgttgactgactgcagcagcttgcctcatggttttccctttttcttagaatatttattcttcagaggtaacatgcagttgggtctcaagacctttcctccaatcagcccaacccagcccagactgggcttttctggggagctgaggagtttatcagtattcatcttccatcctttcatagtcacaagttttgttattttgtttttttttgggggtgatggtgtaattgttaacctcatttccgtttcctacctgtttgcttccccccccagtcctccgcatgagctgttgccctccaggggcctggcacagctggccttggggacgagggagaggactgattcagggccccctcagctgtctcctccctccctctggaaaggagggtggggctcaggggcctcaagctgggctctgtgtgaggcctggcccccactcccaaccttggctctagactgttactcttaagctttgagaaattttcacattgatgactattttaaaatcaaataaaactattttactggt

SEQ ID NO: 31682 - DNA, 7950 bp, Homo sapiens
  source 1..7950: mol_type = unassigned DNA
cgggcatgctcagtgggccgggccggcaggtttgcgtggccgctgagttgccggcgccggctgagccagcggacgccgcgttccttggcggccgccggttcccgggaagttacgtggcgaagccggcttccgaggagacgccgggaggccacgggtgctgctgacgggcgggcgaccgggcgaggccgacgtggccgggctgcgaaagctgcgggaggccgagtgggtggccgcgctcggagggaggtgccggtcgggcgcgccccgtggagaagacccgggcggggcgggcgcttcccggacttttgtccgagttgaattccctccccctgggccgggcccttccggccgcccccgcccgtgccccgctcgctctcgggagatgtttatttgggctgtggcgtgaggagcgggcgggccagcgccgcggagtttcgggtccgaggagcctcgcgcggcgctggagagagacaagatgtccgccagagctgcggccgccaagagcacagcaatggaggaaacagctatatgggaacaacatacagtgacgcttcacagggctcctggatttggatttggaattgcaatatctggtggacgagataatcctcattttcagagtggggaaacgtcaatagtgatttcagatgtgctgaaaggaggaccagctgaaggacagctacaggaaaatgaccgagttgcaatggttaacggagtttcaatggataatgttgaacatgcttttgctgttcagcaactaaggaaaagtgggaaaaatgcaaaaattacaattagaaggaagaagaaagttcaaataccagtaagtcgtcctgatcctgaaccagtatctgataatgaagaagatagttatgatgaggaaatacatgatccaagaagtggccggagtggtgtggttaacagaaggagtgagaagatttggccgagggatagaagtgcaagtagagagaggagcttgtccccgcggtcagacaggcggtcagtggcttccagccagcctgctaaacctactaaagtcacactggtgaaatcccggaaaaatgaagaatatggtcttcgattggcaagccatatatttgttaaggaaatttcacaagatagtttggcagcaagagatggcaatattcaagaaggtgatgttgtattgaagataaatggtactgtgacagaaaatatgtcattgacagatgcaaagacattgatagaaaggtctaaaggcaaattaaaaatggtagttcaaagagatgaacgggctacgctattgaatgtccctgatctttctgacagcatccactctgctaatgcctctgagagagacgacatttcagaaattcagtcactggcatcagatcattctggtcgatcacacgataggcctccccgccgcagccggtcacgatctcctgaccagcggtcagagccttctgatcattccaggcactcgccgcagcagccaagcaatggcagtctccggagtagagatgaagagagaatttctaaacctggggctgtctcaactcctgtaaagcatgctgatgatcacacacctaaaacagtggaagaagttacagttgaaagaaatgagaaacaaacaccttctcttccagaaccaaagcctgtgtatgcccaagttgggcaaccagatgtggatttacctgtcagtccatctgatggtgtcctacctaattcaactcatgaagatgggattcttcggcccagcatgaaattggtaaaattcagaaaaggagatagtgtgggtttgcggctggctggtggaaatgatgttggaatatttgtagctggcgttctagaagatagccctgcagccaaggaaggcttagaggaaggtgatcaaattctcagggtaaacaacgtagattttacaaatatcataagagaagaagccgtccttttcctgcttgacctccctaaaggagaagaagtgaccatattggctcagaagaagaaggatgtttatcgtcgcattgtagaatcagatgtaggagattctttctatattagaacccattttgaatatgaaaaggaatctccctatggacttagttttaacaaaggagaggtgttccgtgttgtggataccttgtacaatggaaaactgggctcttggcttgctattcgaattggtaaaaatcataaggaggtagaacgaggcatcatccctaataagaacagagctgagcagctagccagtgtacagtatacacttccaaaaacagcaggcggagaccgtgctgacttctggagattcagaggtcttcgcagctccaagagaaatcttcgaaaaagcagagaggatttgtccgctcagcctgttcaaacaaagtttccagcttatgaaagagtggttcttcgagaagctggatttctgaggcctgtaaccatttttggaccaatagctgatgttgccagagaaaagctggcaagagaagaaccagatatttatcaaattgcaaagagtgaaccacgagacgctggaactgaccaacgtagctctggcattattcgcctgcatacaataaagcaaatcatagatcaagacaaacatgctttattagatgtaacaccaaatgcagttgatcgtcttaactatgcccagtggtatccaattgttgtatttcttaaccctgattctaagcaaggagtaaaaacaatgagaatgaggttatgtccagaatctcggaaaagtgccaggaagttatacgagcgatctcataaacttcgtaaaaataatcaccatctttttacaactacaattaacttaaattcaatgaatgatggttggtatggtgcgctgaaagaagcaattcaacaacagcaaaaccagctggtatgggtttccgagggaaaggcggatggtgctacaagtgatgaccttgatttgcatgatgatcgtctgtcctacctgtcagctccaggtagtgaatactcaatgtatagcacggacagtagacacacttctgactatgaagacacagacacagaaggcggggcctacactgatcaagaactagatgaaactcttaatgatgaggttgggactccaccggagtctgccattacacggtcctctgagcctgtaagagaggactcctctggaatgcatcatgaaaaccaaacatatcctccttactcaccacaagcgcagccacaaccaattcatagaatagactcccctggatttaagccagcctctcaacagaaagcagaagcttcatctccagtcccttacctttcgcctgaaacaaacccagcatcatcaacctctgctgttaatcataatgtaaatttaactaatgtcagactggaggagcccaccccagctccttccacctcttactcaccacaagctgattctttaagaacaccaagtactgaggcagctcacataatgctaagagatcaagaaccatcattgtcgtcgcatgtagatccaacaaaggtgtatagaaaggatccatatcccgaggaaatgatgaggcagaaccatgttttgaaacagccagccgttagtcacccagggcacaggccagacaaagagcctaatctgacctatgaaccccaactcccatacgtagagaaacaagccagcagagacctcgagcagcccacatacagatacgagtcctcaagctatacggaccagttttctcgaaactatgaacatcgtctgcgatacgaagatcgcgtccccatgtatgaagaacagtggtcatattatgatgacaaacagccctacccatctcggccaccttttgataatcagcactctcaagaccttgactccagacagcatcccgaagagtcctcagaacgagggtactttccacgttttgaagagccagcccctctgtcttacgacagcagaccacgttacgaacaggcacctagagcatccgccctgcggcacgaagagcagccagctcctgggtatgacacacatggtagactcagaccggaagcccagccccacccttcagcagggcccaagcctgcagagtccaagcagtattttgagcaatattcacgcagttacgagcaagtaccaccccaaggatttacctctagagcaggtcattttgagcctctccatggtgctgcagctgtccctccgctgataccttcatctcagcataagccagaagctctgccttcaaacaccaaaccactgcctccacccccaactcaaaccgaagaagaggaagatccagcaatgaagccacagtctgtactcaccagagttaagatgtttgaaaacaaaagatctgcatccttagagaccaagaaggatgtaaatgacactggcagttttaagcctccagaagtagcatctaaaccttcaggtgctcccatcattggtcccaaacccacttctcagaatcaattcagtgaacatgacaaaactctgtacaggatcccagaacctcaaaaacctcaactgaagccacctgaagatattgttcggtccaatcattatgaccctgaagaagatgaagaatattatcgaaaacagctgtcatactttgaccgaagaagttttgagaataagcctcctgcacacattgccgccagccatctctccgagcctgcaaagccagcgcattctcagaatcaatcaaatttttctagttattcttcaaagggaaagcctcctgaagctgatggtgtggatagatcatttggcgagaaacgctatgaacccatccaggccactccccctcctcctccattgccctcgcagtatgcccagccatctcagcctgtcaccagcgcgtctctccacatacattctaagggagcacatggtgaaggtaattcagtgtcattggattttcagaattccttagtgtccaaaccagacccacctccatctcagaataagccagcaactttcagaccaccaaaccgagaagatactgctcaggcagctttctatccccagaaaagttttccagataaagccccagttaatggaactgaacagactcagaaaacagtcactccagcatacaatcgattcacaccaaaaccatatacaagttctgcccgaccatttgaacgcaagtttgaaagtcctaaattcaatcacaatcttctgccaagtgaaactgcacataaacctgacttgtcttcaaaaactcccacttctccaaaaactcttgtgaaatcgcacagtttggcacagcctcctgagtttgacagtggagttgaaactttctctatccatgcagagaagcctaaatatcaaataaataatatcagcacagtgcctaaagctattcctgtgagtccttcagctgtggaagaggatgaagatgaagatggtcatactgtggtggccacagcccgaggcatatttaacagcaatgggggcgtgctgagttccatagaaactggtgttagtataattatccctcaaggagccattcccgaaggagttgagcaggaaatctatttcaaggtctgccgggacaacagcatccttccacctttagataaagagaaaggtgaaacactgctgagtcctttggtgatgtgtggtccccatggcctcaagttcctgaagcctgtggagctgcgcttaccacactgtgatcctaaaacctggcaaaacaagtgtcttcccggagatccaaattatctcgttggagcaaactgtgtttctgtccttattgaccacttttaactcttgaaatataggaacttaaataatgtgaaactggattaaacttaatctaaatggaaccactctatcaagtattataccttttttagagttgatactacagtttgttagtatgaggcatttgtttgaactgataaagatgagtgagcatgcccctgaaccatggtcggaaaacatgctacacactgcatgtttgtgattgacgggactgttggtattggctagaggttcaaagatattttgctttgtgatttttgtaatttttttatcgtcactgcttaacttcacatattgatttccgttaaaataccagccagtaaatgggggtgcatttgaggtctgttctttccaaagtacactgtttcaaactttactatggccctggcctagcatacgtacacattttattttattatgcatgaagtaatatgcacacattttttaaatgcacctggaatatataaccagtgttgtggatttaacagaaatgtacagcaaggagatttacaactgggggagggtgaagtgaagacaatgacttactgtacatgaaaacacatttttcttagggaaggatacaaaagcatgtgagactggttccatggcctcttcagatctctaacttcaccatattaccacagacatactaaccagcagaaatgccttaccctcatgttcttaattcttagctcattctccttgtgttactaagtttttatggcttttgtgcattatctagatactgtatcatgacaaagactgagtacgttgtgcatttggtggtttcagaaatgtgttatcacccagaagaaaatagtggtgtgatttggggatatttttttcttttcttttcttttctttttttttttttttgacaaggggcagtggtggttttctgttctttctggctatgcatttgaaaattttgatgttttaaggatgcttgtacataatgcgtgcataccacttttgttcttggtttgtaaattaacttttataaactttaccttttttatacataaacaagaccacgtttctaaaggctacctttgtattctctcctgtacctcttgagccttgaactttgacctctgcagcaataaagcagcgtttctatgacacatgcaaggtcattttttttaagaaaaaggatgcacagagttgttacatttttaagtgctgcatttaaaagatacagttactcagaattctctagtttgattaaattcttgcaaagtatccctactgtaatttgtgatacaatgctgtgccctaaagtgtatttttttactaatagacaatttattatggcacatcagcacgatttctgtttagataatacaccactacattctgttaatcattaggtgtgactgaatttcttttgccgttattaaaaatctcaaatttctaaatctccaaaataaaactttttaaaataaagtgctggcttggtctgtttgcccactgttttctagtttcatgcagctttataatcctgttttaaaatcctgcacacaaatccctatcacccagcgtcacctaccacctcgtcgtctggtgttgcatgcagaatttctccccttggccagcatgtacagatgggtgggcagtgctcatctgaagggctcagactgaagtggggcagaaggacctggagacagagtgggagaaggcagcaggccgacttccccctgtgggtaaacacacacccctgcgtggagaaacacccctgcatggggacacacgtgcgtttgtgtgtgtgcgtgtaaccatttgtatatggttttattccccagataaatagcacgggcattgtttaatgtcacccacatttgggggaagaaaatgggtttagtgagcataaatattccattgtggacatcctacttacttaactgccacccctgttgacatttggattattgctatagtgtttcagtaaacacctttgtggactgaatccatctatgtggattttatttttttcatctttgttaaggtataatttacatagagtaagttactgtttttaaaatgtatagttcaaattttgacaaacacatactgtttatttaccacggttaatacatacaacagtttctttatcttctctaatcatttgtacccctttatactcaacccttcttccagcccctggcaggatgatctcttctgtttctatagttgcctttttgacagtgtcatataaatggaatcatacaata

SEQ ID NO: 31683 - DNA, 5007 bp, Homo sapiens
  source 1..5007: mol_type = unassigned DNA
atgtccgccagagctgcggccgccaagagcacagcaatggaggaaacagctatatgggaacaacatacagtgacgcttcacagggctcctggatttggatttggaattgcaatatctggtggacgagataatcctcattttcagagtggggaaacgtcaatagtgatttcagatgtgctgaaaggaggaccagctgaaggacagctacaggaaaatgaccgagttgcaatggttaacggagtttcaatggataatgttgaacatgcttttgctgttcagcaactaaggaaaagtgggaaaaatgcaaaaattacaattagaaggaagaagaaagttcaaataccagtaagtcgtcctgatcctgaaccagtatctgataatgaagaagatagttatgatgaggaaatacatgatccaagaagtggccggagtggtgtggttaacagaaggagtgagaagatttggccgagggatagaagtgcaagtagagagaggagcttgtccccgcggtcagacaggcggtcagtggcttccagccagcctgctaaacctactaaagtcacactggtgaaatcccggaaaaatgaagaatatggtcttcgattggcaagccatatatttgttaaggaaatttcacaagatagtttggcagcaagagatggcaatattcaagaaggtgatgttgtattgaagataaatggtactgtgacagaaaatatgtcattgacagatgcaaagacattgatagaaaggtctaaaggcaaattaaaaatggtagttcaaagagatgaacgggctacgctattgaatgtccctgatctttctgacagcatccactctgctaatgcctctgagagagacgacatttcagaaattcagtcactggcatcagatcattctggtcgatcacacgataggcctccccgccgcagccggtcacgatctcctgaccagcggtcagagccttctgatcattccaggcactcgccgcagcagccaagcaatggcagtctccggagtagagatgaagagagaatttctaaacctggggctgtctcaactcctgtaaagcatgctgatgatcacacacctaaaacagtggaagaagttacagttgaaagaaatgagaaacaaacaccttctcttccagaaccaaagcctgtgtatgcccaagttgggcaaccagatgtggatttacctgtcagtccatctgatggtgtcctacctaattcaactcatgaagatgggattcttcggcccagcatgaaattggtaaaattcagaaaaggagatagtgtgggtttgcggctggctggtggaaatgatgttggaatatttgtagctggcgttctagaagatagccctgcagccaaggaaggcttagaggaaggtgatcaaattctcagggtaaacaacgtagattttacaaatatcataagagaagaagccgtccttttcctgcttgacctccctaaaggagaagaagtgaccatattggctcagaagaagaaggatgtttatcgtcgcattgtagaatcagatgtaggagattctttctatattagaacccattttgaatatgaaaaggaatctccctatggacttagttttaacaaaggagaggtgttccgtgttgtggataccttgtacaatggaaaactgggctcttggcttgctattcgaattggtaaaaatcataaggaggtagaacgaggcatcatccctaataagaacagagctgagcagctagccagtgtacagtatacacttccaaaaacagcaggcggagaccgtgctgacttctggagattcagaggtcttcgcagctccaagagaaatcttcgaaaaagcagagaggatttgtccgctcagcctgttcaaacaaagtttccagcttatgaaagagtggttcttcgagaagctggatttctgaggcctgtaaccatttttggaccaatagctgatgttgccagagaaaagctggcaagagaagaaccagatatttatcaaattgcaaagagtgaaccacgagacgctggaactgaccaacgtagctctggcattattcgcctgcatacaataaagcaaatcatagatcaagacaaacatgctttattagatgtaacaccaaatgcagttgatcgtcttaactatgcccagtggtatccaattgttgtatttcttaaccctgattctaagcaaggagtaaaaacaatgagaatgaggttatgtccagaatctcggaaaagtgccaggaagttatacgagcgatctcataaacttcgtaaaaataatcaccatctttttacaactacaattaacttaaattcaatgaatgatggttggtatggtgcgctgaaagaagcaattcaacaacagcaaaaccagctggtatgggtttccgagggaaaggcggatggtgctacaagtgatgaccttgatttgcatgatgatcgtctgtcctacctgtcagctccaggtagtgaatactcaatgtatagcacggacagtagacacacttctgactatgaagacacagacacagaaggcggggcctacactgatcaagaactagatgaaactcttaatgatgaggttgggactccaccggagtctgccattacacggtcctctgagcctgtaagagaggactcctctggaatgcatcatgaaaaccaaacatatcctccttactcaccacaagcgcagccacaaccaattcatagaatagactcccctggatttaagccagcctctcaacaggtgtatagaaaggatccatatcccgaggaaatgatgaggcagaaccatgttttgaaacagccagccgttagtcacccagggcacaggccagacaaagagcctaatctgacctatgaaccccaactcccatacgtagagaaacaagccagcagagacctcgagcagcccacatacagatacgagtcctcaagctatacggaccagttttctcgaaactatgaacatcgtctgcgatacgaagatcgcgtccccatgtatgaagaacagtggtcatattatgatgacaaacagccctacccatctcggccaccttttgataatcagcactctcaagaccttgactccagacagcatcccgaagagtcctcagaacgagggtactttccacgttttgaagagccagcccctctgtcttacgacagcagaccacgttacgaacaggcacctagagcatccgccctgcggcacgaagagcagccagctcctgggtatgacacacatggtagactcagaccggaagcccagccccacccttcagcagggcccaagcctgcagagtccaagcagtattttgagcaatattcacgcagttacgagcaagtaccaccccaaggatttacctctagagcaggtcattttgagcctctccatggtgctgcagctgtccctccgctgataccttcatctcagcataagccagaagctctgccttcaaacaccaaaccactgcctccacccccaactcaaaccgaagaagaggaagatccagcaatgaagccacagtctgtactcaccagagttaagatgtttgaaaacaaaagatctgcatccttagagaccaagaaggatgtaaatgacactggcagttttaagcctccagaagtagcatctaaaccttcaggtgctcccatcattggtcccaaacccacttctcagaatcaattcagtgaacatgacaaaactctgtacaggatcccagaacctcaaaaacctcaactgaagccacctgaagatattgttcggtccaatcattatgaccctgaagaagatgaagaatattatcgaaaacagctgtcatactttgaccgaagaagttttgagaataagcctcctgcacacattgccgccagccatctctccgagcctgcaaagccagcgcattctcagaatcaatcaaatttttctagttattcttcaaagggaaagcctcctgaagctgatggtgtggatagatcatttggcgagaaacgctatgaacccatccaggccactccccctcctcctccattgccctcgcagtatgcccagccatctcagcctgtcaccagcgcgtctctccacatacattctaagggagcacatggtgaaggtaattcagtgtcattggattttcagaattccttagtgtccaaaccagacccacctccatctcagaataagccagcaactttcagaccaccaaaccgagaagatactgctcaggcagctttctatccccagaaaagttttccagataaagccccagttaatggaactgaacagactcagaaaacagtcactccagcatacaatcgattcacaccaaaaccatatacaagttctgcccgaccatttgaacgcaagtttgaaagtcctaaattcaatcacaatcttctgccaagtgaaactgcacataaacctgacttgtcttcaaaaactcccacttctccaaaaactcttgtgaaatcgcacagtttggcacagcctcctgagtttgacagtggagttgaaactttctctatccatgcagagaagcctaaatatcaaataaataatatcagcacagtgcctaaagctattcctgtgagtccttcagctgtggaagaggatgaagatgaagatggtcatactgtggtggccacagcccgaggcatatttaacagcaatgggggcgtgctgagttccatagaaactggtgttagtataattatccctcaaggagccattcccgaaggagttgagcaggaaatctatttcaaggtctgccgggacaacagcatccttccacctttagataaagagaaaggtgaaacactgctgagtcctttggtgatgtgtggtccccatggcctcaagttcctgaagcctgtggagctgcgcttaccacactgtgatcctaaaacctggcaaaacaagtgtcttcccggagatccaaattatctcgttggagcaaactgtgtttctgtccttattgaccacttttaa

SEQ ID NO: 31684 - DNA, 3725 bp, Homo sapiens
  source 1..3725: mol_type = unassigned DNA
tgcccaggaggagtaggagcaggagcagaagcagaagcggggtccggagctgcgcgcctacgcgggacctgtgtccgaaatgccggtgcgaggagaccgcgggtttccaccccggcgggagctgtcaggttggctccgcgccccaggcatggaagagctgatatgggaacagtacactgtgaccctacaaaaggattccaaaagaggatttggaattgcagtgtccggaggcagagacaacccccactttgaaaatggagaaacgtcaattgtcatttctgatgtgctcccgggtgggcctgctgatgggctgctccaagaaaatgacagagtggtcatggtcaatggcacccccatggaggatgtgcttcattcgtttgcagttcagcagctcagaaaaagtgggaaggtcgctgctattgtggtcaagaggccccggaaggtccaggtggccgcacttcaggccagccctcccctggatcaggatgaccgggcttttgaggtgatggacgagtttgatggcagaagtttccggagtggctacagcgagaggagccggctgaacagccatggggggcgcagccgcagctgggaggacagcccggaaagggggcgtccccatgagcgggcccggagccgggagcgggacctcagccgggaccggagccgtggccggagcctggagcggggcctggaccaagaccatgcgcgcacccgagaccgcagccgtggccggagcctggagcggggcctggaccacgactttgggccatcccgggaccgggaccgtgaccgcagccgcggccggagcattgaccaggactacgagcgagcctatcaccgggcctacgacccagactacgagcgggcctacagcccggagtacaggcgcggggcccgccacgatgcccgctctcggggaccccgaagccgcagccgcgagcacccgcactcacggagccccagccccgagcctagggggcggccggggcccatcggggtcctcctgatgaaaagcagagcgaacgaagagtatggtctccggcttgggagtcagatcttcgtaaaggaaatgacccgaacgggtctggcaactaaagatggcaaccttcacgaaggagacataattctcaagatcaatgggactgtaactgagaacatgtctttaacggatgctcgaaaattgatagaaaagtcaagaggaaaactacagctagtggtgttgagagacagccagcagaccctcatcaacatcccgtcattaaatgacagtgactcagaaatagaagatatttcagaaatagagtcaaaccgatcattttctccagaggagagacgtcatcagtattctgattatgattatcattcctcaagtgagaagctgaaggaaaggccaagttccagagaggacacgccgagcagattgtccaggatgggtgcgacacccactccctttaagtccacaggggatattgcaggcacagttgtcccagagaccaacaaggaacccagataccaagaggaccccccagctcctcaaccaaaagcagccccgagaacttttcttcgtcctagtcctgaagatgaagcaatatatggccctaataccaaaatggtaaggttcaagaagggagacagcgtgggcctccggttggctggtggcaatgatgtcgggatatttgttgctggcattcaagaagggacctcggcggagcaggagggccttcaagaaggagaccagattctgaaggtgaacacacaggatttcagaggattagtgcgggaggatgccgttctctacctgttagaaatccctaaaggtgaaatggtgaccattttagctcagagccgagccgatgtgtatagagacatcctggcttgtggcagaggggattcgttttttataagaagccactttgaatgtgagaaggaaactccacagagcctggccttcaccagaggggaggtcttccgagtggtagacacactgtatgacggcaagctgggcaactggctggctgtgaggattgggaacgagttggagaaaggcttaatccccaacaagagcagagctgaacaaatggccagtgttcaaaatgcccagagagacaacgctggggaccgggcagatttctggagaatgcgtggccagaggtctggggtgaagaagaacctgaggaaaagtcgggaagacctcacagctgttgtgtctgtcagcaccaagttcccagcttatgagagggttttgctgcgagaagctggtttcaagagacctgtggtcttattcggccccatagctgatatagcaatggaaaaattggctaatgagttacctgactggtttcaaactgctaaaacggaaccaaaagatgcaggatctgagaaatccactggagtggtccggttaaataccgtgaggcaaattattgaacaggataagcatgcactactggatgtgactccgaaagctgtggacctgttgaattacacccagtggttcccaattgtgatttttttcaacccagactccagacaaggtgtcaaaaccatgagacaaaggttaaatccaacgtccaacaaaagttctcgaaagttatttgatcaagccaacaagcttaaaaaaacgtgtgcacacctttttacagctacaatcaacctaaattcagccaatgatagctggtttggcagcttaaaggacactattcagcatcagcaaggagaagcggtttgggtctctgaaggaaagatggaagggatggatgatgaccccgaagaccgcatgtcctacttaaccgccatgggcgcggactatctgagttgcgacagccgcctcatcagtgactttgaagacacggacggtgaaggaggcgcctacactgacaatgagctggatgagccagccgaggagccgctggtgtcgtccatcacccgctcctcggagccggtgcagcacgaggaggtgaggcgaggcaggccacgggcaggaacaggagagcctggtgttttccttgcactctcgtggacagctgtgtgttcagggtgctgtggaaggcattcctaagggttggagcagatgacttccagggagtctctcgctttgagtccacgctggcatggttgcagtctgtgggaaagtggggcaggcaggtggacttcagaagagcttgaggggtcagcactccgcacacccatgccctcaggtgcgatggataaacagaatggctttaggtgccgtctgtccaaattaccagcggaaccttccttcccatgcagtattgttgtatgtacttgtaacctttgattaggtttctctctgtactcttagatgtccttgcttttcttccccatcctgcctttaacctttctaatcttgccaaagctcttgagtgtttccccatcagtttccttctctcttatatttcagttttttaattgagttcatgatcaaaccttcatctgatcacatcacatgtactgtgcatccactgtgattagatagcttatgggatccttgaaatcacattgacaggcactgtaaagtcacagccaagttagcaattattagttgcacctcagagaatgttggaataatgatctttgaagatgggattgttcatatatttggataattattgctgtggatttctctctagcattttagctcattccagtaaatgatttttttctttatgaaatagaactaccaaaaaaaaaaaaaaaaaaaa

SEQ ID NO: 31685 - DNA, 4058 bp, Homo sapiens
  source 1..4058: mol_type = unassigned DNA
agagcactgtccggtggtgcccaggaggagtaggagcaggagcagaagcagaagcggggtccggagctgcgcgcctacgcgggacctgtgtccgaaatgccggtgcgaggagaccgcgggtttccaccccggcgggagctgtcaggttggctccgcgccccaggcatggaagagctgatatgggaacagtacactgtgaccctacaaaaggattccaaaagaggatttggaattgcagtgtccggaggcagagacaacccccactttgaaaatggagaaacgtcaattgtcatttctgatgtgctcccgggtgggcctgctgatgggctgctccaagaaaatgacagagtggtcatggtcaatggcacccccatggaggatgtgcttcattcgtttgcagttcagcagctcagaaaaagtgggaaggtcgctgctattgtggtcaagaggccccggaaggtccaggtggccgcacttcaggccagccctcccctggatcaggatgaccgggcttttgaggtgatggacgagtttgatggcagaagtttccggagtggctacagcgagaggagccggctgaacagccatggggggcgcagccgcagctgggaggacagcccggaaagggggcgtccccatgagcgggcccggagccgggagcgggacctcagccgggaccggagccgtggccggagcctggagcggggcctggaccaagaccatgcgcgcacccgagaccgcagccgtggccggagcctggagcggggcctggaccacgactttgggccatcccgggaccgggaccgtgaccgcagccgcggccggagcattgaccaggactacgagcgagcctatcaccgggcctacgacccagactacgagcgggcctacagcccggagtacaggcgcggggcccgccacgatgcccgctctcggggaccccgaagccgcagccgcgagcacccgcactcacggagccccagccccgagcctagggggcggccggggcccatcggggtcctcctgatgaaaagcagagcgaacgaagagtatggtctccggcttgggagtcagatcttcgtaaaggaaatgacccgaacgggtctggcaactaaagatggcaaccttcacgaaggagacataattctcaagatcaatgggactgtaactgagaacatgtctttaacggatgctcgaaaattgatagaaaagtcaagaggaaaactacagctagtggtgttgagagacagccagcagaccctcatcaacatcccgtcattaaatgacagtgactcagaaatagaagatatttcagaaatagagtcaaaccgatcattttctccagaggagagacgtcatcagtattctgattatgattatcattcctcaagtgagaagctgaaggaaaggccaagttccagagaggacacgccgagcagattgtccaggatgggtgcgacacccactccctttaagtccacaggggatattgcaggcacagttgtcccagagaccaacaaggaacccagataccaagaggaccccccagctcctcaaccaaaagcagccccgagaacttttcttcgtcctagtcctgaagatgaagcaatatatggccctaataccaaaatggtaaggttcaagaagggagacagcgtgggcctccggttggctggtggcaatgatgtcgggatatttgttgctggcattcaagaagggacctcggcggagcaggagggccttcaagaaggagaccagattctgaaggtgaacacacaggatttcagaggattagtgcgggaggatgccgttctctacctgttagaaatccctaaaggtgaaatggtgaccattttagctcagagccgagccgatgtgtatagagacatcctggcttgtggcagaggggattcgttttttataagaagccactttgaatgtgagaaggaaactccacagagcctggccttcaccagaggggaggtcttccgagtggtagacacactgtatgacggcaagctgggcaactggctggctgtgaggattgggaacgagttggagaaaggcttaatccccaacaagagcagagctgaacaaatggccagtgttcaaaatgcccagagagacaacgctggggaccgggcagatttctggagaatgcgtggccagaggtctggggtgaagaagaacctgaggaaaagtcgggaagacctcacagctgttgtgtctgtcagcaccaagttcccagcttatgagagggttttgctgcgagaagctggtttcaagagacctgtggtcttattcggccccatagctgatatagcaatggaaaaattggctaatgagttacctgactggtttcaaactgctaaaacggaaccaaaagatgcaggatctgagaaatccactggagtggtccggttaaataccgtgaggcaaattattgaacaggataagcatgcactactggatgtgactccgaaagctgtggacctgttgaattacacccagtggttcccaattgtgatttttttcaacccagactccagacaaggtgtcaaaaccatgagacaaaggttaaatccaacgtccaacaaaagttctcgaaagttatttgatcaagccaacaagcttaaaaaaacgtgtgcacacctttttacagctacaatcaacctaaattcagccaatgatagctggtttggcagcttaaaggacactattcagcatcagcaaggagaagcggtttgggtctctgaaggaaagatggaagggatggatgatgaccccgaagaccgcatgtcctacttaaccgccatgggcgcggactatctgagttgcgacagccgcctcatcagtgactttgaagacacggacggtgaaggaggcgcctacactgacaatgagctggatgagccagccgaggagccgctggtgtcgtccatcacccgctcctcggagccggtgcagcacgaggagatcgaaattgcccagaagcatcctgatatctatgcagttccaatcaaaacgcacaagccagaccctggcacgccccagcacacgagttccagaccccctgagccacagaaagctccttccagaccttatcaggataccagaggaagttatggcagtgatgccgaggaggaggagtaccgccagcagctgtcagaacactccaagcgcggttactatggccagtctgcccgataccgggacacagaattatagatgtctgagcacggactctcccaggcctgcctgcatggcatcagactagccactcctgccaggccgccgggatggttcttctccagttagaatgcaccatggagacgtggtgggactccagctcgtgtgtcctcatggagaacccaggggacagctggtgcaaattcagaactgagggctctgtttgtgggactgggttagaggagtctgtggctttttgttcagaattaagcagaacactgcagtcagatcctgttacttgcttcagtggaccgaaatctgtattctgtttgcgtacttgtaatatgtatattaagaagcaataactatttttcctcattaatagctgccttcaaggactgtttcagtgtgagtcagaatgtgaaaaaggaataaaaaatactgttgggctcaaactaaattcaaagaagtactttattgcaactcttttaagtgccttggatgagaagtgtcttaaattttcttcctttgaagctttaggcagagccataatggactaaaacattttgactaagtttttataccagcttaatagctgtagttttccctgcactgtgtcatcttttcaaggcatttgtctttgtaatattttccataaatttggactgtctatatcataactatacttgatagtttggctataagtgctcaatagcttgaagcccaagaagttggtatcgaaatttgttgtttgtttaaacccaagtgctgcacaaaagcagatacttgaggaaaacactatttccaaaagcacatgtattgacaacagttttataatttaataaaaaggaatacattgcaatccgtaa

SEQ ID NO: 31686 - DNA, 4611 bp, Homo sapiens
  source 1..4611: mol_type = unassigned DNA
gcggaggcgccacgctcgggtcgggggcgggctgacgccgccgccgccgcgggaggagggacaaaggggtgggtccccgcgggtcggcaccccggcggttgggctgcgggtcagagcactgtccggtggtgcccaggaggagtaggagcaggagcagaagcagaagcggggtccggagctgcgcgcctacgcgggacctgtgtccgaaatgccggtgcgaggagaccgcgggtttccaccccggcgggagctgtcaggttggctccgcgccccaggcatggaagagctgatatgggaacagtacactgtgaccctacaaaaggattccaaaagaggatttggaattgcagtgtccggaggcagagacaacccccactttgaaaatggagaaacgtcaattgtcatttctgatgtgctcccgggtgggcctgctgatgggctgctccaagaaaatgacagagtggtcatggtcaatggcacccccatggaggatgtgcttcattcgtttgcagttcagcagctcagaaaaagtgggaaggtcgctgctattgtggtcaagaggccccggaaggtccaggtggccgcacttcaggccagccctcccctggatcaggatgaccgggcttttgaggtgatggacgagtttgatggcagaagtttccggagtggctacagcgagaggagccggctgaacagccatggggggcgcagccgcagctgggaggacagcccggaaagggggcgtccccatgagcgggcccggagccgggagcgggacctcagccgggaccggagccgtggccggagcctggagcggggcctggaccaagaccatgcgcgcacccgagaccgcagccgtggccggagcctggagcggggcctggaccacgactttgggccatcccgggaccgggaccgtgaccgcagccgcggccggagcattgaccaggactacgagcgagcctatcaccgggcctacgacccagactacgagcgggcctacagcccggagtacaggcgcggggcccgccacgatgcccgctctcggggaccccgaagccgcagccgcgagcacccgcactcacggagccccagccccgagcctagggggcggccggggcccatcggggtcctcctgatgaaaagcagagcgaacgaagagtatggtctccggcttgggagtcagatcttcgtaaaggaaatgacccgaacgggtctggcaactaaagatggcaaccttcacgaaggagacataattctcaagatcaatgggactgtaactgagaacatgtctttaacggatgctcgaaaattgatagaaaagtcaagaggaaaactacagctagtggtgttgagagacagccagcagaccctcatcaacatcccgtcattaaatgacagtgactcagaaatagaagatatttcagaaatagagtcaaaccgatcattttctccagaggagagacgtcatcagtattctgattatgattatcattcctcaagtgagaagctgaaggaaaggccaagttccagagaggacacgccgagcagattgtccaggatgggtgcgacacccactccctttaagtccacaggggatattgcaggcacagttgtcccagagaccaacaaggaacccagataccaagaggaccccccagctcctcaaccaaaagcagccccgagaacttttcttcgtcctagtcctgaagatgaagcaatatatggccctaataccaaaatggtaaggttcaagaagggagacagcgtgggcctccggttggctggtggcaatgatgtcgggatatttgttgctggcattcaagaagggacctcggcggagcaggagggccttcaagaaggagaccagattctgaaggtgaacacacaggatttcagaggattagtgcgggaggatgccgttctctacctgttagaaatccctaaaggtgaaatggtgaccattttagctcagagccgagccgatgtgtatagagacatcctggcttgtggcagaggggattcgttttttataagaagccactttgaatgtgagaaggaaactccacagagcctggccttcaccagaggggaggtcttccgagtggtagacacactgtatgacggcaagctgggcaactggctggctgtgaggattgggaacgagttggagaaaggcttaatccccaacaagagcagagctgaacaaatggccagtgttcaaaatgcccagagagacaacgctggggaccgggcagatttctggagaatgcgtggccagaggtctggggtgaagaagaacctgaggaaaagtcgggaagacctcacagctgttgtgtctgtcagcaccaagttcccagcttatgagagggttttgctgcgagaagctggtttcaagagacctgtggtcttattcggccccatagctgatatagcaatggaaaaattggctaatgagttacctgactggtttcaaactgctaaaacggaaccaaaagatgcaggatctgagaaatccactggagtggtccggttaaataccgtgaggcaaattattgaacaggataagcatgcactactggatgtgactccgaaagctgtggacctgttgaattacacccagtggttcccaattgtgatttttttcaacccagactccagacaaggtgtcaaaaccatgagacaaaggttaaatccaacgtccaacaaaagttctcgaaagttatttgatcaagccaacaagcttaaaaaaacgtgtgcacacctttttacagctacaatcaacctaaattcagccaatgatagctggtttggcagcttaaaggacactattcagcatcagcaaggagaagcggtttgggtctctgaaggaaagatggaagggatggatgatgaccccgaagaccgcatgtcctacttaaccgccatgggcgcggactatctgagttgcgacagccgcctcatcagtgactttgaagacacggacggtgaaggaggcgcctacactgacaatgagctggatgagccagccgaggagccgctggtgtcgtccatcacccgctcctcggagccggtgcagcacgaggagagcataaggaaacccagcccagagccacgagctcagatgaggagggctgctagcagcgatcaacttagggacaatagcccgcccccagcattcaagccagagccgcccaaggccaaaacccagaacaaagaagaatcctatgacttctccaaatcctatgaatataagtcaaacccctctgccgttgctggtaatgaaactcctggggcatctaccaaaggttatcctcctcctgttgcagcaaaacctacctttgggcggtctatactgaagccctccactcccatccctcctcaagagggtgaggaggtgggagagagcagtgaggagcaagataatgctcccaaatcagtcctgggcaaagtcaaaatatttgagaagatggatcacaaggccaggttacagagaatgcaggagctccaggaagcacagaatgcaaggatcgaaattgcccagaagcatcctgatatctatgcagttccaatcaaaacgcacaagccagaccctggcacgccccagcacacgagttccagaccccctgagccacagaaagctccttccagaccttatcaggataccagaggaagttatggcagtgatgccgaggaggaggagtaccgccagcagctgtcagaacactccaagcgcggttactatggccagtctgcccgataccgggacacagaattatagatgtctgagcacggactctcccaggcctgcctgcatggcatcagactagccactcctgccaggccgccgggatggttcttctccagttagaatgcaccatggagacgtggtgggactccagctcgtgtgtcctcatggagaacccaggggacagctggtgcaaattcagaactgagggctctgtttgtgggactgggttagaggagtctgtggctttttgttcagaattaagcagaacactgcagtcagatcctgttacttgcttcagtggaccgaaatctgtattctgtttgcgtacttgtaatatgtatattaagaagcaataactatttttcctcattaatagctgccttcaaggactgtttcagtgtgagtcagaatgtgaaaaaggaataaaaaatactgttgggctcaaactaaattcaaagaagtactttattgcaactcttttaagtgccttggatgagaagtgtcttaaattttcttcctttgaagctttaggcagagccataatggactaaaacattttgactaagtttttataccagcttaatagctgtagttttccctgcactgtgtcatcttttcaaggcatttgtctttgtaatattttccataaatttggactgtctatatcataactatacttgatagtttggctataagtgctcaatagcttgaagcccaagaagttggtatcgaaatttgttgtttgtttaaacccaagtgctgcacaaaagcagatacttgaggaaaacactatttccaaaagcacatgtattgacaacagttttataatttaataaaaaggaatacattgcaatccgtaa

SEQ ID NO: 31687 - DNA, 588 bp, Homo sapiens
  source 1..588: mol_type = unassigned DNA
tccagggtgcgaagtaccacattactgtcatctccctgtgagtgggattggcaccccggctgcagctccaggagcaagtactccaggaagcacagagctgtaccagtacacggcccacgttgccaggccccaggcatggaagagctgatatgggaacagtacactgtgaccctacaaaaggattccaaaagaggatttggaattgcagtgtccggaggcagagacaacccccactttgaaaatggagaaacgtcaattgtcatttctgatgtgctcccgggtgggcctgctgatgggctgctccaagaaaatgacagagtggtcatggtcaatggcacccccatggaggatgtgcttcattcgtttgcagttcagcagctcagaaaaagtgggaaggtcgctgctattgtaagtactgggtttgctttcagcttgccttaatagcattttggttttttgcccagaagaaaattaccccttgcttttaagcatttgacagaattacataacctagggaccgctgttcttggatcctcagtacttttggaggggtgtgaagatatgtgtaagttatcttcctacttttcc

SEQ ID NO: 31688 - DNA, 614 bp, Homo sapiens
  source 1..614: mol_type = unassigned DNA
gggtgcgaagtaccacattactgtcatctccctgtgagtgggattggcaccccggctgcagctccaggagcaagtactccaggaagcacagagctgtaccagtacacggcccacgttgccaggccccaggcatggaagagctgatatgggaacagtacactgtgaccctacaaaaggattccaaaagaggatttggaattgcagtgtccggaggcagagacaacccccactttgaaaatggagaaacgtcaattgtcatttctgatgtgctcccgggtgggcctgctgatgggctgctccaagaaaatgacagagtggtcatggtcaatggcacccccatggaggatgtgcttcattcgtttgcagttcagcagctcagaaaaagtgggaaggtcgctgctattgtggtcaagaggccccggaaggtccaggtggccgcacttcaggccagccctcccctggatcaggatgaccgggcttttgaggtgatggacgagtttgatggcagaagtttccggagtggctacagcgagaggagccggctgaacagccatggggggcgcagccgcagctgggaggacagcccggaaagggggcgtccccatgagcgggcc

SEQ ID NO: 31689 - DNA, 4085 bp, Homo sapiens
  source 1..4085: mol_type = unassigned DNA
agctgcgtctccctcccggggctcgcgcgcccagaaccctccggtctcaaggaagcagggtgcgaagtaccacattactgtcatctccctgtgagtgggattggcaccccggctgcagctccaggagcaagtactccaggaagcacagagctgtaccagtacacggcccacgttgccaggccccaggcatggaagagctgatatgggaacagtacactgtgaccctacaaaaggattccaaaagaggatttggaattgcagtgtccggaggcagagacaacccccactttgaaaatggagaaacgtcaattgtcatttctgatgtgctcccgggtgggcctgctgatgggctgctccaagaaaatgacagagtggtcatggtcaatggcacccccatggaggatgtgcttcattcgtttgcagttcagcagctcagaaaaagtgggaaggtcgctgctattgtggtcaagaggccccggaaggtccaggtggccgcacttcaggccagccctcccctggatcaggatgaccgggcttttgaggtgatggacgagtttgatggcagaagtttccggagtggctacagcgagaggagccggctgaacagccatggggggcgcagccgcagctgggaggacagcccggaaagggggcgtccccatgagcgggcccggagccgggagcgggacctcagccgggaccggagccgtggccggagcctggagcggggcctggaccaagaccatgcgcgcacccgagaccgcagccgtggccggagcctggagcggggcctggaccacgactttgggccatcccgggaccgggaccgtgaccgcagccgcggccggagcattgaccaggactacgagcgagcctatcaccgggcctacgacccagactacgagcgggcctacagcccggagtacaggcgcggggcccgccacgatgcccgctctcggggaccccgaagccgcagccgcgagcacccgcactcacggagccccagccccgagcctagggggcggccggggcccatcggggtcctcctgatgaaaagcagagcgaacgaagagtatggtctccggcttgggagtcagatcttcgtaaaggaaatgacccgaacgggtctggcaactaaagatggcaaccttcacgaaggagacataattctcaagatcaatgggactgtaactgagaacatgtctttaacggatgctcgaaaattgatagaaaagtcaagaggaaaactacagctagtggtgttgagagacagccagcagaccctcatcaacatcccgtcattaaatgacagtgactcagaaatagaagatatttcagaaatagagtcaaaccgatcattttctccagaggagagacgtcatcagtattctgattatgattatcattcctcaagtgagaagctgaaggaaaggccaagttccagagaggacacgccgagcagattgtccaggatgggtgcgacacccactccctttaagtccacaggggatattgcaggcacagttgtcccagagaccaacaaggaacccagataccaagaggaccccccagctcctcaaccaaaagcagccccgagaacttttcttcgtcctagtcctgaagatgaagcaatatatggccctaataccaaaatggtaaggttcaagaagggagacagcgtgggcctccggttggctggtggcaatgatgtcgggatatttgttgctggcattcaagaagggacctcggcggagcaggagggccttcaagaaggagaccagattctgaaggtgaacacacaggatttcagaggattagtgcgggaggatgccgttctctacctgttagaaatccctaaaggtgaaatggtgaccattttagctcagagccgagccgatgtgtatagagacatcctggcttgtggcagaggggattcgttttttataagaagccactttgaatgtgagaaggaaactccacagagcctggccttcaccagaggggaggtcttccgagtggtagacacactgtatgacggcaagctgggcaactggctggctgtgaggattgggaacgagttggagaaaggcttaatccccaacaagagcagagctgaacaaatggccagtgttcaaaatgcccagagagacaacgctggggaccgggcagatttctggagaatgcgtggccagaggtctggggtgaagaagaacctgaggaaaagtcgggaagacctcacagctgttgtgtctgtcagcaccaagttcccagcttatgagagggttttgctgcgagaagctggtttcaagagacctgtggtcttattcggccccatagctgatatagcaatggaaaaattggctaatgagttacctgactggtttcaaactgctaaaacggaaccaaaagatgcaggatctgagaaatccactggagtggtccggttaaataccgtgaggcaaattattgaacaggataagcatgcactactggatgtgactccgaaagctgtggacctgttgaattacacccagtggttcccaattgtgatttttttcaacccagactccagacaaggtgtcaaaaccatgagacaaaggttaaatccaacgtccaacaaaagttctcgaaagttatttgatcaagccaacaagcttaaaaaaacgtgtgcacacctttttacagctacaatcaacctaaattcagccaatgatagctggtttggcagcttaaaggacactattcagcatcagcaaggagaagcggtttgggtctctgaaggaaagatggaagggatggatgatgaccccgaagaccgcatgtcctacttaaccgccatgggcgcggactatctgagttgcgacagccgcctcatcagtgactttgaagacacggacggtgaaggaggcgcctacactgacaatgagctggatgagccagccgaggagccgctggtgtcgtccatcacccgctcctcggagccggtgcagcacgaggagatcgaaattgcccagaagcatcctgatatctatgcagttccaatcaaaacgcacaagccagaccctggcacgccccagcacacgagttccagaccccctgagccacagaaagctccttccagaccttatcaggataccagaggaagttatggcagtgatgccgaggaggaggagtaccgccagcagctgtcagaacactccaagcgcggttactatggccagtctgcccgataccgggacacagaattatagatgtctgagcacggactctcccaggcctgcctgcatggcatcagactagccactcctgccaggccgccgggatggttcttctccagttagaatgcaccatggagacgtggtgggactccagctcgtgtgtcctcatggagaacccaggggacagctggtgcaaattcagaactgagggctctgtttgtgggactgggttagaggagtctgtggctttttgttcagaattaagcagaacactgcagtcagatcctgttacttgcttcagtggaccgaaatctgtattctgtttgcgtacttgtaatatgtatattaagaagcaataactatttttcctcattaatagctgccttcaaggactgtttcagtgtgagtcagaatgtgaaaaaggaataaaaaatactgttgggctcaaactaaattcaaagaagtactttattgcaactcttttaagtgccttggatgagaagtgtcttaaattttcttcctttgaagctttaggcagagccataatggactaaaacattttgactaagtttttataccagcttaatagctgtagttttccctgcactgtgtcatcttttcaaggcatttgtctttgtaatattttccataaatttggactgtctatatcataactatacttgatagtttggctataagtgctcaatagcttgaagcccaagaagttggtatcgaaatttgttgtttgtttaaacccaagtgctgcacaaaagcagatacttgaggaaaacactatttccaaaagcacatgtattgacaacagttttataatttaataaaaaggaatacattgcaatccgtaatttt

SEQ ID NO: 31690 - DNA, 4459 bp, Homo sapiens
  source 1..4459: mol_type = unassigned DNA
atatggatgtgtcactgtgtgagatgacaacaggatttgctggaaatgtgggccactattgtatccgccttacgtaaccacatggagtgatggaaatgggtgagcagcccggaatgtaggcggtggcctggcccatgcatctccagagaccatgaagactgctcaagccctacataggatgtggatccaggctgttaaaaagttgaggagatggaaaggccgtgccccaggcatggaagagctgatatgggaacagtacactgtgaccctacaaaaggattccaaaagaggatttggaattgcagtgtccggaggcagagacaacccccactttgaaaatggagaaacgtcaattgtcatttctgatgtgctcccgggtgggcctgctgatgggctgctccaagaaaatgacagagtggtcatggtcaatggcacccccatggaggatgtgcttcattcgtttgcagttcagcagctcagaaaaagtgggaaggtcgctgctattgtggtcaagaggccccggaaggtccaggtggccgcacttcaggccagccctcccctggatcaggatgaccgggcttttgaggtgatggacgagtttgatggcagaagtttccggagtggctacagcgagaggagccggctgaacagccatggggggcgcagccgcagctgggaggacagcccggaaagggggcgtccccatgagcgggcccggagccgggagcgggacctcagccgggaccggagccgtggccggagcctggagcggggcctggaccaagaccatgcgcgcacccgagaccgcagccgtggccggagcctggagcggggcctggaccacgactttgggccatcccgggaccgggaccgtgaccgcagccgcggccggagcattgaccaggactacgagcgagcctatcaccgggcctacgacccagactacgagcgggcctacagcccggagtacaggcgcggggcccgccacgatgcccgctctcggggaccccgaagccgcagccgcgagcacccgcactcacggagccccagccccgagcctagggggcggccggggcccatcggggtcctcctgatgaaaagcagagcgaacgaagagtatggtctccggcttgggagtcagatcttcgtaaaggaaatgacccgaacgggtctggcaactaaagatggcaaccttcacgaaggagacataattctcaagatcaatgggactgtaactgagaacatgtctttaacggatgctcgaaaattgatagaaaagtcaagaggaaaactacagctagtggtgttgagagacagccagcagaccctcatcaacatcccgtcattaaatgacagtgactcagaaatagaagatatttcagaaatagagtcaaaccgatcattttctccagaggagagacgtcatcagtattctgattatgattatcattcctcaagtgagaagctgaaggaaaggccaagttccagagaggacacgccgagcagattgtccaggatgggtgcgacacccactccctttaagtccacaggggatattgcaggcacagttgtcccagagaccaacaaggaacccagataccaagaggaccccccagctcctcaaccaaaagcagccccgagaacttttcttcgtcctagtcctgaagatgaagcaatatatggccctaataccaaaatggtaaggttcaagaagggagacagcgtgggcctccggttggctggtggcaatgatgtcgggatatttgttgctggcattcaagaagggacctcggcggagcaggagggccttcaagaaggagaccagattctgaaggtgaacacacaggatttcagaggattagtgcgggaggatgccgttctctacctgttagaaatccctaaaggtgaaatggtgaccattttagctcagagccgagccgatgtgtatagagacatcctggcttgtggcagaggggattcgttttttataagaagccactttgaatgtgagaaggaaactccacagagcctggccttcaccagaggggaggtcttccgagtggtagacacactgtatgacggcaagctgggcaactggctggctgtgaggattgggaacgagttggagaaaggcttaatccccaacaagagcagagctgaacaaatggccagtgttcaaaatgcccagagagacaacgctggggaccgggcagatttctggagaatgcgtggccagaggtctggggtgaagaagaacctgaggaaaagtcgggaagacctcacagctgttgtgtctgtcagcaccaagttcccagcttatgagagggttttgctgcgagaagctggtttcaagagacctgtggtcttattcggccccatagctgatatagcaatggaaaaattggctaatgagttacctgactggtttcaaactgctaaaacggaaccaaaagatgcaggatctgagaaatccactggagtggtccggttaaataccgtgaggcaaattattgaacaggataagcatgcactactggatgtgactccgaaagctgtggacctgttgaattacacccagtggttcccaattgtgatttttttcaacccagactccagacaaggtgtcaaaaccatgagacaaaggttaaatccaacgtccaacaaaagttctcgaaagttatttgatcaagccaacaagcttaaaaaaacgtgtgcacacctttttacagctacaatcaacctaaattcagccaatgatagctggtttggcagcttaaaggacactattcagcatcagcaaggagaagcggtttgggtctctgaaggaaagatggaagggatggatgatgaccccgaagaccgcatgtcctacttaaccgccatgggcgcggactatctgagttgcgacagccgcctcatcagtgactttgaagacacggacggtgaaggaggcgcctacactgacaatgagctggatgagccagccgaggagccgctggtgtcgtccatcacccgctcctcggagccggtgcagcacgaggaggccaaaacccagaacaaagaagaatcctatgacttctccaaatcctatgaatataagtcaaacccctctgccgttgctggtaatgaaactcctggggcatctaccaaaggttatcctcctcctgttgcagcaaaacctacctttgggcggtctatactgaagccctccactcccatccctcctcaagagggtgaggaggtgggagagagcagtgaggagcaagataatgctcccaaatcagtcctgggcaaagtcaaaatatttgagaagatggatcacaaggccaggttacagagaatgcaggagctccaggaagcacagaatgcaaggatcgaaattgcccagaagcatcctgatatctatgcagttccaatcaaaacgcacaagccagaccctggcacgccccagcacacgagttccagaccccctgagccacagaaagctccttccagaccttatcaggataccagaggaagttatggcagtgatgccgaggaggaggagtaccgccagcagctgtcagaacactccaagcgcggttactatggccagtctgcccgataccgggacacagaattatagatgtctgagcacggactctcccaggcctgcctgcatggcatcagactagccactcctgccaggccgccgggatggttcttctccagttagaatgcaccatggagacgtggtgggactccagctcgtgtgtcctcatggagaacccaggggacagctggtgcaaattcagaactgagggctctgtttgtgggactgggttagaggagtctgtggctttttgttcagaattaagcagaacactgcagtcagatcctgttacttgcttcagtggaccgaaatctgtattctgtttgcgtacttgtaatatgtatattaagaagcaataactatttttcctcattaatagctgccttcaaggactgtttcagtgtgagtcagaatgtgaaaaaggaataaaaaatactgttgggctcaaactaaattcaaagaagtactttattgcaactcttttaagtgccttggatgagaagtgtcttaaattttcttcctttgaagctttaggcagagccataatggactaaaacattttgactaagtttttataccagcttaatagctgtagttttccctgcactgtgtcatcttttcaaggcatttgtctttgtaatattttccataaatttggactgtctatatcataactatacttgatagtttggctataagtgctcaatagcttgaagcccaagaagttggtatcgaaatttgttgtttgtttaaacccaagtgctgcacaaaagcagatacttgaggaaaacactatttccaaaagcacatgtattgacaacagttttataatttaataaaaaggaatacattgcaatccgtaatttt

SEQ ID NO: 31691 - DNA, 4500 bp, Homo sapiens
  source 1..4500: mol_type = unassigned DNA
atgaagactgctcaagccctacataggatgtggatccaggctgttaaaaagttgaggagatggaaaggccgtgtgagtccctctgcaagctctccccttgttttccccaacctttcttcatgggaaggggagggaagcaaaaccattctcacagccccaggcatggaagagctgatatgggaacagtacactgtgaccctacaaaaggattccaaaagaggatttggaattgcagtgtccggaggcagagacaacccccactttgaaaatggagaaacgtcaattgtcatttctgatgtgctcccgggtgggcctgctgatgggctgctccaagaaaatgacagagtggtcatggtcaatggcacccccatggaggatgtgcttcattcgtttgcagttcagcagctcagaaaaagtgggaaggtcgctgctattgtggtcaagaggccccggaaggtccaggtggccgcacttcaggccagccctcccctggatcaggatgaccgggcttttgaggtgatggacgagtttgatggcagaagtttccggagtggctacagcgagaggagccggctgaacagccatggggggcgcagccgcagctgggaggacagcccggaaagggggcgtccccatgagcgggcccggagccgggagcgggacctcagccgggaccggagccgtggccggagcctggagcggggcctggaccaagaccatgcgcgcacccgagaccgcagccgtggccggagcctggagcggggcctggaccacgactttgggccatcccgggaccgggaccgtgaccgcagccgcggccggagcattgaccaggactacgagcgagcctatcaccgggcctacgacccagactacgagcgggcctacagcccggagtacaggcgcggggcccgccacgatgcccgctctcggggaccccgaagccgcagccgcgagcacccgcactcacggagccccagccccgagcctagggggcggccggggcccatcggggtcctcctgatgaaaagcagagcgaacgaagagtatggtctccggcttgggagtcagatcttcgtaaaggaaatgacccgaacgggtctggcaactaaagatggcaaccttcacgaaggagacataattctcaagatcaatgggactgtaactgagaacatgtctttaacggatgctcgaaaattgatagaaaagtcaagaggaaaactacagctagtggtgttgagagacagccagcagaccctcatcaacatcccgtcattaaatgacagtgactcagaaatagaagatatttcagaaatagagtcaaaccgatcattttctccagaggagagacgtcatcagtattctgattatgattatcattcctcaagtgagaagctgaaggaaaggccaagttccagagaggacacgccgagcagattgtccaggatgggtgcgacacccactccctttaagtccacaggggatattgcaggcacagttgtcccagagaccaacaaggaacccagataccaagaggaccccccagctcctcaaccaaaagcagccccgagaacttttcttcgtcctagtcctgaagatgaagcaatatatggccctaataccaaaatggtaaggttcaagaagggagacagcgtgggcctccggttggctggtggcaatgatgtcgggatatttgttgctggcattcaagaagggacctcggcggagcaggagggccttcaagaaggagaccagattctgaaggtgaacacacaggatttcagaggattagtgcgggaggatgccgttctctacctgttagaaatccctaaaggtgaaatggtgaccattttagctcagagccgagccgatgtgtatagagacatcctggcttgtggcagaggggattcgttttttataagaagccactttgaatgtgagaaggaaactccacagagcctggccttcaccagaggggaggtcttccgagtggtagacacactgtatgacggcaagctgggcaactggctggctgtgaggattgggaacgagttggagaaaggcttaatccccaacaagagcagagctgaacaaatggccagtgttcaaaatgcccagagagacaacgctggggaccgggcagatttctggagaatgcgtggccagaggtctggggtgaagaagaacctgaggaaaagtcgggaagacctcacagctgttgtgtctgtcagcaccaagttcccagcttatgagagggttttgctgcgagaagctggtttcaagagacctgtggtcttattcggccccatagctgatatagcaatggaaaaattggctaatgagttacctgactggtttcaaactgctaaaacggaaccaaaagatgcaggatctgagaaatccactggagtggtccggttaaataccgtgaggcaaattattgaacaggataagcatgcactactggatgtgactccgaaagctgtggacctgttgaattacacccagtggttcccaattgtgatttttttcaacccagactccagacaaggtgtcaaaaccatgagacaaaggttaaatccaacgtccaacaaaagttctcgaaagttatttgatcaagccaacaagcttaaaaaaacgtgtgcacacctttttacagctacaatcaacctaaattcagccaatgatagctggtttggcagcttaaaggacactattcagcatcagcaaggagaagcggtttgggtctctgaaggaaagatggaagggatggatgatgaccccgaagaccgcatgtcctacttaaccgccatgggcgcggactatctgagttgcgacagccgcctcatcagtgactttgaagacacggacggtgaaggaggcgcctacactgacaatgagctggatgagccagccgaggagccgctggtgtcgtccatcacccgctcctcggagccggtgcagcacgaggagagcataaggaaacccagcccagagccacgagctcagatgaggagggctgctagcagcgatcaacttagggacaatagcccgcccccagcattcaagccagagccgcccaaggccaaaacccagaacaaagaagaatcctatgacttctccaaatcctatgaatataagtcaaacccctctgccgttgctggtaatgaaactcctggggcatctaccaaaggttatcctcctcctgttgcagcaaaacctacctttgggcggtctatactgaagccctccactcccatccctcctcaagagggtgaggaggtgggagagagcagtgaggagcaagataatgctcccaaatcagtcctgggcaaagtcaaaatatttgagaagatggatcacaaggccaggttacagagaatgcaggagctccaggaagcacagaatgcaaggatcgaaattgcccagaagcatcctgatatctatgcagttccaatcaaaacgcacaagccagaccctggcacgccccagcacacgagttccagaccccctgagccacagaaagctccttccagaccttatcaggataccagaggaagttatggcagtgatgccgaggaggaggagtaccgccagcagctgtcagaacactccaagcgcggttactatggccagtctgcccgataccgggacacagaattatagatgtctgagcacggactctcccaggcctgcctgcatggcatcagactagccactcctgccaggccgccgggatggttcttctccagttagaatgcaccatggagacgtggtgggactccagctcgtgtgtcctcatggagaacccaggggacagctggtgcaaattcagaactgagggctctgtttgtgggactgggttagaggagtctgtggctttttgttcagaattaagcagaacactgcagtcagatcctgttacttgcttcagtggaccgaaatctgtattctgtttgcgtacttgtaatatgtatattaagaagcaataactatttttcctcattaatagctgccttcaaggactgtttcagtgtgagtcagaatgtgaaaaaggaataaaaaatactgttgggctcaaactaaattcaaagaagtactttattgcaactcttttaagtgccttggatgagaagtgtcttaaattttcttcctttgaagctttaggcagagccataatggactaaaacattttgactaagtttttataccagcttaatagctgtagttttccctgcactgtgtcatcttttcaaggcatttgtctttgtaatattttccataaatttggactgtctatatcataactatacttgatagtttggctataagtgctcaatagcttgaagcccaagaagttggtatcgaaatttgttgtttgtttaaacccaagtgctgcacaaaagcagatacttgaggaaaacactatttccaaaagcacatgtattgacaacagttttataatttaataaaaaggaatacattgcaatccgtaatttt

SEQ ID NO: 31692 - DNA, 3068 bp, Homo sapiens
  source 1..3068: mol_type = unassigned DNA
agccgggagctgcggagctggagggaggaggacgagagcccggccctcagcccgctgtgactctcctcagccccctcccccagcccggggtgggggccgattgactgtttccaggaccccctcgggtaggggggctggagagcccccaggtggaccatggcggtgagattccaggtggctgacatggaggagctgaccatctgggaacagcacacggccacactgtccaaggacccccgccggggctttggcattgcgatctctggaggccgagaccggcccggtggatccatggttgtatctgacgtggtacctggagggccggcggagggcaggctacagacaggcgaccacatcgtcatggtgaacggggtttccatggagaatgccacctccgcgtttgccattcagatactcaagacctgcaccaagatggccaacatcacagtgaaacgtccccggaggatccacctgcccgccaccaaagccagcccctccagcccagggcgccaggactcggatgaagacgatgggccccagcgggtggaggaggtggaccagggccggggctatgacggcgactcatccagtggctccggccgctcctgggacgagcgctcccgccggccgaggcctggtcgccggggccgggccggcagccatgggcgtaggagcccaggtggtggctctgaggccaacgggctggccctggtgtccggctttaagcggctgccacggcaggacgtgcagatgaagcctgtgaagtcagtgctggtgaagaggagagacagcgaagagtttggcgtcaagctgggcagtcagatcttcatcaagcacattacagattcgggcctggctgcccggcaccgtgggctgcaggaaggagatctcattctacagatcaacggggtgtctagccagaacctgtcactgaacgacacccggcgactgattgagaagtcagaagggaagctaagcctgctggtgctgagagatcgtgggcagttcctggtgaacattccgcctgctgtcagtgacagcgacagctcgccattggaggacatctcggacctcgcctcggagctatcgcaggcaccaccatcccacatcccaccaccaccccggcatgctcagcggagccccgaggccagccagaccgactctcccgtggagagtccccggcttcggcgggaaagttcagtagattccagaaccatctcggaaccagatgagcaacggtcagagttgcccagggaaagcagctatgacatctacagagtgcccagcagtcagagcatggaggatcgtgggtacagccccgacacgcgtgtggtccgcttcctcaagggcaagagcatcgggctgcggctggcagggggcaatgacgtgggcatcttcgtgtccggggtgcaggcgggcagcccggccgacgggcagggcatccaggagggagatcagattctgcaggtgaatgacgtgccattccagaacctgacacgggaggaggcagtgcagttcctgctggggctgccaccaggcgaggagatggagctggtgacgcagaggaagcaggacattttctggaaaatggtgcagtcccgcgtgggtgactccttctacatccgcactcactttgagctggagcccagtccaccgtctggcctgggcttcacccgtggcgacgtcttccacgtgctggacacgctgcaccccggccccgggcagagccacgcacgaggaggccactggctggcggtgcgcatgggtcgtgacctgcgggagcaagagcggggcatcattcccaaccagagcagggcggagcagctggccagcctggaagctgcccagagggccgtgggagtcgggcccggctcctccgcgggctccaatgctcgggccgagttctggcggctgcggggtcttcgtcgaggagccaagaagaccactcagcggagccgtgaggacctctcagctctgacccgacagggccgctacccgccctacgaacgagtggtgttgcgagaagccagtttcaagcgcccggtagtgatcctgggacccgtggccgacattgctatgcagaagttgactgctgagatgcctgaccagtttgaaatcgcagagactgtgtccaggaccgacagcccctccaagatcatcaaactagacaccgtgcgggtgattgcagaaaaagacaagcatgcgctcctggatgtgaccccctccgccatcgagcgcctcaactatgtgcagtactaccccattgtggtcttcttcatccccgagagccggccggccctcaaggcactgcgccagtggctggcgcctgcctcccgccgcagcacccgtcgcctctacgcacaagcccagaagctgcgaaaacacagcagccacctcttcacagccaccatccctctgaatggcacgagtgacacctggtaccaggagctcaaggccatcattcgagagcagcagacgcggcccatctggacggcggaagatcagctggatggctccttggaggacaacctagacctccctcaccacggcctggccgacagctccgctgacctcagctgcgacagccgcgttaacagcgactacgagacggacggcgagggcggcgcgtacacggatggcgagggctacacagacggcgagggggggccctacacggatgtggatgatgagcccccggctccagccctggcccggtcctcggagcccgtgcaggcagatgagtcccagagcccgagggatcgtgggagaatctcggctcatcagggggcccaggtggacagccgccacccccagggacagtggcgacaggacagcatgcgaacctatgaacgggaagccctgaagaaaaagtttatgcgagtacatgatgcggagtcctccgatgaagacggctatgactggggtccggccactgacctgtgacctctcgaaggctgccagctggtccgtcctccttctccctccctggggctgggactcagtttcccatacagaacccacaaccttacctccctccgcctggtctttaataaacagagtattttcac

SEQ ID NO: 31693 - DNA, 2859 bp, Homo sapiens
  source 1..2859: mol_type = unassigned DNA
atgaacctgtgtggcctcatgcccatcttccccgctcccctcgaccaggtggctgacatggaggagctgaccatctgggaacagcacacggccacactgtccaaggacccccgccggggctttggcattgcgatctctggaggccgagaccggcccggtggatccatggttgtatctgacgtggtacctggagggccggcggagggcaggctacagacaggcgaccacatcgtcatggtgaacggggtttccatggagaatgccacctccgcgtttgccattcagatactcaagacctgcaccaagatggccaacatcacagtgaaacgtccccggaggatccacctgcccgccaccaaagccagcccctccagcccagggcgccaggactcggatgaagacgatgggccccagcgggtggaggaggtggaccagggccggggctatgacggcgactcatccagtggctccggccgctcctgggacgagcgctcccgccggccgaggcctggtcgccggggccgggccggcagccatgggcgtaggagcccaggtggtggctctgaggccaacgggctggccctggtgtccggctttaagcggctgccacggcaggacgtgcagatgaagcctgtgaagtcagtgctggtgaagaggagagacagcgaagagtttggcgtcaagctgggcagtcagatcttcatcaagcacattacagattcgggcctggctgcccggcaccgtgggctgcaggaaggagatctcattctacagatcaacggggtgtctagccagaacctgtcactgaacgacacccggcgactgattgagaagtcagaagggaagctaagcctgctggtgctgagagatcgtgggcagttcctggtgaacattccgcctgctgtcagtgacagcgacagctcgccattggaggaaggcgtgaccatggctgatgagatgtcctctccccctgcagacatctcggacctcgcctcggagctatcgcaggcaccaccatcccacatcccaccaccaccccggcatgctcagcggagccccgaggccagccagaccgactctcccgtggagagtccccggcttcggcgggaaagttcagtagattccagaaccatctcggaaccagatgagcaacggtcagagttgcccagggaaagcagctatgacatctacagagtgcccagcagtcagagcatggaggatcgtgggtacagccccgacacgcgtgtggtccgcttcctcaagggcaagagcatcgggctgcggctggcagggggcaatgacgtgggcatcttcgtgtccggggtgcaggcgggcagcccggccgacgggcagggcatccaggagggagatcagattctgcaggtgaatgacgtgccattccagaacctgacacgggaggaggcagtgcagttcctgctggggctgccaccaggcgaggagatggagctggtgacgcagaggaagcaggacattttctggaaaatggtgcagtcccgcgtgggtgactccttctacatccgcactcactttgagctggagcccagtccaccgtctggcctgggcttcacccgtggcgacgtcttccacgtgctggacacgctgcaccccggccccgggcagagccacgcacgaggaggccactggctggcggtgcgcatgggtcgtgacctgcgggagcaagagcggggcatcattcccaaccagagcagggcggagcagctggccagcctggaagctgcccagagggccgtgggagtcgggcccggctcctccgcgggctccaatgctcgggccgagttctggcggctgcggggtcttcgtcgaggagccaagaagaccactcagcggagccgtgaggacctctcagctctgacccgacagggccgctacccgccctacgaacgagtggtgttgcgagaagccagtttcaagcgcccggtagtgatcctgggacccgtggccgacattgctatgcagaagttgactgctgagatgcctgaccagtttgaaatcgcagagactgtgtccaggaccgacagcccctccaagatcatcaaactagacaccgtgcgggtgattgcagaaaaagacaagcatgcgctcctggatgtgaccccctccgccatcgagcgcctcaactatgtgcagtactaccccattgtggtcttcttcatccccgagagccggccggccctcaaggcactgcgccagtggctggcgcctgcctcccgccgcagcacccgtcgcctctacgcacaagcccagaagctgcgaaaacacagcagccacctcttcacagccaccatccctctgaatggcacgagtgacacctggtaccaggagctcaaggccatcattcgagagcagcagacgcggcccatctggacggcggaagatcagctggatggctccttggaggacaacctagacctccctcaccacggcctggccgacagctccgctgacctcagctgcgacagccgcgttaacagcgactacgagacggacggcgagggcggcgcgtacacggatggcgagggctacacagacggcgagggggggccctacacggatgtggatgatgagcccccggctccagccctggcccggtcctcggagcccgtgcaggcagatgagtcccagagcccgagggatcgtgggagaatctcggctcatcagggggcccaggtggacagccgccacccccagggacagtggcgacaggacagcatgcgaacctatgaacgggaagccctgaagaaaaagtttatgcgagtacatgatgcggagtcctccgatgaagacggctatgactggggtccggccactgacctgtga

SEQ ID NO: 31694 - DNA, 3110 bp, Homo sapiens
  source 1..3110: mol_type = unassigned DNA
agccgggagctgcggagctggagggaggaggacgagagcccggccctcagcccgctgtgactctcctcagccccctcccccagcccggggtgggggccgattgactgtttccaggaccccctcgggtaggggggctggagagcccccaggtggaccatggcggtgagattccaggtggctgacatggaggagctgaccatctgggaacagcacacggccacactgtccaaggacccccgccggggctttggcattgcgatctctggaggccgagaccggcccggtggatccatggttgtatctgacgtggtacctggagggccggcggagggcaggctacagacaggcgaccacatcgtcatggtgaacggggtttccatggagaatgccacctccgcgtttgccattcagatactcaagacctgcaccaagatggccaacatcacagtgaaacgtccccggaggatccacctgcccgccaccaaagccagcccctccagcccagggcgccaggactcggatgaagacgatgggccccagcgggtggaggaggtggaccagggccggggctatgacggcgactcatccagtggctccggccgctcctgggacgagcgctcccgccggccgaggcctggtcgccggggccgggccggcagccatgggcgtaggagcccaggtggtggctctgaggccaacgggctggccctggtgtccggctttaagcggctgccacggcaggacgtgcagatgaagcctgtgaagtcagtgctggtgaagaggagagacagcgaagagtttggcgtcaagctgggcagtcagatcttcatcaagcacattacagattcgggcctggctgcccggcaccgtgggctgcaggaaggagatctcattctacagatcaacggggtgtctagccagaacctgtcactgaacgacacccggcgactgattgagaagtcagaagggaagctaagcctgctggtgctgagagatcgtgggcagttcctggtgaacattccgcctgctgtcagtgacagcgacagctcgccattggaggaaggcgtgaccatggctgatgagatgtcctctccccctgcagacatctcggacctcgcctcggagctatcgcaggcaccaccatcccacatcccaccaccaccccggcatgctcagcggagccccgaggccagccagaccgactctcccgtggagagtccccggcttcggcgggaaagttcagtagattccagaaccatctcggaaccagatgagcaacggtcagagttgcccagggaaagcagctatgacatctacagagtgcccagcagtcagagcatggaggatcgtgggtacagccccgacacgcgtgtggtccgcttcctcaagggcaagagcatcgggctgcggctggcagggggcaatgacgtgggcatcttcgtgtccggggtgcaggcgggcagcccggccgacgggcagggcatccaggagggagatcagattctgcaggtgaatgacgtgccattccagaacctgacacgggaggaggcagtgcagttcctgctggggctgccaccaggcgaggagatggagctggtgacgcagaggaagcaggacattttctggaaaatggtgcagtcccgcgtgggtgactccttctacatccgcactcactttgagctggagcccagtccaccgtctggcctgggcttcacccgtggcgacgtcttccacgtgctggacacgctgcaccccggccccgggcagagccacgcacgaggaggccactggctggcggtgcgcatgggtcgtgacctgcgggagcaagagcggggcatcattcccaaccagagcagggcggagcagctggccagcctggaagctgcccagagggccgtgggagtcgggcccggctcctccgcgggctccaatgctcgggccgagttctggcggctgcggggtcttcgtcgaggagccaagaagaccactcagcggagccgtgaggacctctcagctctgacccgacagggccgctacccgccctacgaacgagtggtgttgcgagaagccagtttcaagcgcccggtagtgatcctgggacccgtggccgacattgctatgcagaagttgactgctgagatgcctgaccagtttgaaatcgcagagactgtgtccaggaccgacagcccctccaagatcatcaaactagacaccgtgcgggtgattgcagaaaaagacaagcatgcgctcctggatgtgaccccctccgccatcgagcgcctcaactatgtgcagtactaccccattgtggtcttcttcatccccgagagccggccggccctcaaggcactgcgccagtggctggcgcctgcctcccgccgcagcacccgtcgcctctacgcacaagcccagaagctgcgaaaacacagcagccacctcttcacagccaccatccctctgaatggcacgagtgacacctggtaccaggagctcaaggccatcattcgagagcagcagacgcggcccatctggacggcggaagatcagctggatggctccttggaggacaacctagacctccctcaccacggcctggccgacagctccgctgacctcagctgcgacagccgcgttaacagcgactacgagacggacggcgagggcggcgcgtacacggatggcgagggctacacagacggcgagggggggccctacacggatgtggatgatgagcccccggctccagccctggcccggtcctcggagcccgtgcaggcagatgagtcccagagcccgagggatcgtgggagaatctcggctcatcagggggcccaggtggacagccgccacccccagggacagtggcgacaggacagcatgcgaacctatgaacgggaagccctgaagaaaaagtttatgcgagtacatgatgcggagtcctccgatgaagacggctatgactggggtccggccactgacctgtgacctctcgaaggctgccagctggtccgtcctccttctccctccctggggctgggactcagtttcccatacagaacccacaaccttacctccctccgcctggtctttaataaacagagtattttcac

SEQ ID NO: 31695 - DNA, 2894 bp, Homo sapiens
  source 1..2894: mol_type = unassigned DNA
caggcacccgggccctggcacctgctgcctgcccagaggccacccagcctcctagacaggacccccgccggggctttggcattgcgatctctggaggccgagaccggcccggtggatccatggttgtatctgacgtggtacctggagggccggcggagggcaggctacagacaggcgaccacatcgtcatggtgaacggggtttccatggagaatgccacctccgcgtttgccattcagatactcaagacctgcaccaagatggccaacatcacagtgaaacgtccccggaggatccacctgcccgccaccaaagccagcccctccagcccagggcgccaggactcggatgaagacgatgggccccagcgggtggaggaggtggaccagggccggggctatgacggcgactcatccagtggctccggccgctcctgggacgagcgctcccgccggccgaggcctggtcgccggggccgggccggcagccatgggcgtaggagcccaggtggtggctctgaggccaacgggctggccctggtgtccggctttaagcggctgccacggcaggacgtgcagatgaagcctgtgaagtcagtgctggtgaagaggagagacagcgaagagtttggcgtcaagctgggcagtcagatcttcatcaagcacattacagattcgggcctggctgcccggcaccgtgggctgcaggaaggagatctcattctacagatcaacggggtgtctagccagaacctgtcactgaacgacacccggcgactgattgagaagtcagaagggaagctaagcctgctggtgctgagagatcgtgggcagttcctggtgaacattccgcctgctgtcagtgacagcgacagctcgccattggaggacatctcggacctcgcctcggagctatcgcaggcaccaccatcccacatcccaccaccaccccggcatgctcagcggagccccgaggccagccagaccgactctcccgtggagagtccccggcttcggcgggaaagttcagtagattccagaaccatctcggaaccagatgagcaacggtcagagttgcccagggaaagcagctatgacatctacagagtgcccagcagtcagagcatggaggatcgtgggtacagccccgacacgcgtgtggtccgcttcctcaagggcaagagcatcgggctgcggctggcagggggcaatgacgtgggcatcttcgtgtccggggtgcaggcgggcagcccggccgacgggcagggcatccaggagggagatcagattctgcaggtgaatgacgtgccattccagaacctgacacgggaggaggcagtgcagttcctgctggggctgccaccaggcgaggagatggagctggtgacgcagaggaagcaggacattttctggaaaatggtgcagtcccgcgtgggtgactccttctacatccgcactcactttgagctggagcccagtccaccgtctggcctgggcttcacccgtggcgacgtcttccacgtgctggacacgctgcaccccggccccgggcagagccacgcacgaggaggccactggctggcggtgcgcatgggtcgtgacctgcgggagcaagagcggggcatcattcccaaccagagcagggcggagcagctggccagcctggaagctgcccagagggccgtgggagtcgggcccggctcctccgcgggctccaatgctcgggccgagttctggcggctgcggggtcttcgtcgaggagccaagaagaccactcagcggagccgtgaggacctctcagctctgacccgacagggccgctacccgccctacgaacgagtggtgttgcgagaagccagtttcaagcgcccggtagtgatcctgggacccgtggccgacattgctatgcagaagttgactgctgagatgcctgaccagtttgaaatcgcagagactgtgtccaggaccgacagcccctccaagatcatcaaactagacaccgtgcgggtgattgcagaaaaagacaagcatgcgctcctggatgtgaccccctccgccatcgagcgcctcaactatgtgcagtactaccccattgtggtcttcttcatccccgagagccggccggccctcaaggcactgcgccagtggctggcgcctgcctcccgccgcagcacccgtcgcctctacgcacaagcccagaagctgcgaaaacacagcagccacctcttcacagccaccatccctctgaatggcacgagtgacacctggtaccaggagctcaaggccatcattcgagagcagcagacgcggcccatctggacggcggaagatcagctggatggctccttggaggacaacctagacctccctcaccacggcctggccgacagctccgctgacctcagctgcgacagccgcgttaacagcgactacgagacggacggcgagggcggcgcgtacacggatggcgagggctacacagacggcgagggggggccctacacggatgtggatgatgagcccccggctccagccctggcccggtcctcggagcccgtgcaggcagatgagtcccagagcccgagggatcgtgggagaatctcggctcatcagggggcccaggtggacagccgccacccccagggacagtggcgacaggacagcatgcgaacctatgaacgggaagccctgaagaaaaagtttatgcgagtacatgatgcggagtcctccgatgaagacggctatgactggggtccggccactgacctgtgacctctcgaaggctgccagctggtccgtcctccttctccctccctggggctgggactcagtttcccatacagaacccacaaccttacctccctccgcctggtctttaataaacagagtattttc

SEQ ID NO: 31696 - DNA, 3075 bp, Homo sapiens
  source 1..3075: mol_type = unassigned DNA
agttccactggcaggggacctgcctccctgttgccaccacaagagaggaaaagttggtcaaacaggtggggaggccagagctacaagcctcgggttccctccccaccacccgtgccaggcaggcacccgggccctggcacctgctgcctgcccagaggccacccagcctcctagacaggtggctgacatggaggagctgaccatctgggaacagcacacggccacactgtccaaggacccccgccggggctttggcattgcgatctctggaggccgagaccggcccggtggatccatggttgtatctgacgtggtacctggagggccggcggagggcaggctacagacaggcgaccacatcgtcatggtgaacggggtttccatggagaatgccacctccgcgtttgccattcagatactcaagacctgcaccaagatggccaacatcacagtgaaacgtccccggaggatccacctgcccgccaccaaagccagcccctccagcccagggcgccaggactcggatgaagacgatgggccccagcgggtggaggaggtggaccagggccggggctatgacggcgactcatccagtggctccggccgctcctgggacgagcgctcccgccggccgaggcctggtcgccggggccgggccggcagccatgggcgtaggagcccaggtggtggctctgaggccaacgggctggccctggtgtccggctttaagcggctgccacggcaggacgtgcagatgaagcctgtgaagtcagtgctggtgaagaggagagacagcgaagagtttggcgtcaagctgggcagtcagatcttcatcaagcacattacagattcgggcctggctgcccggcaccgtgggctgcaggaaggagatctcattctacagatcaacggggtgtctagccagaacctgtcactgaacgacacccggcgactgattgagaagtcagaagggaagctaagcctgctggtgctgagagatcgtgggcagttcctggtgaacattccgcctgctgtcagtgacagcgacagctcgccattggaggacatctcggacctcgcctcggagctatcgcaggcaccaccatcccacatcccaccaccaccccggcatgctcagcggagccccgaggccagccagaccgactctcccgtggagagtccccggcttcggcgggaaagttcagtagattccagaaccatctcggaaccagatgagcaacggtcagagttgcccagggaaagcagctatgacatctacagagtgcccagcagtcagagcatggaggatcgtgggtacagccccgacacgcgtgtggtccgcttcctcaagggcaagagcatcgggctgcggctggcagggggcaatgacgtgggcatcttcgtgtccggggtgcaggcgggcagcccggccgacgggcagggcatccaggagggagatcagattctgcaggtgaatgacgtgccattccagaacctgacacgggaggaggcagtgcagttcctgctggggctgccaccaggcgaggagatggagctggtgacgcagaggaagcaggacattttctggaaaatggtgcagtcccgcgtgggtgactccttctacatccgcactcactttgagctggagcccagtccaccgtctggcctgggcttcacccgtggcgacgtcttccacgtgctggacacgctgcaccccggccccgggcagagccacgcacgaggaggccactggctggcggtgcgcatgggtcgtgacctgcgggagcaagagcggggcatcattcccaaccagagcagggcggagcagctggccagcctggaagctgcccagagggccgtgggagtcgggcccggctcctccgcgggctccaatgctcgggccgagttctggcggctgcggggtcttcgtcgaggagccaagaagaccactcagcggagccgtgaggacctctcagctctgacccgacagggccgctacccgccctacgaacgagtggtgttgcgagaagccagtttcaagcgcccggtagtgatcctgggacccgtggccgacattgctatgcagaagttgactgctgagatgcctgaccagtttgaaatcgcagagactgtgtccaggaccgacagcccctccaagatcatcaaactagacaccgtgcgggtgattgcagaaaaagacaagcatgcgctcctggatgtgaccccctccgccatcgagcgcctcaactatgtgcagtactaccccattgtggtcttcttcatccccgagagccggccggccctcaaggcactgcgccagtggctggcgcctgcctcccgccgcagcacccgtcgcctctacgcacaagcccagaagctgcgaaaacacagcagccacctcttcacagccaccatccctctgaatggcacgagtgacacctggtaccaggagctcaaggccatcattcgagagcagcagacgcggcccatctggacggcggaagatcagctggatggctccttggaggacaacctagacctccctcaccacggcctggccgacagctccgctgacctcagctgcgacagccgcgttaacagcgactacgagacggacggcgagggcggcgcgtacacggatggcgagggctacacagacggcgagggggggccctacacggatgtggatgatgagcccccggctccagccctggcccggtcctcggagcccgtgcaggcagatgagtcccagagcccgagggatcgtgggagaatctcggctcatcagggggcccaggtggacagccgccacccccagggacagtggcgacaggacagcatgcgaacctatgaacgggaagccctgaagaaaaagtttatgcgagtacatgatgcggagtcctccgatgaagacggctatgactggggtccggccactgacctgtgacctctcgaaggctgccagctggtccgtcctccttctccctccctggggctgggactcagtttcccatacagaacccacaaccttacctccctccgcctggtctttaataaacagagtattttcacagc

SEQ ID NO: 31697 - DNA, 4376 bp, Homo sapiens
  source 1..4376: mol_type = unassigned DNA
gaccggtccagctgagcctggtggcggaaaggctgcggccccgcgccagagggccggtggctcctccgggcttctgaggacccgcagggagcgggcctcatcatttctgtctcctgtttctccacttccttctctgttggttggtccactgatgtatggacttgcacatgatgaactgtgaacttctagccacatgtagtgcccttgggtacttggagggagacacttaccataaggaaccagattgcttagagagcgtgaaggatctgatccgctatttgaggcatgaggatgagacacgagatgtgcggcagcagctgggggcagcccagatcctacagagcgaccttctgcccatcctcacccagcaccaccaggacaagcctctctttgatgctgttatcagactgatggtgaacttgacacaaccagccttgctctgttttggcaatctgcctaaggagcccagctttcggcaccattttttgcaggtgctaacttatttgcaggcctacaaagaggcctttgccagtgagaaggcttttggagtcctcagtgaaaccttgtatgagctgctgcagctgggctgggaggaacggcaggaggaagacaacttgctgattgaacggatcctactgctggtcagaaatattctccatgtcccagctgaccttgatcaggagaagattgatgatgacgccagtgcccatgaccagctcctctgggcgattcacctcagcggcctggatgacctgctcctctttctggccagctcgtctgctgaggagcaatggagcctacatgtgctagagattgtctcccttatgtttcgtgaccagaaccccgagcagctggcgggagtagggcagggacgcttagctcaggagcggagtgcagattttgcagaactggaggtgttgcgccagcgagagatggcagaaaagaagactcgagccctccagcgaggcaacaggcattctcgatttgggggctcctatattgtccaggggttgaaatccattggggagagggacctcatctttcacaaaggccttcacaacctacgaaactacagttcagatttgggaaagcagccgaaaaaggtgcctaaacgtcgccaggccgcccgagagctgtccattcagcgccgttctgccctcaatgtgaggctcttcctcagagacttctgctctgagttcctggagaactgttacaaccggctcatgggatcagtaaaggatcacctgcttcgggagaaagctcagcagcatgatgagacctattatatgtgggccttggctttcttcatggccttcaaccgagctgcctccttccggccaggcctggtttctgagaccctcagtgtccgtaccttccacttcattgagcagaacctcaccaactactatgagatgatgctgactgaccgcaaggaagctgcctcctgggcacgccggatgcacttggctctgaaggcctatcaggagctgctggcaacagtgaatgagatggacatatctccagatgaggctgtgagggagagcagccgcatcatcaagaacaatattttctatgtgatggagtaccgagaactattcctggcactttttcgaaagtttgatgagagatgccagccccgctctttccttcgtgacctggtggagaccacccacctcttcctcaaaatgttggagcgattctgtcggagccgtgggaacctggtggtgcagaacaaacaaaagaagagaaggaagaagaagaagaaggtcctagaccaggccattgtttctggtaatgtcccatctagcccagaagaagtggaggctgtgtggccagccctggctgagcagctacagtgctgtgcccagaattctgagctcagcatggactccgtggttccctttgatgcggcctcagaggtgccagtggaggagcagcgggcagaagctatggtacggatccaagactgtctcctggctggccaggccccacaggccctgactctcctgaggtctgctcgggaggtgtggcctgaaggagatgtgtttggctctcaagacatttctccagaggaagagatccagttgctgaaacaaatcctctctgctccacttccccggcagcagggcccagaggaacgtggggcagaggaagaagaagaggaggaggaggaggaagaggaggagttgcaagtggtccaggtgtcggagaaagaatttaattttctggactacctgaaacgctttgcatgttcaactgtcgttcgagcctatgtgctgctactaaggagctaccagcagaatagtgcccacactaaccattgcattgtgaagatgctgcaccggctggcccatgacctcaaaatggaagccctactttttcagctgtcagtcttctgcctcttcaatcgtctgcttagtgaccctgctgctggagcctacaaagagctagtgacttttgccaaatacatcctgggcaaattttttgcactggctgcagtcaaccaaaaagcctttgtggagctgttgttctggaagaacacagctgtggttcgagagatgactgagggctatggctccctggatgacaggtcttccagtcgcagagcacctacatggagccccgaagaagaggctcatcttcgggagctgtacctcgccaataaggacgtggaagggcaggatgtggtggaagccatcttggcccacctgaatactgttcctcgaacacgcaagcagatcatccaccatctggtacagatgggactggctgacagtgtcaaggacttccaaaggaaaggaacccatattgtactgtggacgggggatcaggagttggagctgcagcggctttttgaggaattccgggactcagatgatgtcctgggtcatatcatgaagaatatcacagccaaacgctcacgggcccgaatagtggataaactcttggctctggggctggtggctgagcggcgggagctgtacaagaaacggcagaaaaagttggcatcctccatcttgccaaatggagcggagtccctgaaagatttttgccaggaagatctggaagaagaggaaaacctgcctgaggaagacagcgaagaggaagaagaagggggctcagaagcagaacaagtccagggtagcttagtcctttcaaatgaaaaccttggtcaaagcctgcatcaggaaggcttttctatcccgctcctatggctccagaactgcctgatccgagcagctgatgatcgggaagaggatggctgctcccaggccgttccattggtgccactcacagaggaaaatgaggaagccatggaaaacgaacagtttcagcagctgttgcgcaagctaggggttcggccccctgcctctgggcaggaaaccttctggcgaattccagccaagctgagtcctacccagctccggagggcagcagcttctttgagtcaaccagaggaggaacagaagctgcagccagagctgcagcctaaagtccctggagagcaaggctctgatgaggagcactgtaaagagcaccgagcacaagccctgagggccctcttgctagcccacaagaagaaagcgggcctggcatccccagaggaggaagacgctgttggtaaagagccgctgaaggcagcacccaagaaacgacaattgctggacagcgacgaggaacaggaagaagatgagggcaggaacagagcaccagagttgggagctccaggaatccaaaagaagaaacgataccagattgaggatgatgaggatgactgaagagctaagaagcctaggggtagagatagacacgtttttagatggtgcattcaagtcagagttggaagggtcatacaggacccagaagctcctcttactggacagagcagtagaatcccaggctctttcacggatttaggctgagaaacttcagcagcagtattggacttctctgctgtcagtctttgtttctcccagtttttatcggtatgccccagcagctctctggagatttagttctcttcttctaggaaccatttcttttggttattggagctccttagcaaataagaggagtgagtgaaatagagaaagcaccccggaccccttttattggtctgttcctttggctttctcttggaggtgggtcgcagcaccagatggggagctttatgacatgacaggcgggagttttgtaccacttttagaagataccagatgcctctgtcctcattttgtttcctatgatcatcctctagataccagatagaggcccattcctgcatttgagatagggttggaatatagtactctagatgatgaatgtgtttgctttgtgtttggtattaaacatgtaagattagaagttctcatctc

SEQ ID NO: 31698 - DNA, 4371 bp, Homo sapiens
  source 1..4371: mol_type = unassigned DNA
ggtccagctgagcctggtggcggaaaggctgcggccccgcgccagagggccggtggctcctccgggcttctgaggacccgcagggagcgggcctcatcatttctgtctcctgtttctccacttccttctctgttggttggtccactgatgtatggacttgcacatgatgaactgtgaacttctagccacatgtagtgcccttgggtacttggagggagacacttaccataaggaaccagattgcttagagagcgtgaaggatctgatccgctatttgaggcatgaggatgagacacgagatgtgcggcagcagctgggggcagcccagatcctacagagcgaccttctgcccatcctcacccagcaccaccaggacaagcctctctttgatgctgttatcagactgatggtgaacttgacacaaccagccttgctctgttttggcaatctgcctaaggagcccagctttcggcaccattttttgcaggtgctaacttatttgcaggcctacaaagaggcctttgccagtgagaaggcttttggagtcctcagtgaaaccttgtatgagctgctgcagctgggctgggaggaacggcaggaggaagacaacttgctgattgaacggatcctactgctggtcagaaatattctccatgtcccagctgaccttgatcaggagaagaagattgatgatgacgccagtgcccatgaccagctcctctgggcgattcacctcagcggcctggatgacctgctcctctttctggccagctcgtctgctgaggagcaatggagcctacatgtgctagagattgtctcccttatgtttcgtgaccagaaccccgagcagctggcgggagtagggcagggacgcttagctcaggagcggagtgcagattttgcagaactggaggtgttgcgccagcgagagatggcagaaaagaagactcgagccctccagcgaggcaacaggcattctcgatttgggggctcctatattgtccaggggttgaaatccattggggagagggacctcatctttcacaaaggccttcacaacctacgaaactacagttcagatttgggaaagcagccgaaaaaggtgcctaaacgtcgccaggccgcccgagagctgtccattcagcgccgttctgccctcaatgtgaggctcttcctcagagacttctgctctgagttcctggagaactgttacaaccggctcatgggatcagtaaaggatcacctgcttcgggagaaagctcagcagcatgatgagacctattatatgtgggccttggctttcttcatggccttcaaccgagctgcctccttccggccaggcctggtttctgagaccctcagtgtccgtaccttccacttcattgagcagaacctcaccaactactatgagatgatgctgactgaccgcaaggaagctgcctcctgggcacgccggatgcacttggctctgaaggcctatcaggagctgctggcaacagtgaatgagatggacatatctccagatgaggctgtgagggagagcagccgcatcatcaagaacaatattttctatgtgatggagtaccgagaactattcctggcactttttcgaaagtttgatgagagatgccagccccgctctttccttcgtgacctggtggagaccacccacctcttcctcaaaatgttggagcgattctgtcggagccgtgggaacctggtggtgcagaacaaacaaaagaagagaaggaagaagaagaagaaggtcctagaccaggccattgtttctggtaatgtcccatctagcccagaagaagtggaggctgtgtggccagccctggctgagcagctacagtgctgtgcccagaattctgagctcagcatggactccgtggttccctttgatgcggcctcagaggtgccagtggaggagcagcgggcagaagctatggtacggatccaagactgtctcctggctggccaggccccacaggccctgactctcctgaggtctgctcgggaggtgtggcctgaaggagatgtgtttggctctcaagacatttctccagaggaagagatccagttgctgaaacaaatcctctctgctccacttccccggcagcagggcccagaggaacgtggggcagaggaagaagaagaggaggaggaggaggaagaggaggagttgcaagtggtccaggtgtcggagaaagaatttaattttctggactacctgaaacgctttgcatgttcaactgtcgttcgagcctatgtgctgctactaaggagctaccagcagaatagtgcccacactaaccattgcattgtgaagatgctgcaccggctggcccatgacctcaaaatggaagccctactttttcagctgtcagtcttctgcctcttcaatcgtctgcttagtgaccctgctgctggagcctacaaagagctagtgacttttgccaaatacatcctgggcaaattttttgcactggctgcagtcaaccaaaaagcctttgtggagctgttgttctggaagaacacagctgtggttcgagagatgactgagggctatggctccctggatgacaggtcttccagtcgcagagcacctacatggagccccgaagaagaggctcatcttcgggagctgtacctcgccaataaggacgtggaagggcaggatgtggtggaagccatcttggcccacctgaatactgttcctcgaacacgcaagcagatcatccaccatctggtacagatgggactggctgacagtgtcaaggacttccaaaggaaaggaacccatattgtactgtggacgggggatcaggagttggagctgcagcggctttttgaggaattccgggactcagatgatgtcctgggtcatatcatgaagaatatcacagccaaacgctcacgggcccgaatagtggataaactcttggctctggggctggtggctgagcggcgggagctgtacaagaaacggcagaaaaagttggcatcctccatcttgccaaatggagcggagtccctgaaagatttttgccaggaagatctggaagaagaggaaaacctgcctgaggaagacagcgaagaggaagaagaagggggctcagaagcagaacaagtccagggtagcttagtcctttcaaatgaaaaccttggtcaaagcctgcatcaggaaggcttttctatcccgctcctatggctccagaactgcctgatccgagcagctgatgatcgggaagaggatggctgctcccaggccgttccattggtgccactcacagaggaaaatgaggaagccatggaaaacgaacagtttcagcagctgttgcgcaagctaggggttcggccccctgcctctgggcaggaaaccttctggcgaattccagccaagctgagtcctacccagctccggagggcagcagcttctttgagtcaaccagaggaggaacagaagctgcagccagagctgcagcctaaagtccctggagagcaaggctctgatgaggagcactgtaaagagcaccgagcacaagccctgagggccctcttgctagcccacaagaagaaagcgggcctggcatccccagaggaggaagacgctgttggtaaagagccgctgaaggcagcacccaagaaacgacaattgctggacagcgacgaggaacaggaagaagatgagggcaggaacagagcaccagagttgggagctccaggaatccaaaagaagaaacgataccagattgaggatgatgaggatgactgaagagctaagaagcctaggggtagagatagacacgtttttagatggtgcattcaagtcagagttggaagggtcatacaggacccagaagctcctcttactggacagagcagtagaatcccaggctctttcacggatttaggctgagaaacttcagcagcagtattggacttctctgctgtcagtctttgtttctcccagtttttatcggtatgccccagcagctctctggagatttagttctcttcttctaggaaccatttcttttggttattggagctccttagcaaataagaggagtgagtgaaatagagaaagcaccccggaccccttttattggtctgttcctttggctttctcttggaggtgggtcgcagcaccagatggggagctttatgacatgacaggcgggagttttgtaccacttttagaagataccagatgcctctgtcctcattttgtttcctatgatcatcctctagataccagatagaggcccattcctgcatttgagatagggttggaatatagtactctagatgatgaatgtgtttgctttgtgtttggtattaaacatgtaagattagaagttctca

SEQ ID NO: 31699 - DNA, 1236 bp, Homo sapiens
  source 1..1236: mol_type = unassigned DNA
ggagttcccgagtatcgcgagaagcgcgcttagtctgcacgccgaggtccgcgctgtgtcccgtgttttctgcgtgagaggaaaagatgctagaaccacaggagaatggcgtgattgacctaccagattatgagcatgtagaagatgaaacttttcctcctttcccacctccagcctctccagagagacaagatggtgaaggaactgagcctgatgaagagtcaggaaatggagcacctgttcgtgtacctccaaagagaacagttaaaagaaatatacccaagctggatgctcagagattaatttcagagagaggacttccagccttaaggcatgtatttgataaggcaaaattcaaaggtaaaggtcatgaggctgaagacttgaagatgctaatcagacacatggagcactgggcacataggctattccctaaactgcagtttgaggattttattgacagagttgaatacctgggaagtaaaaaggaagttcagacctgtttaaaacgaattcgacttgatctccctattttacatgaagattttgttagcaataatgatgaagttgcggagaataatgaacatgatgtcacttctactgaattagatccctttctgacaaacttatctgaaagtgagatgtttgcttctgagttaagtagaagcctaacagaagagcaacaacaaagaattgagagaaataaacaactggccttggaaagaaggcaggcaaagctgctgagtaatagtcagaccctaggaaatgatatgttaatgaatacacccagggcacacacggttgaagaggttaatactgatgaggatcaaaaggaggagtcaaatggattaaacgaagacattctggacaatccatgtaatgatgctattgccaatactttaaatgaagaggaaacactgctggaccagtcttttaaaaatgtgcaacagcaacttgatgctacatccagaaatattactgaagctagataagtttccattaagagaaaatgtatctgttaagtcatcgtcctgcaagcttggcgttactatgtattttttcttcttggagtgaaaatccttagatagtaaaactgttatagattattgtttaaaatctgataatctggtatttatttataattatgcttgtcactttagttaaatctatttgttctctttagtgtttgtttttatataggtatttcttcataaaatgattaggaggtaataagca

SEQ ID NO: 31700 - DNA, 1459 bp, Homo sapiens
  source 1..1459: mol_type = unassigned DNA
agtctgcacgccgaggtccgcgctgtgtcccgtgttttctgcgtgagaggaaaagatgctagaaccacaggagaatggcgtgattgacctaccagattatgagcatgtagaagatgaaacttttcctcctttcccacctccagcctctccagagagacaagatggtgaaggaactgagcctgatgaagagtcaggaaatggagcacctgttcgtgtacctccaaagagaacagttaaaagaaatatacccaagctggatgctcagaggctgaagacttgaagatgctaatcagacacatggagcactgggcacataggctattccctaaactgcagtttgaggattttattgacagagttgaatacctgggaagtaaaaaggaagttcagacctgtttaaaacgaattcgacttgatctccctattttacatgaagattttgttagcaataatgatgaagttgcggagaataatgaacatgatgtcacttctactgaattagatccctttctgacaaacttatctgaaagtgagatgtttgcttctgagttaagtagaagcctaacagaagagcaacaacaaagaattgagagaaataaacaactggccttggaaagaaggcaggcaaagctgctgagtaatagtcagaccctaggaaatgatatgttaatgaatacacccagggcacacacggttgaagaggttaatactgatgaggatcaaaaggaggagtcaaatggattaaacgaagacattctggacaatccatgtaatgatgctattgccaatactttaaatgaagaggaaacactgctggaccagtcttttaaaaatgtgcaacagcaacttgatgctacatccagaaatattactgaagctagataagtttccattaagagaaaatgtatctgttaagtcatcgtcctgcaagcttggcgttactatgtattttttcttcttggagtgaaaatccttagatagtaaaactgttatagattattgtttaaaatctgataatctggtatttatttataattatgcttgtcactttagttaaatctatttgttctctttagtgtttgtttttatataggtatttcttcataaaatgattaggaggtaataagcagtttctgctgctggtctgtcattgaatgccttgttttcactaagttgggaggttttgtttctgttttttactgctccttgcaaagcagggctaatccatggacagtgtgcccagagtagtctagttgaagttttttgttttgttttgttttgttttttttgacacagagtctcactctgttggccaggctggagtgcagtggcacagtcttggctcactgcaacctctgcctcctgggctcaagcaattctcctgccttagcctcccgagtagctgggactacaggcgtgtgccaccacgcttggctaatttttgtacttttagtagaga

SEQ ID NO: 31701 - DNA, 727 bp, Homo sapiens
  source 1..727: mol_type = unassigned DNA
cctctgcgggtcctgcctcagccatgatgatccacggcttccagagcagccaccgggatttctgcttcgggccctggaagctgacggcgtccaagacccacatcatgaagtcggcggatgtggagaaattagccgatgaattacatatgccatctctccctgaaatgatgtttggagacaacgttttaagaatccagcatgggtctggctttggaattgagttcaatgctacagatgcgttaagatgtgtaaacaactaccaaggaatgcttaaagtggcctgtgctgaagagtggcaagaaagcaggacggagggtgaacactccaaagaggttattaaaccatatgattggacctatacaacagattataagggaaccttacttggagaatctcttaagttaaaggttgtacctacaacagatcatatagatacagaaaaattgaaagccagagaacagattaagttttttgaagaagttctcctttttgaggatgaacttcatgatcatggagtttcaagcctgagtgtgaagattcctggtggcgggcacctgtagtcccagctactcgggaggctgaggcaggagaagcgtgaacccgggaggcggagcttgcagtgagctgagatcgcaccactgcactccagccctccagcctgggcgacagagcaagactccgtctcaaaaaaaaaaaataaaataaaataaaagaagtagaaaacaca

SEQ ID NO: 31702 - DNA, 1630 bp, Homo sapiens
  source 1..1630: mol_type = unassigned DNA
gggtcggccggcagggggcggggccgggcatggtaacggctcggaagcctaggaggctgggccggagggaggcggaggaaccggtgttcgccgccgccgctgcttcagcttattccttgtggcctctgcgggtcctgcctcagccatgatgatccacggcttccagagcagccaccgggatttctgcttcgggccctggaagctgacggcgtccaagacccacatcatgaagtcggcggatgtggagaaattagccgatgaattacatatgccatctctccctgaaatgatgtttggagacaacgttttaagaatccagcatgggtctggctttggaattgagttcaatgctacagatgcgttaagatgtgtaaacaactaccaaggaatgcttaaagtggcctgtgctgaagagtggcaagaaagcaggacggagggtgaacactccaaagaggttattaaaccatatgattggacctatacaacagattataagggaaccttacttggagaatctcttaagttaaaggttgtacctacaacagatcatatagatacagaaaaattgaaagccagagaacagattaagttttttgaagaagttctcctttttgaggatgaacttcatgatcatggagtttcaagcctgagtgtgaagattagagtaatgccttctagctttttcctgctgttgcggtttttcttgagaattgatggggtgcttatcagaatgaatgacacgagactttaccatgaggctgacaagacctacatgttacgagaatatacgtcacgagaaagcaaaatttctagtttgatgcatgttccaccttccctcttcacggaacctaatgaaatatcccagtatttaccaataaaggaagcagtttgtgagaagctaatatttccagaaagaattgatcctaacccagcagactcacaaaaaagtacacaagtggaataaaatgtgatacaacatatactcactatggaatctgactggacaccttggctatttgtaaggggttatttttattatgagaattaattgccttgtttatgtacagattttctgtagccttaaaggaaaaaaaaataaagatcgttacaggcaggtttcactcaactgctgtttgtactgtctgtcttcacattcatattccagatttatattttctggagttaaatttggatgatttctaaattatcacaaagtgggacctcagcagtagtgatgtgtgtgtctcatgagcagtgagcacagtctgcattcatcatgaaacactatcttctaccaggaggaggttaatgtaaatcaccaaatcccaatgccttgtgactttcataggattcctgatcatgcatgttgatgtactggctcttcactttgggctttctgatgtttattcacacctttggagagttgcaacttgccacatacgaaattagtctcatagtgtagtgaacttcaaccccaaaattttaaaaatgtatttccccccagttttaaattgcctttgaaatttaaaaaaaaaaaatttagacttagtaccagaaccaaaaatacctagatttttggagaacttattacatacatagaaacatgaatatggtttaccactgtgtgtgt

SEQ ID NO: 31703 - DNA, 3913 bp, Homo sapiens
  source 1..3913: mol_type = unassigned DNA
attcccaactgccagtgatctctgaagccgactctgaggctccctctttgctctaacagacagcagcgactttaggctggataatagtcaaattcttacctcgctctttcactgctagtaagatcagattgcgtttctttcagttactcttcaatcgccagtttcttgatctgcttctaaaagaagaagtagagaagataaatcctgtcttcaatacctggaaggaaaaacaaaataacctcaactccgttttgaaaaaaacattccaagaactttcatcagagattttacttagatgatttacacaatgaagaaagtacatgcactttgggcttctgtatgcctgctgcttaatcttgcccctgcccctcttaatgctgattctgaggaagatgaagaacacacaattatcacagatacggagttgccaccactgaaacttatgcattcattttgtgcattcaaggcggatgatggcccatgtaaagcaatcatgaaaagatttttcttcaatattttcactcgacagtgcgaagaatttatatatgggggatgtgaaggaaatcagaatcgatttgaaagtctggaagagtgcaaaaaaatgtgtacaagagataatgcaaacaggattataaagacaacattgcaacaagaaaagccagatttctgctttttggaagaagatcctggaatatgtcgaggttatattaccaggtatttttataacaatcagacaaaacagtgtgaacgtttcaagtatggtggatgcctgggcaatatgaacaattttgagacactggaagaatgcaagaacatttgtgaagatggtccgaatggtttccaggtggataattatggaacccagctcaatgctgtgaataactccctgactccgcaatcaaccaaggttcccagcctttttgaatttcacggtccctcatggtgtctcactccagcagacagaggattgtgtcgtgccaatgagaacagattctactacaattcagtcattgggaaatgccgcccatttaagtacagtggatgtgggggaaatgaaaacaattttacttccaaacaagaatgtctgagggcatgtaaaaaaggtttcatccaaagaatatcaaaaggaggcctaattaaaaccaaaagaaaaagaaagaagcagagagtgaaaatagcatatgaagaaatttttgttaaaaatatgtgaatttgttatagcaatgtaacattaattctactaaatattttatatgaaatgtttcactatgattttctatttttcttctaaaatgcttttaattaatatgttcattaaattttctatgcttattgtacttgttatcaacacgtttgtatcagagttgcttttctaatcttgttaaattgcttattctaggtctgtaatttattaactggctactgggaaattacttattttctggatctatctgtattttcatttaactacaaattatcatactaccggctacatcaaatcagtcctttgattccatttggtgaccatctgtttgagaatatgatcatgtaaatgattatctcctttatagcctgtaaccagattaaggaatacagctcttaaaaaatcaagaacttcctgagtttcacatataaaatggtgacaaacacctgcttctgataaagtttatccaattttgtatttatagtattctattgtaataatagaattctattatgtgcttccctccttagacatagtttttctccttttgtactaaccagtacttccatctatattgagctaaactgtctttgaacagtcaactctgcatcatgtgcctgcctgatttggattggtttcacttttttttttgtttgaccatagcccattctatcagtcaagatgactgaataattgtgtgttaaatacaactcatgataaggagaacctttatggaaacaagaagttttatggcaatcgagagggaattatttatatgtacttcttaatactatgcttcccaatattttttcttactaaaaataacaaaaatatttaaaccttctgaaatctattcagttatcattaggatttgcacacaatgcaactaataattcatgctttaaaaagtaggttatttctgttgaagagaaaattatcagcagggaagagtctactagaaaattcatgtgctagtcattcttggggatttaatattttgctggagttaattcactatatccagacctgtatctttcatttattgctgagccatgtgcagtctggcatctcaacaacctcaacaacctcaacaacctccaagacatgtcagtttctgtagtgttcacctcaaatctgacactggaattggaactgatttagaaacaaccatttcattcatttggtatgactagcttcatgactagcttcatgaatagcttcatgaatagcttcatgacttctcgctaacaatgatagtataattctgcctgttcttcaggattgaaattttgaactcaatttagatttcctgttttccctcatataccacatctaaacagtctccaaatctttatgcttttttttttttttttcgaaaaagttcacccaatccctaggctttttacttttttctttttcttttcttttttcttgtttttttttttttttcattttgttttgttttgttatgtttttttagacagggtcccactctgtcacccaggctggagtgcagtggtgcaatcacaggacactgaaacctcccacctagctgggactagaggtgcaggccaccacaccagctaatttatgtaatttttgtagagacgagtttcaccacgttacctaggcttgtcttgaacacctgggctcaagcaatcttccagccccagcctcccaaagtgctgggattacaggtataaaccacaatgcccccgtttttactctttactgcatccttcccatcagtattaattcctcagaaatttagtacattcctccaccatttcaaaatgctcccagaactcacactagttggtacttaactacaaccttcaacctcaccatttaattttgatgtatgtttttggatttaccaacagtactttctttcatgactactttgatttagttaagaatgctcactgtacactgaatgttaattactcagctaattcacactgatttcctgtttaaaaatatgatcccctccaggccattcatgtgaagtcagggtacagctgatgccagctacagaatcactatgtttcaatatggaatatgaaaagtcctaacacataattgcaaatcattttctactatggtatacaaattttatcattacaaaatagtatcagcttttttcacttaaggaaaataatacatcttcattcaaatattcagtgcataaataattgccttaaattgagtctttgctgtggaatttgagagttttggaaatcaaaggcccttgtgaaacatttcctgttgccatttatttatagatagcaatagcttcaaatgagtgggaaagtctacttaggtgaagtggtaaatagtcactaagattgtataaatagcgcattgatgagttgcctaattgttttctccaacaataaccactggtccattggttcactacttactcaagaaagacatatactgagatggcttgaaatgtttaatgcatgtgaacgttatttttaccgtgttttggaaaaagatcttgatgttattgtcttcctttattttccacaattaagtgcatctaactgtgaattgtatatggaattacattattcagcatatacatatatttacctgctttgttcattctctgtattcaaaattaacagatcatgctgaaaaccactcaaacgattatattttttacattataagaagtaaaatatattattctgaataatg

SEQ ID NO: 31704 - DNA, 1088 bp, Homo sapiens
  source 1..1088: mol_type = unassigned DNA
aacagacagcagcgactttaggctggataatagtcaaattcttacctcgctctttcactgctagtaagatcagattgcgtttctttcagttactcttcaatcgccagtttcttgatctgcttctaaaagaagaagtagagaagataaatcctgtcttcaatacctggaaggaaaaacaaaataacctcaactccgttttgaaaaaaacattccaagaactttcatcagagattttacttagatgatttacacaatgaagaaagtacatgcactttgggcttctgtatgcctgctgcttaatcttgcccctgcccctcttaatgctgattctgaggaagatgaagaacacacaattatcacagatacggagttgccaccactgaaacttatgcattcattttgtgcattcaaggcggatgatggcccatgtaaagcaatcatgaaaagatttttcttcaatattttcactcgacagtgcgaagaatttatatatgggggatgtgaaggaaatcagaatcgatttgaaagtctggaagagtgcaaaaaaatgtgtacaagagataatgcaaacaggattataaagacaacattgcaacaagaaaagccagatttctgctttttggaagaagatcctggaatatgtcgaggttatattaccaggtatttttataacaatcagacaaaacagtgtgaacgtttcaagtatggtggatgcctgggcaatatgaacaattttgagacactggaagaatgcaagaacatttgtgaagatggtccgaatggtttccaggtggataattatggaacccagctcaatgctgtgaataactccctgactccgcaatcaaccaaggttcccagcctttttgttacaaaagaaggaacaaatgatggttggaagaatgcggctcatatttaccaagtctttctgaacgccttctgcattcatgcatccatgttctttctaggattggatagcatttcatgcctatgttaatatttgtgcttttggcatttccttaatatttatatgtatacgtgatgcctttgatagcatactgctaataaagttttaatatttacatgca

SEQ ID NO: 31705 - DNA, 3649 bp, Homo sapiens
  source 1..3649: mol_type = unassigned DNA
gcagtctcagcggttagcagcacaagagatgatttacacaatgaagaaagtacatgcactttgggcttctgtatgcctgctgcttaatcttgcccctgcccctcttaatgctgattctgaggaagatgaagaacacacaattatcacagatacggagttgccaccactgaaacttatgcattcattttgtgcattcaaggcggatgatggcccatgtaaagcaatcatgaaaagatttttcttcaatattttcactcgacagtgcgaagaatttatatatgggggatgtgaaggaaatcagaatcgatttgaaagtctggaagagtgcaaaaaaatgtgtacaagagataatgcaaacaggattataaagacaacattgcaacaagaaaagccagatttctgctttttggaagaagatcctggaatatgtcgaggttatattaccaggtatttttataacaatcagacaaaacagtgtgaacgtttcaagtatggtggatgcctgggcaatatgaacaattttgagacactggaagaatgcaagaacatttgtgaagatggtccgaatggtttccaggtggataattatggaacccagctcaatgctgtgaataactccctgactccgcaatcaaccaaggttcccagcctttttgaatttcacggtccctcatggtgtctcactccagcagacagaggattgtgtcgtgccaatgagaacagattctactacaattcagtcattgggaaatgccgcccatttaagtacagtggatgtgggggaaatgaaaacaattttacttccaaacaagaatgtctgagggcatgtaaaaaaggtttcatccaaagaatatcaaaaggaggcctaattaaaaccaaaagaaaaagaaagaagcagagagtgaaaatagcatatgaagaaatttttgttaaaaatatgtgaatttgttatagcaatgtaacattaattctactaaatattttatatgaaatgtttcactatgattttctatttttcttctaaaatgcttttaattaatatgttcattaaattttctatgcttattgtacttgttatcaacacgtttgtatcagagttgcttttctaatcttgttaaattgcttattctaggtctgtaatttattaactggctactgggaaattacttattttctggatctatctgtattttcatttaactacaaattatcatactaccggctacatcaaatcagtcctttgattccatttggtgaccatctgtttgagaatatgatcatgtaaatgattatctcctttatagcctgtaaccagattaaggaatacagctcttaaaaaatcaagaacttcctgagtttcacatataaaatggtgacaaacacctgcttctgataaagtttatccaattttgtatttatagtattctattgtaataatagaattctattatgtgcttccctccttagacatagtttttctccttttgtactaaccagtacttccatctatattgagctaaactgtctttgaacagtcaactctgcatcatgtgcctgcctgatttggattggtttcacttttttttttgtttgaccatagcccattctatcagtcaagatgactgaataattgtgtgttaaatacaactcatgataaggagaacctttatggaaacaagaagttttatggcaatcgagagggaattatttatatgtacttcttaatactatgcttcccaatattttttcttactaaaaataacaaaaatatttaaaccttctgaaatctattcagttatcattaggatttgcacacaatgcaactaataattcatgctttaaaaagtaggttatttctgttgaagagaaaattatcagcagggaagagtctactagaaaattcatgtgctagtcattcttggggatttaatattttgctggagttaattcactatatccagacctgtatctttcatttattgctgagccatgtgcagtctggcatctcaacaacctcaacaacctcaacaacctccaagacatgtcagtttctgtagtgttcacctcaaatctgacactggaattggaactgatttagaaacaaccatttcattcatttggtatgactagcttcatgactagcttcatgaatagcttcatgaatagcttcatgacttctcgctaacaatgatagtataattctgcctgttcttcaggattgaaattttgaactcaatttagatttcctgttttccctcatataccacatctaaacagtctccaaatctttatgcttttttttttttttttcgaaaaagttcacccaatccctaggctttttacttttttctttttcttttcttttttcttgtttttttttttttttcattttgttttgttttgttatgtttttttagacagggtcccactctgtcacccaggctggagtgcagtggtgcaatcacaggacactgaaacctcccacctagctgggactagaggtgcaggccaccacaccagctaatttatgtaatttttgtagagacgagtttcaccacgttacctaggcttgtcttgaacacctgggctcaagcaatcttccagccccagcctcccaaagtgctgggattacaggtataaaccacaatgcccccgtttttactctttactgcatccttcccatcagtattaattcctcagaaatttagtacattcctccaccatttcaaaatgctcccagaactcacactagttggtacttaactacaaccttcaacctcaccatttaattttgatgtatgtttttggatttaccaacagtactttctttcatgactactttgatttagttaagaatgctcactgtacactgaatgttaattactcagctaattcacactgatttcctgtttaaaaatatgatcccctccaggccattcatgtgaagtcagggtacagctgatgccagctacagaatcactatgtttcaatatggaatatgaaaagtcctaacacataattgcaaatcattttctactatggtatacaaattttatcattacaaaatagtatcagcttttttcacttaaggaaaataatacatcttcattcaaatattcagtgcataaataattgccttaaattgagtctttgctgtggaatttgagagttttggaaatcaaaggcccttgtgaaacatttcctgttgccatttatttatagatagcaatagcttcaaatgagtgggaaagtctacttaggtgaagtggtaaatagtcactaagattgtataaatagcgcattgatgagttgcctaattgttttctccaacaataaccactggtccattggttcactacttactcaagaaagacatatactgagatggcttgaaatgtttaatgcatgtgaacgttatttttaccgtgttttggaaaaagatcttgatgttattgtcttcctttattttccacaattaagtgcatctaactgtgaattgtatatggaattacattattcagcatatacatatatttacctgctttgttcattctctgtattcaaaattaacagatcatgctgaaaaccactcaaacgattatattttttacattataagaagtaaaatatattattctgaataatgaaa

SEQ ID NO: 31706 - DNA, 1119 bp, Homo sapiens
  source 1..1119: mol_type = unassigned DNA
agcagcgactttaggctggataatagtcaaattcttacctcgctctttcactgctagtaagatcagattgcgtttctttcagttactcttcaatcgccagtttcttgatctgcttctaaaagaagaagtagagaagataaatcctgtcttcaatacctggaaggaaaaacaaaataacctcaactccgttttgaaaaaaacattccaagaactttcatcagagattttacttgaacagcagtctcagcggttagcagcacaagagatgatttacacaatgaagaaagtacatgcactttgggcttctgtatgcctgctgcttaatcttgcccctgcccctcttaatgctgattctgaggaagatgaagaacacacaattatcacagatacggagttgccaccactgaaacttatgcattcattttgtgcattcaaggcggatgatggcccatgtaaagcaatcatgaaaagatttttcttcaatattttcactcgacagtgcgaagaatttatatatgggggatgtgaaggaaatcagaatcgatttgaaagtctggaagagtgcaaaaaaatgtgtacaagagataatgcaaacaggattataaagacaacattgcaacaagaaaagccagatttctgctttttggaagaagatcctggaatatgtcgaggttatattaccaggtatttttataacaatcagacaaaacagtgtgaacgtttcaagtatggtggatgcctgggcaatatgaacaattttgagacactggaagaatgcaagaacatttgtgaagatggtccgaatggtttccaggtggataattatggaacccagctcaatgctgtgaataactccctgactccgcaatcaaccaaggttcccagcctttttgttacaaaagaaggaacaaatgatggttggaagaatgcggctcatatttaccaagtctttctgaacgccttctgcattcatgcatccatgttctttctaggattggatagcatttcatgcctatgttaatatttgtgcttttggcatttccttaatatttatatgtatacgtgatgcctttgatagcatactgctaataaagttttaatatttacatgcatagtaaa

SEQ ID NO: 31707 - DNA, 554 bp, Homo sapiens
  source 1..554: mol_type = unassigned DNA
attcccaactgccagtgatctctgaagccgactctgaggctccctctttgctctaacagacagcagcgactttaggctggataatagtcaaattcttacctcgctctttcactgctagtaagatcagattgcgtttctttcagttactcttcaatcgccagtttcttgatctgcttctaaaagaagaagtagagaagataaatcctgtcttcaatacctggaaggaaaaacaaaataacctcaactccgttttgaaaaaaacattccaagaactttcatcagagattttacttgaacagcagtctcagcggttagcagcacaagagatgatttacacaatgaagaaagtacatgcactttgggcttctgtatgcctgctgcttaatcttgcccctgcccctcttaatgctgattctgaggaagatgaagaacacacaattatcacagatacggagttgccaccactgaaacttatgcattcattttgtgcattcaaggcggatgatggcccatgtaaagcaatcatgaaaagatttttcttcaatattttcact

SEQ ID NO: 31708 - DNA, 685 bp, Homo sapiens
  source 1..685: mol_type = unassigned DNA
ctctgaggctccctctttgctctaacagacagcagcgactttaggctggataatagtcaaattcttacctcgctctttcactgctagtaagatcagattgcgtttctttcagttactcttcaatcgccagtttcttgatctgcttctaaaagaagaagtagagaagataaatcctgtcttcaatacctggaaggaaaaacaaaataacctcaactccgttttgaaaaaaacattccaagaactttcatcagagattttacttatgaagtcttgctctgttgcccaggctggagcgcagtggcacaatctcagctcactgaaaccttcgccccctgggctcaagctagccagtcttttagtaaacatttagtcaacaaatctgcaattataacggagtacgggtggctggcaagatggccgaataggaagagctccagtctacagctcccgcagagatcaacgcagaaggaacagcagtctcagcggttagcagcacaagagatgatttacacaatgaagaaagtacatgcactttgggcttctgtatgcctgctgcttaatcttgcccctgcccctcttaatgctgattctgaggaagatgaagaacacacaattatcacagatacggagttgccaccactgaaacttatgcattcattttgtgcattcaaggcggatgatggcc

SEQ ID NO: 31709 - DNA, 804 bp, Homo sapiens
  source 1..804: mol_type = unassigned DNA
aataaacagtcatgtcgctaacacaaagcctgtttggtggtctcttcacatggacgcgcgtgaaatttggtgccgtgactcggatcgggggacctcccttgggagatcaatcccctgtcctcttgttctttgctccgtgagaaagatccacctacgacctcaggtcctcagaccaaccagcccaagaaacatctcaccaatttcaaatccgttactcttcaatcgccagtttcttgatctgcttctaaaagaagaagtagagaagataaatcctgtcttcaatacctggaaggaaaaacaaaataacctcaactccgttttgaaaaaaacattccaagaactttcatcagagattttacttgacaggaaaggccatgtgaggacatagggagaaagcagccaccattggcaagccaagagagagccctcaccaggaacgattggaccagcaccttgatcttggattttctagcctccagaactagatgatttacacaatgaagaaagtacatgcactttgggcttctgtatgcctgctgcttaatcttgcccctgcccctcttaatgctgattctgaggaagatgaagaacacacaattatcacagatacggagttgccaccactgaaacttatgcattcattttgtgcattcaaggcggatgatggcccatgtaaagcaatcatgaaaagatttttcttcaatattttcactcgacagtgcgaagaatttatatatgggggatgtgaaggaaatcagaatcgatttgaaagtctggaagagtgcaaaaaaatgtgtacaagag

SEQ ID NO: 31710 - DNA, 1161 bp, Homo sapiens
  source 1..1161: mol_type = unassigned DNA
attcccaactgccagtgatctctgaagccgactctgaggctccctctttgctctaacagacagcagcgactttaggctggataatagtcaaattcttacctcgctctttcactgctagtaagatcagattgcgtttctttcagttactcttcaatcgccagtttcttgatctgcttctaaaagaagaagtagagaagataaatcctgtcttcaatacctggaaggaaaaacaaaataacctcaactccgttttgaaaaaaacattccaagaactttcatcagagattttacttagatgatttacacaatgaagaaagtacatgcactttgggcttctgtatgcctgctgcttaatcttgcccctgcccctcttaatgctgattctgaggaagatgaagaacacacaattatcacagatacggagttgccaccactgaaacttatgcattcattttgtgcattcaaggcggatgatggcccatgtaaagcaatcatgaaaagatttttcttcaatattttcactcgacagtgcgaagaatttatatatgggggatgtgaaggaaatcagaatcgatttgaaagtctggaagagtgcaaaaaaatgtgtacaagagataatgcaaacaggattataaagacaacattgcaacaagaaaagccagatttctgctttttggaagaagatcctggaatatgtcgaggttatattaccaggtatttttataacaatcagacaaaacagtgtgaacgtttcaagtatggtggatgcctgggcaatatgaacaattttgagacactggaagaatgcaagaacatttgtgaagatggtccgaatggtttccaggtggataattatggaacccagctcaatgctgtgaataactccctgactccgcaatcaaccaaggttcccagcctttttgaatttcacggtccctcatggtgtctcactccagcagacagaggattgtgtcgtgccaatgagaacagattctactacaattcagtcattgggaaatgccgcccatttaagtacagtggatgtgggggaaatgaaaacaattttacttccaaacaagaatgtctgagggcatgtaaaaaaggtttcatccaaagaatatcaaaaggaggcctaattaaaaccaaaagaaaaagaaagaa

SEQ ID NO: 31711 - DNA, 545 bp, Homo sapiens
  source 1..545: mol_type = unassigned DNA
agttactcttcaatcgccagtttcttgatctgcttctaaaagaagaagtagagaagataaatcctgtcttcaatacctggaaggaaaaacaaaataacctcaactccgttttgaaaaaaacattccaagaactttcatcagagattttactttacgggtggctggcaagatggccgaataggaagagctccagtctacagctcccgcagagatcaacgcagaagagatgatttacacaatgaagaaagtacatgcactttgggcttctgtatgcctgctgcttaatcttgcccctgcccctcttaatgctgattctgaggaagatgaagaacacacaattatcacagatacggagttgccaccactgaaacttatgcattcattttgtgcattcaaggcggatgatggcccatgtaaagcaatcatgaaaagatttttcttcaatattttcactcgacagtgcgaagaatttatatatgggggatgtgaaggaaatcagaatcgatttgaaagtctggaagagtgcaaaaaaatgtgtacaagag

SEQ ID NO: 31712 - DNA, 733 bp, Homo sapiens
  source 1..733: mol_type = unassigned DNA
attcccaactgccagtgatctctgaagccgactctgaggctccctctttgctctaacagacagcagcgactttaggctggataatagtcaaattcttacctcgctctttcactgctagtaagatcagattgcgtttctttcagttactcttcaatcgccagtttcttgatctgcttctaaaagaagaagtagagaagataaatcctgtcttcaatacctggaaggaaaaacaaaataacctcaactccgttttgaaaaaaacattccaagaactttcatcagagattttacttgacaggaaaggccatgtgaggacatagggagaaagcagccaccattggcaagccaagagagagccctcaccaggaacgattggaccagcaccttgatcttggattttctagcctccagaactagatgatttacacaatgaagaaagtacatgcactttgggcttctgtatgcctgctgcttaatcttgcccctgcccctcttaatgctgattctgaggaagatgaagaacacacaattatcacagatacggagttgccaccactgaaacttatgcattcattttgtgcattcaaggcggatgatggcccatgtaaagcaatcatgaaaagatttttcttcaatattttcactcgacagtgcgaagaatttatatatgggggatgtgaaggaaatcagaatcgatttgaaagtctggaagagtgcaaaaaaatgtgtacaa

SEQ ID NO: 31713 - DNA, 1362 bp, Homo sapiens
  source 1..1362: mol_type = unassigned DNA
tcccggccccgccccccacctggctccgcgggcagccggagcgcacccggccggaagccgctgtcggggagccggcggtggggctggacgcaggtgcaactgacatgggtgaaccccagggatccatgcggattctagtgacagggggctctgggctggtaggcaaagccatccagaaggtggtagcagatggagctggacttcctggagaggactgggtgtttgtctcctctaaagacgccgatctcacggatacagcacagacccgcgccctgtttgagaaggtccaacccacacacgtcatccatcttgctgcaatggtggggggcctgttccggaatatcaaatacaatttggacttctggaggaaaaacgtgcacatgaacgacaacgtcctgcactcggcctttgaggtgggcgcccgcaaggtggtgtcctgcctgtccacctgtatcttccctgacaagacgacctacccgatagatgagaccatgatccacaatgggcctccccacaacagcaattttgggtactcgtatgccaagaggatgatcgacgtgcagaacagggcctacttccagcagtacggctgcaccttcaccgctgtcatccccaccaacgtcttcgggccccacgacaacttcaacatcgaggatggccacgtgctgcctggcctcatccacaaggtgcacctggccaagagcagcggctcggccctgacggtgtggggtacagggaatccgcggaggcagttcatatactcgctggacctggcccagctctttatctgggtcctgcgggagtacaatgaagtggagcccatcatcctctccgtgggcgaggaagatgaggtctccatcaaggaggcagccgaggcggtggtggaggccatggacttccatggggaagtcacctttgatacaaccaagtcggatgggcagtttaagaagacagccagtaacagcaagctgaggacctacctgcccgacttccggttcacacccttcaagcaggcggtgaaggagacctgtgcttggttcactgacaactacgagcaggcccggaagtgaagctggaagacaggatcaggtgccagcggaccatcggctggcagagcccagcggccaccacccgtcaaccctgccaggagctgagggcaccacccagcaacctgggcctgcattccatccgctctgcagccccaagcatctttccagtggggcccccattcacgttggtcctcagggaaaccagggtcccgggcaggcccggcgctttgctccccacaccagccccctgcgcgtgtccactctgatcctgcatcccactccctgggagccaataaagtgcattttcacaggc

SEQ ID NO: 31714 - DNA, 488 bp, Homo sapiens
  source 1..488: mol_type = unassigned DNA
gttgtttgctgcttgctgcccgagcctgggcgtacccatgggcgcgggtgacagtgcaagtgcttgggacgacaacccgggctcctcatcgcggccggaatccaagaggctgcggcgcgaggtgcaactgacatgggtgaaccccagggatccatgcggattctagtgacagggggctctgggctggtaggcaaagccatccagaaggtggtagcagatggagctggacttcctggagaggactgggtgtttgtctcctctaaagacgccgatctcacggatacagcacagacccgcgccctgtttgagaaggtccaacccacacacgtcatccatcttgctgcaatggtggggggcctgttccggaatatcaaatacaatttggacttctggaggaaaaacgtgcacatgaacgacaacgtcctgcactcggcctttgaggtgggcgcccgcaaggtggtgtcctgcctgtccacctgtatcttccc

SEQ ID NO: 31715 - DNA, 869 bp, Homo sapiens
  source 1..869: mol_type = unassigned DNA
ggtgaggtggcaccggactcagccgcgccctgggccctggatgctccgtgagagtgcaactgacatgggtgaaccccagggatccatgcggattctagtgacagggggctctgggctggtaggcaaagccatccagaaggtggtagcagatggagctggacttcctggagaggactgggtgtttgtctcctctaaagacgccgatctcacggatacagcacagacccgcgccctgtttgagaaggtccaacccacacacgtcatccatcttgctgcaatggtggggggcctgttccggaatatcaaatacaatttggacttctggaggaaaaacgtgcacatgaacgacaacgtcctgcactcggcctttgaggtgggcgcccgcaaggtggtgtcctgcctgtccacctgtatcttccctgacaagacgacctacccgatagatgagaccatgatccacaatgggcctccccacaacagcaattttgggtactcgtatgccaagaggatgatcgacgtgcagaacagggcctacttccagcagtacggctgcaccttcaccgctgtcatccccaccaacgtcttcgggccccacgacaacttcaacatcgaggatggccacgtgctgcctggcctcatccacaaggtgcacctggccaagagcagcggctcggccctgacggtgtggggtacagggaatccgcggaggcagttcatatactcgctggacctggcccagctctttatctgggtcctgcgggagtacaatgaagtggagcccatcatcctctccgtgggcgaggaagatgaggtctccatcaaggaggcagccgaggcggtggtggaggccatggacttccatggggaag

SEQ ID NO: 31716 - DNA, 1324 bp, Homo sapiens
  source 1..1324: mol_type = unassigned DNA
tggacgcaggtgaggtggcaccggactcagccgcgccctgggccctggatgctccgtgcaactgacatgggtgaaccccagggatccatgcggattctagtgacagggggctctgggctggtaggcaaagccatccagaaggtggtagcagatggagctggacttcctggagaggactgggtgtttgtctcctctaaagacgccgatctcacggatacagcacagacccgcgccctgtttgagaaggtccaacccacacacgtcatccatcttgctgcaatggtggggggcctgttccggaatatcaaatacaatttggacttctggaggaaaaacgtgcacatgaacgacaacgtcctgcactcggcctttgaggtgggcgcccgcaaggtggtgtcctgcctgtccacctgtatcttccctgacaagacgacctacccgatagatgagaccatgatccacaatgggcctccccacaacagcaattttgggtactcgtatgccaagaggatgatcgacgtgcagaacagggcctacttccagcagtacggctgcaccttcaccgctgtcatccccaccaacgtcttcgggccccacgacaacttcaacatcgaggatggccacgtgctgcctggcctcatccacaaggtgcacctggccaagagcagcggctcggccctgacggtgtggggtacagggaatccgcggaggcagttcatatactcgctggacctggcccagctctttatctgggtcctgcgggagtacaatgaagtggagcccatcatcctctccgtgggcgaggaagatgaggtctccatcaaggaggcagccgaggcggtggtggaggccatggacttccatggggaagtcacctttgatacaaccaagtcggatgggcagtttaagaagacagccagtaacagcaagctgaggacctacctgcccgacttccggttcacacccttcaagcaggcggtgaaggagacctgtgcttggttcactgacaactacgagcaggcccggaagtgaagctggaagacaggatcaggtgccagcggaccatcggctggcagagcccagcggccaccacccgtcaaccctgccaggagctgagggcaccacccagcaacctgggcctgcattccatccgctctgcagccccaagcatctttccagtggggcccccattcacgttggtcctcagggaaaccagggtcccgggcaggcccggcgctttgctccccacaccagccccctgcgcgtgtccactctgatcctgcatcccactccctgggagccaataaagtgcattttcacaggc

SEQ ID NO: 31717 - DNA, 871 bp, Homo sapiens
  source 1..871: mol_type = unassigned DNA
ggccccctcccctaagggctggccctggggccctgccgggggagcccgagcaggtttccggctcccaggatgggatccttgagggtggctgcgccccgaggcctgtcctgccctggaggaatctggctcgccagggctctccaggaccagccagcctcgagtgggcgtgggctgcacacaggcgccgtctcgtgcctgtccctagcatgcgggctttagctgcgaaccgtgttaacgacctgtgccaggagcccccgtcccaaggtgcaactgacatgggtgaaccccagggatccatgcggattctagtgacagggggctctgggctggtaggcaaagccatccagaaggtggtagcagatggagctggacttcctggagaggactgggtgtttgtctcctctaaagacgccgatctcacggatacagcacagacccgcgccctgtttgagaaggtccaacccacacacgtcatccatcttgctgcaatggtggggggcctgttccggaatatcaaatacaatttggacttctggaggaaaaacgtgcacatgaacgacaacgtcctgcactcggcctttgaggtgggcgcccgcaaggtggtgtcctgcctgtccacctgtatcttccctgacaagacgacctacccgatagatgagaccatgatccacaatgggcctccccacaacagcaattttgggtactcgtatgccaagaggatgatcgacgtgcagaacagggcctacttccagcagtacggctgcaccttcaccgctgtcatccccaccaacgtcttcgggccccacgacaacttcaacatcgaggatggccacgtgctgcctggcctcatccacaaggtgcacctggccaa

SEQ ID NO: 31718 - DNA, 2944 bp, Homo sapiens
  source 1..2944: mol_type = unassigned DNA
caagagctttcaaatagaactatggtggagaaaagtagtattgatgaaaattccatttctttagaaaaagaagtccgacatgtacaggaacaaaacttagacattttaaaaactgatctttctcttaaatccttttctgaagaaatctatagtgaatcatgtgccctacttccaacctcatctgcagatatagaagaaactgatctttctgagaaaagttgtcctctagaaaatggaggcagaagttccatctcacatttgaaaaaagcagcaagtgaggaaaagcctttaggggttggtgaaatggaagaagaatgcactctagaaccagagttggcagcatttccaaagcaggatggtgggacacaggaatatacagatgccactttggaagaccacagaggtgatgttcaggaagctgacacactccatagacagctctccctgagtcagtgcttcccactcttgatgactgaagaacaacagaatccaggtgaacaaataagtacaaacattcatgcctctggagaagaaaaatgttatgaagaagttcaagttcagaatgaagcttctttctccactttagaaggagaaatgatagaaactagtttttctcaaaatattcctaaattagatgaggcacataccactgaggcagcagaatctgagacctccctaacacaatatttacttgctgctggaaagcgtgaggttcctgaaactaaagacaccagagaccaggcaaagcttgtccagagtgaatcaatcacttcaatggaggtggaagaagtaactttcaacactgtgtatgaatactacaaccagaaacaggaatcactaggtcgtccactttctcctgagtctgacatttccattggtgtgggaagtacaaccagtgaagaaatatctgagttagatcagttttataccccaccatcatctgttgaatattttgaatctccaaagtcccctgacttatattttaatccttcagatataactaaacaatcctcaatacattcaggaggtgagacagttgaaagatattccacacctttaggggaagttgctgaaagatattcaacaccttccgaaggtgaggtaggagaaagatactccacacccccaggggagacactagagagatactccacacctccaggagagactctagagagatactccacacccccaggggaggcactagagagatattctattcctactggaggaccaaaccccactggtacttttaaaacatatccatcaaaaatagaaagggaagacggtacaccaaatgagcatttctacacacctacagaagagaggggttcagcttatgaaatatggcgttccgattcatttggtacacccaatgaagccattgagccaaaagacaatgaaatgcctccatcttttattgaacctctgaccaaaaggaaggtatatgaaaacacaacactaggcttcattgttgaagttgaaggtcttccagttcctggtgtgaaatggtatcgaaataaatctttactagagccagatgaaagaatcaaaatggaaagagtgggtaatgtgtgttcactggaaatttctaacattcaaaaaggagaagggggagagtacatgtgtcatgctgtaaacatcataggggaagcaaagagctttgcaaatgtagacataatgccccaggaagaaagagtggtggcactaccacctccagtaacacatcagcatgtcatggagtttgatttggaacacaccacatcatcaagaacaccttctcctcaagaaattgtcctggaagttgaattaagtgaaaaagacgttaaagaatttgagaagcaggtgaaaatagtgacagttcccgaatttactcctgaccataaaagtatgattgtgagtctagatgttcttccatttaattttgtagatccaaatatggattcaagggagggagaagacaaagaactaaaaattgatttagaagtatttgaaatgcctcctcgctttataatgcctatttgtgattttaaaattccagaaaattcagatgctgtattcaaatgttcagtcatagggatcccgactcccgaagttaagtggtataaagaatatatgtgtattgagccagataatattaaatacgtgattagcgaggagaagggaagtcacactcttaaaattcgaaatgtctgtctttctgatagtgcaacatacaggtgcagagctgtgaattgtgtaggagaggctatctgtcggggattcctcaccatgggagattctgaaatatttgctgtgatagcaaagaaaagcaaagtgactttaagcagtttaatggaagaattggtcttaaagagcaactacacagacagtttttttgaatttcaggtggtggaagggcctcccaggtttatcaaaggtatttctgactgttatgcaccaataggtacagcagcatattttcagtgcttagttcgtggctctccaagacccacggtttactggtacaaagatggaaaattagtccaaggaagaaggttcactgttgaggaaagtggcacagggttccataacctgtttataacaagcttagtaaagagtgatgaaggagagtataggtgtgtagctacaaacaaatcaggaatggctgagagctttgcagcactcaccttaacttaaaatgtaatgttttagtgcctcagtaattattagcattgatctgagtgctttcatattttccaaattatgtggatctaataaacttccaaacaggtccaccatatttgaattcattaccttggagacccctaaagaaataatctctatgtagaaatctcatctttgtaatacatgtaaatattttgttatctgaactgtggaatcatcacttgtgtcaatcatgctgtgtaatatcaaacacaattaaatctctccttggctacct

SEQ ID NO: 31719 - DNA, 17305 bp, Homo sapiens
  source 1..17305: mol_type = unassigned DNA
gagcagtcgtgcattcccagcctcgcctcgggtgtagggattgcatagaaaagcaaaactacacagtcttgactgtgtagttttgtttttaggattagaggctcaccgattcatgtcggagatggtcagaaaaaccaactctccataggacgtcgtttcagaagcaaccttgggcttagtcccaccctttttaggcactcttgagaaatcagagtgcctagaaagatgacaactcaagcaccgacgtttacgcagccgttacaaagcgttgtggtactggagggtagtaccgcaacctttgaggctcacattagtggttttccagttcctgaggtgagctggtttagggatggccaggtgatttccacttccactctgcccggcgtgcagatctcctttagcgatggccgcgctaaactgacgatccccgccgtgactaaagccaacagtggacgatattccctgaaagccaccaatggatctggacaagcgactagtactgctgagcttctcgtgaaagctgagacagcaccacccaacttcgttcaacgactgcagagcatgaccgtgagacaaggaagccaagtgagactccaagtgagagtgactggaatccctacacctgtggtgaagttctaccgggatggagccgaaatccagagctcccttgatttccaaatttcacaagaaggcgacctctacagcttactgattgcagaagcataccctgaggactcagggacctattcagtaaatgccaccaatagcgttggaagagctacttcgactgctgaattactggttcaaggtgaagaagaagtacctgctaaaaagacaaagacaattgtttcgactgctcagatctcagaatcaagacaaacccgaattgaaaagaagattgaagcccactttgatgccagatcaattgcaacagttgagatggtcatagatggtgccgctgggcaacagctgccacataaaacacctcccaggattcctccgaagccaaagtcaagatccccaacaccaccgtctattgctgccaaagcacagctggctcggcagcagtccccatcgcccataagacactccccttccccggtcagacacgtgcgggcaccgaccccatctccggtcaggtccgtgtctccagcagcaagaatctccacatcccccatcaggtctgttaggtctccattgctcatgcgtaagactcaggcatccaccgtggccacaggtcctgaagtgcctcccccttggaagcaagagggctacgtggcctcctcatctgaggctgagatgagagagacaacgctgacaacctctactcagatcaggacagaagagagatgggaagggagatacggtgtccaggagcaagtgaccatcagtggtgctgcgggtgctgccgccagtgtgtcggccagtgctagctacgcagcagaggctgttgccactggtgctaaagaggtgaaacaagatgctgacaaaagtgcagctgttgcgactgttgttgctgccgttgatatggccagagtgagagaaccagtgatcagcgctgtagagcagactgctcagaggacaaccacgactgctgtgcacatccaacctgctcaagaacaggtaagaaaggaagcggagaagactgctgtaactaaggtagtagtggccgccgataaagccaaggaacaagaattaaaatcaagaaccaaagaagtaattaccacaaagcaagagcagatgcacgtaactcatgagcagataagaaaagaaactgaaaaaacatttgtaccaaaggtagtaatttccgcagctaaagccaaagaacaagaaactagaatttctgaagaaattactaagaaacagaaacaagtaactcaagaagcaataagacaggaaactgagataactgctgcatccatggtggtagttgccactgcaaagtccacaaaactagaaacagtcccgggagctcaagaagaaactaccacacaacaagatcaaatgcacctaagttatgaaaagataatgaaggaaactaggaaaacagttgtacctaaagtcatagttgccacacccaaagtcaaagaacaagatttagtatcaagaggtagagaaggcattactaccaaaagagaacaagtgcaaataactcaggagaagatgagaaaggaagccgagaaaactgccttgtctacaatagcagttgctactgctaaagccaaagaacaagaaacaatactgagaactagagaaactatggctactagacaagaacaaatccaagttacccatggaaaggtggacgttggaaaaaaggctgaagctgtagcaacagttgttgctgcagtagaccaggcccgagtcagagagcccagagagcctgggcatcttgaagaatcctatgctcagcagaccactttggagtacggatataaggaacgcatttccgccgcaaaggtagctgagcctccccaacgtccagcctcagaaccccacgttgtccctaaagcagtcaagcctagagtaatccaggctccttctgagactcatatcaaaactactgatcaaaagggaatgcacatatcatcacagatcaagaaaactacagatctaacaacggaaagattagtccatgtggataaacgcccccgcacagctagccctcactttactgtttcaaaaatttctgttcctaagacagaacatggatatgaggcatcaatagccggtagtgctattgccacattacaaaaagagttgtcagccacatcttctgctcagaagatcaccaaatcggtgaaggctcctactgtgaagcccagtgagactagagtaagggcagagcccacacccttgccacagttccccttcgctgacacaccagatacttacaagagtgaagctggcgttgaggtgaaaaaggaagtaggggtgagcatcactggcaccaccgtccgtgaagagcgctttgaagtactgcacggacgcgaagccaaggtaacagaaacagcaagagtaccagcacctgttgaaattcctgttactccaccaactttggtctcgggcttaaaaaatgtgactgtcatagaaggtgaatctgtcaccttggagtgccacatctctggatacccatccccgacagtgacatggtacagggaagactaccaaatcgaaagttccattgacttccagataaccttccagagtggaattgctcgtcttatgattcgcgaagcatttgcggaagacagcgggcgatttacttgcagtgctgtaaatgaggctggaaccgtcagcacatcctgctatctggctgtgcaggtgtcagaagaatttgaaaaggaaaccacagccgtgactgagaaatttactacagaagagaaacgctttgttgagtcaagagatgtggttatgactgatactagcctcacagaggaacaagcagggcctggagaacctgccgcgccttactttattacaaaaccagtggtccagaaactggtggaaggtgggagcgtggtgtttggatgccaagttggcggcaacccaaagccccatgtatactggaaaaaatctggtgttcctctaaccactggatacagatacaaagtgagttacaacaaacaaaccggtgaatgcaagctggtgatttctatgacttttgctgatgatgctggagaatacactattgttgttcgcaataagcatggagaaacttctgcatctgcttccttgcttgaagaagctgattatgagttactgatgaagtcccagcaagaaatgctttatcagacacaagtgactgcatttgttcaagaacctaaagttggagaaacagcacctggatttgtatactctgagtatgaaaaagagtatgaaaaagaacaagccttaattaggaagaaaatggccaaagatactgtagtggtcagaacttatgtagaagatcaggaattccatatttcttcctttgaagagagacttattaaagaaattgaatatagaataataaagactacattagaagaacttcttgaagaagatggagaagaaaagatggcagttgacatttctgaatctgaagctgttgaatcaggatttgattcaagaatcaagaattatagaattcttgaggggatgggtgtcacttttcattgcaagatgtctggatatccattaccaaagattgcttggtacaaagatggcaagcgcatcaaacatggagaaagataccaaatggactttctacaagatggcagagctagtctgcgtatacctgttgttcttccagaagatgaaggaatctacactgcatttgccagcaatattaaaggaaatgcaatttgctcagggaaattgtatgtggagcctgctgcaccacttggagctccgacttacattcccacactagagccagtgagcagaatcagatctctctctccacgttcagtgagcaggtctcctatacgcatgtctcctgcacggatgtcacctgcaaggatgtctcctgcacggatgtcccctgcaagaatgtcccctggacgtaggctggaggagacagatgagtcacaacttgagagactatataaaccagtctttgtgttaaaacctgtttctttcaaatgtttagaagggcaaactgccagatttgacttaaaggttgttggtagacctatgccagagacgttctggtttcatgatggccagcaaattgtcaatgactatacccataaagtagtcattaaagaagatggtactcaatcactaattattgtccctgccacacccagtgattctggggaatggactgtggttgcccaaaacagggcaggcagatcttcaatttcagtgattttaactgtggaagctgtggaacatcaggtaaaaccgatgtttgtagaaaaactgaaaaatgtcaatataaaggaaggttcccgacttgaaatgaaagtcagagctacgggtaaccccaaccctgacattgtatggttgaaaaacagtgacatcattgtgcctcataaatatcccaaaatcagaattgaaggaaccaagggagaagctgcccttaaaatcgattccactgtcagccaagattctgcctggtatactgcgactgctattaataaagctggcagagacactacaagatgcaaagtaaatgttgaagttgagtttgcagagcctgagccagagagaaagttaatcatcccacgggggacatatagagcaaaggagattgcagccccagaactggagcccctccatttgcgatatggccaagagcaatgggaagaaggtgatctctatgacaaagagaaacaacagaaaccatttttcaagaaaaaactcacttccttaagacttaagcgctttgggcctgcccactttgaatgcaggctaacacccattggtgacccaacgatggtggtggagtggctccatgatggaaagccacttgaagcagccaacaggctccgtatgatcaatgaatttgggtactgcagccttgattatggcgttgcatattctagagacagtggtatcattacttgcagagccactaacaaatatggaacagatcacacatctgctacccttattgttaaagatgagaaaagtcttgtggaagaatcccaattgcctgaggggaggaaaggcttacagagaattgaagaattagagagaatggctcatgaaggtgcacttacaggtgtaacaacagatcagaaagaaaagcaaaagccagacattgtcttgtacccagagccagttagagtacttgaaggggagactgcaaggttccgctgcagggtaacaggctaccctcagcccaaagtcaactggtacctcaatggacagctcatccgcaaaagcaaaaggttcagagttcgctatgatggtatccattacctggacatcgtggactgcaaatcatatgacacaggtgaagtgaaggtcaccgcggaaaatcctgaaggtgtgatagagcataaagtgaagcttgagattcaacagagggaagattttaggtctgtccttaggagagctcctgaaccaaggcctgagtttcacgtacatgaaccaggaaagcttcagtttgaagtacaaaaagtggatagacctgttgacaccactgaaaccaaagaagttgtgaagttgaaaagggctgaaagaattacccatgaaaaagtgcctgaagagtcggaagagctgcgcagtaaattcaagcgcagaacagaagagggctattatgaagccattaccgctgtggagctcaagtctcgaaagaaggatgaatcctatgaggaactcctcaggaagacaaaagatgaacttctccactggaccaaagagttaactgaagaggaaaagaaagctcttgccgaagaaggcaaaatcacgattccaacttttaaacctgacaagattgaactaagtcctagtatggaggctccaaaaatcttcgaaagaatccagagccaaacagtgggccaaggatctgatgcacacttccgggtcagagtcgtggggaaaccagaccccgaatgtgaatggtacaaaaatggtgtcaaaattgaacggtctgaccggatctactggtactggcccgaagacaatgtttgtgaattggtcataagagatgtgactgctgaggactctgccagcatcatggtaaaagccatcaacatagctggagaaacctccagtcacgcattcttacttgtccaagccaagcaattgatcactttcacacaggaattacaagatgttgttgctaaggaaaaagacactatggcaacctttgaatgtgaaacttcagaaccatttgtcaaagtgaaatggtataaagatggtatggaggttcatgagggagataaatacaggatgcactctgacagaaaggttcacttcctctccatactgaccattgatacgtctgatgctgaagattacagctgtgtacttgtggaagatgaaaatgtcaaaacgactgctaaacttattgttgaaggtgcagttgttgagtttgtgaaagaacttcaggacatagaagttccagaatcatattcaggagaattagagtgcattgtatccccagaaaatatagaaggaaaatggtatcataatgatgtggagcttaaatccaatggcaaatatacaattacatctcgtcgtggacgtcagaacctcacggtcaaggatgtaaccaaggaggaccagggagaatacagctttgtcatcgacgggaaaaagacaacctgtaaattaaagatgaaaccccgccccattgctatcctacaaggacttagtgaccaaaaagtctgtgagggtgacattgttcagcttgaagttaaagtctccttggaaagtgtggaaggcgtctggatgaaagacggccaagaagtgcagcccagtgacagggttcacattgtgatagacaaacaatctcatatgctgctcattgaagacatgactaaggaagatgctggaaattactctttcaccattccagcccttggcctctccaccagtgggcgtgtctctgtctatagtgtggacgtgataacacctctaaaagatgttaatgtgattgaaggcaccaaggctgtgcttgaatgtaaggtgtcagtccctgatgtgacttctgttaagtggtacttaaatgatgaacaaatcaagcctgatgaccgtgtacaggccattgtgaaaggtactaaacagcgactagtcattaaccgaactcatgcttcagacgaaggaccttacaagctgatagttggcagagttgaaaccaactgtaatctctctgtagaaaaaattaaaattatcagaggtcttcgtgaccttacctgtacagaaactcaaaatgtggtgtttgaggttgagctgtcccactctggaattgatgtcctgtggaattttaaggacaaggaaatcaagcccagttctaaatataaaattgaagcacatggaaaaatatataaattgacagttctaaatatgatgaaagatgatgaaggaaaatacacattttacgcgggagaaaatatgacatctggaaaacttactgtggcaggtggggccatctccaagccactcacagatcagaccgtagctgaatcccaggaagctgtgtttgaatgtgaagttgccaacccagattccaaaggcgaatggttgagggatggcaaacacctaccactgactaacaacatcagaagtgagtctgatggccacaaaaggagacttatcattgctgccaccaaattagatgacattggagaatatacctacaaggtggccacctccaaaacatctgccaaactcaaagttgaagctgtcaaaattaagaagactctgaagaacctcacagtgacagaaacacaggatgctgttttcactgtcgagcttacacaccctaatgtcaaaggtgtccagtggatcaaaaatggagttgtgctggaatccaatgaaaagtatgctatctctgtcaaaggaacaatttactctctgaggattaaaaactgtgccatcgtggatgagtctgtttatggcttcaggcttggaaggcttggagccagtgccagactgcacgtggagactgtcaagatcattaaaaagccaaaggatgtgacagccttggaaaatgccactgttgcctttgaagttagtgtttcccatgacactgttccagtaaaatggttccataagagtgtggaaattaagccaagtgacaaacacagactggtctcagaaaggaaagtccacaagctgatgctgcagaacatctccccctcagatgctggggaatacacagctgtggtcgggcaattggaatgcaaagcaaaactgtttgtggagacattacatattacaaaaaccatgaaaaatatcgaggtgcctgagaccaaaactgcctcttttgagtgtgaggtgtcccacttcaatgtcccttccatgtggctgaagaatggtgtggaaattgagatgagtgaaaagttcaagatagttgtgcagggaaaactccatcagctgatcatcatgaacaccagcacagaggactcggcagaatacacatttgtctgtggcaatgaccaagtcagtgccaccctgacagtcaccccaatcatgattacttccatgctgaaagacatcaacgctgaagaaaaagacactattacttttgaggtgacagtgaactatgaaggcatctcttacaaatggttaaagaatggtgtggaaatcaaatcaactgacaagtgccagatgagaaccaaaaagctcacacactcactgaacatcaggaatgttcactttggggatgctgctgactacacctttgtggctggaaaagcaacatcaacagccacactttatgtggaagctcgtcatatagaatttaggaaacacattaaggacattaaggtactggagaagaagcgagccatgtttgaatgtgaagtttctgaacctgacatcactgtacagtggatgaaagatgaccaggaactgcagatcacagacagaataaagattcagaaggagaaatatgtccaccgccttctgatcccatccacccggatgtctgatgctgggaagtacacagtggtggcaggaggcaacgtgtcaactgcaaaactctttgtagaaggcagagatgttcgcatccgaagtattaaaaaggaggttcaggtcattgagaaacagcgtgctgttgttgaatttgaggtcaatgaagacgatgttgatgcccactggtataaagatggcattgaaatcaatttccaagttcaagaacgacacaaatatgtagtggaaagaagaatccaccgaatgtttatctctgagaccagacagagcgatgcaggagaatacacctttgtggcaggaaggaacaggagttctgtcactctctatgtcaatgctcctgaaccgccccaagttctgcaggagctccagcctgtcactgtgcagtctggcaagcctgcccgcttctgtgccgtgatatccggaagaccacagcccaaaatttcctggtacaaggaagagcagctgctttccactggcttcaagtgcaaatttcttcatgatgggcaagaatacacgcttttgctaattgaagccttcccagaggatgcggcagtctatacctgtgaagccaagaatgactatggtgttgccacaacatcagcttcactctcagtggaagttccagaagttgtgtctcctgatcaggaaatgcctgtttatccacctgccatcatcaccccgcttcaggacactgtcacttctgaagggcagccagcccgttttcaatgccgggtttctggaacagatctaaaagtgtcgtggtacagcaaagacaagaaaatcaagccatctcggttctttagaatgactcaatttgaagacacttatcaactggaaattgccgaagcttatccagaagatgaaggaacttacacgtttgttgctagtaatgctgtaggccaagtatcaagcacagccaacctgagtctggaagctcctgaatcaattttgcatgagaggattgaacaagagattgagatggaaatgaaagaattattctctgagggggaatctgaacattcagaaagggatacacgtgacgccttttcagattctgaagacatagaccacaaatccatggctgctaaaagatatgcaagtagaatatcatctacaagctcctggcctgaatattttaagccttcttttacccagaaacttacatttaaatatgttttagagggtgaaccggttgtttttacatgtagattaattgcctgtccaactccagaaatgacttggtttcataacaatcggcccatcccaacaggtcttcgtcggattataaaagctgagagtgatttacaccatcactcttccagcttagagattaaaagggtccaagacagagattctggaagttataggttactagcaattaatagtgaagggtctgcagaatcaactgcatcattgcttgttatccaaaaagggcaagatgagaaatatttagaatttctgaaaagagcagaacggacacatgaaaatgtggaggctttagttgaaaggggagaagataggataaaggttgacctgaggtttactggctctccctttaacaaaaaacaagatgtggaacaaaagggaatgatgagaactatacattttaagacaatgagttctgccaagaaaacagattacatgtatgatgaagaatatttagaaagtaaatctgacataagaggttggcttaatgtaggtgaaagtttcctggacaaggagaccaaagtgaagttgcaacgtttaagggaggctagaaaaacattaatggagaaaaagaaattatctcttttagatacgtcttctgaaataagctcaagaactttgagaagtgaagctagtgataaagatattctgttctctagagaggacatgaaaatcagatctatgtctgatctagctgaaagttataaggtagatcattcagctgagagtattgtgcaaaatccacatgccctttctaatcaaatggatcaaaatatagaatctgaggaacttcccacaagctttcaaactattgttgatgaagaaattttccagactgaaataagaatgagccaagaagcactggtaaaggaaagtctaccaaaagaccatttatatggtgaaattctagtaaatgaaaatacccaagcaagaggacagctggaagaaattatggccaatactacaattggagagtcatccacatatatcactaatgtatgtgagaaggaggaagtatatgagactcctgaaaatgtgtctcaagctattacaccacatgccagcgaatcttttggtacacttgtaaatgttgaagaaagtgaagaaatagctagtgaaagaataaaaaaggatgatttgagagaattacaactctctgcttctacacgaattgatgaattcaaaaccgaacagaaggaagaaaacatgagattttttgaaaattcttttcgaaaacgcccacaacgttgcccaccttcatttcttcaagaaattgaatctcaagaagtttatgaaggtgacagttgtaattttgtgtgtcattttcaaggatatcctcaacctatagtgacgtggtataacaatgacatgccaatcccacgtaatcaaaactttatcattcattcgttggaaaactattcaatattaactctttcatctgttcatcatcagaatgaaggttctattacttgtgtgctatttaaccaatatggaacagtaaaaacaaccagtatgcttaaagtgaaagcaaaacaaaaacatgatgtcaaagcacataaagtcccagtgttccatgactacttggatgaggaagaagagttagcattggtgtttgaccaagcaaaaggcgcccatccatctatgagtcaagagggccaaacaaatcttcatttgttaaaaactaacccaccagttcctccctctggagacacagaattgctttcctttcctgtagaaattcaggtaacagcagctactcctatcccagaacaggataaagagtctaaagaagtgtttcaaactgaggagctggaacctaaagcaatgcctcaagatcaagttactcaatcaccaaaacacagatttgtatttttgtctgatattactaatgaaccaccaaaaatgttacaagaaatgccaaagcatgccaggtgtagagaaggggattccatcattcttgaatgtttaatatctggtgagccccagccagttgtaacatggtttcaaaatggagtccttttaaagcagaaccagaagtttcagtttgaagaagttaattgtagccaccaattatatattaaggatgttaattctcaagattctggaaaatataaatgtgttgctgaaaacaattcaggggcagttgaaagtgtttcagatctaacagtggagcctgtcacttatagagaaaatagtcaattcgaaaatattggtgaaatttatggaaaatattccagagatcagcaactgcaagaccagggagaatctgtaagggcacatttttatgattatccagctggtccctttactccctggacaaatgtaaaagaatattcagtaagggactattttcaaagccttgagactattgagcaaatagaccagaaagagcaggtgcgttgcataccttctagagaaaaaattcccagatttgtgcatggtgcttcaagaaccataaaaatcagcaagcccatcagggctgaattcatacaatgtcaggctgaagggaaagagagacatgtaagtgaaaaatcaaagctgcaccaagcagagggtactgtttatccatttgttgatgatttcagtgatgtcactattaagaaagaaataagaaataattttggaaaacttggtagatcagaaaaggaaaatgtacaagaatgtgcccaaagtgactatttaccaaatattcactctgagagaatttctgacagttacaatacaaaagattcatctgccattgtatatgaagaatcccttggtgaagagatacactacccggggaaaaaggtgaagcatagaattatcgaatttgaaaaattacatgtagaaaaaggagttctagaaaaaagacctaccagaacatcaattgttaatcctcctcaaaagaagattgatgacaaagccttttcattaaagcaaagagaatcaagatcaagcaatctaaatgcaaatatgtatcaggcagagaaaatgtctccaaatactgaatcagattcatctaacattgcaataaatttaaagctgctttcctctcaaactcataaagaatttgacgcacaagaaagggaacaacaggaaaaaataagtcttatagataaacctgcaatttctaaaagagctgaacatgaatcacctattacatttgacttaaagcagtttcacactcaaataaaacacacagatgtgaaattccaagaattagatagtggtcaaccagaagaagcttattttaaaatccaacatcctgctgacactgagaacattgtatttgatctaaaacaaatgtattctcatataggagatccagctctggagttccaagggcaagaaactagggaacagcaggaaatacattataaagaaaaaattcctagccctgaaacgttacaacctgacacacacaatatctctaaaagtgtgcaaaataatgtatttgccagtcaagaaatttcttccagtcaagagctttcaaatagaactatggtggagaaaagtagtattgatgaaaattccatttctttagaaaaagaagtccgacatgtacaggaacaaaacttagacattttaaaaactgatctttctcttaaatccttttctgaagaaatctatagtgaatcatgtgccctacttccaacctcatctgcagatatagaagaaactgatctttctgagaaaagttgtcctctagaaaatggaggcagaagttccatctcacatttgaaaaaagcagcaagtgaggaaaagcctttaggggttggtgaaatggaagaagaatgcactctagaaccagagttggcagcatttccaaagcaggatggtgggacacaggaatatacagatgccactttggaagaccacagaggtgatgttcaggaagctgacacactccatagacagctctccctgagtcagtgcttcccactcttgatgactgaagaacaacagaatccaggtgaacaaataagtacaaacattcatgcctctggagaagaaaaatgttatgaagaagttcaagttcagaatgaagcttctttctccactttagaaggagaaatgatagaaactagtttttctcaaaatattcctaaattagatgaggcacataccactgaggcagcagaatctgagacctccctaacacaatatttacttgctgctggaaagcgtgaggttcctgaaactaaagacaccagagaccaggcaaagcttgtccagagtgaatcaatcacttcaatggaggtggaagaagtaactttcaacactgtgtatgaatactacaaccagaaacaggaatcactaggtcgtccactttctcctgagtctgacatttccattggtgtgggaagtacaaccagtgaagaaatatctgagttagatcagttttataccccaccatcatctgttgaatattttgaatctccaaagtcccctgacttatattttaatccttcagatataactaaacaatcctcaatacattcaggaggtgagacagttgaaagatattccacacctttaggggaagttgctgaaagatattcaacaccttccgaaggtgaggtaggagaaagatactccacacccccaggggagacactagagagatactccacacctccaggagagactctagagagatactccacacccccaggagagactctagagagatattccacacccccaggagagactctggagagatactccacacccccaggagagactctagagcgatattccacacccccaggggaggcactagagagatattctattcctactggaggaccaaaccccactggtacttttaaaacatatccatcaaaaatagaaagggaagacggtacaccaaatgagcatttctacacacctacagaagagaggggttcagcttatgaaatatggcgttccgattcatttggtacacccaatgaagccattgagccaaaagacaatgaaatgcctccatcttttattgaacctctgaccaaaaggaaggtatatgaaaacacaacactaggcttcattgttgaagttgaaggtcttccagttcctggtgtgaaatggtatcgaaataaatctttactagagccagatgaaagaatcaaaatggaaagagtgggtaatgtgtgttcactggaaatttctaacattcaaaaaggagaagggggagagtacatgtgtcatgctgtaaacatcataggggaagcaaagagctttgcaaatgtagacataatgccccaggaagaaagagtggtggcactaccacctccagtaacacatcagcatgtcatggagtttgatttggaacacaccacatcatcaagaacaccttctcctcaagaaattgtcctggaagttgaattaagtgaaaaagacgttaaagaatttgagaagcaggtgaaaatagtgacagttcccgaatttactcctgaccataaaagtatgattgtgagtctagatgttcttccatttaattttgtagatccaaatatggattcaagggagggagaagacaaagaactaaaaattgatttagaagtatttgaaatgcctcctcgctttataatgcctatttgtgattttaaaattccagaaaattcagatgctgtattcaaatgttcagtcatagggatcccgactcccgaagttaagtggtataaagaatatatgtgtattgagccagataatattaaatacgtgattagcgaggagaagggaagtcacactcttaaaattcgaaatgtctgtctttctgatagtgcaacatacaggtgcagagctgtgaattgtgtaggagaggctatctgtcggggattcctcaccatgggagattctgaaatatttgctgtgatagcaaagaaaagcaaagtgactttaagcagtttaatggaagaattggtcttaaagagcaactacacagacagtttttttgaatttcaggtggtggaagggcctcccaggtttatcaaaggtatttctgactgttatgcaccaataggtacagcagcatattttcagtgcttagttcgtggctctccaagacccacggtttactggtacaaagatggaaaattagtccaaggaagaaggttcactgttgaggaaagtggcacagggttccataacctgtttataacaagcttagtaaagagtgatgaaggagagtataggtgtgtagctacaaacaaatcaggaatggctgagagctttgcagcactcaccttaacttaaaatgtaatgttttagtgcctcagtaattattagcattgatctgagtgctttcatattttccaaattatgtggatctaataaacttccaaacaggtccaccatatttgaattcattaccttggagacccctaaagaaataatctctatgtagaaatctcatctttgtaatacatgtaaatattttgttatctgaactgtggaatcatcacttgtgtcaatcatgctgtgtaatatcaaacacaattaaatctctccttggctacct

SEQ ID NO: 31720 - DNA, 2483 bp, Homo sapiens
  source 1..2483: mol_type = unassigned DNA
aagaattcatcaaattagaacaacatagagttgaagaagaacacagagttgaaaaagttcatagggtaatagaagtttttgaggctgaagaagtggaagtatttgaaaaaccaaaagctccacctaaagggcctgagatatctgagaaaatcatccctccaaaaaaaccgcccactaaagttgttcctcgaaaagagccaccagctaaagtaccggaggtgcctaagaaaattgtggtagaagaaaaagtacgtgttcctgaagagcccagagttccaccaactaaagcacccgaagtacccaagaaaattgtcccagaagaaaaagttcgtgaagctgttctgaaaaagcctgaagttccaccagctaaagttcctgggatgcctaagaaaagtgttcaagaagaaaaatcacctattgttatttctgaagacacagagatgtacatttatgaagcatctgaagaagcagtcctagaagaaaaagtacttgtgactcaacctcaaaagacaaaacccaaactagcaaaagtgcctgagccacccaagaaagttgttccagaagacaaaatatatgtgactattcctaaaaagagagaaacaccagcaactaaagaacctgatacaaccagaggcatttttccagaggtggagccacctgaggctattcctgaaattccagaacatcctccaactgaagagtttgaagtcttcaaggaagtcattccagagggagaaactcctattgttaaaagaagaaaaacaccatcaccaacagcaccagaagctatgaaagaagttgtccctgaaatgaaaatatttgaggatgtacctgaagagccagaaactccacgtatgaaaacgcccgaagctcctcaagaaattattcctgccaagacagttccttccaaaaaaagagaacccccatcagttaaagtgcctgaagctctccaagaaattgtccctgaaaagaaaacgcttgtggttcctctcagaaagcctgaagtccttcctgatgaagtgccggaggctctcagagaagttgtcccggaaaagaaagtgcatcctccccaaagggctgaagttgtacctgtcaaagtgcacgaagctcccaaagagattatccctgaaaagaaagtgtcggtggtgcctcctaaaaagcctgaagtcccacctgttaaagtgccagaagcttccaaagaggttatccgcgaagagaaagtgcccttggctcctcctaaagagcctgaagtcccacctgttaaagtaccagagcctcccaaagaagtagttcctgaaaagaaagcgccagtggctcctcctaaagagcctgaagtcccacctgttaaagtgcctgaggctcccaaagaagttgttcctgaaaagaaagtgccagtgcctcctcctaaaaagcctgaagtgccacccacaaaagtcccagaggtgccaaaggcagctgtcccagaaaagaagttgcctgaagctattcctcccaaaccggaaagtcctccccctgaagtgcctgaagtgctgccaccgaaggaagtggtcccagaaaagaaagtaccggtgcctcctgccaaaaagccagaagctccacctcctaaagttcctgaagctcctaaagaagttgtacttgaaaagaaagcatctgtggctgtgcccaaaaaaccggaagccccacgtgcaaaagtgcctgaagctgctcaagaagttgtcccagaaaagaaaattcccaaggcaccaatcaaaaaaccagaagcccccgcagttacagtgcctgaagtcccacaagaaattgtgccagaaaagaaaacactggtgcttcctaaaaagccagaagttccacctgttacagtgccagaggctcccaaagaagttgtccttgaaaagaaagtgccctcggctcctcctaaaaagcctgaagtcccacctgttaaagtgcctgaggctcccaaagaagttgttcctgaaaagaaagtgccagtgcctcctcctaaaaagcctgaagtgccacccacaaaagtcccagaggtgccaaaggcagctgtcccagaaaagaaggtgcctgaagctattcctcccaaaccggaaagtcctccccctgaagtgcctgaagtgctgccaccgaaggaagtggtcccagaaaagaaagtaccggtgcctcctgccaaaaagccagaagctccacctcctaaagttcctgaagctcctaaagaagttgtacttgaaaagaaagcatctgtggctgtgcccaaaaaaccggaagccccacgtgcaaaagtgcctgaagctgctcaagaagttgtcccagaaaagaaaattcccaaggcaccaatcaaaaaaccagaagcccccgcagttacagtgccagaagttcctcaagaagccgcagaaaaagaaattcccgtggctccacccaaaaaaccagaagctccgattgtcccagtgcctgaagctcaagaagttgtcccagaaaagaaa

SEQ ID NO: 31721 - DNA, 1285 bp, Homo sapiens
  source 1..1285: mol_type = unassigned DNA
gttgttcctgaaaagaaggtgcctctggtggttcccaaaaagccagaagccccacctgctaaagtgcctgaagttccaaaagaagttgttccagaaaagaaagtagctgttcccaaaaagccagaagtcccaccagcaaaagtgccagaagtgccaaagaaacctgtcttggaagagaaaccagctgttcctgttccagaaagagcggagtctcctcccccagaagtatatgaagaacctgaggaaattgctcctgaagaggaaattgctcctgaagaggaaaagccagttcctgttgcagaagaggaggaaccagaggttccacctccagcagtgcctgaagagcccaagaagatcatcccagagaagaaagttcctgtcatcaaaaaaccagaagcaccgcctcctaaagaacctgagatgccaaagaaagttgttccagtgaagaaggtcccaactgttaagaagccagaaacaccagcagctaaagtgcctgaggtgcccaagaaacttgttccagtaaagaaagaacctgtgcctgttaccaaaaaaccagaagttcttccagaaaaagtgcccaaagtgcctgagaaaatcatcccagaaaaggaagtgtctgtgcctatccctgcagagccagaagttccacctgctgaagttgaagagactcctgaggaaataatatatgaagaaaaagcatctataaccattggtagaaaagagactccccctgttgaagaacgtgaaattgaaaagtatattaaacctgaagagcccgaacctgaaccacagcctgaagaaataccagtaaaagaacctgaacctgaaaaggttattgagaagccaaaactcaaaccaagacccccacctcctccacctgctccacctaaggaagatgtgaaggagaaaatattccaacttaaagctattccaaagaagaaagttcctgaaaaacctcaggttccagaaaaagtggagcttacacctctgaaagtaccagaaccaccacctccaaaacctgttgaagaggttgaagtacctactgttacaaaaagggaaaggaagattcctgaaccaacaaaagtgcctgaaatcaagccagcaatacctctccctgcacctgaaccgaaaccaaagcccgaagcagaagtgaaaacaatcaaaccacctcctgtggaacctgaaccaacccccatcgctgccccagtaacagtgccagtggttggaaagaaagcaggtgtacccaaaaagactccttcaccaatagaagccgaaaggagaaagt

SEQ ID NO: 31722 - DNA, 540 bp, Homo sapiens
  source 1..540: mol_type = unassigned DNA
aaagtgccagaagtgccaaagaaacctgtcttggaagagaaaccagctgttcctgttccagaaagagcggagtctcctcccccagaagtatatgaagaacctgaggaaattgctcctgaagaggaaattgctcctgaagaggaaaagccagttcctgttgcagaagaggaggaaccagaggttccacctccagcagtgcctgaagagcccaagaagatcatcccagagaagaaagttcctgtcatcaaaaaaccagaagcaccgcctcctaaagaacctgaacctgaaaaggttattgagaagccaaaactcaaaccaagacccccacctcctccacctgctccacctaaggaagatgtgaaggagaaaatattccaacttaaagctattccaaagaagaaagttcctgaaaaacctcaggttccagaaaaagtggagcttacacctctgaaagtgcctggaggtgaaaagaaagttcgcaaattacttccggaacgtaaacctgaaccaaaggaagaagttgttctgaaaagcggtata

SEQ ID NO: 31723 - DNA, 436 bp, Homo sapiens
  source 1..436: mol_type = unassigned DNA
gaagacacttatcaactggaaattgccgaagcttatccagaagatgaaggaacttacacgtttgttgctagtaatgctgtaggccaagtatcaagcacagccaacctgagtctggaagctcctgaatcaattttgcatgagaggattgaacaagagattgagatggaaatgaaagaattattctctgagggggaatctgaacattcagaaagggatacacgtgacgccttttcagattctgaagacatagaccacaaatccatggctgctaaaagatatgcaagtagaatatcatctacaagctcctggcctgaatattttaagccttcttttacccagaaacttacatttaaatatgttttagagggtgaaccggttgtttttacatgtagattaattgcctgtccaactccagaaatgacttggtttcataaca

SEQ ID NO: 31724 - DNA, 1885 bp, Homo sapiens
  source 1..1885: mol_type = unassigned DNA
taaattgaccattgcagatgttcgagcagaagaccagggtcagtacacctgcaaatatgaagaccttgaaacttcagcagaactcagaatcgaagctgaaccaattcagtttacaaagcgcatacagaacatcgtggtgagtgagcatcagtctgccacctttgagtgtgaagtgtcctttgatgatgccattgtaacatggtacaaaggaccaacagaactgacagagagccagaaatacaacttcaggaatgatggccgctgccattatatgaccatccacaatgtgaccccagacgatgaaggtgtctactcggtcatcgctcggctggagccaagaggtgaagcaagaagcacggcagagctgtacctaacgacgaaagaaatcaaacttgagctgaagcctcctgatattcctgactccagagttccaatcccaaccatgcctatcagagcagtgccaccagaagaaatccctcctgtggttgctcctcctatcccccttttgctaccaacacccgaagaaaagaaaccaccaccaaaacgtattgaagttaccaaaaaggctgtgaagaaagatgccaaaaaagttgttgcaaagcccaaagagatgacaccacgtgaagagattgtcaagaagcctccacctcctactaccttaattccagcaaaagctcctgaaatcattgatgtatcctctaaagctgaagaagtaaaaataatgactataaccagaaagaaagaggttcagaaagaaaaagaagctgtgtatgagaaaaagcaagcagtccacaaggagaagagagtcttcattgaatctttcgaagaaccttatgacgaactggaggtagaaccatacacagagccatttgaacaaccttattatgaagaaccagatgaagactatgaagagattaaggtagaagctaaaaaagaagttcacgaggaatgggaagaagattttgaagaagggcaagaatactatgaaagggaagaaggctatgacgaaggggaggaagagtgggaagaggcttaccaagaaagggaagtaattcaagttcaaaaggaggtctatgaagaatcacatgagagaaaagttccagccaaagtacctgaaaagaaagcaccaccacctcctaaagttataaagaagccagtaattgaaaaaattgaaaagacttctcgaagaatggaggaagaaaaagttcaagtcaccaaagtacctgaagtttcaaagaagattgttccacaaaaaccttcccggactccagtacaggaagaagttattgaagtgaaagtaccagctgtgcatacaaagaagatggttatttcagaagaaaagatgttctttgcttctcacacagaggaggaggtgtcagtcacagtccccgaggtacaaaaggaaattgttactgaagagaaaattcacgttgccatttccaaaagggttgaaccaccacctaaagtccctgagctacctgagaaaccagctccagaagaagtggcccctgttcctatccctaaaaaagtggagcccccagcaccaaaagttcctgaggttcccaagaaacccgtgccagaggagaaaaagccagttcctgtgcctaagaaggaacctgctgctcccccaaaagtcccagaggtgccaaagaaacctgtccctgaagaaaagattcccgttcctgttgcaaagaaaaaggaagctcccccagctaaagtgccagaaataccaaagaagaaagttcctgaagaaaggaaacctgttcctcggaaggaggaagaagttccaccaccaccaaaagtgccagctctgcctaagaaacccgtcccagaggagaaagttgcagtgccagttcctgtcgctaagaaagctcctcctccccga

SEQ ID NO: 31725 - DNA, 2793 bp, Homo sapiens
  source 1..2793: mol_type = unassigned DNA
gtagaagaattcatcaaattagaacaacatagagttgaagaagaacacagagttgaaaaagttcatagggtaatagaagtttttgaggctgaagaagtggaagtatttgaaaaaccaaaagctccacctaaagggcctgagatatctgagaaaatcatccctccaaaaaaaccgcccactaaagttgttcctcgaaaagagccaccagctaaagtaccggaggtgcctaagaaaattgtggtagaagaaaaagtacgtgttcctgaagagcccagagttccaccaactaaagcacccgaagtacccaagaaaattgtcccagaagaaaaagttcgtgaagctgttctgaaaaagcctgaagttccaccagctaaagttcctgggatgcctaagaaaagtgttcaagaagaaaaatcacctattgttatttctgaagacacagagatgtacatttatgaagcatctgaagaagcagtcctagaagaaaaagtacttgtgactcaacctcaaaagacaaaacccaaactagcaaaagtgcctgagccacccaagaaagttgttccagaagacaaaatatatgtgactattcctaaaaagagagaaacaccagcaactaaagaacctgatacaaccagaggcatttttccagaggtggagccacctgaggctattcctgaaattccagaacatcctccaactgaagagtttgaagtcttcaaggaagtcattccagagggagaaactcctattgttaaaagaagaaaaacaccatcaccaacagcaccagaagctatgaaagaagttgtccctgaaatgaaaatatttgaggatgtacctgaagagccagaaactccacgtatgaaaacgcccgaagctcctcaagaaattattcctgccaagacagttccttccaaaaaaagagaacccccatcagttaaagtgcctgaagctctccaagaaattgtccctgaaaagaaaacgcttgtggttcctctcagaaagcctgaagtccttcctgatgaagtgccggaggctctcagagaagttgtcccggaaaagaaagtgcatcctccccaaagggctgaagttgtacctgtcaaagtgcacgaagctcccaaagagattatccctgaaaagaaagtgtcggtggtgcctcctaaaaagcctgaagtcccacctgttaaagtgccagaagcttccaaagaggttatccgcgaagagaaagtgcccttggctcctcctaaagagcctgaagtcccacctgttaaagtaccagagcctcccaaagaagtagttcctgaaaagaaagcgccagtggctcctcctaaagagcctgaagtcccacctgttaaagtgcctgaggctcccaaagaagttgttcctgaaaagaaagtgccagtgcctcctcctaaaaagcctgaagtgccacccacaaaagtcccagaggtgccaaaggcagctgtcccagaaaagaagttgcctgaagctattcctcccaaaccggaaagtcctccccctgaagtgcctgaagtgctgccaccgaaggaagtggtcccagaaaagaaagtaccggtgcctcctgccaaaaagccagaagctccacctcctaaagttcctgaagctcctaaagaagttgtacttgaaaagaaagcatctgtggctgtgcccaaaaaaccggaagccccacgtgcaaaagtgcctgaagctgctcaagaagttgtcccagaaaagaaaattcccaaggcaccaatcaaaaaaccagaagcccccgcagttacagtgcctgaagtcccacaagaaattgtgccagaaaagaaaacactggtgcttcctaaaaagccagaagttccacctgttacagtgccagaggctcccaaagaagttgtccttgaaaagaaagtgccctcggctcctcctaaaaagcctgaagtcccacctgttaaagtgcctgaggctcccaaagaagttgttcctgaaaagaaagtgccagtgcctcctcctaaaaagcctgaagtgccacccacaaaagtcccagaggtgccaaaggcagctgtcccagaaaagaaggtgcctgaagctattcctcccaaaccggaaagtcctccccctgaagtgcctgaagtgctgccaccgaaggaagtggtcccagaaaagaaagtaccggtgcctcctgccaaaaagccagaagctccacctcctaaagttcctgaagctcctaaagaagttgtacttgaaaagaaagcatctgtggctgtgcccaaaaaaccggaagccccacgtgcaaaagtgcctgaagctgctcaagaagttgtcccagaaaagaaaattcccaaggcaccaatcaaaaaaccagaagcccccgcagttacagtgccagaagttcctcaagaagccgcagaaaaagaaattcccgtggctccacccaaaaaaccagaagctccgattgtcccagtgcctgaagctcaagaagttgtcccagaaaagaaagttcctaaggctcctcccacaaaaccagaagccccacctgccacagtgcctgaagtcccacaagaaattgtgccagaaaagaaaacactggtgcttcctaaaaagccagaagttccacctgttacagtgccagaggctcccaaagaagttgtccttgaaaagaaagtgcccttggctcctcctaaaaagcctgaagtcccacctgttaaagtgcctgaggctcccaaagaagttgttcctgaaaagaaagtgccagtgcctcctcctaaaaagcctgaagtgccacccacaaaagtcccagaggtg

SEQ ID NO: 31726 - DNA, 2123 bp, Homo sapiens
  source 1..2123: mol_type = unassigned DNA
atatgaagaaccggggacagtgctcagtaatcaatagtctgcagttctgcacccacgtgctcctgggtactctgccgtccccacagggtcctcagctcagcccctgtcactgcctctcctgccaccctttgtccactcggcagtgttctcactcctcatccccccacacccaccacctgtctgccagcctcttgcaccatgagttgctactcctggggtgctggactgtccccacagccatctgtctcccctgctccccatgaagaagagccagtcccctcccaggtagcacatcagagcgggcaggctccagagctcttctggtcctcttgcagtggccagaaagtggggaaaggggcccagagaggggcagggactgacccatggtcacacagcctatttatggctgatctggagccaggccttctgactatcacccatcagagcccctggattcccatttcacccaacacaggtgttggggtagaactgggggccctccacccctactagcctgactgtctcctgagacctgtctcctaagaccacttacctgaccactggccatggggaaggaaaacacctggccaaggctcatgccccaggttcccaggcatgaagttgactgtctccgcccctgctggtgtggtgagggtgactggggactaggcactaggcctttggtgcaggcgcctgaggacgtggttgcactctcccttctggggatatgcccttgagcccaggcagaggagagcacagccagggcaggacctggcagccctggtacagagcccagagggggcatcagttcctgctggtcctgctctgtttacagacaagctgctgtcctccctgcaaaggggagtgggtggggcagagggcaagtgccaggggggcacaaggctgggcatgtggctggcatgagacggtgtctgagtaatgtcaggcacctggaggcattgaccccaggaccttggaccccagacctctgaccggggggcagccagcgtccaggtaccccaacccctgccctgggtccggcgtccccccattagtgagtcttggctctacttatagcatctgacaccagaggggccgaaaatagcccctggagaagggggaggagggggctatttaaagggcctgggaggggagagagaatgaggagtgatcatggctacctcagagctgagctgcgaggtgtcggaggagaactgtgagcgccgggaggccttctgggcagaatggaaggatctgacactgtccacacggcccgaggagggctgctccctgcatgaggaggacacccagagacatgagacctaccaccagcaggggcagtgccaggtgctggtgcagcgctcgccctggctgatgatgcggatgggcatcctcggccgtgggctgcaggagtaccagctgccctaccagcgggtactgccgctgcccatcttcacccctgccaagatgggcgccaccaaggaggagcgtgaggacacccccatccagcttcaggagctgctggcgctggagacagccctgggtggccagtgtgtggaccgccaggaggtggctgagatcacaaagcagctgccccctgtggtgcctgtcagcaagcccggtgcacttcgtcgctccctgtcccgctccatgtcccaggaagcacagagaggctgagagggactgtgacttgggctccgctgtgcccgccctgggctgggcccttcctggctaggactgtggaggggagctgctggccatggctgctttgtagtttgcccagagttgggggctaggggaggggggagccagaggccaggatgcctgagccccctgagttcccaaagggagggtggcagagacagtgggcactaagggtggagagttgggggccagcacagctgaggaccctcagccccaggagaagggacaaaaggtactggtgagggcaagaggtgcctgggaggagtggccctgatccaggaaaatgtgaggggaatctggaacgctctaggcagaagaagctgggagggagggggaggtgaaaagggcagaggcaaggatggtggggcccccagcaccctctgttagtgccgcaataaatgctcaatcatgtgccagag

SEQ ID NO: 31727 - DNA, 1381 bp, Homo sapiens
  source 1..1381: mol_type = unassigned DNA
ggcaagatggcgggaggggtgctcccgctgaggggcctccgcgccttgtgtcgcgtgctgctcttcctctcgcagttctgcattctgtcgggcggtgagcaatcgcaggcgctggctcagtcaataaaggatccgggcccaacacgcacattcacagtagttcccagggcagcagaaagtactgaaatcccaccttatgtgatgaagtgtccgagcaatggtttgtgtagcaggcttcctgcagactgtatagactgcacaacaaatttctcctgtacctatgggaagcctgtcacttttgactgtgcagtgaaaccatctgttacctgtgttgatcaagacttcaaatcccaaaagaacttcatcattaacatgacttgcagattttgctggcagcttcctgaaacagattacgagtgtaccaactccaccagctgcatgacggtgtcctgtcctcggcagcgctaccctgccaactgcacggtgcgggaccacgtccactgcttgggtaaccgtacttttcccaaaatgctatattgcaattggactggaggctataagtggtctacggctctggctctaagcatcaccctcggtgggtttggagcagaccgtttctacctgggccagtggcgggaaggcctcggcaagctcttcagcttcggtggcctgggaatatggacgctgatagacgtcctgctcattggagttggctatgttggaccagcagatggctctttgtacatttagctgtggtgtgtgcttcagaaaggagcagggcttagaaaaagcccttttgtccgtaggagttgatgtggtgtgagtgatatatttctatgtttttaatgtacagcatctgtactttgtttgccttgataaaggtaagataaatgaaacgctgaactatgctaatctggaatttgtttttatttgcctgaaatatatttttttctgtgaaaaaattaaaacgtacttaagccaggagaatgaattatacagtgattgaaaatccatttaattcctatgacttttgttttgtattgcccaagtcaaactacatcacttgtatctccagcccaaatgtagtctgccttgaaaagtctttcagctgtgactgcaggaagtgggagtgtttttattgttagctaattgctgtgactgcaggaagtgggagtgtttctgttgttggctaattgaagttattaggctcagcttcagtcatgtgtaagttttgcagtgtaatacatatgtagtctggtctgtatatatgaaaatttgaattaaactgcagaatgtttatgtctagttatggtttaaattttcttagtagtatataaaaggtaagagtactgaaaaattaataaaattgcaagttaagaaa

SEQ ID NO: 31728 - DNA, 1329 bp, Homo sapiens
  source 1..1329: mol_type = unassigned DNA
ccggcccggaagtgcgcaggcgctggcaagatggcgggaggggtgctcccgctgaggggcctccgcgccttgtgtcgcgtgctgctcttcctctcgcagttctgcattctgtcgggcggtgaaagtactgaaatcccaccttatgtgatgaagtgtccgagcaatggtttgtgtagcaggcttcctgcagactgtatagactgcacaacaaatttctcctgtacctatgggaagcctgtcacttttgactgtgcagtgaaaccatctgttacctgtgttgatcaagacttcaaatcccaaaagaacttcatcattaacatgacttgcagattttgctggcagcttcctgaaacagattacgagtgtaccaactccaccagctgcatgacggtgtcctgtcctcggcagcgctaccctgccaactgcacggtgcgggaccacgtccactgcttgggtaaccgtacttttcccaaaatgctatattgcaattggactggaggctataagtggtctacggctctggctctaagcatcaccctcggtgggtttggagcagaccgtttctacctgggccagtggcgggaaggcctcggcaagctcttcagcttcggtggcctgggaatatggacgctgatagacgtcctgctcattggagttggctatgttggaccagcagatggctctttgtacatttagctgtggtgtgtgcttcagaaaggagcagggcttagaaaaagcccttttgtccgtaggagttgatgtggtgtgagtgatatatttctatgtttttaatgtacagcatctgtactttgtttgccttgataaaggtaagataaatgaaacgctgaactatgctaatctggaatttgtttttatttgcctgaaatatatttttttctgtgaaaaaattaaaacgtacttaagccaggagaatgaattatacagtgattgaaaatccatttaattcctatgacttttgttttgtattgcccaagtcaaactacatcacttgtatctccagcccaaatgtagtctgccttgaaaagtctttcagctgtgactgcaggaagtgggagtgtttttattgttagctaattgctgtgactgcaggaagtgggagtgtttctgttgttggctaattgaagttattaggctcagcttcagtcatgtgtaagttttgcagtgtaatacatatgtagtctggtctgtatatatgaaaatttgaattaaactgcagaatgtttatgtctagttatggtttaaattttcttagtagtatataaaaggtaagagtactgaaaaattaataaaattgcaagttaagaaata

SEQ ID NO: 31729 - DNA, 6324 bp, Homo sapiens
  source 1..6324: mol_type = unassigned DNA
gcggcgggggctgtgctggcgccggcaggcgcgaggaatcacagagcggggcgcccagcctcatcatggggcggcccacggagacttcccgtgggagtggggtctggtgcaggggcgccccaaaggacgagtgggagatggggacacgcggcgcagagagactcctcgtggatggagccgatggaggcccagtgtagaagagaaaggggtcaaggagacggataaggagccaccagagacgcggggggaattccccgcagaggatgcgggaagccggggaaaggaagggattccggaaggaagggctgagagccgggtcaggtgctggcaggagggctggttggatagaaactggggcgggcccagggcatttggcgtccccgacatgcgtatacacttggagagatgattccctggagatccaagtgcctgtatagacaatcttttctagaagttctaccgttaggtgaggcgagagtagatgtagaaattggagacgagaataaagagtgttttaaaagcgtgcgtggttacaggactggctctgggttcaggggtccccactcactagctgtgagaccttgaacaagtcgcttagcctctctgtgcctcagttttctcatctgtaaggtggggatgatgatggcaatacctgcttcacagagtgaaaattagatgagatgatgtctgtaaaattacgtaagacggtacccaaaagtagtactatttttcccttttcttattagagcaggttgcgcacgttttgatgtccgtgggaatgagcaggtagagagggtggtattgaggccggaggggagagaagggacccacagatggggagagaagtcttgggtgcctgttttatcccaaaccaggggaaggagggaacaggtagggctggctgcaggaaagcttgcaggtatggggtacacagttaaaagggagtgtcttctgatagtcttgatgcaggcctggaggtcgtttgttatgggggtggaggtcctgatgtacattgtggcggtaagatgccgtgctgtctttgccaccagcctgtggcagccctggtgttacaccagggcaggtgggcagtttaatgtatctcaggccagatgacctgccctgcccacctgttgaggctccagtagatagacgtgaaagcacagtataagcataatgcaccactttaatccttttctctgaggagctggaaggcctgtagtcaccatctgagccaaatgtcattcaagtacttcacttgggttacacaccacactttgacccactatctcatttagtcatcacaacaaatgggtgaaataggtattattgtcccattttacagatgcagaatctgagtttcagggaagttaaggactttgtcccagggcccacagttagtaagcagtggacccaggatttcaactcagctctgtctgacctcaaaacccatgatctgaaaccactgtgaaagtttgcaaaacctctgtagcagccaagcaggatggaaagatgtgtagggattgtcttctccatttgatagatgagacaagagctgggtactctgatctccatcccaagcacacagagcttggggccccacagccctggtgtgaatcccactccactaccagaggctgtgtgcctttggaccaggcatcttgcttctctgaccctatatacagctgcagaagaattccttgcaggttgctgtaaggatttggagggaaactgttgcccagcacacagtacacattctgggagccatcgtttccccagtgcacttttcctgcaaatgtggatctacatcccacttggatgctgagaccagctgctgtgatcttgcatttgtttagcgctttgttctccttgaggcagtaaagtggtggcacctgaccggagcatgtagccacctatgacttcctgagtggggtggtgtggggagggccctgaggagtctgtggtcctaggccttggatttcatcagggctttcctgctccttctggttgcctcagtcccaggcaagatagggtcccagaatcttacagcccagaggccacctgttgcaacttcttttttacagatggagtcatcagaacccactgtgaggaagtgacttctccttgaggtcacccagacactccaaacagagcagagcaaaagcgcctagaacttgaaattttggacctgtctccaacaccctggggatttccaccaggaagccttcagtcaccatccaggggatttttatcgccacaaagggtaattcctgctccatccctgctgtgactcagctgtgacgttgaaccacacaagccagagagaagaagataaagtcatcagagctcctactcaccagagagtgaggcccaggccaggactccacaaggctggtcccctgccctggagcaacttaaacaggccctctggccagcctggaaccctgagatggcctccagctcaggcagcagtcctcgcccggcccctgatgagaatgagtttccctttgggtgccctcccaccgtctgccaggacccaaaggagcccagggctctctgctgtgcaggctgtctctctgagaacccgaggaatggcgaggatcagatctgccccaaatgcagaggggaagacctccagtctataagcccaggaagccgtcttcgaactcaggagaaggctcaccccgaggtggctgaggctggaattgggtgcccctttgcaggtgtcggctgctccttcaagggaagcccacagtctgtgcaagagcatgaggtcacctcccagacctcccacctaaacctgctgttggggttcatgaaacagtggaaggcccggctgggctgtggcctggagtctgggcccatggccctggagcagaacctgtcagacctgcagctgcaggcagccgtggaagtggcgggggacctggaggtcgattgctaccgggcaccctgctccgagagccaggaggagctggccctgcagcacttcatgaaggagaagcttctggctgagctggaggggaagctgcgtgtgtttgagaacattgttgctgtcctcaacaaggaggtggaggcctcccacctggccctggccacctctatccaccagagccagctggaccgtgagcgcatcctgagcttggagcagagggtggtggagcttcagcagaccctggcccagaaagaccaggccctgggcaagctggagcagagcttgcgcctcatggaggaggcctccttcgatggcactttcctgtggaagatcaccaatgtcaccaggcggtgccatgagtcggcctgtggcaggaccgtcagcctcttctccccagccttctacactgccaagtatggctacaagttgtgcctgcggctgtacctgaatggagatggcactggaaagagaacccatctgtcgctcttcatcgtgatcatgagaggggagtatgatgcgctgctgccgtggcccttccggaacaaggtcaccttcatgctgctggaccagaacaaccgtgagcacgccattgacgccttccggcctgacctaagctcagcgtccttccagaggccccagagtgaaaccaacgtggccagtggatgcccactcttcttccccctcagcaaactgcagtcacccaagcacgcctacgtgaaggacgacacaatgttcctcaagtgcattgtggagaccagcacttagggtgggcggggctcctgagggagctccaactcagaagggagctagccagaggactgtgatgccctgcccttggcacccaagacctcagggcacaaagatgggtgaaggctggcatgatccaagcaagactgaggggtcgacttcgggctggccatctggttaggatggcaggacgtgggctgggcccacaaaggcaaagggtccagaaggagacaggcagagctgctcccctctgcacggaccatgcgacactgggaggccagtgagccactccggccccgaatgttgaggtggactctcaccaaatgagaagaaaatggaaccaggcttggaaccgtaggacccaagcagagaagctctcgggctaggaagatctctgcagggccgccagggagacctggacacaggcctgctctctttttctccagggtcagaaacaggaccgggtggaagggatggggtgccagtttgaatgcagtctgtccaggctcgtcattggaggtgaacaagcaaacccagacggctccactaggacttcaaattgggggttggatttgaagacttttaagtttccttccagcccagaaagtctctcattctaggcctcctggcccaggtgagtcctagagctacaggggttctggaaacattcaggagcttcctgtcctcccagctcctcactcaccttcagtaacccccactggactgacctggtccacagggcacctgccaccctgggcctggcagctcagcttccccaacacgcaggagcacacccagcccccacatcctgtgcctccatcagctaaacaccacgtcacttcatgcaggtgaaacccagtcactgtgagctcccaggtgcagccagaggcacctcaagaagaagaggggcataaactttcctcttcctgcctagaggccccacctttggtgctttccagaatcccgtaacacctgattaactgaggcatccacttctttcagcagactgatcaggacctccaagccactgagcaatgtataaccccaaagaaataatttttagaatctctttcgaagttttcctaaagtgtatggtttgggagttgtttgtactgagccaggtttgaaaaggccattgctgagtttgaggtggtgccaccagttttgcaggtggcatcagaggctggcatgctggcaggaacatcccctcttagccccagtcttctcttttctataatgagacccaccccagcttgcctccctccctggcttctctgaccctcaaaggagatgccacgcaggacagactggagagagaagcctgggcaatactgcccgcctgtcatggcctggtggtggcccacacctatcttctcaccttggaggccacacccaactttccaaagaccctgagacaagtcaggaccctactactctcccctgctgctttcctgacagcttactcttcctccacctgctgagcctgtgccagactccattgctcaaatcgttagggttgcttctataaaaatgggtcagtagcccttcctgttctctccagcccagcatacaggaggatcaaaggaggtgacggagcatcgtggcacggcagtctcaatgggtcagaaacccaggccagctgggctctaagcctggcatcctgtcatgcttagtccttcagctgaagatcagaggaagcctctcccttgccctctccagctctaggggttttcaggaggcccaactgcaataatggagcactagtgcttttatgtgcaatggtgtcgtccatgcacgacagcagcaaacattctggggctgctttttattgttcccacggctgacagcgtggcagcggagactgtggaggcagtggagactgacttcttcctgctgacagctggatgtcacacatgaaggtctggcctagcgagtgatgggtctaggccctgaaactgatgtcctagcaataacctcttgatccctactcaccgagtgttgagcccaaggggggatttgtagaacaagcccccatgagaaacagctgttactctacacttttgattgcctatttctgatggcaagagatacatactctcttcaaagagcatgagatgcagccattctttcagcaaagcttcattgacacctgcacctgttaactgtgttcgacattgaagggagaaaggcaagatgtgcactctggactcaagaaactcttagttcagtggaggaaatgagcagataagtagatcattatgattgagagtaggagaagcttagagaaagcacagaatcccagatccagctggtgaaggagggaaggcttcaggcctttaagctcagcctgagaatattgtgaaatgcagaggatggggaaaagggaagagtaccgacttgaaaacggagagctgtcttggctgagggcagggtctgtgtggcaggatgggggagggagtcagaagggtcagatgaactggagtgtagacagcatcagatgcagcagtgcccaccgcccccccccccaccccccgccctgcccacagagcacctgctggtaaccctgggcctattgaaagcaggatgagatgataatttaagacactgaatgatttcttttccaacaaagctctatgttaagtgca

SEQ ID NO: 31730 - DNA, 4303 bp, Homo sapiens
  source 1..4303: mol_type = unassigned DNA
acactccaccggaagctccgggcctggccgccggtaggcggtggcggaggcggcgccgagatggagtcatcagaacccactgtgaggaagtgacttctccttgaggtcacccagacactccaaacagagcagagcaaaagcgcctagaacttgaaattttggacctgtctccaacaccctggggatttccaccaggaagccttcagtcaccatccaggggatttttatcgccacaaagggtaattcctgctccatccctgctgtgactcagctgtgacgttgaaccacacaagccagagagaagaagataaagtcatcagagctcctactcaccagagagtgaggcccaggccaggactccacaaggctggtcccctgccctggagcaacttaaacaggccctctggccagcctggaaccctgagatggcctccagctcaggcagcagtcctcgcccggcccctgatgagaatgagtttccctttgggtgccctcccaccgtctgccaggacccaaaggagcccagggctctctgctgtgcaggctgtctctctgagaacccgaggaatggcgaggatcagatctgccccaaatgcagaggggaagacctccagtctataagcccaggaagccgtcttcgaactcaggagaaggctcaccccgaggtggctgaggctggaattgggtgcccctttgcaggtgtcggctgctccttcaagggaagcccacagtctgtgcaagagcatgaggtcacctcccagacctcccacctaaacctgctgttggggttcatgaaacagtggaaggcccggctgggctgtggcctggagtctgggcccatggccctggagcagaacctgtcagacctgcagctgcaggcagccgtggaagtggcgggggacctggaggtcgattgctaccgggcaccctgctccgagagccaggaggagctggccctgcagcacttcatgaaggagaagcttctggctgagctggaggggaagctgcgtgtgtttgagaacattgttgctgtcctcaacaaggaggtggaggcctcccacctggccctggccacctctatccaccagagccagctggaccgtgagcgcatcctgagcttggagcagagggtggtggagcttcagcagaccctggcccagaaagaccaggccctgggcaagctggagcagagcttgcgcctcatggaggaggcctccttcgatggcactttcctgtggaagatcaccaatgtcaccaggcggtgccatgagtcggcctgtggcaggaccgtcagcctcttctccccagccttctacactgccaagtatggctacaagttgtgcctgcggctgtacctgaatggagatggcactggaaagagaacccatctgtcgctcttcatcgtgatcatgagaggggagtatgatgcgctgctgccgtggcccttccggaacaaggtcaccttcatgctgctggaccagaacaaccgtgagcacgccattgacgccttccggcctgacctaagctcagcgtccttccagaggccccagagtgaaaccaacgtggccagtggatgcccactcttcttccccctcagcaaactgcagtcacccaagcacgcctacgtgaaggacgacacaatgttcctcaagtgcattgtggagaccagcacttagggtgggcggggctcctgagggagctccaactcagaagggagctagccagaggactgtgatgccctgcccttggcacccaagacctcagggcacaaagatgggtgaaggctggcatgatccaagcaagactgaggggtcgacttcgggctggccatctggttaggatggcaggacgtgggctgggcccacaaaggcaaagggtccagaaggagacaggcagagctgctcccctctgcacggaccatgcgacactgggaggccagtgagccactccggccccgaatgttgaggtggactctcaccaaatgagaagaaaatggaaccaggcttggaaccgtaggacccaagcagagaagctctcgggctaggaagatctctgcagggccgccagggagacctggacacaggcctgctctctttttctccagggtcagaaacaggaccgggtggaagggatggggtgccagtttgaatgcagtctgtccaggctcgtcattggaggtgaacaagcaaacccagacggctccactaggacttcaaattgggggttggatttgaagacttttaagtttccttccagcccagaaagtctctcattctaggcctcctggcccaggtgagtcctagagctacaggggttctggaaacattcaggagcttcctgtcctcccagctcctcactcaccttcagtaacccccactggactgacctggtccacagggcacctgccaccctgggcctggcagctcagcttccccaacacgcaggagcacacccagcccccacatcctgtgcctccatcagctaaacaccacgtcacttcatgcaggtgaaacccagtcactgtgagctcccaggtgcagccagaggcacctcaagaagaagaggggcataaactttcctcttcctgcctagaggccccacctttggtgctttccagaatcccgtaacacctgattaactgaggcatccacttctttcagcagactgatcaggacctccaagccactgagcaatgtataaccccaaagaaataatttttagaatctctttcgaagttttcctaaagtgtatggtttgggagttgtttgtactgagccaggtttgaaaaggccattgctgagtttgaggtggtgccaccagttttgcaggtggcatcagaggctggcatgctggcaggaacatcccctcttagccccagtcttctcttttctataatgagacccaccccagcttgcctccctccctggcttctctgaccctcaaaggagatgccacgcaggacagactggagagagaagcctgggcaatactgcccgcctgtcatggcctggtggtggcccacacctatcttctcaccttggaggccacacccaactttccaaagaccctgagacaagtcaggaccctactactctcccctgctgctttcctgacagcttactcttcctccacctgctgagcctgtgccagactccattgctcaaatcgttagggttgcttctataaaaatgggtcagtagcccttcctgttctctccagcccagcatacaggaggatcaaaggaggtgacggagcatcgtggcacggcagtctcaatgggtcagaaacccaggccagctgggctctaagcctggcatcctgtcatgcttagtccttcagctgaagatcagaggaagcctctcccttgccctctccagctctaggggttttcaggaggcccaactgcaataatggagcactagtgcttttatgtgcaatggtgtcgtccatgcacgacagcagcaaacattctggggctgctttttattgttcccacggctgacagcgtggcagcggagactgtggaggcagtggagactgacttcttcctgctgacagctggatgtcacacatgaaggtctggcctagcgagtgatgggtctaggccctgaaactgatgtcctagcaataacctcttgatccctactcaccgagtgttgagcccaaggggggatttgtagaacaagcccccatgagaaacagctgttactctacacttttgattgcctatttctgatggcaagagatacatactctcttcaaagagcatgagatgcagccattctttcagcaaagcttcattgacacctgcacctgttaactgtgttcgacattgaagggagaaaggcaagatgtgcactctggactcaagaaactcttagttcagtggaggaaatgagcagataagtagatcattatgattgagagtaggagaagcttagagaaagcacagaatcccagatccagctggtgaaggagggaaggcttcaggcctttaagctcagcctgagaatattgtgaaatgcagaggatggggaaaagggaagagtaccgacttgaaaacggagagctgtcttggctgagggcagggtctgtgtggcaggatgggggagggagtcagaagggtcagatgaactggagtgtagacagcatcagatgcagcagtgcccaccgcccccccccccaccccccgccctgcccacagagcacctgctggtaaccctgggcctattgaaagcaggatgagatgataatttaagacactgaatgatttcttttccaacaaagctctatgttaagtgca

SEQ ID NO: 31731 - DNA, 3715 bp, Homo sapiens
  source 1..3715: mol_type = unassigned DNA
gatgattacggagctgtgtggactgtgccctgacaggagaaatagcagtgctgcccaggatcacagctcaccccgaggtggctgaggctggaattgggtgcccctttgcaggtgtcggctgctccttcaagggaagcccacagtctgtgcaagagcatgaggtcacctcccagacctcccacctaaacctgctgttggggttcatgaaacagtggaaggcccggctgggctgtggcctggagtctgggcccatggccctggagcagaacctgtcagacctgcagctgcaggcagccgtggaagtggcgggggacctggaggtcgattgctaccgggcaccctgctccgagagccaggaggagctggccctgcagcacttcatgaaggagaagcttctggctgagctggaggggaagctgcgtgtgtttgagaacattgttgctgtcctcaacaaggaggtggaggcctcccacctggccctggccacctctatccaccagagccagctggaccgtgagcgcatcctgagcttggagcagagggtggtggagcttcagcagaccctggcccagaaagaccaggccctgggcaagctggagcagagcttgcgcctcatggaggaggcctccttcgatggcactttcctgtggaagatcaccaatgtcaccaggcggtgccatgagtcggcctgtggcaggaccgtcagcctcttctccccagccttctacactgccaagtatggctacaagttgtgcctgcggctgtacctgaatggagatggcactggaaagagaacccatctgtcgctcttcatcgtgatcatgagaggggagtatgatgcgctgctgccgtggcccttccggaacaaggtcaccttcatgctgctggaccagaacaaccgtgagcacgccattgacgccttccggcctgacctaagctcagcgtccttccagaggccccagagtgaaaccaacgtggccagtggatgcccactcttcttccccctcagcaaactgcagtcacccaagcacgcctacgtgaaggacgacacaatgttcctcaagtgcattgtggagaccagcacttagggtgggcggggctcctgagggagctccaactcagaagggagctagccagaggactgtgatgccctgcccttggcacccaagacctcagggcacaaagatgggtgaaggctggcatgatccaagcaagactgaggggtcgacttcgggctggccatctggttaggatggcaggacgtgggctgggcccacaaaggcaaagggtccagaaggagacaggcagagctgctcccctctgcacggaccatgcgacactgggaggccagtgagccactccggccccgaatgttgaggtggactctcaccaaatgagaagaaaatggaaccaggcttggaaccgtaggacccaagcagagaagctctcgggctaggaagatctctgcagggccgccagggagacctggacacaggcctgctctctttttctccagggtcagaaacaggaccgggtggaagggatggggtgccagtttgaatgcagtctgtccaggctcgtcattggaggtgaacaagcaaacccagacggctccactaggacttcaaattgggggttggatttgaagacttttaagtttccttccagcccagaaagtctctcattctaggcctcctggcccaggtgagtcctagagctacaggggttctggaaacattcaggagcttcctgtcctcccagctcctcactcaccttcagtaacccccactggactgacctggtccacagggcacctgccaccctgggcctggcagctcagcttccccaacacgcaggagcacacccagcccccacatcctgtgcctccatcagctaaacaccacgtcacttcatgcaggtgaaacccagtcactgtgagctcccaggtgcagccagaggcacctcaagaagaagaggggcataaactttcctcttcctgcctagaggccccacctttggtgctttccagaatcccgtaacacctgattaactgaggcatccacttctttcagcagactgatcaggacctccaagccactgagcaatgtataaccccaaagaaataatttttagaatctctttcgaagttttcctaaagtgtatggtttgggagttgtttgtactgagccaggtttgaaaaggccattgctgagtttgaggtggtgccaccagttttgcaggtggcatcagaggctggcatgctggcaggaacatcccctcttagccccagtcttctcttttctataatgagacccaccccagcttgcctccctccctggcttctctgaccctcaaaggagatgccacgcaggacagactggagagagaagcctgggcaatactgcccgcctgtcatggcctggtggtggcccacacctatcttctcaccttggaggccacacccaactttccaaagaccctgagacaagtcaggaccctactactctcccctgctgctttcctgacagcttactcttcctccacctgctgagcctgtgccagactccattgctcaaatcgttagggttgcttctataaaaatgggtcagtagcccttcctgttctctccagcccagcatacaggaggatcaaaggaggtgacggagcatcgtggcacggcagtctcaatgggtcagaaacccaggccagctgggctctaagcctggcatcctgtcatgcttagtccttcagctgaagatcagaggaagcctctcccttgccctctccagctctaggggttttcaggaggcccaactgcaataatggagcactagtgcttttatgtgcaatggtgtcgtccatgcacgacagcagcaaacattctggggctgctttttattgttcccacggctgacagcgtggcagcggagactgtggaggcagtggagactgacttcttcctgctgacagctggatgtcacacatgaaggtctggcctagcgagtgatgggtctaggccctgaaactgatgtcctagcaataacctcttgatccctactcaccgagtgttgagcccaaggggggatttgtagaacaagcccccatgagaaacagctgttactctacacttttgattgcctatttctgatggcaagagatacatactctcttcaaagagcatgagatgcagccattctttcagcaaagcttcattgacacctgcacctgttaactgtgttcgacattgaagggagaaaggcaagatgtgcactctggactcaagaaactcttagttcagtggaggaaatgagcagataagtagatcattatgattgagagtaggagaagcttagagaaagcacagaatcccagatccagctggtgaaggagggaaggcttcaggcctttaagctcagcctgagaatattgtgaaatgcagaggatggggaaaagggaagagtaccgacttgaaaacggagagctgtcttggctgagggcagggtctgtgtggcaggatgggggagggagtcagaagggtcagatgaactggagtgtagacagcatcagatgcagcagtgcccaccgcccccccccccaccccccgccctgcccacagagcacctgctggtaaccctgggcctattgaaagcaggatgagatgataatttaagacactgaatgatttcttttccaacaaagctctatgttaagtgca

SEQ ID NO: 31732 - DNA, 4279 bp, Homo sapiens
  source 1..4279: mol_type = unassigned DNA
gtccgttgctaaggccgcgcagccctagtgaccgaacgccctgcggcggccgcgcaggcgctgtggtgggctccggtgcactgtgggatggaaaccggagcggcgcgtcctggcaggaccgggcggcggcggcggcggggccggcggcggccagggacccgggcttaggctcggccaggccggctgaggggcgcgggcggccagcgggcggcggacgccgtcatgaacgcggcggtggtgaggcggacgcaggaggcgctggggaaagtgattcggaggccgccgctgaccgagaagctgctgagcaagcccccgttccgctacctgcacgacatcatcacggaggtgattagaatgactggtttcatgaagggcctctacacagacgccgagatgaagtctgataatgtgaaggataaagatgcaaaaattagcttcctacaaaaggccatagacgtggttgtaatggtgtcgggagagccactgttggccaaaccagcccgaatcgtggcggggcatgagcctgaaagaacaaacgagctgctccagataattggaaaatgctgtctcaacaagctctctagtgacgatgcggtgcggagggttttagctggagagaagggagaagtgaaaggccgggcctcactgacctcaagatctcaggaattggataataagaatgtgcgagaagaagagtccagagttcacaaaaatacagaggatagaggagacgctgaaataaaagagagaagtacaagcagagatcgaaaacagaaggaagaattgaaagaagaccgcaagccaagagaaaaggacaaggacaaggagaaggccaaggagaatggcggaaacagacacagagaaggggagagagagagagccaaagcccgggccaggccagacaacgagcgacagaaagacagaggcaacagggagcgggacagagactccgagcgcaagaaggagacagagagaaagagtgagggggggaaagagaaggagagactgagagacagggaccgagagcgcgaccgggacaaagggaaggacagggacagacggagagtgaaaaacggggagcactcctgggacctggacagggagaagaacagagagcatgacaaacctgagaaaaagtcagcaagctcaggggagatgtctaaaaagttatcagatggaacttttaaagactccaaggctgaaacagagactgagatttccactagagcttccaagtcattgacaacaaaaacatcaaaacggcgatccaaaaattcagtggaaggaaggaaggaggataatatttcagctaaaagtttagactccatagtgtctggaataaataatgagccaaatcaggaaacgacaacatcagaaataggaacaaaagaagctaatattaactcaactagtatttcagatgataattcagctagtctgcggtgtgagaatattcagcccaaccccacagagaagcagaaaggtgactccaccagtgatgcagaaggagatgctggacctgctggccaagataagtctgaggtgccagagactccagaaattcctaatgagctttcatccaacatcagaagaattcctcggcctgggagtgcaagaccagcccctccccgggtcaaacggcaagacagcatggaggcgctacaaatggataggtcagggagtggtaaaaccgtttcaaatgtgattacagagtcacacaattctgacaatgaagaggatgatcaatttgtggtggaagctgcccctcagctctctgaaatgtcagaaattgaaatggtaacagcagtggaactagaagaagaggagaagcatggtggacttgtgaaaaaaattttggagacgaagaaagattatgagaaattgcagcagtcacccaaacctggggagaaggagcgatctctctttgagtcggcatggaagaaggagaaggacatcgtttccaaggagatagagaagctccgcacgtccatccagaccctgtgcaagagcgcacttcccctggggaagatcatggactacatccaggaagacgtggatgccatgcagaatgagctgcagatgtggcacagcgagaacaggcagcacgccgaggccctgcagcaggagcagaggatcacagactgtgccgtggagcccttaaaggctgagctcgcggagctggagcagctgatcaaagaccagcaagacaagatctgtgctgtgaaggccaacatcctcaagaatgaagaaaaaatccagaaaatggtatatagtatcaatttgacttcgagaaggtgaacactcaaaagtttcagagatgaaaagtcacctcagtttaaaagcaaaaaggaagatagaaaatcattactcttttaagttccagtttgctaagaaaatgaacagtttacaatgttattatccagctaattttcagagctttaaaactgtaagcatgttaagtgtattaaaaaaaccatgttttcttacctccttccagatggaatactggctagttataaatagcgcttccaaacacctctgtgaaaagtttttttgaaagcctgttctttgtgtttctgctgtaacctgtttagttctgtaccagaactctctagcaggtaagtggtgtgggcataccaagggaacagtagtcctttattttggtttagtggaaagactttcagaggtcagtgccgaatgaaggatgactgtgtactttttgataggcacttgataagtagaatgaggcctgaaaatgaatacattatatttttagttaatttccaatggaaagggctaacctcagcctgtctccatatcaggtacctatcaactggattgttttcatttttgttttttgacctctttgtaattgcatgtacttctctatgtaattttcctcttgatctctactatcgtttgcttgtgtttctagtccttaaagttcataaatttaaaaaggagatttcaggatggcctttatggacgttgtctggacatacatcctcactttcttccgcagtttaccctggttttcctcagacagaggctagcgcagccccccggagtccttgttctccttaagagggtctcgctctgcaaagcattggcgccatggcttttcctttgcatgggtgtgcataccgagagacaggcagcttaggaaaaacaacataaggaagacttaaaaggatgcactgatttacgacgttttttgatgttagccatttttttggaaattgttttttaaagcaaaagttttttaaaaacatggtttatagtttttcacttacatatactattgtaaatacttagcagagtcttaagttactgtataaaacatttcattgtgtttgaagacatacttatgggtcttgaggtctgggtcctaatacttttaaatagtgtatttattatgtaaactgaggagtgccatttaaagtgtgaggattgcctgaaaaggttttgtttctttcttttttttttttttttgagatggagtcttactctgtcgcccaggctggagtgcagtggcgcaatctcggctcactgcaaccaccgcctcccgagttcaagtgattctcctgcctcagcctcctgagtaactgggactacaggcgcacgccaccatgcccagctaatttttgtattttcagtagagatggggtttcaccgtgttgaccaggatggtctccacctcctgacctcgtgatccgcctgcctcggcctcccaaagtgctgggattacaggcatgagccactgcacccggccaggttttgtttctttaaggattagcacaaatggcaccgttgggtttttcttcatacaatttccaaaataaattctgtactcaggttgttatatgattttctgagctgaataagttcaggagcagattattaagatctgccattctgaaacgctggtctttttctccttcctatagtgcaccataaaattctgtttgatcagattatattacatacattttgggggagtggagggacatgagttaagtagcccttcatgtatttataatctcttttctactgaatcaaatgacttagccatgaccctgaatggaccttgttttacttcaagttgagatgtctgccttttatgaatttgtatatgtgaatagagtttgggggttgccaaaaattgcatacattgtatgtaagtaaaattttttatgaagtagtctgtcaaattgtatcataaagtttatttttcttttatacgtaaatcattaaaaataatcacatattttttccataa

SEQ ID NO: 31733 - DNA, 4003 bp, Homo sapiens
  source 1..4003: mol_type = unassigned DNA
gtccgttgctaaggccgcgcagccctagtgaccgaacgccctgcggcggccgcgcaggcgctgtggtgggctccggtgcactgtgggatggaaaccggagcggcgcgtcctggcaggaccgggcggcggcggcggcggggccggcggcggccagggacccgggcttaggctcggccaggccggctgaggggcgcgggcggccagcgggcggcggacgccgtcatgaacgcggcggtggtgaggcggacgcaggaggcgctggggaaagtgattcggaggccgccgctgaccgagaagctgctgagcaagcccccgttccgctacctgcacgacatcatcacggaggtgattagaatgactggtttcatgaagggcctctacacagacgccgagatgaagtctgataatgtgaaggataaagatgcaaaaattagcttcctacaaaaggccatagacgtggttgtaatggtgtcgggagagccactgttggccaaaccagcccgaatcgtggcggggcatgagcctgaaagaacaaacgagctgctccagataattggaaaatgctgtctcaacaagctctctagtgacgatgcggtgcggagggttttagctggagagaagggagaagtgaaaggccgggcctcactgacctcaagatctcaggaattggataataagaatgtgcgagaagaagagtccagagttcacaaaaatacagaggatagaggagacgctgaaataaaagagagaagtacaagcagagatcgaaaacagaaggaagaattgaaagaagaccgcaagccaagagaaaaggacaaggacaaggagaaggccaaggagaatggcggaaacagacacagagaaggggagagagagagagccaaagcccgggccaggccagacaacgagcgacagaaagacagaggcaacagggagcgggacagagactccgagcgcaagaaggagacagagagaaagagtgagggggggaaagagaaggagagactgagagacagggaccgagagcgcgaccgggacaaagggaaggacagggacagacggagagtgaaaaacggggagcactcctgggacctggacagggagaagaacagagagcatgacaaacctgagaaaaagtcagcaagctcaggggagatgtctaaaaagttatcagatggaacttttaaagactccaaggctgaaacagagactgagatttccactagagcttccaagtcattgacaacaaaaacatcaaaacggcgatccaaaaattcagtggaaggtgactccaccagtgatgcagaaggagatgctggacctgctggccaagataagtctgaggtgccagagactccagaaattcctaatgagctttcatccaacatcagaagaattcctcggcctgggagtgcaagaccagcccctccccgggtcaaacggcaagacagcatggaggcgctacaaatggataggtcagggagtggtaaaaccgtttcaaatgtgattacagagtcacacaattctgacaatgaagaggatgatcaatttgtggtggaagctgcccctcagctctctgaaatgtcagaaattgaaatggtaacagcagtggaactagaagaagaggagaagcatggtggacttgtgaaaaaaattttggagacgaagaaagattatgagaaattgcagcagtcacccaaacctggggagaaggagcgatctctctttgagtcggcatggaagaaggagaaggacatcgtttccaaggagatagagaagctccgcacgtccatccagaccctgtgcaagagcgcacttcccctggggaagatcatggactacatccaggaagacgtggatgccatgcagaatgagctgcagatgtggcacagcgagaacaggcagcacgccgaggccctgcagcaggagcagaggatcacagactgtgccgtggagcccttaaaggctgagctcgcggagctggagcagctgatcaaagaccagcaagacaagatctgtgctgtgaaggccaacatcctcaagaatgaagaaaaaatccagaaaatggtatatagtatcaatttgacttcgagaaggtgaacactcaaaagtttcagagatgaaaagtcacctcagtttaaaagcaaaaaggaagatagaaaatcattactcttttaagttccagtttgctaagaaaatgaacagtttacaatgttattatccagctaattttcagagctttaaaactgtaagcatgttaagtgtattaaaaaaaccatgttttcttacctccttccagatggaatactggctagttataaatagcgcttccaaacacctctgtgaaaagtttttttgaaagcctgttctttgtgtttctgctgtaacctgtttagttctgtaccagaactctctagcaggtaagtggtgtgggcataccaagggaacagtagtcctttattttggtttagtggaaagactttcagaggtcagtgccgaatgaaggatgactgtgtactttttgataggcacttgataagtagaatgaggcctgaaaatgaatacattatatttttagttaatttccaatggaaagggctaacctcagcctgtctccatatcaggtacctatcaactggattgttttcatttttgttttttgacctctttgtaattgcatgtacttctctatgtaattttcctcttgatctctactatcgtttgcttgtgtttctagtccttaaagttcataaatttaaaaaggagatttcaggatggcctttatggacgttgtctggacatacatcctcactttcttccgcagtttaccctggttttcctcagacagaggctagcgcagccccccggagtccttgttctccttaagagggtctcgctctgcaaagcattggcgccatggcttttcctttgcatgggtgtgcataccgagagacaggcagcttaggaaaaacaacataaggaagacttaaaaggatgcactgatttacgacgttttttgatgttagccatttttttggaaattgttttttaaagcaaaagttttttaaaaacatggtttatagtttttcacttacatatactattgtaaatacttagcagagtcttaagttactgtataaaacatttcattgtgtttgaagacatacttatgggtcttgaggtctgggtcctaatacttttaaatagtgtatttattatgtaaactgaggagtgccatttaaagtgtgaggattgcctgaaaaggttttgtttctttcttttttttttttttttgagatggagtcttactctgtcgcccaggctggagtgcagtggcgcaatctcggctcactgcaaccaccgcctcccgagttcaagtgattctcctgcctcagcctcctgagtaactgggactacaggcgcacgccaccatgcccagctaatttttgtattttcagtagagatggggtttcaccgtgttgaccaggatggtctccacctcctgacctcgtgatccgcctgcctcggcctcccaaagtgctgggattacaggcatgagccactgcacccggccaggttttgtttctttaaggattagcacaaatggcaccgttgggtttttcttcatacaatttccaaaataaattctgtactcaggttgttatatgattttctgagctgaataagttcaggagcagattattaagatctgccattctgaaacgctggtctttttctccttcctatagtgcaccataaaattctgtttgatcagattatattacatacattttgggggagtggagggacatgagttaagtagcccttcatgtatttataatctcttttctactgaatcaaatgacttagccatgaccctgaatggaccttgttttacttcaagttgagatgtctgccttttatgaatttgtatatgtgaatagagtttgggggttgccaaaaattgcatacattgtatgtaagtaaaattttttatgaagta

SEQ ID NO: 31734 - DNA, 4172 bp, Homo sapiens
  source 1..4172: mol_type = unassigned DNA
cgcgtcctggcaggaccgggcggcggcggcggcggggccggcggcggccagggacccgggcttaggctcggccaggccggctgaggggcgcgggcggccagcgggcggcggacgccgtcatgaacgcggcggtggtgaggcggacgcaggaggcgctggggaaagtgattcggaggccgccgctgaccgagaagctgctgagcaagcccccgttccgctacctgcacgacatcatcacggaggtgattagaatgactggtttcatgaagggcctctacacagacgccgagatgaagtctgataatgtgaaggataaagatgcaaaaattagcttcctacaaaaggccatagacgtggttgtaatggtgtcgggagagccactgttggccaaaccagcccgaatcgtggcggggcatgagcctgaaagaacaaacgagctgctccagataattggaaaatgctgtctcaacaagctctctagtgacgatgcggtgcggagggttttagctggagagaagggagaagtgaaaggccgggcctcactgacctcaagatctcaggaattggataataagaatgtgcgagaagaagagtccagagttcacaaaaatacagaggatagaggagacgctgaaataaaagagagaagtacaagcagagatcgaaaacagaaggaagaattgaaagaagaccgcaagccaagagaaaaggacaaggacaaggagaaggccaaggagaatggcggaaacagacacagagaaggggagagagagagagccaaagcccgggccaggccagacaacgagcgacagaaagacagaggcaacagggagcgggacagagactccgagcgcaagaaggagacagagagaaagagtgagggggggaaagagaaggagagactgagagacagggaccgagagcgcgaccgggacaaagggaaggacagggacagacggagagtgaaaaacggggagcactcctgggacctggacagggagaagaacagagagcatgacaaacctgagaaaaagtcagcaagctcaggggagatgtctaaaaagttatcagatggaacttttaaagactccaaggctgaaacagagactgagatttccactagagcttccaagtcattgacaacaaaaacatcaaaacggcgatccaaaaattcagtggaaggaaggaaggaggataatatttcagctaaaagtttagactccatagtgtctggaataaataatgagccaaatcaggaaacgacaacatcagaaataggaacaaaagaagctaatattaactcaactagtatttcagatgataattcagctagtctgcggtgtgagaatattcagcccaaccccacagagaagcagaaaggtaagaatgggtctgaacgtgaaggagatgctggacctgctggccaagataagtctgaggtgccagagactccagaaattcctaatgagctttcatccaacatcagaagaattcctcggcctgggagtgcaagaccagcccctccccgggtcaaacggcaagacagcatggaggcgctacaaatggataggtcagggagtggtaaaaccgtttcaaatgtgattacagagtcacacaattctgacaatgaagaggatgatcaatttgtggtggaagctgcccctcagctctctgaaatgtcagaaattgaaatggtaacagcagtggaactagaagaagaggagaagcatggtggacttgtgaaaaaaattttggagacgaagaaagattatgagaaattgcagcagtcacccaaacctggggagaaggagcgatctctctttgagtcggcatggaagaaggagaaggacatcgtttccaaggagatagagaagctccgcacgtccatccagaccctgtgcaagagcgcacttcccctggggaagatcatggactacatccaggaagacgtggatgccatgcagaatgagctgcagatgtggcacagcgagaacaggcagcacgccgaggccctgcagcaggagcagaggatcacagactgtgccgtggagcccttaaaggctgagctcgcggagctggagcagctgatcaaagaccagcaagacaagatctgtgctgtgaaggccaacatcctcaagaatgaagaaaaaatccagaaaatggtatatagtatcaatttgacttcgagaaggtgaacactcaaaagtttcagagatgaaaagtcacctcagtttaaaagcaaaaaggaagatagaaaatcattactcttttaagttccagtttgctaagaaaatgaacagtttacaatgttattatccagctaattttcagagctttaaaactgtaagcatgttaagtgtattaaaaaaaccatgttttcttacctccttccagatggaatactggctagttataaatagcgcttccaaacacctctgtgaaaagtttttttgaaagcctgttctttgtgtttctgctgtaacctgtttagttctgtaccagaactctctagcaggtaagtggtgtgggcataccaagggaacagtagtcctttattttggtttagtggaaagactttcagaggtcagtgccgaatgaaggatgactgtgtactttttgataggcacttgataagtagaatgaggcctgaaaatgaatacattatatttttagttaatttccaatggaaagggctaacctcagcctgtctccatatcaggtacctatcaactggattgttttcatttttgttttttgacctctttgtaattgcatgtacttctctatgtaattttcctcttgatctctactatcgtttgcttgtgtttctagtccttaaagttcataaatttaaaaaggagatttcaggatggcctttatggacgttgtctggacatacatcctcactttcttccgcagtttaccctggttttcctcagacagaggctagcgcagccccccggagtccttgttctccttaagagggtctcgctctgcaaagcattggcgccatggcttttcctttgcatgggtgtgcataccgagagacaggcagcttaggaaaaacaacataaggaagacttaaaaggatgcactgatttacgacgttttttgatgttagccatttttttggaaattgttttttaaagcaaaagttttttaaaaacatggtttatagtttttcacttacatatactattgtaaatacttagcagagtcttaagttactgtataaaacatttcattgtgtttgaagacatacttatgggtcttgaggtctgggtcctaatacttttaaatagtgtatttattatgtaaactgaggagtgccatttaaagtgtgaggattgcctgaaaaggttttgtttctttcttttttttttttttttgagatggagtcttactctgtcgcccaggctggagtgcagtggcgcaatctcggctcactgcaaccaccgcctcccgagttcaagtgattctcctgcctcagcctcctgagtaactgggactacaggcgcacgccaccatgcccagctaatttttgtattttcagtagagatggggtttcaccgtgttgaccaggatggtctccacctcctgacctcgtgatccgcctgcctcggcctcccaaagtgctgggattacaggcatgagccactgcacccggccaggttttgtttctttaaggattagcacaaatggcaccgttgggtttttcttcatacaatttccaaaataaattctgtactcaggttgttatatgattttctgagctgaataagttcaggagcagattattaagatctgccattctgaaacgctggtctttttctccttcctatagtgcaccataaaattctgtttgatcagattatattacatacattttgggggagtggagggacatgagttaagtagcccttcatgtatttataatctcttttctactgaatcaaatgacttagccatgaccctgaatggaccttgttttacttcaagttgagatgtctgccttttatgaatttgtatatgtgaatagagtttgggggttgccaaaaattgcatacattgtatgtaagtaaaattttttatgaagtagtctgtcaaattgtatcataaagtttatttttcttttatacgtaaatcattaaaaataatcacatattttttcc

SEQ ID NO: 31735 - DNA, 3974 bp, Homo sapiens
  source 1..3974: mol_type = unassigned DNA
cgcgtcctggcaggaccgggcggcggcggcggcggggccggcggcggccagggacccgggcttaggctcggccaggccggctgaggggcgcgggcggccagcgggcggcggacgccgtcatgaacgcggcggtggtgaggcggacgcaggaggcgctggggaaagtgattcggaggccgccgctgaccgagaagctgctgagcaagcccccgttccgctacctgcacgacatcatcacggaggtgattagaatgactggtttcatgaagggcctctacacagacgccgagatgaagtctgataatgtgaaggataaagatgcaaaaattagcttcctacaaaaggccatagacgtggttgtaatggtgtcgggagagccactgttggccaaaccagcccgaatcgtggcggggcatgagcctgaaagaacaaacgagctgctccagataattggaaaatgctgtctcaacaagctctctagtgacgatgcggtgcggagggttttagctggagagaagggagaagtgaaaggccgggcctcactgacctcaagatctcaggaattggataataagaatgtgcgagaagaagagtccagagttcacaaaaatacagaggatagaggagacgctgaaataaaagagagaagtacaagcagagatcgaaaacagaaggaagaattgaaagaagaccgcaagccaagagaaaaggacaaggacaaggagaaggccaaggagaatggcggaaacagacacagagaaggggagagagagagagccaaagcccgggccaggccagacaacgagcgacagaaagacagaggcaacagggagcgggacagagactccgagcgcaagaaggagacagagagaaagagtgagggggggaaagagaaggagagactgagagacagggaccgagagcgcgaccgggacaaagggaaggacagggacagacggagagtgaaaaacggggagcactcctgggacctggacagggagaagaacagagagcatgacaaacctgagaaaaagtcagcaagctcaggggagatgtctaaaaagttatcagatggaacttttaaagactccaaggctgaaacagagactgagatttccactagagcttccaagtcattgacaacaaaaacatcaaaacggcgatccaaaaattcagtggaaggtactgcaaaacttattttagaaggagatgctggacctgctggccaagataagtctgaggtgccagagactccagaaattcctaatgagctttcatccaacatcagaagaattcctcggcctgggagtgcaagaccagcccctccccgggtcaaacggcaagacagcatggaggcgctacaaatggataggtcagggagtggtaaaaccgtttcaaatgtgattacagagtcacacaattctgacaatgaagaggatgatcaatttgtggtggaagctgcccctcagctctctgaaatgtcagaaattgaaatggtaacagcagtggaactagaagaagaggagaagcatggtggacttgtgaaaaaaattttggagacgaagaaagattatgagaaattgcagcagtcacccaaacctggggagaaggagcgatctctctttgagtcggcatggaagaaggagaaggacatcgtttccaaggagatagagaagctccgcacgtccatccagaccctgtgcaagagcgcacttcccctggggaagatcatggactacatccaggaagacgtggatgccatgcagaatgagctgcagatgtggcacagcgagaacaggcagcacgccgaggccctgcagcaggagcagaggatcacagactgtgccgtggagcccttaaaggctgagctcgcggagctggagcagctgatcaaagaccagcaagacaagatctgtgctgtgaaggccaacatcctcaagaatgaagaaaaaatccagaaaatggtatatagtatcaatttgacttcgagaaggtgaacactcaaaagtttcagagatgaaaagtcacctcagtttaaaagcaaaaaggaagatagaaaatcattactcttttaagttccagtttgctaagaaaatgaacagtttacaatgttattatccagctaattttcagagctttaaaactgtaagcatgttaagtgtattaaaaaaaccatgttttcttacctccttccagatggaatactggctagttataaatagcgcttccaaacacctctgtgaaaagtttttttgaaagcctgttctttgtgtttctgctgtaacctgtttagttctgtaccagaactctctagcaggtaagtggtgtgggcataccaagggaacagtagtcctttattttggtttagtggaaagactttcagaggtcagtgccgaatgaaggatgactgtgtactttttgataggcacttgataagtagaatgaggcctgaaaatgaatacattatatttttagttaatttccaatggaaagggctaacctcagcctgtctccatatcaggtacctatcaactggattgttttcatttttgttttttgacctctttgtaattgcatgtacttctctatgtaattttcctcttgatctctactatcgtttgcttgtgtttctagtccttaaagttcataaatttaaaaaggagatttcaggatggcctttatggacgttgtctggacatacatcctcactttcttccgcagtttaccctggttttcctcagacagaggctagcgcagccccccggagtccttgttctccttaagagggtctcgctctgcaaagcattggcgccatggcttttcctttgcatgggtgtgcataccgagagacaggcagcttaggaaaaacaacataaggaagacttaaaaggatgcactgatttacgacgttttttgatgttagccatttttttggaaattgttttttaaagcaaaagttttttaaaaacatggtttatagtttttcacttacatatactattgtaaatacttagcagagtcttaagttactgtataaaacatttcattgtgtttgaagacatacttatgggtcttgaggtctgggtcctaatacttttaaatagtgtatttattatgtaaactgaggagtgccatttaaagtgtgaggattgcctgaaaaggttttgtttctttcttttttttttttttttgagatggagtcttactctgtcgcccaggctggagtgcagtggcgcaatctcggctcactgcaaccaccgcctcccgagttcaagtgattctcctgcctcagcctcctgagtaactgggactacaggcgcacgccaccatgcccagctaatttttgtattttcagtagagatggggtttcaccgtgttgaccaggatggtctccacctcctgacctcgtgatccgcctgcctcggcctcccaaagtgctgggattacaggcatgagccactgcacccggccaggttttgtttctttaaggattagcacaaatggcaccgttgggtttttcttcatacaatttccaaaataaattctgtactcaggttgttatatgattttctgagctgaataagttcaggagcagattattaagatctgccattctgaaacgctggtctttttctccttcctatagtgcaccataaaattctgtttgatcagattatattacatacattttgggggagtggagggacatgagttaagtagcccttcatgtatttataatctcttttctactgaatcaaatgacttagccatgaccctgaatggaccttgttttacttcaagttgagatgtctgccttttatgaatttgtatatgtgaatagagtttgggggttgccaaaaattgcatacattgtatgtaagtaaaattttttatgaagtagtctgtcaaattgtatcataaagtttatttttcttttatacgtaaatcattaaaaataatcacatattttttcc

SEQ ID NO: 31736 - DNA, 3972 bp, Homo sapiens
  source 1..3972: mol_type = unassigned DNA
gcagcagccgcgcctgcagaccggcctcgcggagcccgcgcgccgagccccacaatggcttattcagaagagcataaaggtatgccctgtggtttcatccgccagaattccggcaactccatttccttggactttgagcccagtatagagtaccagtttgtggagcggttggaagagcgctacaaatgtgccttctgccactcggtgcttcacaacccccaccagacaggatgtgggcaccgcttctgccagcactgcatcctgtccctgagagaattaaacacagtgccaatctgccctgtagataaagaggtcatcaaatctcaggaggtttttaaagacaattgttgcaaaagagaagtcctcaacttatatgtatattgcagcaatgctcctggatgtaatgccaaggttattctgggccggtaccaggatcaccttcagcagtgcttatttcaacctgtgcagtgttctaatgagaagtgccgggagccagtcctacggaaagacctgaaagagcatttgagtgcatcctgtcagtttcgaaaggaaaaatgcctttattgcaaaaaggatgtggtagtcatcaatctacagaatcatgaggaaaacttgtgtcctgaatacccagtattttgtcccaacaattgtgcgaagattattctaaaaactgaggtagatgaacacctggctgtatgtcctgaagctgagcaagactgtccttttaagcactatggctgtgctgtaacggataaacggaggaacctgcagcaacatgagcattcagccttacgggagcacatgcgtttggttttagaaaagaatgtccaattagaagaacagatttctgacttacacaagagcctagaacagaaagaaagtaaaatccagcagctagcagaaactataaagaaacttgaaaaggagttcaagcagtttgcacagttgtttggcaaaaatggaagcttcctcccaaacatccaggtttttgccagtcacattgacaagtcagcttggctagaagctcaagtgcatcaattattacaaatggttaaccagcaacaaaataaatttgacctgagacctttgatggaagcagttgatacagtgaaacagaaaattaccctgctagaaaacaatgatcaaagattagccgttttagaagaggaaactaacaaacatgatacccacattaatattcataaagcacagctgagtaaaaatgaagagcgatttaaactgctggagggtacttgctataatggaaagctcatttggaaggtgacagattacaagatgaagaagagagaggcggtggatgggcacacagtgtccatcttcagccagtccttctacaccagccgctgtggctaccggctctgtgctagagcatacctgaatggggatgggtcagggagggggtcacacctgtccctatactttgtggtcatgcgaggagagtttgactcactgttgcagtggccattcaggcagagggtgaccctgatgcttctggaccagagtggcaaaaagaacattatggagaccttcaaacctgaccccaatagcagcagctttaaaagacctgatggggagatgaacattgcatctggctgtccccgctttgtggctcattctgttttggagaatgccaagaacgcctacattaaagatgacactctgttcttgaaagtggccgtggacttaactgacctggaggatctctagtcactgttatggggtgataagaggacttcttggggccagaactgtggaggagagcacatttgattatcatattgacctggatttagactcaaagcacatttgtatttgcctttttccttaacgtttgaagtcagtttaaaacttctgaagtgctgtctttttacattttactctgtcccagtttgaaacttaaaactcttagaatattctcttattatttatatttttatatttcttgaaagatggtaagtttcttgaagtttttggggcgtttctcttttactggtgcttagcgcagtgtctcgggcactctaaatattgagtgttatggaggacacagaggtagcagaatcccagttgaaaatgttttgatattttattgtttggcctattgattctagacctggccttaagtctgcaaaagccatctttataaggtaggctgttccagttaagtagtgggtgatgtagttacaaagataatatgctcagtttggacctttttttcagttaaatgctaaatatatgaaaattactatacctctaagtattttcatgaaattcaccagcagtttgcaagcacagttttgcaaggctgcataagaactggtgaatggggtaagcattttcattcttcctgctgaagtaaagcagaaagtactgcatagtatatgagatatagccagctagctaaagttcagattttgttaggttcaaccctatgaaaaaaactattttcataggtcaaaaatggtaaaaaattagcagtttcataagattcaaccaaataaatatatatatacacacacacatacatatacacctatatatgtgtgtatacaaacagttcgaatgtattttggtgacagtaataaatcaatgtgaggatggatagaatttagtatatgatagagaaaatgtcataaatggataaaaggaatttacaacttgaggagaaaacctttacaatttcctatgggtgtcagaagtactctcagcgaaaactgatggctaaaacagtatctactattctctgataactttttttttgagacagagtttcattgtcacccaggctggagtacagtggcatgatctcagctcactgcaaactctgcctcccgaattcaagtgattctcctgcctcagcctcctgagtagctgggattacaggcgcccgtcaccacacccaggtaatttttgtatttttagtagagacggagttttgccatgttggccaagctgatctcaaactcctgacctcaagtgatctgcccgcctcggcctcccaaagtgctgagattacaggcatgacccaccgcgtcaagcctctgacaactattgaatttgtaagctgctatgcaaatgggcatttatataaacttgtgatgtttcttgtcagaattctgagtactctgtgaagaacagaaatgatcatattcttatgcatctatctgtatgggtctgaaggtgtatatacaaactgagatgagtccttatgactcttgataagcctgagtttaacaacaacaaaaatgccaagttgtcctgagcccttctgcgttgttatgccacttccctactgctcatatgcacgctggctcccctgggcacgcaaggatgagtatgggccatgggcccctgtagagctgcttacctggtgatgaccatgcaccttacaatttctgaacagttaaccctatagaagcatgctttatatgagtgtcttctgggaagaggaaccttcttaatctcttctgtgggattttcaaaatgctaaagactcacactgcagcaatcatcccagatgattaaattcaaagaaataggttcacaacaggaatatactgaagaactagagtgtcactgctggtgaactgtggcacggttgctcaacacatcacctcggacaaattcaggaagcatttctttagcccacaagtccagacccaggtgctctgtatgtttgtttttaatattcatcatatccaagttcactctgtcttcctgagcagtggaagatcatattgctgtaacttcttttaagtagttgatgtggaaaacattttaaagtgaatttgtcaaaatgctggttttgtgttttatccaacttttgtgcatatatataaagtatgtcatggcatggtttgcttaggagttcagagttccttcatcatcgaaatagtgattaagtgatcccagaacaaggaatactagagtaaaaagcacctctttttcacaaaa

SEQ ID NO: 31737 - DNA, 3972 bp, Homo sapiens
  source 1..3972: mol_type = unassigned DNA
agacgcacgtgagggaaatcagatgactggacttgtagatactaacggttctgaagcggaatggcttattcagaagagcataaaggtatgccctgtggtttcatccgccagaattccggcaactccatttccttggactttgagcccagtatagagtaccagtttgtggagcggttggaagagcgctacaaatgtgccttctgccactcggtgcttcacaacccccaccagacaggatgtgggcaccgcttctgccagcactgcatcctgtccctgagagaattaaacacagtgccaatctgccctgtagataaagaggtcatcaaatctcaggaggtttttaaagacaattgttgcaaaagagaagtcctcaacttatatgtatattgcagcaatgctcctggatgtaatgccaaggttattctgggccggtaccaggatcaccttcagcagtgcttatttcaacctgtgcagtgttctaatgagaagtgccgggagccagtcctacggaaagacctgaaagagcatttgagtgcatcctgtcagtttcgaaaggaaaaatgcctttattgcaaaaaggatgtggtagtcatcaatctacagaatcatgaggaaaacttgtgtcctgaatacccagtattttgtcccaacaattgtgcgaagattattctaaaaactgaggtagatgaacacctggctgtatgtcctgaagctgagcaagactgtccttttaagcactatggctgtgctgtaacggataaacggaggaacctgcagcaacatgagcattcagccttacgggagcacatgcgtttggttttagaaaagaatgtccaattagaagaacagatttctgacttacacaagagcctagaacagaaagaaagtaaaatccagcagctagcagaaactataaagaaacttgaaaaggagttcaagcagtttgcacagttgtttggcaaaaatggaagcttcctcccaaacatccaggtttttgccagtcacattgacaagtcagcttggctagaagctcaagtgcatcaattattacaaatggttaaccagcaacaaaataaatttgacctgagacctttgatggaagcagttgatacagtgaaacagaaaattaccctgctagaaaacaatgatcaaagattagccgttttagaagaggaaactaacaaacatgatacccacattaatattcataaagcacagctgagtaaaaatgaagagcgatttaaactgctggagggtacttgctataatggaaagctcatttggaaggtgacagattacaagatgaagaagagagaggcggtggatgggcacacagtgtccatcttcagccagtccttctacaccagccgctgtggctaccggctctgtgctagagcatacctgaatggggatgggtcagggagggggtcacacctgtccctatactttgtggtcatgcgaggagagtttgactcactgttgcagtggccattcaggcagagggtgaccctgatgcttctggaccagagtggcaaaaagaacattatggagaccttcaaacctgaccccaatagcagcagctttaaaagacctgatggggagatgaacattgcatctggctgtccccgctttgtggctcattctgttttggagaatgccaagaacgcctacattaaagatgacactctgttcttgaaagtggccgtggacttaactgacctggaggatctctagtcactgttatggggtgataagaggacttcttggggccagaactgtggaggagagcacatttgattatcatattgacctggatttagactcaaagcacatttgtatttgcctttttccttaacgtttgaagtcagtttaaaacttctgaagtgctgtctttttacattttactctgtcccagtttgaaacttaaaactcttagaatattctcttattatttatatttttatatttcttgaaagatggtaagtttcttgaagtttttggggcgtttctcttttactggtgcttagcgcagtgtctcgggcactctaaatattgagtgttatggaggacacagaggtagcagaatcccagttgaaaatgttttgatattttattgtttggcctattgattctagacctggccttaagtctgcaaaagccatctttataaggtaggctgttccagttaagtagtgggtgatgtagttacaaagataatatgctcagtttggacctttttttcagttaaatgctaaatatatgaaaattactatacctctaagtattttcatgaaattcaccagcagtttgcaagcacagttttgcaaggctgcataagaactggtgaatggggtaagcattttcattcttcctgctgaagtaaagcagaaagtactgcatagtatatgagatatagccagctagctaaagttcagattttgttaggttcaaccctatgaaaaaaactattttcataggtcaaaaatggtaaaaaattagcagtttcataagattcaaccaaataaatatatatatacacacacacatacatatacacctatatatgtgtgtatacaaacagttcgaatgtattttggtgacagtaataaatcaatgtgaggatggatagaatttagtatatgatagagaaaatgtcataaatggataaaaggaatttacaacttgaggagaaaacctttacaatttcctatgggtgtcagaagtactctcagcgaaaactgatggctaaaacagtatctactattctctgataactttttttttgagacagagtttcattgtcacccaggctggagtacagtggcatgatctcagctcactgcaaactctgcctcccgaattcaagtgattctcctgcctcagcctcctgagtagctgggattacaggcgcccgtcaccacacccaggtaatttttgtatttttagtagagacggagttttgccatgttggccaagctgatctcaaactcctgacctcaagtgatctgcccgcctcggcctcccaaagtgctgagattacaggcatgacccaccgcgtcaagcctctgacaactattgaatttgtaagctgctatgcaaatgggcatttatataaacttgtgatgtttcttgtcagaattctgagtactctgtgaagaacagaaatgatcatattcttatgcatctatctgtatgggtctgaaggtgtatatacaaactgagatgagtccttatgactcttgataagcctgagtttaacaacaacaaaaatgccaagttgtcctgagcccttctgcgttgttatgccacttccctactgctcatatgcacgctggctcccctgggcacgcaaggatgagtatgggccatgggcccctgtagagctgcttacctggtgatgaccatgcaccttacaatttctgaacagttaaccctatagaagcatgctttatatgagtgtcttctgggaagaggaaccttcttaatctcttctgtgggattttcaaaatgctaaagactcacactgcagcaatcatcccagatgattaaattcaaagaaataggttcacaacaggaatatactgaagaactagagtgtcactgctggtgaactgtggcacggttgctcaacacatcacctcggacaaattcaggaagcatttctttagcccacaagtccagacccaggtgctctgtatgtttgtttttaatattcatcatatccaagttcactctgtcttcctgagcagtggaagatcatattgctgtaacttcttttaagtagttgatgtggaaaacattttaaagtgaatttgtcaaaatgctggttttgtgttttatccaacttttgtgcatatatataaagtatgtcatggcatggtttgcttaggagttcagagttccttcatcatcgaaatagtgattaagtgatcccagaacaaggaatactagagtaaaaagcacctctttttc

SEQ ID NO: 31738 - DNA, 1827 bp, Homo sapiens
  source 1..1827: mol_type = unassigned DNA
agtgcagggatgtgcagatgagtgggctgtggggtgtcctgctcacggtttcatggatgaatggcttattcagaagagcataaaggtatgccctgtggtttcatccgccagaattccggcaactccatttccttggactttgagcccagtatagagtaccagtttgtggagcggttggaagagcgctacaaatgtgccttctgccactcggtgcttcacaacccccaccagacaggatgtgggcaccgcttctgccagcactgcatcctgtccctgagagaattaaacacagtgccaatctgccctgtagataaagaggtcatcaaatctcaggaggtttttaaagacaattgttgcaaaagagaagtcctcaacttatatgtatattgcagcaatgctcctggatgtaatgccaaggttattctgggccggtaccaggatcaccttcagcagtgcttatttcaacctgtgcagtgttctaatgagaagtgccgggagccagtcctacggaaagacctgaaagagcatttgagtgcatcctgtcagtttcgaaaggaaaaatgcctttattgcaaaaaggatgtggtagtcatcaatctacagaatcatgaggaaaacttgtgtcctgaatacccagtattttgtcccaacaattgtgcgaagattattctaaaaactgaggtagatgaacacctggctgtatgtcctgaagctgagcaagactgtccttttaagcactatggctgtgctgtaacggataaacggaggaacctgcagcaacatgagcattcagccttacgggagcacatgcgtttggttttagaaaagaatgtccaattagaagaacagatttctgacttacacaagagcctagaacagaaagaaagtaaaatccagcagctagcagaaactataaagaaacttgaaaaggagttcaagcagtttgcacagttgtttggcaaaaatggaagcttcctcccaaacatccaggtttttgccagtcacattgacaagtcagcttggctagaagctcaagtgcatcaattattacaaatggttaaccagcaacaaaataaatttgacctgagacctttgatggaagcagttgatacagtgaaacagaaaattaccctgctagaaaacaatgatcaaagattagccgttttagaagaggaaactaacaaacatgatacccacattaatattcataaagcacagctgagtaaaaatgaagagcgatttaaactgctggagggtacttgctataatggaaagctcatttggaaggtgacagattacaagatgaagaagagagaggcggtggatgggcacacagtgtccatcttcagccagtccttctacaccagccgctgtggctaccggctctgtgctagagcatacctgaatggggatgggtcagggagggggtcacacctgtccctatactttgtggtcatgcgaggagagtttgactcactgttgcagtggccattcaggcagagggtgaccctgatgcttctggaccagagtggcaaaaagaacattatggagaccttcaaacctgaccccaatagcagcagctttaaaagacctgatggggagatgaacattgcatctggctgtccccgctttgtggctcattctgttttggagaatgccaagaacgcctacattaaagatgacactctgttcttgaaagtggccgtggacttaactgacctggaggatctctagtcactgttatggggtgataagaggacttcttggggccagaactgtggaggagagcacatttgattatcatattgacctggatttagactcaaa

SEQ ID NO: 31739 - DNA, 1622 bp, Homo sapiens
  source 1..1622: mol_type = unassigned DNA
gcagccaggagcagcagccgcgcctgcagaccggcctcgcggagcccgcgcgccgagccccacaatggcttattcagaagagcataaaggtatgccctgtggtttcatccgccagaattccggcaactccatttccttggactttgagcccagtatagagtaccagtttgtggagcggttggaagagcgctacaaatgtgccttctgccactcggtgcttcacaacccccaccagacaggatgtgggcaccgcttctgccagcactgcatcctgtccctgagagaattaaacacagtgccaatctgccctgtagataaagaggtcatcaaatctcaggaggtttttaaagacaattgttgcaaaagagaagtcctcaacttatatgtatattgcagcaatgctcctggatgtaatgccaaggttattctgggccggtaccaggataaacggaggaacctgcagcaacatgagcattcagccttacgggagcacatgcgtttggttttagaaaagaatgtccaattagaagaacagatttctgacttacacaagagcctagaacagaaagaaagtaaaatccagcagctagcagaaactataaagaaacttgaaaaggagttcaagcagtttgcacagttgtttggcaaaaatggaagcttcctcccaaacatccaggtttttgccagtcacattgacaagtcagcttggctagaagctcaagtgcatcaattattacaaatggttaaccagcaacaaaataaatttgacctgagacctttgatggaagcagttgatacagtgaaacagaaaattaccctgctagaaaacaatgatcaaagattagccgttttagaagaggaaactaacaaacatgatacccacattaatattcataaagcacagctgagtaaaaatgaagagcgatttaaactgctggagggtacttgctataatggaaagctcatttggaaggtgacagattacaagatgaagaagagagaggcggtggatgggcacacagtgtccatcttcagccagtccttctacaccagccgctgtggctaccggctctgtgctagagcatacctgaatggggatgggtcagggagggggtcacacctgtccctatactttgtggtcatgcgaggagagtttgactcactgttgcagtggccattcaggcagagggtgaccctgatgcttctggaccagagtggcaaaaagaacattatggagaccttcaaacctgaccccaatagcagcagctttaaaagacctgatggggagatgaacattgcatctggctgtccccgctttgtggctcattctgttttggagaatgccaagaacgcctacattaaagatgacactctgttcttgaaagtggccgtggacttaactgacctggaggatctctagtcactgttatggggtgataagaggacttcttggggccagaactgtggaggagagcacatttgattatcatattgacctggatttagactcaaagcacatttgtatttgcctttttccttaacgtttgaagtcagtttaaaacttctgaagtgctgtctttttacattttactctgtcccagtttgaaacttaaaactcttag

SEQ ID NO: 31740 - DNA, 2558 bp, Homo sapiens
  source 1..2558: mol_type = unassigned DNA
gcagtggcgtccgcagctggggcttggcctgcgggcggccagcgaaggtggcgaaggctcccactggatccagagtttgccgtccaagcagcctcgtctcggcgcgcagtgtctgtgtccgtcctctaccagcgccttggctgagcggagtcgtgcggttggtgggggagccctgccctcctggttcggcctccccgcgcactagaacgatcatgaacttctgaagggacccagctttctttgtgtgctccaagtgatttgcacaaataataatatatatatttattgaaggagagaatcagagcaagtgataatcaagttactatgagtctgctaaactgtgaaaacagctgtggatccagccagtctgaaagtgactgctgtgtggccatggccagctcctgtagcgctgtaacaaaagatgatagtgtgggtggaactgccagcacggggaacctctccagctcatttatggaggagatccagggatatgatgtagagtttgacccacccctggaaagcaagtatgaatgccccatctgcttgatggcattacgagaagcagtgcaaacgccatgcggccataggttctgcaaagcctgcatcataaaatcaataagggatgcaggtcacaaatgtccagttgacaatgaaatactgctggaaaatcaactatttccagacaattttgcaaaacgtgagattctttctctgatggtgaaatgtccaaatgaaggttgtttgcacaagatggaactgagacatcttgaggatcatcaagcacattgtgagtttgctcttatggattgtccccaatgccagcgtcccttccaaaaattccatattaatattcacattctgaaggattgtccaaggagacaggtttcttgtgacaactgtgctgcatcaatggcatttgaagataaagagatccatgaccagaactgtcctttggcaaatgtcatctgtgaatactgcaatactatactcatcagagaacagatgcctaatcattatgatctagactgccctacagccccaattccatgcacattcagtacttttggttgccatgaaaagatgcagaggaatcacttggcacgccacctacaagagaacacccagtcacacatgagaatgttggcccaggctgttcatagtttgagcgttatacccgactctgggtatatctcagaggtccggaatttccaggaaactattcaccagttagagggtcgccttgtaagacaagaccatcaaatccgggagctgactgctaaaatggaaactcagagtatgtatgtaagtgagctcaaacgaaccattcgaacccttgaggacaaagttgctgaaatcgaagcacagcagtgcaatggaatttatatttggaagattggcaactttggaatgcatttgaaatgtcaagaagaggagaaacctgttgtgattcatagccctggattctacactggcaaacccgggtacaaactgtgcatgcgcttgcaccttcagttaccgactgctcagcgctgtgcaaactatatatccctttttgtccacacaatgcaaggagaatatgacagccacctcccttggcccttccagggtacaatacgccttacaattcttgatcagtctgaagcacctgtaaggcaaaaccacgaagagataatggatgccaaaccagagctgcttgctttccagcgacccacaatcccacggaacccaaaaggttttggctatgtaacttttatgcatctggaagccctaagacaaagaactttcattaaggatgacacattattagtgcgctgtgaggtctccacccgctttgacatgggtagccttcggagggagggttttcagccacgaagtactgatgcaggggtatagcttgccctcacttgctcaaaaacaactacctggagaaaacagtgcctttccttgccctgttctcaataacatgcaaacaaacaagccacgggaaatatgtaatatctactagtgagtgttgttagagaggtcacttactatttcttcctgttacaaatgatctgaggcagttttttcctgggaatccacacgttccatgctttttcagaaatgttaggcctgaagtgcctgtggcatgttgcagcagctattttgccagttagtatacctctttgttgtactttcttgggcttttgctctggtgtattttattgtcagaaagtccagactcaagagtactaaacttttaataataatggattttccttaaaacttcagtctttttgtagtattatatgtaatatattaaaagtgaaaatcactaccgccttgtgctagtgccctcgagaagagttattgctctagaaagttgagttctcatttttttaacctgttatagatttcagaggatttgaaccataatccttggaaaacttaagttctcattcaccccagtttttcctccaggttgttactaaggatattcagggatgagtttaaaccctaaatataaccttaattatttagtgtaaacatgtctgttgaataatacttgtttaagtgtt

SEQ ID NO: 31741 - DNA, 4627 bp, Homo sapiens
  source 1..4627: mol_type = unassigned DNA
agcagagaaggcggaagcagtggcgtccgcagctggggcttggcctgcgggcggccagcgaaggtggcgaaggctcccactggatccagagtttgccgtccaagcagcctcgtctcggcgcgcagtgtctgtgtccgtcctctaccagcgccttggctgagcggagtcgtgcggttggtgggggagccctgccctcctggttcggcctccccgcgcactagaacgagcaagtgataatcaagttactatgagtctgctaaactgtgaaaacagctgtggatccagccagtctgaaagtgactgctgtgtggccatggccagctcctgtagcgctgtaacaaaagatgatagtgtgggtggaactgccagcacggggaacctctccagctcatttatggaggagatccagggatatgatgtagagtttgacccacccctggaaagcaagtatgaatgccccatctgcttgatggcattacgagaagcagtgcaaacgccatgcggccataggttctgcaaagcctgcatcataaaatcaataagggatgcaggtcacaaatgtccagttgacaatgaaatactgctggaaaatcaactatttccagacaattttgcaaaacgtgagattctttctctgatggtgaaatgtccaaatgaaggttgtttgcacaagatggaactgagacatcttgaggatcatcaagcacattgtgagtttgctcttatggattgtccccaatgccagcgtcccttccaaaaattccatattaatattcacattctgaaggattgtccaaggagacaggtttcttgtgacaactgtgctgcatcaatggcatttgaagataaagagatccatgaccagaactgtcctttggcaaatgtcatctgtgaatactgcaatactatactcatcagagaacagatgcctaatcattatgatctagactgccctacagccccaattccatgcacattcagtacttttggttgccatgaaaagatgcagaggaatcacttggcacgccacctacaagagaacacccagtcacacatgagaatgttggcccaggctgttcatagtttgagcgttatacccgactctgggtatatctcagaggtccggaatttccaggaaactattcaccagttagagggtcgccttgtaagacaagaccatcaaatccgggagctgactgctaaaatggaaactcagagtatgtatgtaagtgagctcaaacgaaccattcgaacccttgaggacaaagttgctgaaatcgaagcacagcagtgcaatggaatttatatttggaagattggcaactttggaatgcatttgaaatgtcaagaagaggagaaacctgttgtgattcatagccctggattctacactggcaaacccgggtacaaactgtgcatgcgcttgcaccttcagttaccgactgctcagcgctgtgcaaactatatatccctttttgtccacacaatgcaaggagaatatgacagccacctcccttggcccttccagggtacaatacgccttacaattcttgatcagtctgaagcacctgtaaggcaaaaccacgaagagataatggatgccaaaccagagctgcttgctttccagcgacccacaatcccacggaacccaaaaggttttggctatgtaacttttatgcatctggaagccctaagacaaagaactttcattaaggatgacacattattagtgcgctgtgaggtctccacccgctttgacatgggtagccttcggagggagggttttcagccacgaagtactgatgcaggggtatagcttgccctcacttgctcaaaaacaactacctggagaaaacagtgcctttccttgccctgttctcaataacatgcaaacaaacaagccacgggaaatatgtaatatctactagtgagtgttgttagagaggtcacttactatttcttcctgttacaaatgatctgaggcagttttttcctgggaatccacacgttccatgctttttcagaaatgttaggcctgaagtgcctgtggcatgttgcagcagctattttgccagttagtatacctctttgttgtactttcttgggcttttgctctggtgtattttattgtcagaaagtccagactcaagagtactaaacttttaataataatggattttccttaaaacttcagtctttttgtagtattatatgtaatatattaaaagtgaaaatcactaccgccttgtgctagtgccctcgagaagagttattgctctagaaagttgagttctcatttttttaacctgttatagatttcagaggatttgaaccataatccttggaaaacttaagttctcattcaccccagtttttcctccaggttgttactaaggatattcagggatgagtttaaaccctaaatataaccttaattatttagtgtaaacatgtctgttgaataatacttgtttaagtgttccttctgccttgcttacttatttccttgaggttacgaagtagcatcttccccagagtttataatgctgagaaccacgtggataccaactgctcattgttatgctatgtaaccctttttgtctattcagtgcagagtgaatttcacagctctgcatatgtcttcatttgtttaatgcttacaagacaggagatgcacacatacaatcagcaacataaaaattaaaagtgacccaagtagtcagcgcatgtggcatctcattggtggtgacagaagctatgtgagccagaagttttcagctcttttgaataccctctggtttatttcgattaaaaagaacaaaattgatttcctaaaatcagaattttttaaaacttgggagatgattggagatacctaggaggtcaccaaactaggattagaagtcacagtggttgtatcacaacttagcttgagtatgttgctgtagcctaacaactgcaggttctgagaaggatcctgtagaatcctggaagtaaccagattttcctaatagggagatgatttttttgtgtgccatcatgtatttgttaaaggcctatatatagatataaaatatcgtggaatctagttctcagggagacccgcaactagtataagcttataaaggatctaaagatccatccaccatttaaagttgtctggtaatgagagatgacattgtatcccccagagaggccaaatcagagtcgccagccagcgttctagatcagccttaatttcaagagaaagccaaggacctcatctgcaggggagtgtggttttcagccccagcgagtgtcactttgaactttccctttgcttttttctctcttctccctccccacccacccttaggctcctgatctggtgagtttgttatggagtgaaaataaaagtcaagcagagaccttgtttcccgtgccaccattagtaccacaagctcatggctagttaccacattacttcctggcagtttgtgtccctcagctgtgccttccaaccagcgcctgagaatcactgcataccaccctctaggtagggaaacctacactgctgctgttcctgtgattattttacaatgaataaataattgtcaagttccatttaaaaactgaacagtagtatttttgtatttgcgtagaaaaagcctgaaggaaatatactaaactttttgttggcttattttcctttgcgcttgcttatattttttacattttctacaataaatgtgtacttttatcggagaaaaaaattaaatgttgccacaaaacatttaatctccacgcccccagctcaaaaaaggaaatgatatttaaaagcttcctggtcagatttctattaaaagcactggctgtgcattagatacaaagaggagtcatttcctgccttggtgatactatttttttctactaactcaagagtctttattaaaaaaaaaagttgttttgcctaatttcagcttttagcaagcttcccatctgtaaaatgatttggaccagatatttctagagtcccctccagccataacattctgtctcaaattaagttccaaccagcagaacaatgacaatacttaggaaagtattttgccagtataaaatgtctttaacttactctttgctgacactgatactttcctctaatttagtgtctatcagctgggtcacatcttaagtaaaatgagcaattttaacccccaacatttggcattttgtcataaaccagccagttattttatgctggtcattcatcttgactacaaagtagaatagtcaagctgtcattccaaatagaaaactttttacttcaatcagaattaagccttaacctggaaagttggtttcttccttacattttcccaatctcctactctattcttaaacatgctagtttcactcagttgggtatacaagcctttgggctttatgttgtatgttactaaccaccttttaccatatttatcttttggcatcattctgggacattgctaaattaaaaaagaaattgtttccacttttttctggagatgttcaactaaaggttgttttgttttgttttttgttttgagacagtctcaccctgacgctcaggctggagtgcagtggtgcaacctcggctcactgcaac

SEQ ID NO: 31742 - DNA, 3700 bp, Homo sapiens
  source 1..3700: mol_type = unassigned DNA
cggctcgcgcgtctagtccctttcccggccggcggccgagggggcatcatgaagcgggctggcggcgctgccgctcccgggcggccgcgggcgggaggtgcttcccaaggaccgtagatgcctctctagagcatgagctcaggcaagagtgcccgctacaaccgcttctccggggggcccagcaatcttcccaccccagacgtcaccacagggaccagaatggaaacgaccttcggacccgccttttcagccgtcaccaccatcacaaaagctgacgggaccagcacctacaagcagcactgcaggacaccctcctcctccagcacccttgcctactccccgcgggacgaggaggacagcatgccccccatcagcactccccgccgctccgactccgccatctctgtccgctccctgcactcagagtccagcatgtctctgcgctccacattctcactgcccgaggaggaggaggagccggagccactggtgtttgcggagcagccctcggtgaagctgtgctgtcagctctgctgcagcgtcttcaaagaccccgtgatcaccacgtgtgggcacacgttctgtaggagatgcgccttgaagtcagagaagtgtcccgtggacaacgtcaaactgaccgtggtggtgaacaacatcgcggtggccgagcagatcggggagctcttcatccactgccggcacggctgccgggtagcgggcagcgggaagccccccatctttgaggtggacccccgagggtgccccttcaccatcaagctcagcgcccggaaggaccacgagggcagctgtgactacaggcctgtgcggtgtcccaacaaccccagctgccccccgctgctcaggatgaacctggaggcccacctcaaggagtgcgagcacatcaaatgcccccactccaagtacgggtgcacgttcatcgggaaccaggacacttacgagacccacctggagacttgccgcttcgagggcctgaaggagtttctgcagcagacggatgaccgcttccacgagatgcacgtggctctggcccagaaggaccaggagatcgccttcctgcgctccatgctgggaaagctctcggagaagatcgaccagctagagaagagcctggagctcaagtttgacgtcctggacgaaaaccagagcaagctcagcgaggacctcatggagttccggcgggacgcatccatgttaaatgacgagctgtcccacatcaacgcgcggctgaacatgggcatcctaggctcctacgaccctcagcagatcttcaagtgcaaagggacctttgtgggccaccagggccctgtgtggtgtctctgcgtctactccatgggtgacctgctcttcagtggctcctctgacaagaccatcaaggtgtgggacacatgtaccacctacaagtgtcagaagacactggagggccatgatggcatcgtgctggctctctgcatccaggggtgcaaactctacagcggctctgcagactgcaccatcattgtgtgggacatccagaacctgcagaaggtgaacaccatccgggcccatgacaacccggtgtgcacgctggtctcctcacacaacgtgctcttcagcggctccctgaaggccatcaaggtctgggacatcgtgggcactgagctgaagttgaagaaggagctcacaggcctcaaccactgggtgcgggccctggtggctgcccagagctacctgtacagcggctcctaccagacaatcaagatctgggacatccgaacccttgactgcatccacgtcctgcagacgtctggtggcagcgtctactccattgctgtgacaaatcaccacattgtctgtggcacctacgagaacctcatccacgtgtgggacattgagtccaaggagcaggtgcggaccctcacgggccacgtgggcaccgtgtatgccctggcggtcatctcgacgccagaccagaccaaagtcttcagtgcatcctacgaccggtccctcagggtctggagtatggacaacatgatctgcacgcagaccctgctgcgtcaccagggcagtgtcaccgcgctggctgtgtcccggggccgactcttctcaggggctgtggatagcactgtgaaggtttggacttgctaacaggatccaggccaggctgtggtttcccctgaaccagccctggacctttctgagccaggctggccacatggggtggtctcggggtttctgcctgccccgtgggcataggtggacaggctctggcagccgggcagtgccctccccgtcccatgctcggcgagcctccctctactcggcactgtccttgctgcccagcccctctctgggtgccaggtacgacgcttgccccggcccaccctccatccccaccctccatccccaccctagatggagcgagggcctttttactcaccttttctaccgtttttagactgtatgtagatttggttacctcctggttgaaataaatgctccacagactgtggctgtgagtggggacagctcctcgggacaagggggctgtgtgtggccttgaggttggtgtgcacaggcactggctgctgtgagtgggggggcatggggcagtttcctttggtggaccccaggacttcggcccactccggggcctcccctccctgctaggaggcaactcgtcacacccaagctgctggcctccagtcccatctcccccaacacatgtgcccccaaaaagtgagccaggcacctctgtttcctgctgtttattgacagccgacggcagcgccttgcccagacctcccctgcccacctgctggagcccagcctgtgccgccctctgaggagaggcctggggggacagctgggcacgtccactcgcagggaaacacggggtgagacagcaggaaggggccctgcacgccgggacgccacctccgccagccgcctccacccgccccacaccacaatcgctggttttcggcattttttaaattttttttttaagaaacgtcaaagttgtgcccaacactgtggatcagcaaacacgatagaggagaccagtcagtacttcttggagggggcaggaggagagaggaaaagggagggcgagaatgaccacacaacacagccttggaccatgagcagaagcgtccgtgggaactccactggggtggatgggctgcctgcacagcccctggagagggggccaggcacaccctcagaggagctgcaagcccgtggcctggcctgctacatgccctgcttccacgtggctgccacgctgacacacccacattcaccaaacccacccgcgccctgggacgcagccacgccaggaggaggacacggccgccgagagcaaggcacaacctcgagttcttggggcgcagagaacttaggagagaagcacggaggagcccccggcagagcacccgcccccgggccccagccttccacctgtgctagcagcctggggcctccactctggccggaggaaggaccgcaggcagacagcctgggcctctaacagcttttgtccggagctagacttcgtgtcctttcagttggtaaatggttttctatagaatcaataatatttctttctttaaatatatatttgttaaagttatacctttttgtttctctggggaaatccgcctcagctcattcccaataaattaatactcttgatagctta

SEQ ID NO: 31743 - DNA, 2263 bp, Homo sapiens
  source 1..2263: mol_type = unassigned DNA
cccttcccatcgtgtacggtcccgcgtggctgcgcgcggcgctctgggagtacgacatggcgcgcgagctgcgggcgctgctgctgtggggccgccgcctgcggcctttgctgcgggcgccggcgctggcggccgtgccgggaggaaaaccaattctgtgtcctcggaggaccacagcccagttgggccccaggcgaaacccagcctggagcttgcaggcaggacgactgttcagcacgcagaccgccgaggacaaggaggaacccctgcactcgattatcagcagcacagagagcgtgcagggttccacttccaaacatgagttccaggccgagacaaagaagcttttggacattgttgcccggtccctgtactcagaaaaagaggtgtttatacgggagctgatctccaatgccagcgatgccttggaaaaactgcgtcacaaactggtgtctgacggccaagcactgccagaaatggagattcacttgcagaccaatgccgagaaaggcaccatcaccatccaggatactggtatcgggatgacacaggaagagctggtgtccaacctggggacgattgccagatcggggtcaaaggccttcctggatgctctgcagaaccaggctgaggccagcagcaagatcatcggccagtttggagtgggtttctactcagctttcatggtggctgacagagtggaggtctattcccgctcggcagccccggggagcctgggttaccagtggctttcagatggttctggagtgtttgaaatcgccgaagcttcgggagttagaaccgggacaaaaatcatcatccacctgaaatccgactgcaaggagttttccagcgaggcccgggtgcgagatgtggtaacgaagtacagcaacttcgtcagcttccccttgtacttgaatggaaggcggatgaacaccttgcaggccatctggatgatggaccccaaggatgtccgtgagtggcaacatgaggagttctaccgctacgtcgcgcaggctcacgacaagccccgctacaccctgcactataagacggacgcaccgctcaacatccgcagcatcttctacgtgcccgacatgaaaccgtccatgtttgatgtgagccgggagctgggctccagcgttgcactgtacagccgcaaagtcctcatccagaccaaggccacggacatcctgcccaagtggctgcgcttcatccgaggtgtggtggacagtgaggacattcccctgaacctcagccgggagctgctgcaggagagcgcactcatcaggaaactccgggacgttttacagcagaggctgatcaaattcttcattgaccagagtaaaaaagatgctgagaagtatgcaaagttttttgaagattacggcctgttcatgcgggagggcattgtgaccgccaccgagcaggaggtcaaggaggacatagcaaagctgctgcgctacgagtcctcggcgctgccctccgggcagctaaccagcctctcagaatacgccagccgcatgcgggccggcacccgcaacatctactacctgtgcgcccccaaccgtcacctggcagagcactcaccctactatgaggccatgaagaagaaagacacagaggttctcttctgctttgagcagtttgatgagctcaccctgctgcaccttcgtgagtttgacaagaagaagctgatctctgtggagacggacatagtcgtggatcactacaaggaggagaagtttgaggacaggtccccagccgccgagtgcctatcagagaaggagacggaggagctcatggcctggatgagaaatgtgctggggtcgcgtgtcaccaacgtgaaggtgaccctccgactggacacccaccctgccatggtcaccgtgctggagatgggggctgcccgccacttcctgcgcatgcagcagctggccaagacccaggaggagcgcgcacagctcctgcagcccacgctggagatcaaccccaggcacgcgctcatcaagaagctgaatcagctgcgcgcaagcgagcctggcctggctcagctgctggtggatcagatatacgagaacgccatgattgctgctggacttgttgacgaccctagggccatggtgggccgcttgaatgagctgcttgtcaaggccctggagcgacactgacagccagggggccagaaggactgacaccacagatgacagccccacctccttgagctttatttacctaaatttaaaggtatttcttaacccga

SEQ ID NO: 31744 - DNA, 2052 bp, Homo sapiens
  source 1..2052: mol_type = unassigned DNA
acgacatggcgcgcgagctgcgggcgctgctgctgtggggccgccgcctgcggcctttgctgcgggcgccggcgctggcggccgtgccgggaggttccacttccaaacatgagttccaggccgagacaaagaagcttttggacattgttgcccggtccctgtactcagaaaaagaggtgtttatacgggagctgatctccaatgccagcgatgccttggaaaaactgcgtcacaaactggtgtctgacggccaagcactgccagaaatggagattcacttgcagaccaatgccgagaaaggcaccatcaccatccaggatactggtatcgggatgacacaggaagagctggtgtccaacctggggacgattgccagatcggggtcaaaggccttcctggatgctctgcagaaccaggctgaggccagcagcaagatcatcggccagtttggagtgggtttctactcagctttcatggtggctgacagagtggaggtctattcccgctcggcagccccggggagcctgggttaccagtggctttcagatggttctggagtgtttgaaatcgccgaagcttcgggagttagaaccgggacaaaaatcatcatccacctgaaatccgactgcaaggagttttccagcgaggcccgggtgcgagatgtggtaacgaagtacagcaacttcgtcagcttccccttgtacttgaatggaaggcggatgaacaccttgcaggccatctggatgatggaccccaaggatgtccgtgagtggcaacatgaggagttctaccgctacgtcgcgcaggctcacgacaagccccgctacaccctgcactataagacggacgcaccgctcaacatccgcagcatcttctacgtgcccgacatgaaaccgtccatgtttgatgtgagccgggagctgggctccagcgttgcactgtacagccgcaaagtcctcatccagaccaaggccacggacatcctgcccaagtggctgcgcttcatccgaggtgtggtggacagtgaggacattcccctgaacctcagccgggagctgctgcaggagagcgcactcatcaggaaactccgggacgttttacagcagaggctgatcaaattcttcattgaccagagtaaaaaagatgctgagaagtatgcaaagttttttgaagattacggcctgttcatgcgggagggcattgtgaccgccaccgagcaggaggtcaaggaggacatagcaaagctgctgcgctacgagtcctcggcgctgccctccgggcagctaaccagcctctcagaatacgccagccgcatgcgggccggcacccgcaacatctactacctgtgcgcccccaaccgtcacctggcagagcactcaccctactatgaggccatgaagaagaaagacacagaggttctcttctgctttgagcagtttgatgagctcaccctgctgcaccttcgtgagtttgacaagaagaagctgatctctgtggagacggacatagtcgtggatcactacaaggaggagaagtttgaggacaggtccccagccgccgagtgcctatcagagaaggagacggaggagctcatggcctggatgagaaatgtgctggggtcgcgtgtcaccaacgtgaaggtgaccctccgactggacacccaccctgccatggtcaccgtgctggagatgggggctgcccgccacttcctgcgcatgcagcagctggccaagacccaggaggagcgcgcacagctcctgcagcccacgctggagatcaaccccaggcacgcgctcatcaagaagctgaatcagctgcgcgcaagcgagcctggcctggctcagctgctggtggatcagatatacgagaacgccatgattgctgctggacttgttgacgaccctagggccatggtgggccgcttgaatgagctgcttgtcaaggccctggagcgacactgacagccagggggccagaaggactgacaccacagatgacagccccacctccttgagctttatttacctaaatttaaaggtatttcttaacccg

SEQ ID NO: 31745 - DNA, 2785 bp, Homo sapiens
  source 1..2785: mol_type = unassigned DNA
agtgagccgaggagccttcatagggacagccgcccctggtgcacacaccctcgtattctcctgcccttccccagccaggcgggcaccacggcaggggctgagctaccctcatggaagggagaggaccgtaccggatctacgaccctgggggcagcgtgccctcaggagaggcatccgcagcttttgagcgcctagtgaaggagaattcccggctgaaggaaaaaatgcaagggataaagatgttaggggagcttttggaagagtcccagatggaagcgaccaggctccggcagaaggcagaggagctagtgaaggacaacgagctgctcccaccaccttctccctccttgggctccttcgaccccctggctgagctcacaggaaaggactcaaatgtcacagcatctcccacagcccctgcatgccccagtgacaagccagcaccagtccagaagcctccatccagtggcacctcctctgaatttgaagtggtcactcctgaggagcagaattcaccagagagcagcagccatgccaatgcgatggcgctgggccccctgccccgtgaggacggcaacctgatgctgcacctgcagcgcctggagaccacgctgagtgtgtgtgccgaggagccggaccacggccagctcttcacccacctgggccgcatggccctggagttcaaccgactggcatccaaggtgcacaagaatgagcagcgcacctccattctgcagaccctgtgtgagcagcttcggaaggagaacgaggctctgaaggccaagttggataagggcctggaacagcgggatcaggctgccgagaggctgcgggaggaaaatttggagctcaagaagttgttgatgagcaatggcaacaaagagggtgcgtctgggcggccaggctcaccgaagatggaagggacaggcaagaaggcagtggctggacagcagcaggctagtgtgacggcaggtaaggtcccagaggtggtggccttgggcgcagccgagaagaaggtgaagatgctggagcagcagcgcagtgagctgctggaagtgaacaagcagtgggaccagcatttccggtccatgaagcagcagtatgagcagaagatcactgagctgcgtcagaagctggctgatttgcagaagcaggtgactgacctggaggccgagcgggagcagaagcagcgtgactttgaccgcaagctcctcctggccaagtccaagattgaaatggaggagaccgacaaggagcagctgacagcagaggccaaggagctgcgccaaaaggtcaagtacctgcaggatcagctgagcccactcacccgacagcgtgagtaccaggaaaaggagatccagcggctcaacaaggccctggaggaagcactgagcatccaaaccccgccatcatctccaccaacagcatttgggagcccagaaggagcaggggccctcctaaggaaacaggagctggtcacgcagaatgagttgctgaaacagcaggtgaagatcttcgaggaggacttccagagggagcgcagtgatcgtgagcgcatgaatgaggagaaggaagagctgaagaagcaagtggagaagctgcaggcccaggtcaccctgtcaaatgcccagctaaaagcattcaaagatgaggagaaggcaagagaagccctcagacagcagaagaggaaagcaaaggcctcaggagagcgttaccatgtggagccccacccagaacatctctgcggggcctacccctacgcctacccgcccatgccagccatggtgccacaccatggcttcgaggactggtcccagatccgctacccccctccccccatggccatggagcacccgcccccactccccaactcgcgcctcttccatctgccggaatacacctggcgtctaccctgtggaggggttcgaaatccaaatcagagctcccaagtgatggaccctcccacagccaggcctacagaaccagagtctccaaaaaatgaccgtgaggggcctcagtgagaccagattgtgtcatttggctccaccttcatcttgcagagccagctgatctcagattgccaagaaactagaagccacttgcacggtgtggccagagcctcagctggatgagaggctgagatgggtggccagcttgtacaccagtccctgaactgagctgtttacaggactggggaggctccacccagaaggctttcatttgtactctgctgggagtgactgggaaaaactccttccctgctgctgagtggagagaggcctcatccggctttgacccaccatccgttgcagaagcctccaggagcagcaatcctaagagtgggaggcagccaagacccccttccttcaaaacctcccggaagtggtttcaggccctctagttgccatgaccaatttgtgtgtgtgtttaatttttgcttcaagctctgtagcaggacctgccccacgcacacccctacccctctgtgaggagctgtgggaagtgtgggtttgtctccagaacagaagagaatgatggatattctggctctggggccctctccaccaccactcacagtagccttgctgaagccatcacagatgggagaaggccatgccagccacgtccgccgaggggcgccagcctgaagctgccaggccctgaggttcagaccctggaccccatagctggaggcctgtggtgccagaagcccagattagggtggctgtccatccctggatagctatttgcacgaatcatggacataaatccaagttgaagaaga

SEQ ID NO: 31746 - DNA, 3268 bp, Homo sapiens
  source 1..3268: mol_type = unassigned DNA
atgcttacgtgccttttggcaggtcccctccctgttctggcctgtgttcccctcggcacaaggaaggggctgggtggtctctgtggctcgcctccgctctgaaattccggctttcaaggtggccccaggccttcgacaggggcttccggcgctgggagtgcggcaaggcgccgcgcaggcccgggacggtggccccagggaagtcgctcctagaggggaaggccgccgaagggacgagagacaccgcgggcccccggaaccgcaggcagccggtgtttacctcgctcggtcccaccccaggcggccgcgggcccgcccggagcgcgcggcgcgattgggcgagtggcctgccagtctccggggactttcccaggggtggggcggcccggccaggcccccggcacttcctcgtcctcggcccgggtgccctgcccccgtccaggagccctaggagtgctacggggggccggagccttgcccgggccgctgccccgtccctggattcggggctggacgcagcaagcggggcgctgtgtccccaagctccccgtcctcgggcgggcaccacggcaggggctgagctaccctcatggaagggagaggaccgtaccggatctacgaccctgggggcagcgtgccctcaggagaggcatccgcagcttttgagcgcctagtgaaggagaattcccggctgaaggaaaaaatgcaagggataaagatgttaggggagcttttggaagagtcccagatggaagcgaccaggctccggcagaaggcagaggagctagtgaaggacaacgagctgctcccaccaccttctccctccttgggctccttcgaccccctggctgagctcacaggaaaggactcaaatgtcacagcatctcccacagcccctgcatgccccagtgacaagccagcaccagtccagaagcctccatccagtggcacctcctctgaatttgaagtggtcactcctgaggagcagaattcaccagagagcagcagccatgccaatgcgatggcgctgggccccctgccccgtgaggacggcaacctgatgctgcacctgcagcgcctggagaccacgctgagtgtgtgtgccgaggagccggaccacggccagctcttcacccacctgggccgcatggccctggagttcaaccgactggcatccaaggtgcacaagaatgagcagcgcacctccattctgcagaccctgtgtgagcagcttcggaaggagaacgaggctctgaaggccaagttggataagggcctggaacagcgggatcaggctgccgagaggctgcgggaggaaaatttggagctcaagaagttgttgatgagcaatggcaacaaagagggtgcgtctgggcggccaggctcaccgaagatggaagggacaggcaagaaggcagtggctggacagcagcaggctagtgtgacggcaggtaaggtcccagaggtggtggccttgggcgcagccgagaagaaggtgaagatgctggagcagcagcgcagtgagctgctggaagtgaacaagcagtgggaccagcatttccggtccatgaagcagcagtatgagcagaagatcactgagctgcgtcagaagctggctgatttgcagaagcaggtgactgacctggaggccgagcgggagcagaagcagcgtgactttgaccgcaagctcctcctggccaagtccaagattgaaatggaggagaccgacaaggagcagctgacagcagaggccaaggagctgcgccaaaaggtcaagtacctgcaggatcagctgagcccactcacccgacagcgtgagtaccaggaaaaggagatccagcggctcaacaaggccctggaggaagcactgagcatccaaaccccgccatcatctccaccaacagcatttgggagcccagaaggagcaggggccctcctaaggaaacaggagctggtcacgcagaatgagttgctgaaacagcaggtgaagatcttcgaggaggacttccagagggagcgcagtgatcgtgagcgcatgaatgaggagaaggaagagctgaagaagcaagtggagaagctgcaggcccaggtcaccctgtcaaatgcccagctaaaagcattcaaagatgaggagaaggcaagagaagccctcagacagcagaagaggaaagcaaaggcctcaggagagcgttaccatgtggagccccacccagaacatctctgcggggcctacccctacgcctacccgcccatgccagccatggtgccacaccatggcttcgaggactggtcccagatccgctacccccctccccccatggccatggagcacccgcccccactccccaactcgcgcctcttccatctgccggaatacacctggcgtctaccctgtggaggggttcgaaatccaaatcagagctcccaagtgatggaccctcccacagccaggcctacagaaccagagtctccaaaaaatgaccgtgaggggcctcagtgagaccagattgtgtcatttggctccaccttcatcttgcagagccagctgatctcagattgccaagaaactagaagccacttgcacggtgtggccagagcctcagctggatgagaggctgagatgggtggccagcttgtacaccagtccctgaactgagctgtttacaggactggggaggctccacccagaaggctttcatttgtactctgctgggagtgactgggaaaaactccttccctgctgctgagtggagagaggcctcatccggctttgacccaccatccgttgcagaagcctccaggagcagcaatcctaagagtgggaggcagccaagacccccttccttcaaaacctcccggaagtggtttcaggccctctagttgccatgaccaatttgtgtgtgtgtttaatttttgcttcaagctctgtagcaggacctgccccacgcacacccctacccctctgtgaggagctgtgggaagtgtgggtttgtctccagaacagaagagaatgatggatattctggctctggggccctctccaccaccactcacagtagccttgctgaagccatcacagatgggagaaggccatgccagccacgtccgccgaggggcgccagcctgaagctgccaggccctgaggttcagaccctggaccccatagctggaggcctgtggtgccagaagcccagattagggtggctgtccatccctggatagctatttgcacgaatcatggacataaatccaagttgaagaagatcaa

SEQ ID NO: 31747 - DNA, 2586 bp, Homo sapiens
  source 1..2586: mol_type = unassigned DNA
agtgagccgaggagccttcatagggacagccgcccctggtgcacacaccctcgtattctcctgcccttccccagccaggcgggcaccacggcaggggctgagctaccctcatggaagggagaggaccgtaccggatctacgaccctgggggcagcgtgccctcaggagaggcatccgcagcttttgagcgcctagtgaaggagaattcccggctgaaggaaaaaatgcaagggataaagatgttaggggagcttttggaagagtcccagatggaagcgaccaggctccggcagaaggcagaggagctagtgaaggacaacgagctgctcccaccaccttctccctccttgggctccttcgaccccctggctgagctcacaggaaaggactcaaatgtcacagcatctcccacagcccctgcatgccccagtgacaagccagcaccagtccagaagcctccatccagtggcacctcctctgaatttgaagtggtcactcctgaggagcagaattcaccagagagcagcagccatgccaatgcgatggcgctgggccccctgccccgtgaggacggcaacctgatgctgcacctgcagcgcctggagaccacgctgagtgtgtgtgccgaggagccggaccacggccagctcttcacccacctgggccgcatggccctggagttcaaccgactggcatccaaggtgcacaagaatgagcagcgcacctccattctgcagaccctgtgtgagcagcttcggaaggagaacgaggctctgaaggccaagttggataagggcctggaacagcgggatcaggctgccgagaggctgcgggaggaaaatttggagctcaagaagttgttgatgagcaatggcaacaaagagggtgcgtctgggcggccaggctcaccgaagatggaagggacaggcaagaaggcagtggctggacagcagcaggctagtgtgacggcaggtaaggtcccagaggtggtggccttgggcgcagccgagaagaaggtgaagatgctggagcagcagcgcagtgagctgctggaagtgaacaagcagtgggaccagcatttccggtccatgaagcagcagtatgagcagaagatcactgagctgcgtcagaagctggctgatttgcagaagcaggtgactgacctggaggccgagcgggagcagaagcagcgtgactttgaccgcaagctcctcctggccaagtccaagattgaaatggaggagaccgacaaggagcagctgacagcagaggccaaggagctgcgccaaaaggtcaagtacctgcaggatcagctgagcccactcacccgacagcgtgagtaccaggaaaaggagatccagcggctcaacaaggccctggaggaagcactgagcatccaaaccccgccatcatctccaccaacagcatttgggagcccagaaggagcaggggccctcctaaggaaacaggagctggtcacgcagaatgagttgctgaaacagcaggtgaagatcttcgaggaggacttccagagggagcgcagtgatcgtgagcgcatgaatgaggagaaggaagagctgaagaagcaagtggagaagctgcaggcccaggtcaccctgtcaaatgcccagctaaaagcattcaaagatgaggagaaggcaagagaagccctcagacagcagaagaggaaagcaaagccggaatacacctggcgtctaccctgtggaggggttcgaaatccaaatcagagctcccaagtgatggaccctcccacagccaggcctacagaaccagagtctccaaaaaatgaccgtgaggggcctcagtgagaccagattgtgtcatttggctccaccttcatcttgcagagccagctgatctcagattgccaagaaactagaagccacttgcacggtgtggccagagcctcagctggatgagaggctgagatgggtggccagcttgtacaccagtccctgaactgagctgtttacaggactggggaggctccacccagaaggctttcatttgtactctgctgggagtgactgggaaaaactccttccctgctgctgagtggagagaggcctcatccggctttgacccaccatccgttgcagaagcctccaggagcagcaatcctaagagtgggaggcagccaagacccccttccttcaaaacctcccggaagtggtttcaggccctctagttgccatgaccaatttgtgtgtgtgtttaatttttgcttcaagctctgtagcaggacctgccccacgcacacccctacccctctgtgaggagctgtgggaagtgtgggtttgtctccagaacagaagagaatgatggatattctggctctggggccctctccaccaccactcacagtagccttgctgaagccatcacagatgggagaaggccatgccagccacgtccgccgaggggcgccagcctgaagctgccaggccctgaggttcagaccctggaccccatagctggaggcctgtggtgccagaagcccagattagggtggctgtccatccctggatagctatttgcacgaatcatggacataaatccaagttg

SEQ ID NO: 31748 - DNA, 2200 bp, Homo sapiens
  source 1..2200: mol_type = unassigned DNA
gactttcccaggggtggggcggcccggccaggcccccggcacttcctcgtcctcggcccgggtgccctgcccccgtccaggagccctaggagtgctacggggggccggagccttgcccgggccgctgccccgtccctggattcggggctggacgcagcaagcggggcgctgtgtccccaagctccccgtcctcggccaggcgggcaccacggcaggggctgagctaccctcatggaagggagaggaccgtaccggatctacgaccctgggggcagcgtgccctcaggagaggcatccgcagcttttgagcgcctagtgaaggagaattcccggctgaaggaaaaaatgcaagggataaagatgttaggggagcttttggaagagtcccagatggaagcgaccaggctccggcagaaggcagaggagctagtgaaggacaacgagctgctcccaccaccttctccctccttgggctccttcgaccccctggctgagctcacaggaaaggactcaaatgtcacagcatctcccacagcccctgcatgccccagtgacaagccagcaccagtccagaagcctccatccagtggcacctcctctgaatttgaagtggtcactcctgaggagcagaattcaccagagagcagcagccatgccaatgcgatggcgctgggccccctgccccgtgaggacggcaacctgatgctgcacctgcagcgcctggagaccacgctgagtgtgtgtgccgaggagccggaccacggccagctcttcacccacctgggccgcatggccctggagttcaaccgactggcatccaaggtgcacaagaatgagcagcgcacctccattctgcagaccctgtgtgagcagcttcggaaggagaacgaggctctgaaggccaagttggataagggcctggaacagcgggatcaggctgccgagaggctgcgggaggaaaatttggagctcaagaagttgttgatgagcaatggcaacaaagagggtgcgtctgggcggccaggctcaccgaagatggaagggacaggcaagaaggcagtggctggacagcagcaggctagtgtgacggcaggtaaggtcccagaggtggtggccttgggcgcagccgagaagaaggtgaagatgctggagcagcagcgcagtgagctgctggaagtgaacaagcagtgggaccagcatttccggtccatgaagcagcagtatgagcagaagatcactgagctgcgtcagaagctggctgatttgcagaagcaggtgactgacctggaggccgagcgggagcagaagcagcgtgactttgaccgcaagctcctcctggccaagtccaagattgaaatggaggagaccgacaaggagcagctgacagcagaggccaaggagctgcgccaaaaggtcaagtacctgcaggatcagctgagcccactcacccgacagcgtgagtaccaggaaaaggagatccagcggctcaacaaggccctggaggaagcactgagcatccaaaccccgccatcatctccaccaacagcatttgggagcccagaaggagcaggggccctcctaaggaaacaggagctggtcacgcagaatgagttgctgaaacagcaggtgaagatcttcgaggaggacttccagagggagcgcagtgatcgtgagcgcatgaatgaggagaaggaagagctgaagaagcaagtggagaagctgcaggcccaggtcaccctgtcaaatgcccagctaaaagcattcaaagatgaggagaaggcaagagaagccctcagacagcagaagaggaaagcaaaggcctcaggagagcgttaccatgtggagccccacccagaacatctctgcggggcctacccctacgcctacccgcccatgccagccatggtgccacaccatggcttcgaggactggtcccagatccgctacccccctccccccatggccatggagcacccgcccccactccccaactcgcgcctcttccatctgccggaatacacctggcgtctaccctgtggaggggttcgaaatccaaatcagagctcccaagtgatggaccctcccacagccaggcctacagaaccagagccagctgatctcagattgccaagaaactagaagccacttgcacggtgtggccagagcctcagctggatgagaggctgagatgggtggccag

SEQ ID NO: 31749 - DNA, 1815 bp, Homo sapiens
  source 1..1815: mol_type = unassigned DNA
gggagcttttggaagagtcccagatggaagcgaccaggctccggcagaaggcagaggagctagtgaaggacaacgagctgctcccaccaccttctccctccttgggctccttcgaccccctggctgagctcacaggaaaggactcaaatgtcacagcatctcccacagcccctgcatgccccagtgacaagccagcaccagtccagaagcctccatccagtggcacctcctctgaatttgaagtggtcactcctgaggagcagaattcaccagagagcagcagccatgccaatgcgatggcgctgggccccctgccccgtgaggacggcaacctgatgctgcacctgcagcgcctggagaccacgctgagtgtgtgtgccgaggagccggaccacggccagctcttcacccacctgggccgcatggccctggagttcaaccgactggcatccaaggtgcacaagaatgagcagcgcacctccattctgcagaccctgtgtgagcagcttcggaaggagaacgaggctctgaaggccaagttggataagggcctggaacagcgggatcaggctgccgagaggctgcgggaggaaaatttggagctcaagaagttgttgatgagcaatggcaacaaagagggtgcgtctgggcggccaggctcaccgaagatggaagggacaggcaagaaggcagtggctggacagcagcaggctagtgtgacggcaggtaaggtcccagaggtggtggccttgggcgcagccgagaagaaggtgaagatgctggagcagcagcgcagtgagctgctggaagtgaacaagcagtgggaccagcatttccggtccatgaagcagcagtatgagcagaagatcactgagctgcgtcagaagctggctgatttgcagaagcaggtgactgacctggaggccgagcgggagcagaagcagcgtgactttgaccgcaagctcctcctggccaagtccaagattgaaatggaggagaccgacaaggagcagctgacagcagaggccaaggagctgcgccaaaaggtcaagtacctgcaggatcagctgagcccactcacccgacagcgtgagtaccaggaaaaggagatccagcggctcaacaaggccctggaggaagcactgagcatccaaaccccgccatcatctccaccaacagcatttgggagcccagaaggagcaggggccctcctaaggaaacaggagctggtcacgcagaatgagttgctgaaacagcaggtgaagatcttcgaggaggacttccagagggagcgcagtgatcgtgagcgcatgaatgaggagaaggaagagctgaagaagcaagtggagaagctgcaggcccaggtcaccctgtcaaatgcccagctaaaagcattcaaagatgaggagaaggcaagagaagccctcagacagcagaagaggaaagcaaagggcacacacagaggctgccccagacaccttccagagaggaaggttaagtgaggggttcagaaactgcatccttctgaactaaacagcaccgtggtggcagccggaatacacctggcgtctaccctgtggaggggttcgaaatccaaatcagagctcccaagtgatggaccctcccacagccaggcctacagaaccagagtctccaaaaaatgaccgtgaggggcctcagtgagaccagattgtgtcatttggctccaccttcatcttgcagagccagctgatctcagattgccaagaaactagaagccacttgcacggtgtggccagagcctcagctggatgagaggctgagatgggtggccag

SEQ ID NO: 31750 - DNA, 658 bp, Homo sapiens
  source 1..658: mol_type = unassigned DNA
acttcctcgtcctcggcccgggtgccctgcccccgtccaggagccctaggagtgctacggggggccggagccttgcccgggccgctgccccgtccctggattcggggctggacgcagcaagcggggcgctgtgtccccaagctccccgtcctcgggaaaccgaggtacttggagcttgaggtcacacagctccaggcgggcaccacggcaggggctgagctaccctcatggaagggagaggaccgtaccggatctacgaccctgggggcagcgtgccctcaggagaggcatccgcagcttttgagcgcctagtgaaggagaattcccggctgaaggaaaaaatgcaagggataaagatgttaggggagcttttggaagagtcccagatggaagcgaccaggctccggcagaaggcagaggagctagtgaaggacaacgagctgctcccaccaccttctccctccttgggctccttcgaccccctggctgagctcacaggaaaggactcaaatgtcacagcatctcccacagcccctgcatgccccagtgacaagccagcaccagtccagaagcctccatccagtggcacctcctctgaatttgaagtggtcactcctgaggagcagaattcaccagagagcagcagccatgccaatgc

SEQ ID NO: 31751 - DNA, 2680 bp, Homo sapiens
  source 1..2680: mol_type = unassigned DNA
cgggtgccctgcccccgtccaggagccctaggagtgctacggggggccggagccttgcccgggccgctgccccgtccctggattcggggctggacgcagcaagcggggcgctgtgtccccaagctccccgtcctcgggggagcttttggaagagtcccagatggaagcgaccaggctccggcagaaggcagaggagctagtgaaggacaacgagctgctcccaccaccttctccctccttgggctccttcgaccccctggctgagctcacaggaaaggactcaaatgtcacagcatctcccacagcccctgcatgccccagtgacaagccagcaccagtccagaagcctccatccagtggcacctcctctgaatttgaagtggtcactcctgaggagcagaattcaccagagagcagcagccatgccaatgcgatggcgctgggccccctgccccgtgaggacggcaacctgatgctgcacctgcagcgcctggagaccacgctgagtgtgtgtgccgaggagccggaccacggccagctcttcacccacctgggccgcatggccctggagttcaaccgactggcatccaaggtgcacaagaatgagcagcgcacctccattctgcagaccctgtgtgagcagcttcggaaggagaacgaggctctgaaggccaagttggataagggcctggaacagcgggatcaggctgccgagaggctgcgggaggaaaatttggagctcaagaagttgttgatgagcaatggcaacaaagagggtgcgtctgggcggccaggctcaccgaagatggaagggacaggcaagaaggcagtggctggacagcagcaggctagtgtgacggcaggtaaggtcccagaggtggtggccttgggcgcagccgagaagaaggtgaagatgctggagcagcagcgcagtgagctgctggaagtgaacaagcagtgggaccagcatttccggtccatgaagcagcagtatgagcagaagatcactgagctgcgtcagaagctggctgatttgcagaagcaggtgactgacctggaggccgagcgggagcagaagcagcgtgactttgaccgcaagctcctcctggccaagtccaagattgaaatggaggagaccgacaaggagcagctgacagcagaggccaaggagctgcgccaaaaggtcaagtacctgcaggatcagctgagcccactcacccgacagcgtgagtaccaggaaaaggagatccagcggctcaacaaggccctggaggaagcactgagcatccaaaccccgccatcatctccaccaacagcatttgggagcccagaaggagcaggggccctcctaaggaaacaggagctggtcacgcagaatgagttgctgaaacagcaggtgaagatcttcgaggaggacttccagagggagcgcagtgatcgtgagcgcatgaatgaggagaaggaagagctgaagaagcaagtggagaagctgcaggcccaggtcaccctgtcaaatgcccagctaaaagcattcaaagatgaggagaaggcaagagaagccctcagacagcagaagaggaaagcaaaggcctcaggagagcgttaccatgtggagccccacccagaacatctctgcggggcctacccctacgcctacccgcccatgccagccatggtgccacaccatggcttcgaggactggtcccagatccgctacccccctccccccatggccatggagcacccgcccccactccccaactcgcgcctcttccatctgccggaatacacctggcgtctaccctgtggaggggttcgaaatccaaatcagagctcccaagtgatggaccctcccacagccaggcctacagaaccagagtctccaaaaaatgaccgtgaggggcctcagtgagaccagattgtgtcatttggctccaccttcatcttgcagagccagctgatctcagattgccaagaaactagaagccacttgcacggtgtggccagagcctcagctggatgagaggctgagatgggtggccagcttgtacaccagtccctgaactgagctgtttacaggactggggaggctccacccagaaggctttcatttgtactctgctgggagtgactgggaaaaactccttccctgctgctgagtggagagaggcctcatccggctttgacccaccatccgttgcagaagcctccaggagcagcaatcctaagagtgggaggcagccaagacccccttccttcaaaacctcccggaagtggtttcaggccctctagttgccatgaccaatttgtgtgtgtgtttaatttttgcttcaagctctgtagcaggacctgccccacgcacacccctacccctctgtgaggagctgtgggaagtgtgggtttgtctccagaacagaagagaatgatggatattctggctctggggccctctccaccaccactcacagtagccttgctgaagccatcacagatgggagaaggccatgccagccacgtccgccgaggggcgccagcctgaagctgccaggccctgaggttcagaccctggaccccatagctggaggcctgtggtgccagaagcccagattagggtggctgtccatccctggatagctatttgcacgaatcatggacataaatccaagttgaagaagatcaa

SEQ ID NO: 31752 - DNA, 575 bp, Homo sapiens
  source 1..575: mol_type = unassigned DNA
atacatactgttctgtgactccccgaaagagggattctctctacattctgaaatttgttgtccctatcctggtattgagaagtcaccttcctgatacaaaaagaaggaacaagttgggagaccacagtgactcaacgacaccaggcgggcaccacggcaggggctgagctaccctcatggaagggagaggaccgtaccggatctacgaccctgggggcagcgtgccctcaggagaggcatccgcagcttttgagcgcctagtgaaggagaattcccggctgaaggaaaaaatgcaagggataaagatgttaggggagcttttggaagagtcccagatggaagcgaccaggctccggcagaaggcagaggagctagtgaaggacaacgagctgctcccaccaccttctccctccttgggctccttcgaccccctggctgagctcacaggaaaggactcaaatgtcacagcatctcccacagcccctgcatgccccagtgacaagccagcaccagtccagaagcctccatccagtggcacctcctctgaatttgaagtggtcactcctgaggagcag

SEQ ID NO: 31753 - DNA, 2274 bp, Homo sapiens
  source 1..2274: mol_type = unassigned DNA
gactttcccaggggtggggcggcccggccaggcccccggcacttcctcgtcctcggcccgggtgccctgcccccgtccaggagccctaggagtgctacggggggccggagccttgcccgggccgctgccccgtccctggattcggggctggacgcagcaagcggggcgctgtgtccccaagctccccgtcctcggccaggcgggcaccacggcaggggctgagctaccctcatggaagggagaggaccgtaccggatctacgaccctgggggcagcgtgccctcaggagaggcatccgcagcttttgagcgcctagtgaaggagaattcccggctgaaggaaaaaatgcaagggataaagatgttaggggagcttttggaagagtcccagatggaagcgaccaggctccggcagaaggcagaggagctagtgaaggacaacgagctgctcccaccaccttctccctccttgggctccttcgaccccctggctgagctcacaggaaaggactcaaatgtcacagcatctcccacagcccctgcatgccccagtgacaagccagcaccagtccagaagcctccatccagtggcacctcctctgaatttgaagtggtcactcctgaggagcagaattcaccagagagcagcagccatgccaatgcgatggcgctgggccccctgccccgtgaggacggcaacctgatgctgcacctgcagcgcctggagaccacgctgagtgtgtgtgccgaggagccggaccacggccagctcttcacccacctgggccgcatggccctggagttcaaccgactggcatccaaggtgcacaagaatgagcagcgcacctccattctgcagaccctgtgtgagcagcttcggaaggagaacgaggctctgaaggccaagttggataagggcctggaacagcgggatcaggctgccgagaggctgcgggaggaaaatttggagctcaagaagttgttgatgagcaatggcaacaaagagggtgcgtctgggcggccaggctcaccgaagatggaagggacaggcaagaaggcagtggctggacagcagcaggctagtgtgacggcaggtaaggtcccagaggtggtggccttgggcgcagccgagaagaaggtgaagatgctggagcagcagcgcagtgagctgctggaagtgaacaagcagtgggaccagcatttccggtccatgaagcagcagtatgagcagaagatcactgagctgcgtcagaagctggctgatttgcagaagcaggtgactgacctggaggccgagcgggagcagaagcagcgtgactttgaccgcaagctcctcctggccaagtccaagattgaaatggaggagaccgacaaggagcagctgacagcagaggccaaggagctgcgccaaaaggtcaagtacctgcaggatcagctgagcccactcacccgacagcgtgagtaccaggaaaaggagatccagcggctcaacaaggccctggaggaagcactgagcatccaaaccccgccatcatctccaccaacagcatttgggagcccagaaggagcaggggccctcctaaggaaacaggagctggtcacgcagaatgagttgctgaaacagcaggtgaagatcttcgaggaggacttccagagggagcgcagtgatcgtgagcgcatgaatgaggagaaggaagagctgaagaagcaagtggagaagctgcaggcccaggtcaccctgtcaaatgcccagctaaaagcattcaaagatgaggagaaggcaagagaagccctcagacagcagaagaggaaagcaaaggcctcaggagagcgttaccatgtggagccccacccagaacatctctgcggggcctacccctacgcctacccgcccatgccagccatggtgccacaccatggcttcgaggactggtcccagatccgctacccccctccccccatggccatggagcacccgcccccactccccaactcgcgcctcttccatctgccggaatacacctggcgtctaccctgtggaggggttcgaaatccaaatcagagctcccaagtgatggaccctcccacagccaggcctacagaaccagagtctccaaaaaatgaccgtgaggggcctcagtgagaccagattgtgtcatttggctccaccttcatcttgcagagccagctgatctcagattgccaagaaactagaagccacttgcacggtgtggccagagcctcagctggatgagaggctgagatgggtggccag

SEQ ID NO: 31754 - DNA, 877 bp, Homo sapiens
  source 1..877: mol_type = unassigned DNA
agaagcacagtgagccgaggagccttcatagggacagccgcccctggtgcacacaccctcgtattctcctgcccttccccaggggagcttttggaagagtcccagatggaagcgaccaggctccggcagaaggcagaggagctagtgaaggacaacgagctgctcccaccaccttctccctccttgggctccttcgaccccctggctgagctcacaggaaaggactcaaatgtcacagcatctcccacagcccctgcatgccccagtgacaagccagcaccagtccagaagcctccatccagtggcacctcctctgaatttgaagtggtcactcctgaggagcagaattcaccagagagcagcagccatgccaatgcgatggcgctgggccccctgccccgtgaggacggcaacctgatgctgcacctgcagcgcctggagaccacgctgagtgtgtgtgccgaggagccggaccacggccagctcttcacccacctgggccgcatggccctggagttcaaccgactggcatccaaggtgcacaagaatgagcagcgcacctccattctgcagaccctgtgtgagcagcttcggaaggagaacgaggctctgaaggccaagttggataagggcctggaacagcgggatcaggctgccgagaggctgcgggaggaaaatttggagctcaagaagttgttgatgagcaatggcaacaaagagggtgcgtctgggcggccaggctcaccgaagatggaagggacaggcaagaaggcagtggctggacagcagcaggctagtgtgacggcaggtaaggtcccagaggtggtggccttgggcgcagccgagaagaaggtgaagatgctggagcagcagcgca

SEQ ID NO: 31755 - DNA, 2238 bp, Homo sapiens
  source 1..2238: mol_type = unassigned DNA
atgcaccaaggaaggagtgggccccttcttcactatggatggagaagcctcagagagtaagtggcaacagccaggcgggcaccacggcaggggctgagctaccctcatggaagggagaggaccgtaccggatctacgaccctgggggcagcgtgccctcaggagaggcatccgcagcttttgagcgcctagtgaaggagaattcccggctgaaggaaaaaatgcaagggataaagatgttaggggagcttttggaagagtcccagatggaagcgaccaggctccggcagaaggcagaggagctagtgaaggacaacgagctgctcccaccaccttctccctccttgggctccttcgaccccctggctgagctcacaggaaaggactcaaatgtcacagcatctcccacagcccctgcatgccccagtgacaagccagcaccagtccagaagcctccatccagtggcacctcctctgaatttgaagtggtcactcctgaggagcagaattcaccagagagcagcagccatgccaatgcgatggcgctgggccccctgccccgtgaggacggcaacctgatgctgcacctgcagcgcctggagaccacgctgagtgtgtgtgccgaggagccggaccacggccagctcttcacccacctgggccgcatggccctggagttcaaccgactggcatccaaggtgcacaagaatgagcagcgcacctccattctgcagaccctgtgtgagcagcttcggaaggagaacgaggctctgaaggccaagttggataagggcctggaacagcgggatcaggctgccgagaggctgcgggaggaaaatttggagctcaagaagttgttgatgagcaatggcaacaaagagggtgcgtctgggcggccaggctcaccgaagatggaagggacaggcaagaaggcagtggctggacagcagcaggctagtgtgacggcaggtaaggtcccagaggtggtggccttgggcgcagccgagaagaaggtgaagatgctggagcagcagcgcagtgagctgctggaagtgaacaagcagtgggaccagcatttccggtccatgaagcagcagtatgagcagaagatcactgagctgcgtcagaagctggctgatttgcagaagcaggtgactgacctggaggccgagcgggagcagaagcagcgtgactttgaccgcaagctcctcctggccaagtccaagattgaaatggaggagaccgacaaggagcagctgacagcagaggccaaggagctgcgccaaaaggtcaagtacctgcaggatcagctgagcccactcacccgacagcgtgagtaccaggaaaaggagatccagcggctcaacaaggccctggaggaagcactgagcatccaaaccccgccatcatctccaccaacagcatttgggagcccagaaggagcaggggccctcctaaggaaacaggagctggtcacgcagaatgagttgctgaaacagcaggtgaagatcttcgaggaggacttccagagggagcgcagtgatcgtgagcgcatgaatgaggagaaggaagagctgaagaagcaagtggagaagctgcaggcccaggtcaccctgtcaaatgcccagctaaaagcattcaaagatgaggagaaggcaagagaagccctcagacagcagaagaggaaagcaaaggcctcaggagagcgttaccatgtggagccccacccagaacatctctgcggggcctacccctacgcctacccgcccatgccagccatggtgccacaccatggcttcgaggactggtcccagatccgctacccccctccccccatggccatggagcacccgcccccactccccaactcgcgcctcttccatctgccggaatacacctggcgtctaccctgtggaggggttcgaaatccaaatcagagctcccaagtgatggaccctcccacagccaggcctacagaaccagagtctccaaaaaatgaccgtgaggggcctcagtgagaccagattgtgtcatttggctccaccttcatcttgcagagccagctgatctcagattgccaagaaactagaagccacttgcacggtgtggccagagcctcagctggatgagaggctgagatgggtggccagcttgtacaccagtccctgaactgagctgtttacaggactggggaggctccacccagaaggctttcatttgtactctgctgggagtgact

SEQ ID NO: 31756 - DNA, 1743 bp, Homo sapiens
  source 1..1743: mol_type = unassigned DNA
atggaagggagaggaccgtaccggatctacgaccctgggggcagcgtgccctcaggagaggcatccgcagcttttgagcgcctagtgaaggagaattcccggctgaaggaaaaaatgcaagggataaagatgttaggggagcttttggaagagtcccagatggaagcgaccaggctccggcagaaggcagaggagctagtgaaggacaacgagctgctcccaccaccttctccctccttgggctccttcgaccccctggctgagctcacaggaaaggactcaaatgtcacagcatctcccacagcccctgcatgccccagtgacaagccagcaccagtccagaagcctccatccagtggcacctcctctgaatttgaagtggtcactcctgaggagcagaattcaccagagagcagcagccatgccaatgcgatggcgctgggccccctgccccgtgaggacggcaacctgatgctgcacctgcagcgcctggagaccacgctgagtgtgtgtgccgaggagccggaccacggccagctcttcacccacctgggccgcatggccctggagttcaaccgactggcatccaaggtgcacaagaatgagcagcgcacctccattctgcagaccctgtgtgagcagcttcggaaggagaacgaggctctgaaggccaagttggataagggcctggaacagcgggatcaggctgccgagaggctgcgggaggaaaatttggagctcaagaagttgttgatgagcaatggcaacaaagagggtgcgtctgggcggccaggctcaccgaagatggaagggacaggcaagaaggcagtggctggacagcagcaggctagtgtgacggcaggtaaggtcccagaggtggtggccttgggcgcagccgagaagaaggtgaagatgctggagcagcagcgcagtgagctgctggaagtgaacaagcagtgggaccagcatttccggtccatgaagcagcagtatgagcagaagatcactgagctgcgtcagaagctggctgatttgcagaagcaggtgactgacctggaggccgagcgggagcagaagcagcgtgactttgaccgcaagctcctcctggccaagtccaagattgaaatggaggagaccgacaaggagcagctgacagcagaggccaaggagctgcgccaaaaggtcaagtacctgcaggatcagctgagcccactcacccgacagcgtgagtaccaggaaaaggagatccagcggctcaacaaggccctggaggaagcactgagcatccaaaccccgccatcatctccaccaacagcatttgggagcccagaaggagcaggggccctcctaaggaaacaggagctggtcacgcagaatgagttgctgaaacagcaggtgaagatcttcgaggaggacttccagagggagcgcagtgatcgtgagcgcatgaatgaggagaaggaagagctgaagaagcaagtggagaagctgcaggcccaggtcaccctgtcaaatgcccagctaaaagcattcaaagatgaggagaaggcaagagaagccctcagacagcagaagaggaaagcaaagccggaatacacctggcgtctaccctgtggaggggttcgaaatccaaatcagagctcccaagtgatggaccctcccacagccaggcctacagaaccagagtctccaaaaaatgaccgtgaggggcctcagtgagaccagattgtgtcatttggctcc

SEQ ID NO: 31757 - DNA, 2711 bp, Homo sapiens
  source 1..2711: mol_type = unassigned DNA
agtgagccgaggagccttcatagggacagccgcccctggtgcacacaccctcgtattctcctgcccttccccagccaggcgggcaccacggcaggggctgagctaccctcatggaagggagaggaccgtaccggatctacgaccctgggggcagcgtgccctcaggagaggcatccgcagcttttgagcgcctagtgaaggagaattcccggctgaaggaaaaaatgcaagggataaagatgttaggggagcttttggaagagtcccagatggaagcgaccaggctccggcagaaggcagaggagctagtgaaggacaacgagctgctcccaccaccttctccctccttgggctccttcgaccccctggctgagctcacaggaaaggactcaaatgtcacagcatctcccacagcccctgcatgccccagtgacaagccagcaccagtccagaagcctccatccagtggcacctcctctgaatttgaagtggtcactcctgaggagcagaattcaccagagagcagcagccatgccaatgcgatggcgctgggccccctgccccgtgaggacggcaacctgatgctgcacctgcagcgcctggagaccacgctgagtgtgtgtgccgaggagccggaccacggccagctcttcacccacctgggccgcatggccctggagttcaaccgactggcatccaaggtgcacaagaatgagcagcgcacctccattctgcagaccctgtgtgagcagcttcggaaggagaacgaggctctgaaggccaagttggataagggcctggaacagcgggatcaggctgccgagaggctgcgggaggaaaatttggagctcaagaagttgttgatgagcaatggcaacaaagagggtgcgtctgggcggccaggctcaccgaagatggaagggacaggcaagaaggcagtggctggacagcagcaggctagtgtgacggcaggtaaggtcccagaggtggtggccttgggcgcagccgagaagaaggtgaagatgctggagcagcagcgcagtgagctgctggaagtgaacaagcagtgggaccagcatttccggtccatgaagcagcagtatgagcagaagatcactgagctgcgtcagaagctggctgatttgcagaagcaggtgactgacctggaggccgagcgggagcagaagcagcgtgactttgaccgcaagctcctcctggccaagtccaagattgaaatggaggagaccgacaaggagcagctgacagcagaggccaaggagctgcgccaaaaggtcaagtacctgcaggatcagctgagcccactcacccgacagcgtgagtaccaggaaaaggagatccagcggctcaacaaggccctggaggaagcactgagcatccaaaccccgccatcatctccaccaacagcatttgggagcccagaaggagcaggggccctcctaaggaaacaggagctggtcacgcagaatgagttgctgaaacagcaggtgaagatcttcgaggaggacttccagagggagcgcagtgatcgtgagcgcatgaatgaggagaaggaagagctgaagaagcaagtggagaagctgcaggcccaggtcaccctgtcaaatgcccagctaaaagcattcaaagatgaggagaaggcaagagaagccctcagacagcagaagaggaaagcaaaggcctcaggagagcgttaccatgtggagccccacccagaacatctctgcggggcctacccctacgcctacccgcccatgccagccatggtgccacaccatggcttcgaggactggtcccagatccgctacccccctccccccatggccatggagcacccgcccccactccccaactcgcgcctcttccatctgccggaatacacctggcgtctaccctgtggaggggttcgaaatccaaatcagagctcccaagtgatggaccctcccacagccaggcctacagaaccagagccagctgatctcagattgccaagaaactagaagccacttgcacggtgtggccagagcctcagctggatgagaggctgagatgggtggccagcttgtacaccagtccctgaactgagctgtttacaggactggggaggctccacccagaaggctttcatttgtactctgctgggagtgactgggaaaaactccttccctgctgctgagtggagagaggcctcatccggctttgacccaccatccgttgcagaagcctccaggagcagcaatcctaagagtgggaggcagccaagacccccttccttcaaaacctcccggaagtggtttcaggccctctagttgccatgaccaatttgtgtgtgtgtttaatttttgcttcaagctctgtagcaggacctgccccacgcacacccctacccctctgtgaggagctgtgggaagtgtgggtttgtctccagaacagaagagaatgatggatattctggctctggggccctctccaccaccactcacagtagccttgctgaagccatcacagatgggagaaggccatgccagccacgtccgccgaggggcgccagcctgaagctgccaggccctgaggttcagaccctggaccccatagctggaggcctgtggtgccagaagcccagattagggtggctgtccatccctggatagctatttgcacgaatcatggacataaatccaagttgaagaaga

SEQ ID NO: 31758 - DNA, 1716 bp, Homo sapiens
  source 1..1716: mol_type = unassigned DNA
atggaagggagaggaccgtaccggatctacgaccctgggggcagcgtgccctcaggagaggcatccgcagcttttgagcgcctagtgaaggagaattcccggctgaaggaaaaaatgcaagggataaagatgttaggggagcttttggaagagtcccagatggaagcgaccaggctccggcagaaggcagaggagctagtgaaggacaacgagctgctcccaccaccttctccctccttgggctccttcgaccccctggctgagctcacaggaaaggactcaaatgtcacagcatctcccacagcccctgcatgccccagtgacaagccagcaccagtccagaagcctccatccagtggcacctcctctgaatttgaagtggtcactcctgaggagcagaattcaccagagagcagcagccatgccaatgcgatggcgctgggccccctgccccgtgaggacggcaacctgatgctgcacctgcagcgcctggagaccacgctgagtgtgtgtgccgaggagccggaccacggccagctcttcacccacctgggccgcatggccctggagttcaaccgactggcatccaaggtgcacaagaatgagcagcgcacctccattctgcagaccctgtgtgagcagcttcggaaggagaacgaggctctgaaggccaagttggataagggcctggaacagcgggatcaggctgccgagaggctgcgggaggaaaatttggagctcaagaagttgttgatgagcaatggcaacaaagagggtgcgtctgggcggccaggctcaccgaagatggaagggacaggcaagaaggcagtggctggacagcagcaggctagtgtgacggcaggtaaggtcccagaggtggtggccttgggcgcagccgagaagaaggtgaagatgctggagcagcagcgcagtgagctgctggaagtgaacaagcagtgggaccagcatttccggtccatgaagcagcagtatgagcagaagatcactgagctgcgtcagaagctggctgatttgcagaagcaggtgactgacctggaggccgagcgggagcagaagcagcgtgactttgaccgcaagctcctcctggccaagtccaagattgaaatggaggagaccgacaaggagcagctgacagcagaggccaaggagctgcgccaaaaggtcaagtacctgcaggatcagctgagcccactcacccgacagcgtgagtaccaggaaaaggagatccagcggctcaacaaggccctggaggaagcactgagcatccaaaccccgccatcatctccaccaacagcatttgggagcccagaaggagcaggggccctcctaaggaaacaggagctggtcacgcagaatgagttgctgaaacagcaggtgaagatcttcgaggaggacttccagagggagcgcagtgatcgtgagcgcatgaatgaggagaaggaagagctgaagaagcaagtggagaagctgcaggcccaggtcaccctgtcaaatgcccagctaaaagcattcaaagatgaggagaaggcaagagaagccctcagacagcagaagaggaaagcaaagagtctccaaaaaatgaccgtgaggggcctcagtgagaccagattgtgtcatttggctccaccttcatcttgcagagccagctgatctcagattgccaagaaactagaagccacttgcacggtgtggcca

SEQ ID NO: 31759 - DNA, 2406 bp, Homo sapiens
  source 1..2406: mol_type = unassigned DNA
agtgagccgaggagccttcatagggacagccgcccctggtgcacacaccctcgtattctcctgcccttccccagccaggcgggcaccacggcaggggctgagctaccctcatggaagggagaggcatccgcagcttttgagcgcctagtgaaggagaattcccggctgaaggaaaaaatgcaagggataaagatgttaggggagcttttggaagagtcccagatggaagcgaccaggctccggcagaaggcagaggagctagtgaaggacaacgagctgctcccaccaccttctccctccttgggctccttcgaccccctggctgagctcacaggaaaggactcaaatgtcacagcatctcccacagcccctgcatgccccagtgacaagccagcaccagtccagaagcctccatccagtggcacctcctctgaatttgaagtggtcactcctgaggagcagaattcaccagagagcagcagccatgccaatgcgatggcgctgggccccctgccccgtgaggacggcaacctgatgctgcacctgcagcgcctggagaccacgctgagtgtgtgtgccgaggagccggaccacggccagctcttcacccacctgggccgcatggccctggagttcaaccgactggcatccaaggtgcacaagaatgagcagcgcacctccattctgcagaccctgtgtgagcagcttcggaaggagaacgaggctctgaaggccaagttggataagggcctggaacagcgggatcaggctgccgagaggctgcgggaggaaaatttggagctcaagaagttgttgatgagcaatggcaacaaagagggtgcgtctgggcggccaggctcaccgaagatggaagggacaggcaagaaggcagtggctggacagcagcaggctagtgtgacggcaggtaaggtcccagaggtggtggccttgggcgcagccgagaagaaggtgaagatgctggagcagcagcgcagtgagctgctggaagtgaacaagcagtgggaccagcatttccggtccatgaagcagcagtatgagcagaagatcactgagctgcgtcagaagctggctgatttgcagaagcaggtgactgacctggaggccgagcgggagcagaagcagcgtgactttgaccgcaagctcctcctggccaagtccaagattgaaatggaggagaccgacaaggagcagctgacagcagaggccaaggagctgcgccaaaaggtcaagtacctgcaggatcagctgagcccactcacccgacagcgtgagtaccaggaaaaggagatccagcggctcaacaaggccctggaggaagcactgagcatccaaaccccgccatcatctccaccaacagcatttgggagcccagaaggagcaggggccctcctaaggaaacaggagctggtcacgcagaatgagttgctgaaacagcaggtgaagatcttcgaggaggacttccagagggagcgcagtgatcgtgagcgcatgaatgaggagaaggaagagctgaagaagcaagtggagaagctgcaggcccaggtcaccctgtcaaatgcccagctaaaagcattcaaagatgaggagaaggcaagagaagccctcagacagcagaagaggaaagcaaaggcctcaggagagcgttaccatgtggagccccacccagaacatctctgcggggcctacccctacgcctacccgcccatgccagccatggtgccacaccatggcttcgaggactggtcccagatccgctacccccctccccccatggccatggagcacccgcccccactccccaactcgcgcctcttccatctgccggaatacacctggcgtctaccctgtggaggggttcgaaatccaaatcagagctcccaagtgatggaccctcccacagccaggcctacagaaccagagtctccaaaaaatgaccgtgaggggcctcagtgagaccagattgtgtcatttggctccaccttcatcttgcagagccagctgatctcagattgccaagaaactagaagccacttgcacggtgtggccagagcctcagctggatgagaggctgagatgggtggccagcttgtacaccagtccctgaactgagctgtttacaggactggggaggctccacccagaaggctttcatttgtactctgctgggagtgactgggaaaaactccttccctgctgctgagtggagagaggcctcatccggctttgacccaccatccgttgcagaagcctccaggagcagcaatcctaagagtgggaggcagccaagacccccttccttcaaaacctcccggaagtggtttcaggccctctagttgccatgaccaatttgtgtgtgtgtttaatttttgcttcaagctctgtagc

SEQ ID NO: 31760 - DNA, 2489 bp, Homo sapiens
  source 1..2489: mol_type = unassigned DNA
agtgagccgaggagccttcatagggacagccgcccctggtgcacacaccctcgtattctcctgcccttccccagccaggcgggcaccacggcaggggctgagctaccctcatggaagggagaggaccgtaccggatctacgaccctgggggcagcgtgccctcaggagaggcatccgcagcttttgagcgcctagtgaaggagaattcccggctgaaggaaaaaatgcaagggataaagatgttaggggagcttttggaagagtcccagatggaagcgaccaggctccggcagaaggcagaggagctagtgaaggacaacgagctgctcccaccaccttctccctccttgggctccttcgaccccctggctgagctcacaggaaaggactcaaatgtcacagcatctcccacagcccctgcatgccccagtgacaagccagcaccagtccagaagcctccatccagtggcacctcctctgaatttgaagtggtcactcctgaggagcagaattcaccagagagcagcagccatgccaatgcgatggcgctgggccccctgccccgtgaggacggcaacctgatgctgcacctgcagcgcctggagaccacgctgagtgtgtgtgccgaggagccggaccacggccagctcttcacccacctgggccgcatggccctggagttcaaccgactggcatccaaggtgcacaagaatgagcagcgcacctccattctgcagaccctgtgtgagcagcttcggaaggagaacgaggctctgaaggccaagttggataagggcctggaacagcgggatcaggctgccgagaggctgcgggaggaaaatttggagctcaagaagttgttgatgagcaatggcaacaaagagggtgcgtctgggcggccaggctcaccgaagatggaagggacaggcaagaaggcagtggctggacagcagcaggctagtgtgacggcaggtaaggtcccagaggtggtggccttgggcgcagccgagaagaaggtgaagatgctggagcagcagcgcagtgagctgctggaagtgaacaagcagtgggaccagcatttccggtccatgaagcagcagtatgagcagaagatcactgagctgcgtcagaagctggctgatttgcagaagcaggtgactgacctggaggccgagcgggagcagaagcagcgtgactttgaccgcaagctcctcctggccaagtccaagattgaaatggaggagaccgacaaggagcagctgacagcagaggccaaggagctgcgccaaaaggtcaagtacctgcaggatcagctgagcccactcacccgacagcgtgagtaccaggaaaaggagatccagcggctcaacaaggccctggaggaagcactgagcatccaaaccccgccatcatctccaccaacagcatttgggagcccagaaggagcaggggccctcctaaggaaacaggagctggtcacgcagaatgagttgctgaaacagcaggtgaagatcttcgaggaggacttccagagggagcgcagtgatcgtgagcgcatgaatgaggagaaggaagagctgaagaagcaagtggagaagctgcaggcccaggtcaccctgtcaaatgcccagctaaaagcattcaaagatgaggagaaggcaagagaagccctcagacagcagaagaggaaagcaaagagtctccaaaaaatgaccgtgaggggcctcagtgagaccagattgtgtcatttggctccaccttcatcttgcagagccagctgatctcagattgccaagaaactagaagccacttgcacggtgtggccagagcctcagctggatgagaggctgagatgggtggccagcttgtacaccagtccctgaactgagctgtttacaggactggggaggctccacccagaaggctttcatttgtactctgctgggagtgactgggaaaaactccttccctgctgctgagtggagagaggcctcatccggctttgacccaccatccgttgcagaagcctccaggagcagcaatcctaagagtgggaggcagccaagacccccttccttcaaaacctcccggaagtggtttcaggccctctagttgccatgaccaatttgtgtgtgtgtttaatttttgcttcaagctctgtagcaggacctgccccacgcacacccctacccctctgtgaggagctgtgggaagtgtgggtttgtctccagaacagaagagaatgatggatattctggctctggggccctctccaccaccactcacagtagccttgctgaagccatcacagatgggagaaggccatgccagccacgtccgccgaggggcgccagcctgaagctgccaggccctgaggttcagaccctggaccccatagctggaggcctgtggtgccagaagcccagattagggtggctgtccatccctggatagctatttgcacgaatcatggacataaatccaagttg

SEQ ID NO: 31761 - DNA, 1748 bp, Homo sapiens
  source 1..1748: mol_type = unassigned DNA
agtgagccgaggagccttcatagggacagccgcccctggtgcacacaccctcgtattctcctgcccttccccagccaggcgggcaccacggcaggggctgagctaccctcatggaagggagaggaccgtaccggatctacgaccctgggggcagcgtgccctcaggagaggcatccgcagcttttgagcgcctagtgaaggagaattcccggctgaaggaaaaaatgcaagggataaagatgttaggggagcttttggaagagtcccagatggaagcgaccaggctccggcagaaggcagaggagctagtgaaggacaacgagctgctcccaccaccttctccctccttgggctccttcgaccccctggctgagctcacaggaaaggactcaaatgtcacagcatctcccacagcccctgcatgccccagtgacaagccagcaccagtccagaagcctccatccagtggcacctcctctgaatttgaagtggtcactcctgaggagcagaattcaccagagagcagcagccatgccaatgcgatggcgctgggccccctgccccgtgaggacggcaacctgatgctgcacctgcagcgcctggagaccacgctgagtgtgtgtgccgaggagccggaccacggccagctcttcacccacctgggccgcatggccctggagttcaaccgactggcatccaaggtgcacaagaatgagcagcgcacctccattctgcagaccctgtgtgagcagcttcggaaggagaacgaggctctgaaggccaagttggataagggcctggaacagcgggatcaggctgccgagaggctgcgggaggaaaatttggagctcaagaagttgttgatgagcaatggcaacaaagagggtgcgtctgggcggccaggctcaccgaagatggaagggacaggcaagaaggcagtggctggacagcagcaggctagtgtgacggcaggtaaggtcccagaggtggtggccttgggcgcagccgagaagaaggtgaagatgctggagcagcagcgcagtgagctgctggaagtgaacaagcagtgggaccagcatttccggtccatgaagcagcagtatgagcagaagatcactgagctgcgtcagaagctggctgatttgcagaagcaggtgactgacctggaggccgagcgggagcagaagcagcgtgactttgaccgcaagctcctcctggccaagtccaagattgaaatggaggagaccgacaaggagcagctgacagcagaggccaaggagctgcgccaaaaggtcaagtacctgcaggatcagctgagcccactcacccgacagcgtgagtaccaggaaaaggagatccagcggctcaacaaggccctggaggaagcactgagcatccaaaccccgccatcatctccaccaacagcatttgggagcccagaaggagcaggggccctcctaaggaaacaggagctggtcacgcagaatgagttgctgaaacagcaggtgaagatcttcgaggaggacttccagagggagcgcagtgatcgtgagcgcatgaatgaggagaaggaagagctgaagaagcaagtggagaagctgcaggcccaggtcaccctgtcaaatgcccagctaaaagcattcaaagatgaggagaaggcaagagaagccctcagacagcagaagaggaaagcaaagggcacacacagaggctgccccagacaccttccagagaggaaggttaagtga

SEQ ID NO: 31762 - DNA, 1974 bp, Homo sapiens
  source 1..1974: mol_type = unassigned DNA
ggaaagttccgggaagggcggcagccggcggggcccgggcgcggaagttgccggcggccgcgcggcctcccgggcgggcctacagccatgtcccgggacccggggtcgggcggctgggaggaggccccgcgcgcagctgccgcgctctgcaccctgtaccacgaggccggacagcggctgcgccgcctgcaggaccagctcgctgcccgcgacgccctcatcgctcgcctccgcgcccgcctggccgcgctggagggggacgccgcgccgtccctagtggacgcgctgctggagcaggttgcgcgcttccgggagcagctgcgaaggcaggagggcggcgccgccgaggcccagatgcgccaggaaattgagaggctgactgagcgactagaagaaaaagagagggagatgcagcagctgctgagccagccccaacacgagcgagagaaggaagtcgtcctgctacggaggagcatggcagaaggggagcgcgcccgggccgccagtgacgtcctgtgccgctccttggccaacgagacccatcagctgcggaggacgctgaccgccaccgcccacatgtgtcagcatctggccaagtgtctggatgaacgacagcatgcacaaaggaatgtgggggagagaagtcctgaccagtcggaacacacagatgggcacacctctgtccagagtgttattgagaagttgcaggaagaaaatcgactgttaaaacagaaggtgactcacgttgaagacctcaatgccaagtggcagcgctacaacgccagcagggacgaatacgtgagggggctccatgcgcagctcagggggctgcagatcccccacgagcccgagctgatgaggaaggagatctcccggctcaacagacagttggaagagaaaataaatgactgtgccgaagtgaagcaggagctggcggcctccaggacggcccgggatgctgcgttggagcgggtgcagatgctggaacagcagattctcgcttacaaggatgacttcatgtcagaaagggccgatcgggaacgggctcaaagtaggattcaagaactggaggaaaaggtcgcctctttgctgcaccaggtgtcctggagacaggattctcgagagccagacgccggccggattcacgctgggagcaaaactgccaagtatttggccgccgacgcattagagcttatggtgcctggtggctggaggcctgggactgggtcccagcagccagaaccccctgcagagggcgggcatcctggcgcggcccagagaggccagggggaccttcagtgccctcactgcctgcagtgcttcagtgacgagcaaggggaagagctcctcaggcatgtggctgagtgctgccagtgaccgagactcacccgtgcccttgcggcctcctggcccggtgcagctgccctcagggacagggtgggtgctctcagatgccatgggttgagctctactgagagccaaggcccctagaatagttgcggggcactctgatcgttcactttggtccctttggctatggaacaggctgggtcacagggaactgccagtgaggctggaggctggaggtggagatggggtcaggaacatctggcagagggaggtcccagtctgtgtctccatcaggcttaagccagagctatctggtgctggtgtgccagcccctcccccagcctgcctagaaaggggtggctgcctgagggagtcacttgtatggtccccagggtgggagccccatcctgttctatggaataaagcgtcgcctctctgcctcgaaccagtcaaatggagtattgcggctgcacgtcacactagggtggccacccccgccattgcgagccacatgtctgcactgagaaactgcatttcagtagcatttgtcatccagccggaagttaaagcacacttactttattcacctatttttataataaacgttcttgctgctgtgactgc

SEQ ID NO: 31763 - DNA, 2006 bp, Homo sapiens
  source 1..2006: mol_type = unassigned DNA
agttgccggcggccgcgcggcctcccgggcgggcctacagccatgtcccgggacccggggtcgggcggctgggaggaggccccgcgcgcagctgccgcgctctgcaccctgtaccacgaggccggacagcggctgcgccgcctgcaggaccagctcgctgcccgcgacgccctcatcgctcgcctccgcgcccgcctggccgcgctggagggggacgccgcgccgtccctagtggacgcgctgctggagcaggttgcgcgcttccgggagcagctgcgaaggcaggagggcggcgccgccgaggcccagatgcgccaggtacgagggcgggtaccagaggagctgcgggagcgagagtgcgtgtggcggccgccgggtcctgggaaattgagaggctgactgagcgactagaagaaaaagagagggagatgcagcagctgctgagccagccccaacacgagcgagagaaggaagtcgtcctgctacggaggagcatggcagaaggggagcgcgcccgggccgccagtgacgtcctgtgccgctccttggccaacgagacccatcagctgcggaggacgctgaccgccaccgcccacatgtgtcagcatctggccaagtgtctggatgaacgacagcatgcacaaaggaatgtgggggagagaagtcctgaccagtcggaacacacagatgggcacacctctgtccagagtgttattgagaagttgcaggaagaaaatcgactgttaaaacagaaggtgactcacgttgaagacctcaatgccaagtggcagcgctacaacgccagcagggacgaatacgtgagggggctccatgcgcagctcagggggctgcagatcccccacgagcccgagctgatgaggaaggagatctcccggctcaacagacagttggaagagaaaataaatgactgtgccgaagtgaagcaggagctggcggcctccaggacggcccgggatgctgcgttggagcgggtgcagatgctggaacagcagattctcgcttacaaggatgacttcatgtcagaaagggccgatcgggaacgggctcaaagtaggattcaagaactggaggaaaaggtcgcctctttgctgcaccaggtgtcctggagacaggattctcgagagccagacgccggccggattcacgctgggagcaaaactgccaagtatttggccgccgacgcattagagcttatggtgcctggtggctggaggcctgggactgggtcccagcagccagaaccccctgcagagggcgggcatcctggcgcggcccagagaggccagggggaccttcagtgccctcactgcctgcagtgcttcagtgacgagcaaggggaagagctcctcaggcatgtggctgagtgctgccagtgaccgagactcacccgtgcccttgcggcctcctggcccggtgcagctgccctcagggacagggtgggtgctctcagatgccatgggttgagctctactgagagccaaggcccctagaatagttgcggggcactctgatcgttcactttggtccctttggctatggaacaggctgggtcacagggaactgccagtgaggctggaggctggaggtggagatggggtcaggaacatctggcagagggaggtcccagtctgtgtctccatcaggcttaagccagagctatctggtgctggtgtgccagcccctcccccagcctgcctagaaaggggtggctgcctgagggagtcacttgtatggtccccagggtgggagccccatcctgttctatggaataaagcgtcgcctctctgcctcgaaccagtcaaatggagtattgcggctgcacgtcacactagggtggccacccccgccattgcgagccacatgtctgcactgagaaactgcatttcagtagcatttgtcatccagccggaagttaaagcacacttactttattcacctatttttataataaacgttcttgctgctgtgactgctctgagaatttg

SEQ ID NO: 31764 - DNA, 2338 bp, Homo sapiens
  source 1..2338: mol_type = unassigned DNA
gggtagctgcggccgcagcagcggcggcgggcatggcagaggcgcgatcccagccctcggcggggccgcagctcaacgcgctaccggaccactctccgttgctgcagccgggcctggcggcgctgcggcgccgggcccgggaagctggcgtcccgctcgcgccgctgccgctcaccgactccttcctgctgcggttcctgcgcgcccgggatttcgatctggacctggcctggcggttactaaaaaactattataagtggagagcagaatgtccagaaataagtgcagatctacaccctagaagtattattggcctcctaaaggctggctaccatggagtcctgagatccagggatcccactggcagcaaagttcttatttacagaatcgcacactgggaccccaaagtttttacagcttatgacgtatttcgagtaagtctaatcacatccgagcttattgtacaggaggtagaaactcagcggaatggaatcaaggctatctttgatctggaaggttggcagttttctcatgcttttcaaatcactccatccgtagccaagaagattgctgctgtacttacggattcatttccattgaaagttcgtggcatccatttgataaatgaaccagtaattttccatgctgtcttttccatgatcaaaccattcctgactgaaaaaattaaggaacggattcacatgcatgggaacaactacaaacaaagcttgcttcagcatttcccagacattcttcctctggaatatggtggtgaagaattctccatggaggacatttgtcaggaatggacaaattttataatgaagtctgaagattatctcagcagcatttctgagagcattcaatgagaagttatgtcatgtgaatggcttcctaactaaaaatacatgagtgatatccaacctggttaaatgaatgaaagaaaaggagcaaatcttttaaactaatgcttgcctgaactttaaaaatgtagaaatcttctgacatgagcaacacaggtgtttggaaagattttttactttttaaatgcttttttctctacttttgaagtaattaaatgtcagtacattttaagagcataaaaatcggcgattttgtacttgaagagaacatgaaagttattgctaaagtagctgctcatgtgcatctttgtatgtttctagaaagttatattttaaacaagttctctgattaaattggtttagaaaaaaatttagaaatattccgcttaaaaatactagcacaagtcagctaatgataaaaaaattaacacttgttttaagtggatgtcagattaaattataattcattataattaaaatctgaatagagttttatggttattcctgtggaccagcaagacatttcatctcagggaaattttattttagtatattaacacgatagaaactttttttttttttttcagacagagtcttgctctgtcgcccaggctagagtgcagtagtgagatctcagctcactgcaacctctgctaggattacatgtgcacaccaccactcctggctaagttttgtattttatatagagatggggttttgccacgttggccaagctggtctcaaactcctgaactcaagtaatttgcctgcttcggcctcccagagtcctgggattacagtcgtgagccatcgcgcctggccgtgatagaaactttcagctgaggagtctatatgccatactactctatgtggcatctttaggtctctgtgaaatcatgttgatgtaattgattaacaaaaataatttagaaaatacgtcaggcacagttgatggcttctcaatatctgctttgcatttttaaacaaatcaagaatgtaattttaacttttgcttatggtcattcttatgactacacggaaagggatggaatcatacttacttgtcttatacatggactgtttttagttaacaataacgtaactacacaaaggaaaggaaatgtttacattttaaaaaattactgtcaattacatctggtatttttcagattatgcataaaataatatgagtttgactattgtatcagaatattttaatcaaatcctgcaatttatattaacttaaaaaaacatctggtaaagactgggtgtggcagctcacacctgtaatcccagcactttgggaggccgaggctggatggatgattgcttgagcgcaggagttctagaccagcctgggcaatacagggagaccctgtctctatttcaaaaataaataaataggccccggtgtgtgatgttccccttcctgtgtccatgtgttctcaaaaaaaattaaaaaataaaaataaaaa

SEQ ID NO: 31765 - DNA, 2847 bp, Homo sapiens
  source 1..2847: mol_type = unassigned DNA
acagactgccaaatggaacagacaagcaggttgtcttgtgttaaagaaaatgagatataagtcagttactcccggaggcaatgctgctgttcagctcttctgtttttgtggccagggtcttcatgaacactaataggggtaccaggccctcttcctcgttagaagaaatcaggataacaaaggcatattgggcacccctacaaaaggaatctgtatctgtatcaagatgatctgaagaacagcttctacctttaggaatgtctagtgttccaaaatgactagcatcttccattttgccattatcttcatgttaatacttcagatcagaatacaattatctgaagaaagtgaatttttagttgataggtcaaaaaacggtctcatccacgttcctaaagacctatcccagaaaacaacaatcttaaatatatcgcaaaattatatatctgagctttggacttctgacatcttatcactgtcaaaactgaggattttgataatttctcataatagaatccagtatcttgatatcagtgttttcaaattcaaccaggaattggaatacttggatttgtcccacaacaagttggtgaagatttcttgccaccctactgtgaacctcaagcacttggacctgtcatttaatgcatttgatgccctgcctatatgcaaagagtttggcaatatgtctcaactaaaatttctggggttgagcaccacacacttagaaaaatctagtgtgctgccaattgctcatttgaatatcagcaaggtcttgctggtcttaggagagacttatggggaaaaagaagaccctgagggccttcaagactttaacactgagagtctgcacattgtgttccccacaaacaaagaattccattttattttggatgtgtcagtcaagactgtagcaaatctggaactatctaatatcaaatgtgtgctagaagataacaaatgttcttacttcctaagtattctggcgaaacttcaaacaaatccaaagttatcaaatcttaccttaaacaacattgaaacaacttggaattctttcattaggatcctccagctggtttggcatacaactgtatggtatttctcaatttcaaacgtgaagctacagggtcagctggacttcagagattttgattattctggcacttccttgaaggccttgtctatacaccaagttgtcagcgatgtgttcggttttccgcaaagttatatctatgaaatcttttcgaatatgaacatcaaaaatttcacagtgtctggtacacgcatggtccacatgctttgcccatccaaaattagcccgttcctgcatttggatttttccaataatctcttaacagacacggtttttgaaaattgtgggcaccttactgagttggagacacttattttacaaatgaatcaattaaaagaactttcaaaaatagctgaaatgactacacagatgaagtctctgcaacaattggatattagccagaattctgtaagctatgatgaaaagaaaggagactgttcttggactaaaagtttattaagtttaaatatgtcttcaaatatacttactgacactattttcagatgtttacctcccaggatcaaggtacttgatcttcacagcaataaaataaagagcattcctaaacaagtcgtaaaactggaagctttgcaagaactcaatgttgctttcaattctttaactgaccttcctggatgtggcagctttagcagcctttctgtattgatcattgatcacaattcagtttcccacccatcggctgatttcttccagagctgccagaagatgaggtcaataaaagcaggggacaatccattccaatgtacctgtgagctaggagaatttgtcaaaaatatagaccaagtatcaagtgaagtgttagagggctggcctgattcttataagtgtgactacccggaaagttatagaggaaccctactaaaggactttcacatgtctgaattatcctgcaacataactctgctgatcgtcaccatcgttgccaccatgctggtgttggctgtgactgtgacctccctctgcagctacttggatctgccctggtatctcaggatggtgtgccagtggacccagacccggcgcagggccaggaacatacccttagaagaactccaaagaaatctccagtttcatgcatttatttcatatagtgggcacgattctttctgggtgaagaatgaattattgccaaacctagagaaagaaggtatgcagatttgccttcatgagagaaactttgttcctggcaagagcattgtggaaaatatcatcacctgcattgagaagagttacaagtccatctttgttttgtctcccaactttgtccagagtgaatggtgccattatgaactctactttgcccatcacaatctctttcatgaaggatctaatagcttaatcctgatcttgctggaacccattccgcagtactccattcctagcagttatcacaagctcaaaagtctcatggccaggaggacttatttggaatggcccaaggaaaagagcaaacgtggccttttttgggctaacttaagggcagccattaatattaagctgacagagcaagcaaagaaatagattacacatcaagtgaaaaatattcctcctgttgatattgctgcttttggaagttccaacaatgactttattttgcatcagcatagatgtaaacacaattgtgagtgtatgatgtaggtaaaaatatataccttcgggtcgcagttcaccatttatatgtggtattaaaaattaatgaaatgatataactttgatttaaacagttctgacac

SEQ ID NO: 31766 - DNA, 2779 bp, Homo sapiens
  source 1..2779: mol_type = unassigned DNA
agaaaatgagatataagtcagttactcccggaggcaatgctgctgttcagctcttctgtttttgtggccagggtcttcatgaacactaataggggtaccaggccctcttcctcgttagaagaaatcaggataacaaaggcatattgggcacccctacaaaaggaatctgtatctgtatcaagatgatctgaagaacagcttctacctttaggaatgtctagtgttccaaaatgactagcatcttccattttgccattatcttcatgttaatacttcagatcagaatacaattatctgaagaaagtgaatttttagttgataggtcaaaaaacggtctcatccacgttcctaaagacctatcccagaaaacaacaatcttaaatatatcgcaaaattatatatctgagctttggacttctgacatcttatcactgtcaaaactgaggattttgataatttctcataatagaatccagtatcttgatatcagtgttttcaaattcaaccaggaattggaatacttggatttgtcccacaacaagttggtgaagatttcttgccaccctactgtgaacctcaagcacttggacctgtcatttaatgcatttgatgccctgcctatatgcaaagagtttggcaatatgtctcaactaaaatttctggggttgagcaccacacacttagaaaaatctagtgtgctgccaattgctcatttgaatatcagcaaggtcttgctggtcttaggagagacttatggggaaaaagaagaccctgagggccttcaagactttaacactgagagtctgcacattgtgttccccacaaacaaagaattccattttattttggatgtgtcagtcaagactgtagcaaatctggaactatctaatatcaaatgtgtgctagaagataacaaatgttcttacttcctaagtattctggcgaaacttcaaacaaatccaaagttatcaaatcttaccttaaacaacattgaaacaacttggaattctttcattaggatcctccagctggtttggcatacaactgtatggtatttctcaatttcaaacgtgaagctacagggtcagctggacttcagagattttgattattctggcacttccttgaaggccttgtctatacaccaagttgtcagcgatgtgttcggttttccgcaaagttatatctatgaaatcttttcgaatatgaacatcaaaaatttcacagtgtctggtacacgcatggtccacatgctttgcccatccaaaattagcccgttcctgcatttggatttttccaataatctcttaacagacacggtttttgaaaattgtgggcaccttactgagttggagacacttattttacaaatgaatcaattaaaagaactttcaaaaatagctgaaatgactacacagatgaagtctctgcaacaattggatattagccagaattctgtaagctatgatgaaaagaaaggagactgttcttggactaaaagtttattaagtttaaatatgtcttcaaatatacttactgacactattttcagatgtttacctcccaggatcaaggtacttgatcttcacagcaataaaataaagagcattcctaaacaagtcgtaaaactggaagctttgcaagaactcaatgttgctttcaattctttaactgaccttcctggatgtggcagctttagcagcctttctgtattgatcattgatcacaattcagtttcccacccatcggctgatttcttccagagctgccagaagatgaggtcaataaaagcaggggacaatccattccaatgtacctgtgagctaggagaatttgtcaaaaatatagaccaagtatcaagtgaagtgttagagggctggcctgattcttataagtgtgactacccggaaagttatagaggaaccctactaaaggactttcacatgtctgaattatcctgcaacataactctgctgatcgtcaccatcgttgccaccatgctggtgttggctgtgactgtgacctccctctgcagctacttggatctgccctggtatctcaggatggtgtgccagtggacccagacccggcgcagggccaggaacatacccttagaagaactccaaagaaatctccagtttcatgcatttatttcatatagtgggcacgattctttctgggtgaagaatgaattattgccaaacctagagaaagaaggtatgcagatttgccttcatgagagaaactttgttcctggcaagagcattgtggaaaatatcatcacctgcattgagaagagttacaagtccatctttgttttgtctcccaactttgtccagagtgaatggtgccattatgaactctactttgcccatcacaatctctttcatgaaggatctaatagcttaatcctgatcttgctggaacccattccgcagtactccattcctagcagttatcacaagctcaaaagtctcatggccaggaggacttatttggaatggcccaaggaaaagagcaaacgtggccttttttgggctaacttaagggcagccattaatattaagctgacagagcaagcaaagaaatagattacacatcaagtgaaaaatattcctcctgttgatattgctgcttttggaagttccaacaatgactttattttgcatcagcatagatgtaaacacaattgtgagtgtatgatgtaggtaaaaatatataccttcgggtcgcagttcaccatttatatgtggtattaaaaattaatgaaatgatataa

SEQ ID NO: 31767 - DNA, 648 bp, Homo sapiens
  source 1..648: mol_type = unassigned DNA
gttttcaacaccaaatgtggttaacagtgaaataaattcaaggaagtgcttgaatttcttacagactgccaaatggaacagacaagcaggttgtcttgaatctgtatctgtatcaagatgatctgaagaacagcttctacctttaggaatgtctagtgttccaaaatgactagcatcttccattttgccattatcttcatgttaatacttcagatcagaatacaattatctgaagaaagtgaatttttagttgataggtcaaaaaacggtctcatccacgttcctaaagacctatcccagaaaacaacaatcttaaatatatcgcaaaattatatatctgagctttggacttctgacatcttatcactgtcaaaactgaggattttgataatttctcataatagaatccagtatcttgatatcagtgttttcaaattcaaccaggaattggaatacttggatttgtcccacaacaagttggtgaagatttcttgccaccctactgtgaacctcaagcacttggacctgtcatttaatgcatttgatgccctgcctatatgcaaagagtttggcaatatgtctcaactaaaatttctggggttgagcaccacacacttagaaaaatctagtgtgctgccaattgctcat

SEQ ID NO: 31768 - DNA, 555 bp, Homo sapiens
  source 1..555: mol_type = unassigned DNA
aattgtatttccgttcatttacaagttattttctcttcttctgaaaaagagatcttgtggatggatgaaaaggcaagaggaaaaacaaagcagccgaaacacacccagacgcacacttctgccaagcatagccaccacgactgccaaatggaacagacaagcaggttgtcttgtgttaaagaaaatgagatataagtcagttactcccggaggcaatgctgctgttcagctcttctgtttttgtggccagggtcttcatgaacactaataggggtaccaggccctcttcctcgttagaagaaatcaggataacaaaggcatattgggcacccctacaaaaggaatctgtatctgtatcaagatgatctgaagaacagcttctacctttaggaatgtctagtgttccaaaatgactagcatcttccattttgccattatcttcatgttaatacttcagatcagaatacaattatctgaagaaagtgaatttttagttgataggtcaaaaaacggtctcatccacgttcctaaagacctatcccagaaaacaacaat

SEQ ID NO: 31769 - DNA, 605 bp, Homo sapiens
  source 1..605: mol_type = unassigned DNA
atagctttatttgcccatttattgtgttgttattttgttgttgtcattactggaaaaggcaagagtagagctatcagaatgtcttccttgaacatgctgtcaacaaaccccaggatttttataaaccctatgtgaaaaacacgctaagaatctcttttcttcttagcatatttttcacttagggtttacaaaaatatgttttgaagaaagcttgaaaagatcagtggaaaaaaattcagcaccaaattttctctgaaaatcaacttgtcaaaaaagacgtgattaacatccatcctgtaaccagcacatgaatgatcttccctctttacgagtgtgcttcagcaaaactttaatctcgacccctccctctttccacttttaatagtggatggatgaaaaggcaagaggaaaaacaaagcagccgaaacacacccagacgcacacttctgccaagcatagccaccacgaatctgtatctgtatcaagatgatctgaagaacagcttctacctttaggaatgtctagtgttccaaaatgactagcatcttccattttgccattatcttcatgttaatacttcagatcagaatacaattatctgaaga

SEQ ID NO: 31770 - DNA, 578 bp, Homo sapiens
  source 1..578: mol_type = unassigned DNA
aactatgtaatgtaattccagtggaattcggtaggtggcataaaacagcctttttgttttgttttgttttcaacaccaaatgtggttaacagtgaaataaattcaaggaagtgcttgaatttcttacagactgccaaatggaacagacaagcaggttgtcttgtgttaaagaaaatgagatataagtcagttactcccggaggcaatgctgctgttcagctcttctgtttttgtggccagaatctgtatctgtatcaagatgatctgaagaacagcttctacctttaggaatgtctagtgttccaaaatgactagcatcttccattttgccattatcttcatgttaatacttcagatcagaatacaattatctgaagaaagtgaatttttagttgataggtcaaaaaacggtctcatccacgttcctaaagacctatcccagaaaacaacaatcttaaatatatcgcaaaattatatatctgagctttggacttctgacatcttatcactgtcaaaactgaggattttgataatttctcataatagaatccagtatcttgatatcagtgttttcaaat

SEQ ID NO: 31771 - DNA, 4200 bp, Homo sapiens
  source 1..4200: mol_type = unassigned DNA
aagcactaatggactaagacaaaaagattccattatgaaagtgaaaaggcaaccgcagagtggcagaagcttttggagatgatgaatatgtttacttcctggattgcggtgatgataccatgagtgtatacatatgtgtgtatacataatgtatacaaattgtgttcattgattatgtacagtttctttgtataccaattataccttaataaagctaaggaaaaaaaaaagaaaatccagaataaatatgcatggtatgacccatttatttaaaaaaaaaaagagggaatgcgaagcagtggttttggtgcgaacacaaaaattctggcttcaacagcatttaaattcccaaaccaagcatgtttgtgttttaattctttgtggccataaattgtacagctcaggcctttatagtctctcagattctgtgaatgtggggaattagttttactcataaaaagttttgttcttggggataaattttttaaaaaaatttttgtatagttagcacactgagaaaatacagacaaaggcatacagatgcaagaaatgaggtagctgaatagaccaaagaatgatatagggcccagaaggtaggcaaagagaaagttgttgggtttatggttacaagtaaactagcagttgtggtgcagatagttttatttcccccacattaatctgaacagcccatccagacttaaacactgctttttgcatttacttctaggcaggaagacagggttctgatggtgtgagtctccttcaactcagcaaaccaccttggtctgcctcgagtttccaacacccctcctgcctgctagtgataggtgtgaggcaggttgatgaacatggaacttttttcttttggtcccaaagcatgctactcctggagtttcattcagtgaatgagaactatagtttggttctgtgagatctctatgaatcaaggcggccactgaagcggagaaaagaaatgcttaaatgttaagaaagtttgaagtgcagaaaaaggtgattgtaaatccatatggttaagcttagcccatttcttaaaaggcttgattgctcattcctccattcattgatttactcactcttccaatccatgttattgagtcttgctctgtaattccggatggttgtgcttttaagtactgcatagtggttgtatgtctgtgttagcattgctgaatgtatcagggaattcatttttttatccccattcattcgttccattcatctgtttctctctctctctctctttgtgtgtgtgtgtgtgtgtgtgtgtgtgtgtgtgtgtgtgtgtgttatgcctagaaaacatttctcaagaattagaattacgatatgctgtcaaacacaatgacttatttgaacctcttttatttgtaggttgaagcactggacaatgccacatactttgtggatggtgtgggtcttgggggtcatcatcagcctctccaaggaagaatcctccaatcaggcttctctgtcttgtgaccgcaatggtatctgcaagggcagctcaggatctttaaactccattccctcagggctcacagaagctgtaaaaagccttgacctgtccaacaacaggatcacctacattagcaacagtgacctacagaggtgtgtgaacctccaggctctggtgctgacatccaatggaattaacacaatagaggaagattctttttcttccctgggcagtcttgaacatttagacttatcctataattacttatctaatttatcgtcttcctggttcaagcccctttcttctttaacattcttaaacttactgggaaatccttacaaaaccctaggggaaacatctcttttttctcatctcacaaaattgcaaatcctgagagtgggaaatatggacaccttcactaagattcaaagaaaagattttgctggacttaccttccttgaggaacttgagattgatgcttcagatctacagagctatgagccaaaaagtttgaagtcaattcagaatgtaagtcatctgatccttcatatgaagcagcatattttactgctggagatttttgtagatgttacaagttccgtggaatgtttggaactgcgagatactgatttggacactttccatttttcagaactatccactggtgaaacaaattcattgattaaaaagtttacatttagaaatgtgaaaatcaccgatgaaagtttgtttcaggttatgaaacttttgaatcagatttctggattgttagaattagagtttgatgactgtacccttaatggagttggtaattttagagcatctgataatgacagagttatagatccaggtaaagtggaaacgttaacaatccggaggctgcatattccaaggttttacttattttatgatctgagcactttatattcacttacagaaagagttaaaagaatcacagtagaaaacagtaaagtttttctggttccttgtttactttcacaacatttaaaatcattagaatacttggatctcagtgaaaatttgatggttgaagaatacttgaaaaattcagcctgtgaggatgcctggccctctctacaaactttaattttaaggcaaaatcatttggcatcattggaaaaaaccggagagactttgctcactctgaaaaacttgactaacattgatatcagtaagaatagttttcattctatgcctgaaacttgtcagtggccagaaaagatgaaatatttgaacttatccagcacacgaatacacagtgtaacaggctgcattcccaagacactggaaattttagatgttagcaacaacaatctcaatttattttctttgaatttgccgcaactcaaagaactttatatttccagaaataagttgatgactctaccagatgcctccctcttacccatgttactagtattgaaaatcagtaggaatgcaataactacgttttctaaggagcaacttgactcatttcacacactgaagactttggaagctggtggcaataacttcatttgctcctgtgaattcctctccttcactcaggagcagcaagcactggccaaagtcttgattgattggccagcaaattacctgtgtgactctccatcccatgtgcgtggccagcaggttcaggatgtccgcctctcggtgtcggaatgtcacaggacagcactggtgtctggcatgtgctgtgctctgttcctgctgatcctgctcacgggggtcctgtgccaccgtttccatggcctgtggtatatgaaaatgatgtgggcctggctccaggccaaaaggaagcccaggaaagctcccagcaggaacatctgctatgatgcatttgtttcttacagtgagcgggatgcctactgggtggagaaccttatggtccaggagctggagaacttcaatccccccttcaagttgtgtcttcataagcgggacttcattcctggcaagtggatcattgacaatatcattgactccattgaaaagagccacaaaactgtctttgtgctttctgaaaactttgtgaagagtgagtggtgcaagtatgaactggacttctcccatttccgtctttttgatgagaacaatgatgctgccattctcattcttctggagcccattgagaaaaaagccattccccagcgcttctgcaagctgcggaagataatgaacaccaagacctacctggagtggcccatggacgaggctcagcgggaaggattttgggtaaatctgagagctgcgataaagtcctaggttcccatatttaagaccagtctttgtctagttgggatctttatgtcactagttatagttaagttcattcagacataattatataaaaactacgtggatgtaccgtcatttgaggacttgcttactaaaactacaaaacttcaaattttgtctggggtgctgttttataaacatatgccagatttaaaaattggtttttggtttttcttttttctatgagataaccatgatcataagtctattactgatatctgaatatagtcccttggtatccaagggaattggttgcaggatcctcgtggatatcaaaattcatagatgatcaagtcccttataagagtggcatagtatttgcatataacctgtgtacattctcctgtatactttaaatcatctctagattacttatgatacccaatacaatgtaaatactatgt

SEQ ID NO: 31772 - DNA, 3047 bp, Homo sapiens
  source 1..3047: mol_type = unassigned DNA
tttcactttcgagagtgccgtctatttgccacacacttccctgatgaaatgtctggatttggactaaagaaaaaaggaaaggctagcagtcatccaacagaatcatgagacagactttgccttgtatctacttttgggggggccttttgccctttgggatgctgtgtgcatcctccaccaccaagtgcactgttagccatgaagttgctgactgcagccacctgaagttgactcaggtacccgatgatctacccacaaacataacagtgttgaaccttacccataatcaactcagaagattaccagccgccaacttcacaaggtatagccagctaactagcttggatgtaggatttaacaccatctcaaaactggagccagaattgtgccagaaacttcccatgttaaaagttttgaacctccagcacaatgagctatctcaactttctgataaaacctttgccttctgcacgaatttgactgaactccatctcatgtccaactcaatccagaaaattaaaaataatccctttgtcaagcagaagaatttaatcacattagatctgtctcataatggcttgtcatctacaaaattaggaactcaggttcagctggaaaatctccaagagcttctattatcaaacaataaaattcaagcgctaaaaagtgaagaactggatatctttgccaattcatctttaaaaaaattagagttgtcatcgaatcaaattaaagagttttctccagggtgttttcacgcaattggaagattatttggcctctttctgaacaatgtccagctgggtcccagccttacagagaagctatgtttggaattagcaaacacaagcattcggaatctgtctctgagtaacagccagctgtccaccaccagcaatacaactttcttgggactaaagtggacaaatctcactatgctcgatctttcctacaacaacttaaatgtggttggtaacgattcctttgcttggcttccacaactagaatatttcttcctagagtataataatatacagcatttgttttctcactctttgcacgggcttttcaatgtgaggtacctgaatttgaaacggtcttttactaaacaaagtatttcccttgcctcactccccaagattgatgatttttcttttcagtggctaaaatgtttggagcaccttaacatggaagataatgatattccaggcataaaaagcaatatgttcacaggattgataaacctgaaatacttaagtctatccaactcctttacaagtttgcgaactttgacaaatgaaacatttgtatcacttgctcattctcccttacacatactcaacctaaccaagaataaaatctcaaaaatagagagtgatgctttctcttggttgggccacctagaagtacttgacctgggccttaatgaaattgggcaagaactcacaggccaggaatggagaggtctagaaaatattttcgaaatctatctttcctacaacaagtacctgcagctgactaggaactcctttgccttggtcccaagccttcaacgactgatgctccgaagggtggcccttaaaaatgtggatagctctccttcaccattccagcctcttcgtaacttgaccattctggatctaagcaacaacaacatagccaacataaatgatgacatgttggagggtcttgagaaactagaaattctcgatttgcagcataacaacttagcacggctctggaaacacgcaaaccctggtggtcccatttatttcctaaagggtctgtctcacctccacatccttaacttggagtccaacggctttgacgagatcccagttgaggtcttcaaggatttatttgaactaaagatcatcgatttaggattgaataatttaaacacacttccagcatctgtctttaataatcaggtgtctctaaagtcattgaaccttcagaagaatctcataacatccgttgagaagaaggttttcgggccagctttcaggaacctgactgagttagatatgcgctttaatccctttgattgcacgtgtgaaagtattgcctggtttgttaattggattaacgagacccataccaacatccctgagctgtcaagccactacctttgcaacactccacctcactatcatgggttcccagtgagactttttgatacatcatcttgcaaagacagtgccccctttgaactctttttcatgatcaataccagtatcctgttgatttttatctttattgtacttctcatccactttgagggctggaggatatctttttattggaatgtttcagtacatcgagttcttggtttcaaagaaatagacagacagacagaacagtttgaatatgcagcatatataattcatgcctataaagataaggattgggtctgggaacatttctcttcaatggaaaaggaagaccaatctctcaaattttgtctggaagaaagggactttgaggcgggtgtttttgaactagaagcaattgttaacagcatcaaaagaagcagaaaaattatttttgttataacacaccatctattaaaagacccattatgcaaaagattcaaggtacatcatgcagttcaacaagctattgaacaaaatctggattccattatattggttttccttgaggagattccagattataaactgaaccatgcactctgtttgcgaagaggaatgtttaaatctcactgcatcttgaactggccagttcagaaagaacggataggtgcctttcgtcataaattgcaagtagcacttggatccaaaaactctgtacattaaatttatttaaatattcaattagcaaaggagaaactttctcaatttaaaaagttctatggcaaatttaagttttccataaaggtgttataatttgtttattcatatttgtaaatgattatattctatcacaattacatctcttctaggaaaatgtgtctccttatttcaggcctatttttgacaattgacttaattttacccaaaataaaacatataagcacgtaagaa

SEQ ID NO: 31773 - DNA, 2310 bp, Homo sapiens
  source 1..2310: mol_type = unassigned DNA
aagacacaaccaggaactgccccaggagtgacttcacgagcagtttattcattgcaattgttctcatggtgataaagaaaaagtaccaggagatggatcctggactggaaggtcagagaagcctccctgaaaaggtggcatctaagctgaggctgtgaatgctgagcagaagttagcccgtggccaggggaggtcagaggctggagtaagagttttctccagggtgttttcacgcaattggaagattatttggcctctttctgaacaatgtccagctgggtcccagccttacagagaagctatgtttggaattagcaaacacaagcattcggaatctgtctctgagtaacagccagctgtccaccaccagcaatacaactttcttgggactaaagtggacaaatctcactatgctcgatctttcctacaacaacttaaatgtggttggtaacgattcctttgcttggcttccacaactagaatatttcttcctagagtataataatatacagcatttgttttctcactctttgcacgggcttttcaatgtgaggtacctgaatttgaaacggtcttttactaaacaaagtatttcccttgcctcactccccaagattgatgatttttcttttcagtggctaaaatgtttggagcaccttaacatggaagataatgatattccaggcataaaaagcaatatgttcacaggattgataaacctgaaatacttaagtctatccaactcctttacaagtttgcgaactttgacaaatgaaacatttgtatcacttgctcattctcccttacacatactcaacctaaccaagaataaaatctcaaaaatagagagtgatgctttctcttggttgggccacctagaagtacttgacctgggccttaatgaaattgggcaagaactcacaggccaggaatggagaggtctagaaaatattttcgaaatctatctttcctacaacaagtacctgcagctgactaggaactcctttgccttggtcccaagccttcaacgactgatgctccgaagggtggcccttaaaaatgtggatagctctccttcaccattccagcctcttcgtaacttgaccattctggatctaagcaacaacaacatagccaacataaatgatgacatgttggagggtcttgagaaactagaaattctcgatttgcagcataacaacttagcacggctctggaaacacgcaaaccctggtggtcccatttatttcctaaagggtctgtctcacctccacatccttaacttggagtccaacggctttgacgagatcccagttgaggtcttcaaggatttatttgaactaaagatcatcgatttaggattgaataatttaaacacacttccagcatctgtctttaataatcaggtgtctctaaagtcattgaaccttcagaagaatctcataacatccgttgagaagaaggttttcgggccagctttcaggaacctgactgagttagatatgcgctttaatccctttgattgcacgtgtgaaagtattgcctggtttgttaattggattaacgagacccataccaacatccctgagctgtcaagccactacctttgcaacactccacctcactatcatgggttcccagtgagactttttgatacatcatcttgcaaagacagtgccccctttgaactctttttcatgatcaataccagtatcctgttgatttttatctttattgtacttctcatccactttgagggctggaggatatctttttattggaatgtttcagtacatcgagttcttggtttcaaagaaatagacagacagacagaacagtttgaatatgcagcatatataattcatgcctataaagataaggattgggtctgggaacatttctcttcaatggaaaaggaagaccaatctctcaaattttgtctggaagaaagggactttgaggcgggtgtttttgaactagaagcaattgttaacagcatcaaaagaagcagaaaaattatttttgttataacacaccatctattaaaagacccattatgcaaaagattcaaggtacatcatgcagttcaacaagctattgaacaaaatctggattccattatattggttttccttgaggagattccagattataaactgaaccatgcactctgtttgcgaagaggaatgtttaaatctcactgcatcttgaactggccagttcagaaagaacggataggtgcctttcgtcataaattgcaagtagcacttggatccaaaaactctgtacattaaatttatttaaatattc

SEQ ID NO: 31774 - DNA, 2711 bp, Homo sapiens
  source 1..2711: mol_type = unassigned DNA
cactttcgagagtgccgtctatttgccacacacttccctgatgaaatgtctggatttggactaaagaaaaaaggaaaggctagcagtcatccaacagaatcatgagacagactttgccttgtatctacttttgggggggccttttgccctttgggatgctgtgtgcatcctccaccaccaagtgcactgttagccatgaagttgctgactgcagccacctgaagttgactcaggtacccgatgatctacccacaaacataacagtgttgaaccttacccataatcaactcagaagattaccagccgccaacttcacaaggtatagccagctaactagcttggatgtaggatttaacaccatctcaaaactggagccagaattgtgccagaaacttcccatgttaaaagttttgaacctccagcacaatgagctatctcaactttctgataaaacctttgccttctgcacgaatttgactgaactccatctcatgtccaactcaatccagaaaattaaaaataatccctttgtcaagcagaagaatttaatcacattagatctgtctcataatggcttgtcatctacaaaattaggaactcaggttcagctggaaaatctccaagagcttctattatcaaacaataaaattcaagcgctaaaaagtgaagaactggatatctttgccaattcatctttaaaaaaattagagttgtcatcgaatcaaattaaagagttttctccagggtgttttcacgcaattggaagattatttggcctctttctgaacaatgtccagctgggtcccagccttacagagaagctatgtttggaattagcaaacacaagcattcggaatctgtctctgagtaacagccagctgtccaccaccagcaatacaactttcttgggactaaagtggacaaatctcactatgctcgatctttcctacaacaacttaaatgtggttggtaacgattcctttgcttggcttccacaactagaatatttcttcctagagtataataatatacagcatttgttttctcactctttgcacgggcttttcaatgtgaggtacctgaatttgaaacggtcttttactaaacaaagtatttcccttgcctcactccccaagattgatgatttttcttttcagtggctaaaatgtttggagcaccttaacatggaagataatgatattccaggcataaaaagcaatatgttcacaggattgataaacctgaaatacttaagtctatccaactcctttacaagtttgcgaactttgacaaatgaaacatttgtatcacttgctcattctcccttacacatactcaacctaaccaagaataaaatctcaaaaatagagagtgatgctttctcttggttgggccacctagaagtacttgacctgggccttaatgaaattgggcaagaactcacaggccaggaatggagaggtctagaaaatattttcgaaatctatctttcctacaacaagtacctgcagctgactaggaactcctttgccttggtcccaagccttcaacgactgatgctccgaagggtggcccttaaaaatgtggatagctctccttcaccattccagcctcttcgtaacttgaccattctggatctaagcaacaacaacatagccaacataaatgatgacatgttggagggtcttgagaaactagaaattctcgatttgcagcataacaacttagcacggctctggaaacacgcaaaccctggtggtcccatttatttcctaaagggtctgtctcacctccacatccttaacttggagtccaacggctttgacgagatcccagttgaggtcttcaaggatttatttgaactaaagatcatcgatttaggattgaataatttaaacacacttccagcatctgtctttaataatcaggtgtctctaaagtcattgaaccttcagaagaatctcataacatccgttgagaagaaggttttcgggccagctttcaggaacctgactgagttagatatgcgctttaatccctttgattgcacgtgtgaaagtattgcctggtttgttaattggattaacgagacccataccaacatccctgagctgtcaagccactacctttgcaacactccacctcactatcatgggttcccagtgagactttttgatacatcatcttgcaaagacagtgccccctttgaactctttttcatgatcaataccagtatcctgttgatttttatctttattgtacttctcatccactttgagggctggaggatatctttttattggaatgtttcagtacatcgagttcttggtttcaaagaaatagacagacagacagaacagtttgaatatgcagcatatataattcatgcctataaagataaggattgggtctgggaacatttctcttcaatggaaaaggaagaccaatctctcaaattttgtctggaagaaagggactttgaggcgggtgtttttgaactagaagcaattgttaacagcatcaaaagaagcagaaaaattatttttgttataacacaccatctattaaaagacccattatgcaaaagattcaaggtacatcatgcagttcaacaagctattgaacaaaatctggattccattatattggttttccttgaggagattccagattataaactgaaccatgcactctgtttgcgaagagcaaag

SEQ ID NO: 31775 - DNA, 2938 bp, Homo sapiens
  source 1..2938: mol_type = unassigned DNA
agaatttggactcatatcaagatgctctgaagaagaacaaccctttaggatagccactgcaacatcatgaccaaagacaaagaacctattgttaaaagcttccattttgtttgccttatgatcataatagttggaaccagaatccagttctccgacggaaatgaatttgcagtagacaagtcaaaaagaggtcttattcatgttccaaaagacctaccgctgaaaaccaaagtcttagatatgtctcagaactacatcgctgagcttcaggtctctgacatgagctttctatcagagttgacagttttgagactttcccataacagaatccagctacttgatttaagtgttttcaagttcaaccaggatttagaatatttggatttatctcataatcagttgcaaaagatatcctgccatcctattgtgagtttcaggcatttagatctctcattcaatgatttcaaggccctgcccatctgtaaggaatttggcaacttatcacaactgaatttcttgggattgagtgctatgaagctgcaaaaattagatttgctgccaattgctcacttgcatctaagttatatccttctggatttaagaaattattatataaaagaaaatgagacagaaagtctacaaattctgaatgcaaaaacccttcaccttgtttttcacccaactagtttattcgctatccaagtgaacatatcagttaatactttagggtgcttacaactgactaatattaaattgaatgatgacaactgtcaagttttcattaaatttttatcagaactcaccagaggttcaaccttactgaattttaccctcaaccacatagaaacgacttggaaatgcctggtcagagtctttcaatttctttggcccaaacctgtggaatatctcaatatttacaatttaacaataattgaaagcattcgtgaagaagattttacttattctaaaacgacattgaaagcattgacaatagaacatatcacgaaccaagtttttctgttttcacagacagctttgtacaccgtgttttctgagatgaacattatgatgttaaccatttcagatacaccttttatacacatgctgtgtcctcatgcaccaagcacattcaagtttttgaactttacccagaacgttttcacagatagtatttttgaaaaatgttccacgttagttaaattggagacacttatcttacaaaagaatggattaaaagaccttttcaaagtaggtctcatgacgaaggatatgccttctttggaaatactggatgttagctggaattctttggaatctggtagacataaagaaaactgcacttgggttgagagtatagtggtgttaaatttgtcttcaaatatgcttactgactctgttttcagatgtttacctcccaggatcaaggtacttgatcttcacagcaataaaataaagagcgttcctaaacaagtcgtaaaactggaagctttgcaagaactcaatgttgctttcaattctttaactgaccttcctggatgtggcagctttagcagcctttctgtattgatcattgatcacaattcagtttcccacccatcggctgatttcttccagagctgccagaagatgaggtcaataaaagcaggggacaatccattccaatgtacctgtgagctaagagaatttgtcaaaaatatagaccaagtatcaagtgaagtgttagagggctggcctgattcttataagtgtgactacccagaaagttatagaggaagcccactaaaggactttcacatgtctgaattatcctgcaacataactctgctgatcgtcaccatcggtgccaccatgctggtgttggctgtgactgtgacctccctctgcatctacttggatctgccctggtatctcaggatggtgtgccagtggacccagactcggcgcagggccaggaacatacccttagaagaactccaaagaaacctccagtttcatgcttttatttcatatagtgaacatgattctgcctgggtgaaaagtgaattggtaccttacctagaaaaagaagatatacagatttgtcttcatgagagaaactttgtccctggcaagagcattgtggaaaatatcatcaactgcattgagaagagttacaagtccatctttgttttgtctcccaactttgtccagagtgagtggtgccattacgaactctattttgcccatcacaatctctttcatgaaggatctaataacttaatcctcatcttactggaacccattccacagaacagcattcccaacaagtaccacaagctgaaggctctcatgacgcagcggacttatttgcagtggcccaaggagaaaagcaaacgtgggctcttttgggctaacattagagccgcttttaatatgaaattaacactagtcactgaaaacaatgatgtgaaatcttaaaaaaatttaggaaattcaacttaagaaaccattatttacttggatgatggtgaatagtacagtcgtaagtaactgtctggaggtgcctccattatcctcatgccttcaggaaagacttaacaaaaacaatgtttcatctggggaactgagctaggcggtgaggttagcctgccagttagagacagcccagtctcttctggtttaatcattatgtttcaaattgaaacagtctcttttgagtaaatgctcagtttttcagctcctctccactctgctttcccaaatggattctgttgtgagcaagagtttatatggcttcatggcagcaagggaacagtcaacttcagcatcatatgcaccagtcctcggagtgccctgtgaatcatattggtctttgggtcagtgtcatcattctcttcaagtctggggcttggggaaaaaattagatcagctacggcatataaaaaagtcttttgtttca

SEQ ID NO: 31776 - DNA, 5879 bp, Homo sapiens
  source 1..5879: mol_type = unassigned DNA
attgtatttccgttcatttacaagttattttctcttcttctgaaaaagagatcttgaatttggactcatatcaagatgctctgaagaagaacaaccctttaggatagccactgcaacatcatgaccaaagacaaagaacctattgttaaaagcttccattttgtttgccttatgatcataatagttggaaccagaatccagttctccgacggaaatgaatttgcagtagacaagtcaaaaagaggtcttattcatgttccaaaagacctaccgctgaaaaccaaagtcttagatatgtctcagaactacatcgctgagcttcaggtctctgacatgagctttctatcagagttgacagttttgagactttcccataacagaatccagctacttgatttaagtgttttcaagttcaaccaggatttagaatatttggatttatctcataatcagttgcaaaagatatcctgccatcctattgtgagtttcaggcatttagatctctcattcaatgatttcaaggccctgcccatctgtaaggaatttggcaacttatcacaactgaatttcttgggattgagtgctatgaagctgcaaaaattagatttgctgccaattgctcacttgcatctaagttatatccttctggatttaagaaattattatataaaagaaaatgagacagaaagtctacaaattctgaatgcaaaaacccttcaccttgtttttcacccaactagtttattcgctatccaagtgaacatatcagttaatactttagggtgcttacaactgactaatattaaattgaatgatgacaactgtcaagttttcattaaatttttatcagaactcaccagaggttcaaccttactgaattttaccctcaaccacatagaaacgacttggaaatgcctggtcagagtctttcaatttctttggcccaaacctgtggaatatctcaatatttacaatttaacaataattgaaagcattcgtgaagaagattttacttattctaaaacgacattgaaagcattgacaatagaacatatcacgaaccaagtttttctgttttcacagacagctttgtacaccgtgttttctgagatgaacattatgatgttaaccatttcagatacaccttttatacacatgctgtgtcctcatgcaccaagcacattcaagtttttgaactttacccagaacgttttcacagatagtatttttgaaaaatgttccacgttagttaaattggagacacttatcttacaaaagaatggattaaaagaccttttcaaagtaggtctcatgacgaaggatatgccttctttggaaatactggatgttagctggaattctttggaatctggtagacataaagaaaactgcacttgggttgagagtatagtggtgttaaatttgtcttcaaatatgcttactgactctgttttcagatgtttacctcccaggatcaaggtacttgatcttcacagcaataaaataaagagcgttcctaaacaagtcgtaaaactggaagctttgcaagaactcaatgttgctttcaattctttaactgaccttcctggatgtggcagctttagcagcctttctgtattgatcattgatcacaattcagtttcccacccatcggctgatttcttccagagctgccagaagatgaggtcaataaaagcaggggacaatccattccaatgtacctgtgagctaagagaatttgtcaaaaatatagaccaagtatcaagtgaagtgttagagggctggcctgattcttataagtgtgactacccagaaagttatagaggaagcccactaaaggactttcacatgtctgaattatcctgcaacataactctgctgatcgtcaccatcggtgccaccatgctggtgttggctgtgactgtgacctccctctgcatctacttggatctgccctggtatctcaggatggtgtgccagtggacccagactcggcgcagggccaggaacatacccttagaagaactccaaagaaacctccagtttcatgcttttatttcatatagtgaacatgattctgcctgggtgaaaagtgaattggtaccttacctagaaaaagaagatatacagatttgtcttcatgagagaaactttgtccctggcaagagcattgtggaaaatatcatcaactgcattgagaagagttacaagtccatctttgttttgtctcccaactttgtccagagtgagtggtgccattacgaactctattttgcccatcacaatctctttcatgaaggatctaataacttaatcctcatcttactggaacccattccacagaacagcattcccaacaagtaccacaagctgaaggctctcatgacgcagcggacttatttgcagtggcccaaggagaaaagcaaacgtgggctcttttgggctaacattagagccgcttttaatatgaaattaacactagtcactgaaaacaatgatgtgaaatcttaaaaaaatttaggaaattcaacttaagaaaccattatttacttggatgatggtgaatagtacagtcgtaagtaactgtctggaggtgcctccattatcctcatgccttcaggaaagacttaacaaaaacaatgtttcatctggggaactgagctaggcggtgaggttagcctgccagttagagacagcccagtctcttctggtttaatcattatgtttcaaattgaaacagtctcttttgagtaaatgctcagtttttcagctcctctccactctgctttcccaaatggattctgttgtgagcaagagtttatatggcttcatggcagcaagggaacagtcaacttcagcatcatatgcaccagtcctcggagtgccctgtgaatcatattggtctttgggtcagtgtcatcattctcttcaagtctggggcttggggaaaaaattagatcagctacggcatataaaaaagtcttttgtttcacatatgtgtaatagcttatttaattttttatcctgctacacaaatatgtaattaaccaatgaggactcatgacttgatagtgtatgtatgtaaagggatatatggacttaatcataagctgttgaggtgaaagacgtggatccacctgctttccaagaaaactcggccaaatttatttgcagctggatattgaatgggacttttctggttgtcttagaattctggctaaaggctcaaagctgacgaaagacagtaactgcaccaacatgatactagacacagccagtctggacttatcaaaagagcagaaagagaccaatgactcccagtccgtattatccatctctagaagactagagtcaaaagcgtgattaaagagtcattaagcggaggttctaggccatagggagattgctttgaatttcttgcagacaagtgtgagggactcagcatggtagaaggtagcctggcatcccactccaagactgaaagcttgcagagtaacaggagcacacaggttcagtgcagcagatgtggtgtggcttgagaattcttggaagagcttgatgagtgtttgctggagtccgagggtgggcactgggaacacagagactggtaaatagtgtttggcaaatacaagtgcttgatgaatatttgttgaatgaatagatgagttcttcccccctggggaattcaggaggtgaaaggttggcttgagcacccaaaatggcaggatgagagaagagaagcactgatagcaacctgccctcccattattgacatggtaaaaggatgtgaatttcttcacatggctttgactatggaagagtagctgggcttgcattgtcatgacgggatatcagccaacagggtagcctgttgtgcaaagaaactatagcagtaagaggacacggggttaggcagaagaggggtttggggtggaggttgctgcaagaggtcagccagataatgtggccctgcatcatggaactgtgcaatgtggggtacactcaaggccctccaataactcacagatgtgccctatgaaaaagccagcatttggactctgccatagcagctggcaggatcatgctggcctgtctgccttattcaatagttaactacaggaagatctgctcctctttgtgtaataccctcttcccttgcaatggcatagggacatctagaatatagagaagacagagacaatggaggaagagtaaagaaactgactatatgccttcgtcatttcactgcaaggaaggccaagcagatttttgaatgaggtgtgagattgctgttaaattggactggcctggacattttaatcccttaaatagaggtgcaatgactaaagtgagatttgtcactaaaatttatggtatctgcccaagattcaggagtgatgatgggaggagatccaacagaactttgttgtaaggcaatggttagagaaaaatgaagccctcgctttctggacttagttcattcaataaaccagtttcggccaggcacgttggctcacatctataatcccagtactgtgggaggctgaggcaggtggatcacttgaggtcaggagttcgagaccagcctggccaacatggtgaaaccctgtctgtactaaaaatacaaaaattagccgggtgtggtggtgtgcacctgtagtcccagctactcgggaggctgaggcaggaaaatcacttgaacctgggagacagaggctgtagtgagctgagacagcgctactgtactccccgctgggcaacagagtgagactccatctcaaaaaagttaaaagaaaaaaaatctggtttcataatagctgtaacgaaataagccttaatgatattttattagcatcatcttctgtctgcattagcccttccttgctcttcaggagaacaacatttgttttcctccctaggctctatcccaaacggcacattcttccacaacccctgttgaacagattttttaaactgttgcctaatctaaaaacaataaaaacaacaaacaaccacagtaacaacaacgacaaaaaaaactgccacagattctaaataatcagatctttttaaatggtatcaatgtttcccacaaaatattgttgacattgaaaatatagaattttagcattaattttgttaaacctacatcccctcggcagaggggcctccctgcatcccagtggaaagtaggttcctcacagtcctctccgtcacattcttcccatttcttttcttcacagaacacatcactgtctaaaattatcttgtttgcttagttgcttactcatcttcttcttctctcctctgaagtctaagctccaggaaaaagggagacttctccacctgttccctgcctctccccagtgccgaggggacactgtgcaccccattgtagatgcgcagtaaaaactcgtgggatgagcaaatgactctgaaacggtcccatgcgggaaatgtccatgaagtcctggattttatctaaaaagcccaggcaggggggggcgggggcggcggggctacagttccacgctgagctgcctcctggccgctcgtccccgccgcagtgcctgggcggcccgggcgcccgaccttggccgtggacaccttcgcggtgggtgctgctcctccccatctgccactggaagatgctggggcgacccggctccaggtttagcaggacactgagaaaagggaatggctgcctttcggaggctgggtgagcccttctctgtgcctcacctgcccgccccacagcggccctgcacctcgtcccacggggcccattgccccggtaggatgcgcgcttttgttttgagggtcaggcatcttccctgccgtcgtttctgggaggttgaaaaattgatccagaaagacct

SEQ ID NO: 31777 - DNA, 572 bp, Homo sapiens
  source 1..572: mol_type = unassigned DNA
aattgtatttccgttcatttacaagttattttctcttcttctgaaaaagagatcttgaatttggactcatatcaagatgctctgaagaagaacaaccctttaggatagccactgcaacatcatgaccaaagacaaagaacctattgttaaaagcttccattttgtttgccttatgatcataatagttggaaccagaatccagttctccgacggaaatgaatttgcagtagacaagtcaaaaagaggtcttattcatgttccaaaagacctaccgctgaaaaccaaagtcttagatatgtctcagaactacatcgctgagcttcaggtctctgacatgagctttctatcagagttgacagttttgagactttcccataacagaatccagctacttgatttaagtgttttcaagttcaaccaggatttagaatatttggatttatctcataatcagttgcaaaagatatcctgccatcctattgtgagtttcaggcatttagatctctcattcaatgatttcaaggccctgcccatctgtaaggaatttggcaacttatcacaactgaatttct

SEQ ID NO: 31778 - DNA, 1628 bp, Homo sapiens
  source 1..1628: mol_type = unassigned DNA
ccctttaggatagccactgcaacatcatgaccaaagacaaagaacctattgttaaaagcttccattttgtttgccttatgatcataatagttggaaccagaatccagttctccgacggaaatgaatttgcagtagacaagtcaaaaagaggtcttattcatgttccaaaagacctaccgctgaaaaccaaagtcttagatatgtctcagaactacatcgctgagcttcaggtctctgacatgagctttctatcagagttgacagttttgagactttcccataacagaatccagctacttgatttaagtgttttcaagttcaaccaggatttagaatatttggatttatctcataatcagttgcaaaagatatcctgccatcctattgtgagtttcaggcatttagatctctcattcaatgatttcaaggccctgcccatctgtaaggaatttggcaacttatcacaactgaatttcttgggattgagtgctatgaagctgcaaaaattagatttgctgccaattgctcacttgcatctaagttatatccttctggatttaagaaattattatataaaagaaaatgagacagaaagtctacaaattctgaatgcaaaaacccttcaccttgtttttcacccaactagtttattcgctatccaagtgaacatatcagttaatactttagggtgcttacaactgactaatattaaattgaatgatgacaactgtcaagttttcattaaatttttatcagaactcaccagaggttcaaccttactgaattttaccctcaaccacatagaaacgacttggaaatgcctggtcagagtctttcaatttctttggcccaaacctgtggaatatctcaatatttacaatttaacaataattgaaagcattcgtgaagaagattttacttattctaaaacgacattgaaagcattgacaatagaacatatcacgaaccaagtttttctgttttcacagacagctttgtacaccgtgttttctgagatgaacattatgatgttaaccatttcagatacaccttttatacacatgctgtgtcctcatgcaccaagcacattcaagtttttgaactttacccagaacgttttcacagatagtatttttgaaaaatgttccacgttagttaaattggagacacttatctttgttttgtctcccaactttgtccagagtgagtggtgccattacgaactctattttgcccatcacaatctctttcatgaaggatctaataacttaatcctcatcttactggaacccattccacagaacagcattcccaacaagtaccacaagctgaaggctctcatgacgcagcggacttatttgcagtggcccaaggagaaaagcaaacgtgggctcttttgggctaacattagagccgcttttaatatgaaattaacactagtcactgaaaacaatgatgtgaaatcttaaaaaaatttaggaaattcaacttaagaaaccattatttacttggatgatggtgaatagtacagtcgtaagtaactgtctggaggtgcctccattatcctcatgccttcaggaaagacttaacaaaaacaatgtttcatctggggaactgagctaggcggt

SEQ ID NO: 31779 - DNA, 548 bp, Homo sapiens
  source 1..548: mol_type = unassigned DNA
aattgtatttccgttcatttacaagttattttctcttcttctgaaaaagagatcttgtggccaagtggatttttcaaatgtatgtgtgtctctgtgggtgttctgatgggcagttgggagaagttatatggatcagtgaagagcttttaaccatacgccattcagtaataaaagttccccaactcagagttttcactcttccaaagaaagaatttggactcatatcaagatgctctgaagaagaacaaccctttaggatagccactgcaacatcatgaccaaagacaaagaacctattgttaaaagcttccattttgtttgccttatgatcataatagttggaaccagaatccagttctccgacggaaatgaatttgcagtagacaagtcaaaaagaggtcttattcatgttccaaaagacctaccgctgaaaaccaaagtcttagatatgtctcagaactacatcgctgagcttcaggtctctgacatgagctttctatcagagttgacagttttgagactttcccataacagaatccagctacttg

SEQ ID NO: 31780 - DNA, 5011 bp, Homo sapiens
  source 1..5011: mol_type = unassigned DNA
gaagactccagatataggatcactccatgccatcaagaaagttgatgctattgggcccatctcaagctgatcttggcacctctcatgctctgctctcttcaaccagacctctacattccattttggaagaagactaaaaatggtgtttccaatgtggacactgaagagacaaattcttatcctttttaacataatcctaatttccaaactccttggggctagatggtttcctaaaactctgccctgtgatgtcactctggatgttccaaagaaccatgtgatcgtggactgcacagacaagcatttgacagaaattcctggaggtattcccacgaacaccacgaacctcaccctcaccattaaccacataccagacatctccccagcgtcctttcacagactggaccatctggtagagatcgatttcagatgcaactgtgtacctattccactggggtcaaaaaacaacatgtgcatcaagaggctgcagattaaacccagaagctttagtggactcacttatttaaaatccctttacctggatggaaaccagctactagagataccgcagggcctcccgcctagcttacagcttctcagccttgaggccaacaacatcttttccatcagaaaagagaatctaacagaactggccaacatagaaatactctacctgggccaaaactgttattatcgaaatccttgttatgtttcatattcaatagagaaagatgccttcctaaacttgacaaagttaaaagtgctctccctgaaagataacaatgtcacagccgtccctactgttttgccatctactttaacagaactatatctctacaacaacatgattgcaaaaatccaagaagatgattttaataacctcaaccaattacaaattcttgacctaagtggaaattgccctcgttgttataatgccccatttccttgtgcgccgtgtaaaaataattctcccctacagatccctgtaaatgcttttgatgcgctgacagaattaaaagttttacgtctacacagtaactctcttcagcatgtgcccccaagatggtttaagaacatcaacaaactccaggaactggatctgtcccaaaacttcttggccaaagaaattggggatgctaaatttctgcattttctccccagcctcatccaattggatctgtctttcaattttgaacttcaggtctatcgtgcatctatgaatctatcacaagcattttcttcactgaaaagcctgaaaattctgcggatcagaggatatgtctttaaagagttgaaaagctttaacctctcgccattacataatcttcaaaatcttgaagttcttgatcttggcactaactttataaaaattgctaacctcagcatgtttaaacaatttaaaagactgaaagtcatagatctttcagtgaataaaatatcaccttcaggagattcaagtgaagttggcttctgctcaaatgccagaacttctgtagaaagttatgaaccccaggtcctggaacaattacattatttcagatatgataagtatgcaaggagttgcagattcaaaaacaaagaggcttctttcatgtctgttaatgaaagctgctacaagtatgggcagaccttggatctaagtaaaaatagtatattttttgtcaagtcctctgattttcagcatctttctttcctcaaatgcctgaatctgtcaggaaatctcattagccaaactcttaatggcagtgaattccaacctttagcagagctgagatatttggacttctccaacaaccggcttgatttactccattcaacagcatttgaagagcttcacaaactggaagttctggatataagcagtaatagccattattttcaatcagaaggaattactcatatgctaaactttaccaagaacctaaaggttctgcagaaactgatgatgaacgacaatgacatctcttcctccaccagcaggaccatggagagtgagtctcttagaactctggaattcagaggaaatcacttagatgttttatggagagaaggtgataacagatacttacaattattcaagaatctgctaaaattagaggaattagacatctctaaaaattccctaagtttcttgccttctggagtttttgatggtatgcctccaaatctaaagaatctctctttggccaaaaatgggctcaaatctttcagttggaagaaactccagtgtctaaagaacctggaaactttggacctcagccacaaccaactgaccactgtccctgagagattatccaactgttccagaagcctcaagaatctgattcttaagaataatcaaatcaggagtctgacgaagtattttctacaagatgccttccagttgcgatatctggatctcagctcaaataaaatccagatgatccaaaagaccagcttcccagaaaatgtcctcaacaatctgaagatgttgcttttgcatcataatcggtttctgtgcacctgtgatgctgtgtggtttgtctggtgggttaaccatacggaggtgactattccttacctggccacagatgtgacttgtgtggggccaggagcacacaagggccaaagtgtgatctccctggatctgtacacctgtgagttagatctgactaacctgattctgttctcactttccatatctgtatctctctttctcatggtgatgatgacagcaagtcacctctatttctgggatgtgtggtatatttaccatttctgtaaggccaagataaaggggtatcagcgtctaatatcaccagactgttgctatgatgcttttattgtgtatgacactaaagacccagctgtgaccgagtgggttttggctgagctggtggccaaactggaagacccaagagagaaacattttaatttatgtctcgaggaaagggactggttaccagggcagccagttctggaaaacctttcccagagcatacagcttagcaaaaagacagtgtttgtgatgacagacaagtatgcaaagactgaaaattttaagatagcattttacttgtcccatcagaggctcatggatgaaaaagttgatgtgattatcttgatatttcttgagaagccctttcagaagtccaagttcctccagctccggaaaaggctctgtgggagttctgtccttgagtggccaacaaacccgcaagctcacccatacttctggcagtgtctaaagaacgccctggccacagacaatcatgtggcctatagtcaggtgttcaaggaaacggtctagcccttctttgcaaaacacaactgcctagtttaccaaggagaggcctggctgtttaaattgttttcatatatatcacaccaaaagcgtgttttgaaattcttcaagaaatgagattgcccatatttcaggggagccaccaacgtctgtcacaggagttggaaagatggggtttatataatgcatcaagtcttctttcttatctctctgtgtctctatttgcacttgagtctctcacctcagctcctgtaaaagagtggcaagtaaaaaacatggggctctgattctcctgtaattgtgataattaaatatacacacaatcatgacattgagaagaactgcatttctacccttaaaaagtactggtatatacagaaatagggttaaaaaaaactcaagctctctctatatgagaccaaaatgtactagagttagtttagtgaaataaaaaaccagtcagctggccgggcatggtggctcatgcttgtaatcccagcactttgggaggccgaggcaggtggatcacgaggtcaggagtttgagaccagtctggccaacatggtgaaaccccgtctgtactaaaaatacaaaaattagctgggcgtggtggtgggtgcctgtaatcccagctacttgggaggctgaggcaggagaatcgcttgaacccgggaggtggaggtggcagtgagccgagatcacgccactgcaatgcagcccgggcaacagagctagactgtctcaaaagaacaaaaaaaaaaaaacacaaaaaaactcagtcagcttcttaaccaattgcttccgtgtcatccagggccccattctgtgcagattgagtgtgggcaccacacaggtggttgctgcttcagtgcttcctgctctttttccttgggcctgcttctgggttccatagggaaacagtaagaaagaaagacacatccttaccataaatgcatatggtccacctacaaatagaaaaatatttaaatgatctgcctttatacaaagtgatattctctacctttgataatttacctgcttaaatgtttttatctgcactgcaaagtactgtatccaaagtaaaatttcctcatccaatatctttcaaactgttttgttaactaatgccatatatttgtaagtatctgcacacttgatacagcaacgttagatggttttgatggtaaaccctaaaggaggactccaagagtgtgtatttatttatagttttatcagagatgacaattatttgaatgccaattatatggattcctttcattttttgctggaggatgggagaagaaaccaaagtttatagaccttcacattgagaaagcttcagttttgaacttcagctatcagattcaaaaacaacagaaagaaccaagacattcttaagatgcctgtactttcagctgggtataaattcatgagttcaaagattgaaacctgaccaatttgctttatttcatggaagaagtgatctacaaaggtgtttgtgccatttggaaaacagcgtgcatgtgttcaagccttagattggcgatgtcgtattttcctcacgtgtggcaatgccaaaggctttactttacctgtgagtacacactatatgaattatttccaacgtacatttaatcaataagggtcacaaattcccaaatcaatctctggaataaatagagaggtaattaaattgctggagccaactatttcacaacttctgtaagc

SEQ ID NO: 31781 - DNA, 4216 bp, Homo sapiens
  source 1..4216: mol_type = unassigned DNA
agtttctcttctcggccacctcctgcatagagggtaccattctgcgctgctgcaagttacggaatgaaaaattagaacaacagaaacatggaaaacatgttccttcagtcgtcaatgctgacctgcattttcctgctaatatctggttcctgtgagttatgcgccgaagaaaatttttctagaagctatccttgtgatgagaaaaagcaaaatgactcagttattgcagagtgcagcaatcgtcgactacaggaagttccccaaacggtgggcaaatatgtgacagaactagacctgtctgataatttcatcacacacataacgaatgaatcatttcaagggctgcaaaatctcactaaaataaatctaaaccacaaccccaatgtacagcaccagaacggaaatcccggtatacaatcaaatggcttgaatatcacagacggggcattcctcaacctaaaaaacctaagggagttactgcttgaagacaaccagttaccccaaataccctctggtttgccagagtctttgacagaacttagtctaattcaaaacaatatatacaacataactaaagagggcatttcaagacttataaacttgaaaaatctctatttggcctggaactgctattttaacaaagtttgcgagaaaactaacatagaagatggagtatttgaaacgctgacaaatttggagttgctatcactatctttcaattctctttcacacgtgccacccaaactgccaagctccctacgcaaactttttctgagcaacacccagatcaaatacattagtgaagaagatttcaagggattgataaatttaacattactagatttaagcgggaactgtccgaggtgcttcaatgccccatttccatgcgtgccttgtgatggtggtgcttcaattaatatagatcgttttgcttttcaaaacttgacccaacttcgatacctaaacctctctagcacttccctcaggaagattaatgctgcctggtttaaaaatatgcctcatctgaaggtgctggatcttgaattcaactatttagtgggagaaatagcctctggggcatttttaacgatgctgccccgcttagaaatacttgacttgtcttttaactatataaaggggagttatccacagcatattaatatttccagaaacttctctaaacttttgtctctacgggcattgcatttaagaggttatgtgttccaggaactcagagaagatgatttccagcccctgatgcagcttccaaacttatcgactatcaacttgggtattaattttattaagcaaatcgatttcaaacttttccaaaatttctccaatctggaaattatttacttgtcagaaaacagaatatcaccgttggtaaaagatacccggcagagttatgcaaatagttcctcttttcaacgtcatatccggaaacgacgctcaacagattttgagtttgacccacattcgaacttttatcatttcacccgtcctttaataaagccacaatgtgctgcttatggaaaagccttagatttaagcctcaacagtattttcttcattgggccaaaccaatttgaaaatcttcctgacattgcctgtttaaatctgtctgcaaatagcaatgctcaagtgttaagtggaactgaattttcagccattcctcatgtcaaatatttggatttgacaaacaatagactagactttgataatgctagtgctcttactgaattgtccgacttggaagttctagatctcagctataattcacactatttcagaatagcaggcgtaacacatcatctagaatttattcaaaatttcacaaatctaaaagttttaaacttgagccacaacaacatttatactttaacagataagtataacctggaaagcaagtccctggtagaattagttttcagtggcaatcgccttgacattttgtggaatgatgatgacaacaggtatatctccattttcaaaggtctcaagaatctgacacgtctggatttatcccttaataggctgaagcacatcccaaatgaagcattccttaatttgccagcgagtctcactgaactacatataaatgataatatgttaaagttttttaactggacattactccagcagtttcctcgtctcgagttgcttgacttacgtggaaacaaactactctttttaactgatagcctatctgactttacatcttcccttcggacactgctgctgagtcataacaggatttcccacctaccctctggctttctttctgaagtcagtagtctgaagcacctcgatttaagttccaatctgctaaaaacaatcaacaaatccgcacttgaaactaagaccaccaccaaattatctatgttggaactacacggaaacccctttgaatgcacctgtgacattggagatttccgaagatggatggatgaacatctgaatgtcaaaattcccagactggtagatgtcatttgtgccagtcctggggatcaaagagggaagagtattgtgagtctggagctaacaacttgtgtttcagatgtcactgcagtgatattatttttcttcacgttctttatcaccaccatggttatgttggctgccctggctcaccatttgttttactgggatgtttggtttatatataatgtgtgtttagctaaggtaaaaggctacaggtctctttccacatcccaaactttctatgatgcttacatttcttatgacaccaaagatgcctctgttactgactgggtgataaatgagctgcgctaccaccttgaagagagccgagacaaaaacgttctcctttgtctagaggagagggattgggatccgggattggccatcatcgacaacctcatgcagagcatcaaccaaagcaagaaaacagtatttgttttaaccaaaaaatatgcaaaaagctggaactttaaaacagctttttacttggctttgcagaggctaatggatgagaacatggatgtgattatatttatcctgctggagccagtgttacagcattctcagtatttgaggctacggcagcggatctgtaagagctccatcctccagtggcctgacaacccgaaggcagaaggcttgttttggcaaactctgagaaatgtggtcttgactgaaaatgattcacggtataacaatatgtatgtcgattccattaagcaatactaactgacgttaagtcatgatttcgcgccataataaagatgcaaaggaatgacatttctgtattagttatctattgctatgtaacaaattatcccaaaacttagtggtttaaaacaacacatttgctggcccacagtttttgagggtcaggagtccaggcccagcataactgggtcctctgctcagggtgtctcagaggctgcaatgtaggtgttcaccagagacataggcatcactggggtcacactcatgtggttgttttctggattcaattcctcctgggctattggccaaaggctatactcatgtaagccatgcgagcctctcccacaaggcagcttgcttcatcagagctagcaaaaaagagaggttgctagcaagatgaagtcacaatcttttgtaatcgaatcaaaaaagtgatatctcatcactttggccatattctatttgttagaagtaaaccacaggtcccaccagctccatgggagtgaccacctcagtccagggaaaacagctgaagaccaagatggtgagctctgattgcttcagttggtcatcaactattttcccttgactgctgtcctgggatggcctgctatcttgatgatagattgtgaatatcaggaggcagggatcactgtggaccatcttagcagttgacctaacacatcttcttttcaatatctaagaacttttgccactgtgactaatggtcctaatattaagctgttgtttatatttatcatatatctatggctacatggttatattatgctgtggttgcgttcggttttatttacagttgcttttacaaatatttgctgtaacatttgacttctaaggtttagatgccatttaagaactgagatggatagcttttaaagcatcttttacttcttaccattttttaaaagtatgcagctaaattcgaagcttttggtctatattgttaattgccattgctgtaaatcttaaaatgaatgaataaaaatgtttcattttacaa

SEQ ID NO: 31782 - DNA, 3367 bp, Homo sapiens
  source 1..3367: mol_type = unassigned DNA
ctcctgcatagagggtaccattctgcgctgctgcaagttacggaatgaaaaattagaacaacagaaacatggttctcttgacacttcagtgttagggaacatcagcaagacccatcccaggagaccttgaaggaagcctttgaaagggagaatgaaggagtcatctttgcaaaatagctcctgcagcctgggaaaggagactaaaaaggaaaacatgttccttcagtcgtcaatgctgacctgcattttcctgctaatatctggttcctgtgagttatgcgccgaagaaaatttttctagaagctatccttgtgatgagaaaaagcaaaatgactcagttattgcagagtgcagcaatcgtcgactacaggaagttccccaaacggtgggcaaatatgtgacagaactagacctgtctgataatttcatcacacacataacgaatgaatcatttcaagggctgcaaaatctcactaaaataaatctaaaccacaaccccaatgtacagcaccagaacggaaatcccggtatacaatcaaatggcttgaatatcacagacggggcattcctcaacctaaaaaacctaagggagttactgcttgaagacaaccagttaccccaaataccctctggtttgccagagtctttgacagaacttagtctaattcaaaacaatatatacaacataactaaagagggcatttcaagacttataaacttgaaaaatctctatttggcctggaactgctattttaacaaagtttgcgagaaaactaacatagaagatggagtatttgaaacgctgacaaatttggagttgctatcactatctttcaattctctttcacacgtgccacccaaactgccaagctccctacgcaaactttttctgagcaacacccagatcaaatacattagtgaagaagatttcaagggattgataaatttaacattactagatttaagcgggaactgtccgaggtgcttcaatgccccatttccatgcgtgccttgtgatggtggtgcttcaattaatatagatcgttttgcttttcaaaacttgacccaacttcgatacctaaacctctctagcacttccctcaggaagattaatgctgcctggtttaaaaatatgcctcatctgaaggtgctggatcttgaattcaactatttagtgggagaaatagcctctggggcatttttaacgatgctgccccgcttagaaatacttgacttgtcttttaactatataaaggggagttatccacagcatattaatatttccagaaacttctctaaacttttgtctctacgggcattgcatttaagaggttatgtgttccaggaactcagagaagatgatttccagcccctgatgcagcttccaaacttatcgactatcaacttgggtattaattttattaagcaaatcgatttcaaacttttccaaaatttctccaatctggaaattatttacttgtcagaaaacagaatatcaccgttggtaaaagatacccggcagagttatgcaaatagttcctcttttcaacgtcatatccggaaacgacgctcaacagattttgagtttgacccacattcgaacttttatcatttcacccgtcctttaataaagccacaatgtgctgcttatggaaaagccttagatttaagcctcaacagtattttcttcattgggccaaaccaatttgaaaatcttcctgacattgcctgtttaaatctgtctgcaaatagcaatgctcaagtgttaagtggaactgaattttcagccattcctcatgtcaaatatttggatttgacaaacaatagactagactttgataatgctagtgctcttactgaattgtccgacttggaagttctagatctcagctataattcacactatttcagaatagcaggcgtaacacatcatctagaatttattcaaaatttcacaaatctaaaagttttaaacttgagccacaacaacatttatactttaacagataagtataacctggaaagcaagtccctggtagaattagttttcagtggcaatcgccttgacattttgtggaatgatgatgacaacaggtatatctccattttcaaaggtctcaagaatctgacacgtctggatttatcccttaataggctgaagcacatcccaaatgaagcattccttaatttgccagcgagtctcactgaactacatataaatgataatatgttaaagttttttaactggacattactccagcagtttcctcgtctcgagttgcttgacttacgtggaaacaaactactctttttaactgatagcctatctgactttacatcttcccttcggacactgctgctgagtcataacaggatttcccacctaccctctggctttctttctgaagtcagtagtctgaagcacctcgatttaagttccaatctgctaaaaacaatcaacaaatccgcacttgaaactaagaccaccaccaaattatctatgttggaactacacggaaacccctttgaatgcacctgtgacattggagatttccgaagatggatggatgaacatctgaatgtcaaaattcccagactggtagatgtcatttgtgccagtcctggggatcaaagagggaagagtattgtgagtctggagctaacaacttgtgtttcagatgtcactgcagtgatattatttttcttcacgttctttatcaccaccatggttatgttggctgccctggctcaccatttgttttactgggatgtttggtttatatataatgtgtgtttagctaaggtaaaaggctacaggtctctttccacatcccaaactttctatgatgcttacatttcttatgacaccaaagatgcctctgttactgactgggtgataaatgagctgcgctaccaccttgaagagagccgagacaaaaacgttctcctttgtctagaggagagggattgggatccgggattggccatcatcgacaacctcatgcagagcatcaaccaaagcaagaaaacagtatttgttttaaccaaaaaatatgcaaaaagctggaactttaaaacagctttttacttggctttgcagaggctaatggatgagaacatggatgtgattatatttatcctgctggagccagtgttacagcattctcagtatttgaggctacggcagcggatctgtaagagctccatcctccagtggcctgacaacccgaaggcagaaggcttgttttggcaaactctgagaaatgtggtcttgactgaaaatgattcacggtataacaatatgtatgtcgattccattaagcaatactaactgacgttaagtcatgatttcgcgccataataaaga

SEQ ID NO: 31783 - DNA, 3870 bp, Homo sapiens
  source 1..3870: mol_type = unassigned DNA
ggaggtcttgtttccggaagatgttgcaaggctgtggtgaaggcaggtgcagcctagcctcctgctcaagctacaccctggccctccacgcatgaggccctgcagaactctggagatggtgcctacaagggcagaaaaggacaagtcggcagccgctgtcctgagggcaccagctgtggtgcaggagccaagacctgagggtggaagtgtcctcttagaatggggagtgcccagcaaggtgtacccgctactggtgctatccagaattcccatctctccctgctctctgcctgagctctgggccttagctcctccctgggcttggtagaggacaggtgtgaggccctcatgggatgtaggctgtctgagaggggagtggaaagaggaaggggtgaaggagctgtctgccatttgactatgcaaatggcctttgactcatgggaccctgtcctcctcactgggggcagggtggagtggagggggagctactaggctggtataaaaatcttacttcctctattctctgagccgctgctgcccctgtgggaagggacctcgagtgtgaagcatccttccctgtagctgctgtccagtctgcccgccagaccctctggagaagcccctgccccccagcatgggtttctgccgcagcgccctgcacccgctgtctctcctggtgcaggccatcatgctggccatgaccctggccctgggtaccttgcctgccttcctaccctgtgagctccagccccacggcctggtgaactgcaactggctgttcctgaagtctgtgccccacttctccatggcagcaccccgtggcaatgtcaccagcctttccttgtcctccaaccgcatccaccacctccatgattctgactttgcccacctgcccagcctgcggcatctcaacctcaagtggaactgcccgccggttggcctcagccccatgcacttcccctgccacatgaccatcgagcccagcaccttcttggctgtgcccaccctggaagagctaaacctgagctacaacaacatcatgactgtgcctgcgctgcccaaatccctcatatccctgtccctcagccataccaacatcctgatgctagactctgccagcctcgccggcctgcatgccctgcgcttcctattcatggacggcaactgttattacaagaacccctgcaggcaggcactggaggtggccccgggtgccctccttggcctgggcaacctcacccacctgtcactcaagtacaacaacctcactgtggtgccccgcaacctgccttccagcctggagtatctgctgttgtcctacaaccgcatcgtcaaactggcgcctgaggacctggccaatctgaccgccctgcgtgtgctcgatgtgggcggaaattgccgccgctgcgaccacgctcccaacccctgcatggagtgccctcgtcacttcccccagctacatcccgataccttcagccacctgagccgtcttgaaggcctggtgttgaaggacagttctctctcctggctgaatgccagttggttccgtgggctgggaaacctccgagtgctggacctgagtgagaacttcctctacaaatgcatcactaaaaccaaggccttccagggcctaacacagctgcgcaagcttaacctgtccttcaattaccaaaagagggtgtcctttgcccacctgtctctggccccttccttcgggagcctggtcgccctgaaggagctggacatgcacggcatcttcttccgctcactcgatgagaccacgctccggccactggcccgcctgcccatgctccagactctgcgtctgcagatgaacttcatcaaccaggcccagctcggcatcttcagggccttccctggcctgcgctacgtggacctgtcggacaaccgcatcagcggagcttcggagctgacagccaccatgggggaggcagatggaggggagaaggtctggctgcagcctggggaccttgctccggccccagtggacactcccagctctgaagacttcaggcccaactgcagcaccctcaacttcaccttggatctgtcacggaacaacctggtgaccgtgcagccggagatgtttgcccagctctcgcacctgcagtgcctgcgcctgagccacaactgcatctcgcaggcagtcaatggctcccagttcctgccgctgaccggtctgcaggtgctagacctgtcccacaataagctggacctctaccacgagcactcattcacggagctaccgcgactggaggccctggacctcagctacaacagccagccctttggcatgcagggcgtgggccacaacttcagcttcgtggctcacctgcgcaccctgcgccacctcagcctggcccacaacaacatccacagccaagtgtcccagcagctctgcagtacgtcgctgcgggccctggacttcagcggcaatgcactgggccatatgtgggccgagggagacctctatctgcacttcttccaaggcctgagcggtttgatctggctggacttgtcccagaaccgcctgcacaccctcctgccccaaaccctgcgcaacctccccaagagcctacaggtgctgcgtctccgtgacaattacctggccttctttaagtggtggagcctccacttcctgcccaaactggaagtcctcgacctggcaggaaaccagctgaaggccctgaccaatggcagcctgcctgctggcacccggctccggaggctggatgtcagctgcaacagcatcagcttcgtggcccccggcttcttttccaaggccaaggagctgcgagagctcaaccttagcgccaacgccctcaagacagtggaccactcctggtttgggcccctggcgagtgccctgcaaatactagatgtaagcgccaaccctctgcactgcgcctgtggggcggcctttatggacttcctgctggaggtgcaggctgccgtgcccggtctgcccagccgggtgaagtgtggcagtccgggccagctccagggcctcagcatctttgcacaggacctgcgcctctgcctggatgaggccctctcctgggactgtttcgccctctcgctgctggctgtggctctgggcctgggtgtgcccatgctgcatcacctctgtggctgggacctctggtactgcttccacctgtgcctggcctggcttccctggcgggggcggcaaagtgggcgagatgaggatgccctgccctacgatgccttcgtggtcttcgacaaaacgcagagcgcagtggcagactgggtgtacaacgagcttcgggggcagctggaggagtgccgtgggcgctgggcactccgcctgtgcctggaggaacgcgactggctgcctggcaaaaccctctttgagaacctgtgggcctcggtctatggcagccgcaagacgctgtttgtgctggcccacacggaccgggtcagtggtctcttgcgcgccagcttcctgctggcccagcagcgcctgctggaggaccgcaaggacgtcgtggtgctggtgatcctgagccctgacggccgccgctcccgctacgtgcggctgcgccagcgcctctgccgccagagtgtcctcctctggccccaccagcccagtggtcagcgcagcttctgggcccagctgggcatggccctgaccagggacaaccaccacttctataaccggaacttctgccagggacccacggccgaatagccgtgagccggaatcctgcacggtgccacctccacactcacctcacctctgcctgcctggtctgaccctcccctgctcgcctccctcaccccacacctgacacagagcaggcactcaataaatgctaccgaaggcta

SEQ ID NO: 31784 - DNA, 2702 bp, Homo sapiens
  source 1..2702: mol_type = unassigned DNA
gcggggtggagccagcgccctcagcgcgctacggtccgcgggcaactccgcagaagccccagcccccaggaccccaggacccagtggcgcagccggcagccccggatccctgatctgcttgggcagctcctgcagaacctggaacagtgaatgggtaggggacactgggcgtgcagaaggcggggggcagtgtggaacatgccttcaccacctccagcttctgctgccggaggctgcacccacctgtgcccatggcctgcacaggcccatcacttcctagcgccttcgacattctaggtgcagcaggccaggacaagctcttgtatctgaagcacaaactgaagaccccacgcccaggctgccaggggcaggacctcctgcatgccatggttctcctgaagctgggccaggaaactgaggccaggatctctctagaggcattgaaggccgatgcggtggcccggctggtggcccgccagtgggctggcgtggacagcaccgaggacccagaggagcccccagatgtgtcctgggctgtggcccgcttgtaccacctgctggctgaggagaagctgtgccccgcctcgctgcgggacgtggcctaccaggaagccgtccgcaccctcagctccagggacgaccaccggctgggggaacttcaggatgaggcccgaaaccggtgtgggtgggacattgctggggatccagggagcatccggacgctccagtccaatctgggctgcctcccaccatcctcggctttgccctctgggaccaggagcctcccacgccccattgacggtgtttcggactggagccaagggtgctccctgcgatccactggcagccctgcctccctggccagcaacttggaaatcagccagtcccctaccatgcccttcctcagcctgcaccgcagcccacatgggcccagcaagctctgtgacgacccccaggccagcttggtgcccgagcctgtccccggtggctgccaggagcctgaggagatgagctggccgccatcgggggagattgccagcccaccagagctgccaagcagcccacctcctgggcttcccgaagtggccccagatgcaacctccactggcctccctgatacccccgcagctccagaaaccagcaccaactacccagtggagtgcaccgaggggtctgcaggcccccagtctctccccttgcctattctggagccggtcaaaaacccctgctctgtcaaagaccagacgccactccaactttctgtagaagataccacctctccaaataccaagccgtgcccacctactcccaccaccccagaaacatcccctcctcctcctcctcctcctccttcatctactccttgttcagctcacctgaccccctcctccctgttcccttcctccctggaatcatcatcggaacagaaattctataactttgtgatcctccacgccagggcagacgaacacatcgccctgcgggttcgggagaagctggaggcccttggcgtgcccgacggggccaccttctgcgaggatttccaggtgccggggcgcggggagctgagctgcctgcaggacgccatagaccactcagctttcatcatcctacttctcacctccaacttcgactgtcgcctgagcctgcaccaggtgaaccaagccatgatgagcaacctcacgcgacaggggtcgccagactgtgtcatccccttcctgcccctggagagctccccggcccagctcagctccgacacggccagcctgctctccgggctggtgcggctggacgaacactcccagatcttcgccaggaaggtggccaacaccttcaagccccacaggcttcaggcccgaaaggccatgtggaggaaggaacaggacacccgagccctgcgggaacagagccaacacctggacggtgagcggatgcaggcggcggcactgaacgcagcctactcagcctacctccagagctacttgtcctaccaggcacagatggagcagctccaggtggcttttgggagccacatgtcatttgggactggggcgccctatggggctcgaatgccctttgggggccaggtgcccctgggagccccgccaccctttcccacttggccggggtgcccgcagccgccacccctgcacgcatggcaggctggcacccccccaccgccctccccacagccagcagcctttccacagtcactgcccttcccgcagtccccagccttccctacggcctcacccgcaccccctcagagcccagggctgcaacccctcattatccaccacgcacagatggtacagctggggctgaacaaccacatgtggaaccagagagggtcccaggcgcccgaggacaagacgcaggaggcagaatgaccgcgtgtccttgcctgaccacctggggaacacccctggacccaggcatcggccaggaccccatagagcaccccggtctgccctgtgccctgtggacagtggaagatgaggtcatctgccactttcaggacattgtccgggagcccttcatttaggacaaaacgggcgcgatgatgccctggctttcagggtggtcagaactggatacggtgtttacaattccaatctctctatttctgggtgaagggtcttggtggtgggggtattgctacggtcttttaattataataaatatttattgaatgcttccgc

SEQ ID NO: 31785 - DNA, 6708 bp, Homo sapiens
  source 1..6708: mol_type = unassigned DNA
ctcacacttttgctctcttgcagtcagttgctttgctggcttctgcaggcttttaaggtctcgcggcgtagaaatgcctggcccccacccccttcctcggtctcccctttcaattcagatgtgctgatgtgcagaccggattcatcttctcggagctgcggcggcggctttgggctcaggcggcggcggctcgcgctcggccgcggagtcctggcagcagcggggacgcggcgcgggagtccgagctctggtggcagctgagcccgcggggcgccgctcgccgagccgcggccgcgggaagttcggcagccagaaggacgacctggcaggctgcgagcgccagcgccgccagagccgagtttgcctgcgccctccccgcctccgagtgcagagttccttacctgccctccgcccacccgtgggcccctagccaacttctccctgcgactgggggtaacaggcagtgcttgccctctctactgtcccggcggcatccacatgtttccggacacctgagcaccccggtcccgccgaggagcctccgggtggggagaagagcaccggtgcccctagccccgcacatcagcgcggaccgcggctgcctaacctctgggtcccgtcccctccttttcctccgggggaggaggatggggttgggaacgctttccccgaggatgctcgtgtggctggtggcctcggggattgttttctacggggagctatgggtctgcgctggcctcgattatgattacacttttgatgggaacgaagaggataaaacagagactatagattacaaggacccgtgtaaagccgctgtattttggggcgatattgccttagatgatgaagacttaaatatctttcaaatagataggacaattgaccttacgcagaacccctttggaaaccttggacataccacaggtggacttggagaccatgctatgtcaaagaagcgaggggccctctaccaacttatagacaggataagaagaattggctttggcttggagcaaaacaacacagttaagggaaaagtacctctacaattctcagggcaaaatgagaaaaatcgagttcccagagccgctacatcaagaacggaaagaatatggcctggaggcgttattccttatgttataggaggaaacttcactggcagccagagagccatgttcaagcaggccatgaggcactgggaaaagcacacatgtgtgactttcatagaaagaagtgatgaagagagttacattgtattcacctataggccttgtggatgctgctcctatgtaggtcggcgaggaaatggacctcaggcaatctctatcggcaagaactgtgataaatttgggattgttgttcatgaattgggtcatgtgataggcttttggcatgaacacacaagaccagatcgagataaccacgtaactatcataagagaaaacatccagccaggtcaagagtacaattttctgaagatggagcctggagaagtaaactcacttggagaaagatatgatttcgacagtatcatgcactatgccaggaacaccttctcaagggggatgtttctggataccattctcccctcccgtgatgataatggcatacgtcctgcaattggtcagcgaacccgtctaagcaaaggagatatcgcacaggcaagaaagctgtatagatgtccagcatgtggagaaactctacaagaatccaatggcaacctttcctctccaggatttcccaatggctacccttcttacacacactgcatctggagagtttctgtgaccccaggggagaagattgttttaaattttacaacgatggatctatacaagagtagtttgtgctggtatgactatattgaagtaagagacgggtactggagaaaatcacctctccttggtagattctgtggggacaaattgcctgaagttcttacttctacagacagcagaatgtggattgagtttcgtagcagcagtaattgggtaggaaaaggctttgcagctgtctatgaagcgatctgtggaggtgagatacgtaaaaatgaaggacagattcagtctcccaattatcctgatgactatcgcccgatgaaagaatgtgtgtggaaaataacagtgtctgagagctaccacgtcgggctgacctttcagtcctttgagattgaaagacatgacaattgtgcttatgactacctggaagttagagatggaaccagtgaaaatagccctttgatagggcgtttctgtggttatgacaaacctgaagacataagatctacctccaatactttgtggatgaagtttgtttctgacggaactgtgaacaaagcagggtttgctgctaacttttttaaagaggaagatgagtgtgccaaacctgaccgtggaggctgtgagcagcgatgtctgaacactctgggcagttaccagtgtgcctgtgagcctggctatgagctgggcccagacagaaggagctgtgaagctgcttgtggtggacttcttaccaaacttaacggcaccataaccacccctggctggcccaaggagtaccctcctaataagaactgtgtgtggcaagtggttgcaccaacccagtacagaatttctgtgaagtttgagttttttgaattggaaggcaatgaagtttgcaaatatgattatgtggagatctggagtggtctttcctctgagtctaaactgcatggcaaattctgtggcgctgaagtgcctgaagtgatcacatcccagttcaacaatatgagaattgaattcaaatctgacaatactgtatccaagaagggcttcaaagcacattttttctcagacaaagatgaatgctctaaggataatggtggatgtcagcacgaatgtgtcaacacgatggggagctacatgtgtcaatgccgtaatggatttgtgctacatgacaataaacatgattgcaaggaagctgagtgtgaacagaagatccacagtccaagtggcctcatcaccagtcccaactggccagacaagtacccaagcaggaaagaatgcacttgggaaatcagcgccactcctggccaccgaatcaaattagcctttagtgaatttgagattgagcagcatcaagaatgtgcttatgaccacttagaagtatttgatggagaaacagaaaagtcaccgattcttggacgactgtgtggcaacaagataccagatccccttgtggctactggaaataaaatgtttgttcggtttgtttctgatgcatctgttcaaagaaaaggctttcaagctacacattctacagagtgtggcggacgattgaaagcagaatcaaaaccaagagatctgtactcacatgctcagtttggtgataacaactacccaggacaggttgactgtgaatggctattagtatcagaacggggctctcgacttgaattatccttccagacatttgaagtggaggaagaagcagactgtggctatgactatgtggagctctttgatggtcttgattcaacagctgtggggcttggtcgattctgtggatccgggccaccagaagagatttattcaattggagattcagttttaattcatttccacactgatgacacaatcaacaagaagggatttcatataagatacaaaagcataagatatccagataccacacataccaaaaaataacaccaaaacctctgtcagaacacaaaggaatgtgcataatggagagaagacatattttttttaaaactgaagatattggcacaaatgttttatacaaagagtttgaacaaaaaatccctgtaagaccagaattatctttgtactaaaagagaagtttccagcaaaaccctcatcagcattacaaggatatttgaactccatgcttgatggtattaataaagctggtgaaagggcatcatatacttcaaggaagactctacaagcttttgttcacagcttgaaatagatgcctcacaattcagacagtttaattcaggaactgtgaccctgcagtgttctttttgacaatttgtcaagatttagggacataaaatgatcttgcaggtcgtaaactggaaaacagtattttggttgtcttaggataattgctgactttgtatcttggatacagtgtaaaccagatccatataaggtgaatgtgaaatgggagtcttctgagggtgatttgtactttccatgtgtatgtgtgtgtctggtgtttggaaactgggatatttcagcttcattatttccacttgcaggccagcttaacctctgaaacacaaatgatcttgagaccactttagtgtacttacatttagatgagtttgaaatctcaatggtgtctaattattgcagttaaattctagacatcagttctttaagtctcagaaaacgcccagtgaattggtaaacttagttcttttttttggaagtgctgccttttcacaccaaatccaagaagcctgtgatgtcttatgaaccttatgagaaaactccgaagaggtgtgagcaggattcttctgaatgactgtctggatggttcattactcaagttactgctgctgctattgtctttcctttgttgtcgatctgttattgttgtattattattgttgatgttgtcatggttaatctattttttaaaattgaaatgaagcagaagtaggccttgtgagaactgaaaggtctctttcatttttctcttcctgggattcattttttcaaaacacaatgctggaaaaaaaagatttgtttctgaaagacttcttatggtgctattccataaactttttttcaaacaagtttttgacctttgagccaacccacccgtagactacgaatgtctccctatggctggtagcatttgaagactaaagacttgtcaaatatatcaagagtatatcattgcaagggcagcacttgtcctgtggaacaactacttataatgccttagaattcctgcacatgatcaaacagatcctcctaaaacacaccttttgaaatgttgaacataatagtgtatgttaattaacagctctatgaagaaaatccatttccatgactgaagcattggatataaatatggtgtcctgctttttttgtagaaaatgtaatttgaggatgaattttctgctttaaaggcatgtgtgtttttaaaattaatgaatgtagatgtgtgattgtctgagtgagtgaaactacaagaggtaaaaaataatgggtggttgaaaagttaaaatgtatgtgccaagttctactagaattccatttgaaatagcaccttccttaggtttcatggacaaataatgggaacttctaattttgatcaatcccattaaaaaaaggctctttcctttagagaaactctattttgatgtcaatatagattactgtatgaagtagctttgtgtctgttacctgtccatgagcatacaacattgaatacaattgggtgtattctttcagttttacacaattaaagtatacacacagatgtagcttatctgtttttttcttaaattgttgccctgaaaaaatttcttgcatatgaattgtaaaatgtaaatacatttttataaccaatgttttgatcttattgaatgttactttgaaaatgtataactattgcctgcaatgtagatgagccttttagtagagctgatttattccagtaacttcttccatattttctcactaatctcccgttagccaaaatatgccagaaatgggaaagagaggagaaaaagtcattaacattaacacctatactgttctatactactcctacccgtgtgctaggaatgtgcactagctctttttaaattccatgctacactttgaggactgtcatcatgttctcgttttgtagttcagaaagtgaggctcaaagaatttatgtaaccttcccagagtcacagtgtaaagttagatgttgaaacccagtttatcttatacaaatgagcctctgcttgttctacaaaggtagtagaatcaatctcgacctatataaatagtagattttttatggtgaaactttcccacataaagtaaattttaggggtgaattagagtaaaacttacaggataagcattttgctctttttaagaacagcatgaaatttagaataccaatgatagctatctttaagaatcagaattagtactagaaatttaaaaaaccctatagtttggagttagtatgagccttttgtgaaaataaatatattaaattattttgcctgatgtggtaggggaaatgtattgctctatattaagaaatattctggatattctgattgacatcttattaggccatagtgagctatgctctgcacaactgagaaattaggtatttagaaggcatatagagatgttgtcataactaggtcttcaacgtgaaaattaatttttattgtatcatgtcaagtatcagtttaccacatattatttttatattaattcaacatttgccttaagtgtgttgttaaatgaaagtacagacagcttcattgttgtattgttaataattgttacttactgctccaggcattttattaaattaattttttaaattattttccaccctacatcagtatattggttgtgctttatatttgccaaagtcctaactgactatacatagaaaaaaaaaaaaacactgttctcacttgattttattaaattatttttaaaagtc

SEQ ID NO: 31786 - DNA, 1829 bp, Homo sapiens
  source 1..1829: mol_type = unassigned DNA
tcccggcggcatccacatgtttccggacacctgagcaccccggtcccgccgaggagcctccgggtggggagaagagcaccggtgcccctagccccgcacatcagcgcggaccgcggctgcctaacctctgggtcccgtcccctccttttcctccgggggaggaggatggggttgggaacgctttccccgaggatgctcgtgtggctggtggcctcggggattgttttctacggggagctatgggtctgcgctggcctcgattatgattacacttttgatgggaacgaagaggataaaacagagactatagattacaaggacccgtgtaaagccgctgtattttggggcgatattgccttagatgatgaagacttaaatatctttcaaatagataggacaattgaccttacgcagaacccctttggaaaccttggacataccacaggtggacttggagaccatgctatgtcaaagaagcgaggggccctctaccaacttatagacaggataagaagaattggctttggcttggagcaaaacaacacagttaagggaaaagtacctctacaattctcagggcaaaatgagaaaaatcgagttcccagagccgctacatcaagaacggaaagaatatggcctggaggcgttattccttatgttataggaggaaacttcactggcagccagagagccatgttcaagcaggccatgaggcactgggaaaagcacacatgtgtgactttcatagaaagaagtgatgaagagagttacattgtattcacctataggccttgtggatgctgctcctatgtaggtcggcgaggaaatggacctcaggcaatctctatcggcaagaactgtgataaatttgggattgttgttcatgaattgggtcatgtgataggcttttggcatgaacacacaagaccagatcgagataaccacgtaactatcataagagaaaacatccagccaggtcaagagtacaattttctgaagatggagcctggagaagtaaactcacttggagaaagatatgatttcgacagtatcatgcactatgccaggaacaccttctcaagggggatgtttctggataccattctcccctcccgtgatgataatggcatacgtcctgcaattggtcagcgaacccgtctaagcaaaggagatatcgcacaggcaagaaagctgtatagatgtccagcatgtggagaaactctacaagaatccaatggcaacctttcctctccaggatttcccaatggctacccttcttacacacactgcatctggagagtttctgtgaccccaggggagaaggttgtattttcactctgttgattgtgtcttctgatgaacacaaattataaagtttgatgtcataccacttgtctacttttagttttattgcctgtgcttttggtgtcatagccaagaaatcatggccatatgtaatgacatgaagtttttaccctgtgttttcttctatgagttctatagttttacagtcttatatgtaggtttttaatcaatattgtgttaatagaaaccattcttgtacatgtggatatccagtttcttcaacaccatttgttaaagatttactaaatgtttttattcagcattcctgctcatgtttctgacttctattatggcttattttggtcctgcctatagcttacattatagattattttttaaattagcgtttttgtttttttctgtttgaaaatgtggattttttacatgaatttataaaactatagtttcactggatatagttggctgcacatttaactttgttttaaataaaagcttgcaaaaat

SEQ ID NO: 31787 - DNA, 6756 bp, Homo sapiens
  source 1..6756: mol_type = unassigned DNA
gcagcctcggccgccgggcaagtagctccgagcggctgcttcccggttgcctcgacgaagacagggggcgccgcgctccgcttgctccgcgcctgagccatgcccagcagccctgtgtaaccaccgagtcccggccggagccgaccgacccagtgtgcgccgtctttcggccgagctgagctttcgtgcacgcaactccctctgccccagccggccccgcgccaccatgccccgggcgactgcacttggggccctggtgtcactgctgctgctgctgccgctgcctcgcggcgccgggggactcggggagcgcccggacgccaccgcagactactcagagctggacggcgaggagggcacggagcagcagctggagcattaccacgacccttgcaaagccgctgtcttttggggagacattgccttagatgaagatgacttgaagctgtttcacattgacaaagccagagactggaccaagcagacagtgggggcaacaggacacagcacaggtgggcttgaagagcaggcatctgagagcagcccagacaccacagccatggacactggcaccaaggaagctggaaaggatggccgggagaataccacactcctgcacagccctgggaccttgcatgccgcagccaagaccttctctccccgggtccgaagagccacaacctcaaggacagagaggatatggcctggaggagtcatcccctacgtcattggagggaacttcactgggagccagagggccatttttaagcaggccatgagacactgggagaagcacacctgtgtgaccttcatagaaaggacggatgaggaaagctttattgtattcagttacagaacctgtggctgttgctcctatgttgggcgccgaggaggaggcccacaggccatatccattgggaagaactgtgacaagtttggcattgtggctcacgagctgggccatgtggttgggttttggcatgaacacacccggccagacagagaccaacatgtcaccatcatcagggaaaacatccagccaggtcaggagtataatttcttaaaaatggaagctggggaagtgagctctctgggagagacatacgactttgacagcatcatgcactacgcccggaacaccttctcaagaggagttttcttagacaccatccttccccgtcaagatgacaatggcgtcaggccaaccattggccagcgcgtgcggctcagtcagggagacatagctcaagcccggaagctgtacaaatgcccagcgtgtggggagaccctgcaggacacaacgggaaacttttctgcacctggtttcccaaatgggtacccatcttactcccactgcgtctggaggatctcggtcaccccaggggaaaagatcgtattaaacttcacatccatggatttgtttaaaagccgactgtgctggtatgattacgtggaggtccgggatggttactggagaaaagccccccttttgggcaggttttgtggcgataagatcccggagcccctcgtctccacggacagccggctctgggtggagttccgcagcagcagcaacatcttgggcaagggcttctttgcagcgtacgaagctacctgcgggggagacatgaacaaagatgccggtcagattcaatctcccaactatccggatgactacagaccttccaaggaatgtgtctggaggattacggtttcagaggggtttcacgtgggacttaccttccaagcttttgagattgaaaggcacgacagctgtgcatatgactacctggaagtccgggatggccccacggaagagagtgccctgatcggccacttttgtggctatgagaagccggaggatgtgaaatcgagctccaacagactgtggatgaagtttgtgtccgatggctctatcaataaagcgggctttgcagccaattttttcaaggaggtggatgagtgttcctggccagatcacggcgggtgcgagcatcgctgtgtgaacacgctgggcagctacaagtgtgcctgtgaccctggctacgagctggccgccgataagaagatgtgtgaagtggcctgtggcggtttcattaccaagctgaatggaaccatcaccagccctgggtggccgaaggagtatcccacaaacaaaaactgtgtctggcaggtggtggcccccgctcagtaccggatctcccttcagtttgaagtgtttgaactggaaggcaatgacgtctgtaagtacgactttgtagaggtgcgcagcggcctgtcccccgacgccaagctgcacggcaggttctgcggctctgagacgccggaggtcatcacctcgcagagcaacaacatgcgcgtggagttcaagtccgacaacaccgtctccaagcgcggcttcagggcccacttcttctcagataaggacgagtgtgccaaggacaacggcgggtgtcagcatgagtgcgtcaacaccttcgggagctacctgtgcaggtgcagaaacggctactggctccacgagaatgggcatgactgcaaagaggctggctgtgcacacaagatcagcagtgtggaggggaccctggcgagccccaactggcctgacaaataccccagccggagggagtgtacctggaacatctcttcgactgcaggccacagagtgaaactcacctttaatgagtttgagatcgagcagcaccaggaatgtgcctatgaccacctggaaatgtatgacgggccggacagcctggcccccattctgggccgtttctgcggcagcaagaaaccagaccccacggtggcttccggcagcagtatgtttctcaggttttattcggatgcctcagtgcagaggaaaggcttccaggcagtgcacagcacagagtgcgggggcaggctgaaggctgaagtgcagaccaaagagctctattcccacgcccagtttggggacaacaactacccgagcgaggcccgctgtgactgggtgatcgtggcagaggacggctacggcgtggagctgacattccggacctttgaggttgaggaggaggccgactgcggctacgactacatggaagcctacgacggctacgacagctcagcgcccaggctcggccgcttctgtggctctgggccattagaagaaatctactctgcaggtgattccctgatgattcgattccgcacagatgacaccatcaacaagaaaggctttcatgcccgatacaccagcaccaagttccaggatgccctgcacatgaagaaatagtgctgatgttcttgaaagacagaaactgagaattttttttgttttgttttgtttttaacaacaatagcaccttgaaaatctgccctaaaacagtgtacagtatttttctcaaacaaaaactcagaatccagccttagaggtatatatttgaatgaaagtcttgtaagtttggccaacaaggtggagagaaaaatgttcttttgcttctgtctgcaatgttatcattcatgaactgttaaagtgttaaagattaggattgaagtcactgaccattccggctatgcttcttcataccattctccttgtcccttgctcctatgtggcaaaaggtcagccttggggttggccgttcctctaatctggacttgcttgcaaaggtgccaggctgtcttctgtccatgttgggcataagggatgaaaacttggccgagactaatgtgtggcccacagctttggctggaatcattttctttctctctgccagggacatgtcaaccaagaaacctgaaaatatggatggatgtcaggactaaaaaaaggcatcacagtgagcagtgagcacagagggagtttcgagtataagaatcattgtcatgaagttaggagaccacaaagccatttctcagagtcattcactctccttgtccctttggtttccccccctccctaattgcagtgggggctaaggcatccattatgaatacagcagaacatttgctggcgagagtcctgtctgctgagaagacaatattgtggctcgtcctgatatttttttcattcattgactttgagaagactccacctgtgcttggaattccatgggcttcaaagaacatttcttcttttagctttggaggcacttgccgtggcacacctggactccttgacatccaattcaaactgcatttgcaaaatgtgcaaagacctcttatgagggaccaattcaggtcccttatggggtgaacactgttgaagactggttaattataagttatgtaagaatcatcgccttgtggaacaagtcaatcagtgactagcttcctgtagccaatcaggttaaagagtgcgttggtaactttgctctgattaactagtattcaatcaccaacttgcaaacagaattcataacacttggcacttgttctagagaagtgtagaggatgatgtttacataattttagcacctcaaggtataatttaaacagtgaggtagttttgaatggcatttcattaaggcatctatgggcattatgagctaaaagctgtggtatgttagctttaaaagagtatttatgttggaataatttttaaataatgtttacataactgtaagtcctgtttggttgttgttggacgcagggcggcacatgagtgtttttggttagagccaagatagctcccatgcaccggaattcctttgggatgaatcagcatcattttaaacaaagtatatgtaaaaggtgaaaggttatattttttacagatcagaatgtggcaccagaggactgtgtctcattaaagtgattgctgggagcaaaaactagaatgatacaaagaaaggtcagagaaatgcatgggaatattttttccttaaaacagaaaaaaattaaagtattattaataatatatgtctgtatatatgtatgtatgtaaaagatcagctgtcaaagccttaatcaatgcagtgtggaaaatgccaacccctggtcctcgctttactgtgggccctgcaggactggctctccatttcctgcctctcctttcaccaagctctgttttggcctttctcggccctggactgaggctcagcctacacgctcatattgtgcatatggcagaccctgcccagcgtgcgctttgatacagcaaatggagcagctgacctcatggctccaatcccacctgcctgttagggtagattccatttatctgatttttgtattttctgaggttttatttggtctcatcttgtctatgagagttgaaactggaactgggaaacctaagatgggtgttatggttctttctccaaggaaataaaaattctgcagttttaacctttagaagtctaagcaagattaacaaatttcatagaaaagtgggagggagtcagaaacagagttggtgctgctcagcaggacggtgaaacaatgatacttctttttatctctttagtatgaacattttcaaaaacacacagcttcaacaattgtcaccatatggccaatttgcaacaatgggactcttatgaaaaacctttatttaggccttctgtgtgacgtatccacagaaaagagaagctctgattcagctggggctagctgggccgctcctctggaagcccacacttgtggggacttaggcatgacacaggttcttgcaaagaaactagaggctggcttcactagagagagtccattcagcagaaagtcccaggcctctgccttggtgcttccaattatcagtgacctgcctgcaagcatccccagaagcaaacagcagaggtagaagatatcactgcagcctgctttgtgctttaattgggtaccaagctttggggatgacagtgagttgcaagaatagttttagttcagagaattgtcttaggacaacaggctaatgaaggatttggggtctgggtttttagcctggctccgttctggtgtaacccggtctagcaaaagctaagcctggattgcagggcaggaaaaaatctggaattaactttagccagtggaatttcttcaaacagagaaagagaggctgttcattgatccactattccctctattttcctctaaggtaaatatttagaggtatttacctgtaaggtgaagtttcctttttatttctactttacaatttctctctaaagcaagcttgtccaacccttggcccaggacggctttgaatatggcccgacacaaattcgtaaactttttaaaaaacattgtaagattctttctgtgatttttttttttctcgtcagctatcgttagtgtattttatgtgtggcccaagataattcttcttccaatgtggcccagggaagccaaaagatgggacacccctgctgtaaagtttcatatcactcatgaattgctcagctgatttaaataatttgtaaaatcctgctaactagcaaattcacattgagattttctattgattgggtccctttgatagctttcagattggtattgttagcgttccatttgtgaacaaatgttcccttggctttagcagatgtttttaaagtttcttttgtagaccgaacttctgaagagtaataccaaatgcctaaaattttatttttaaaaaggaaaattgtttaaagtattatatgtaaacatatgggtattttttattttgtgtaattttacatttcatgaaatgatgtcagtttcaaagagaaagtggagaggacctaacatatgtctctacctagaacggatggtttcattaaagaatgtggatttatt

SEQ ID NO: 31788 - DNA, 3738 bp, Homo sapiens
  source 1..3738: mol_type = unassigned DNA
agcccaaatgcgaacttaggctgttacacaactgctggggtctgttctcgccgcccgcccggcagtcaggcagcgtcgccgccgtggtagcagcctcagccgtttctggagtctcgggcccacagtcaccgccgcttacctgcgcctcctcgagcctccggagtccccgtccgcccgcacaggccggttcgccgtctgcgtctcccccacgccgcctcgcctgccgccgcgctcgtccctccgggccgacatgagtggggaccacctccacaacgattcccagatcgaagcggatttccgattgaatgattctcataaacacaaagataaacacaaagatcgagaacaccggcacaaagaacacaagaaggagaaggaccgggaaaagtccaagcatagcaacagtgaacataaagattctgaaaagaaacacaaagagaaggagaagaccaaacacaaagatggaagctcagaaaagcataaagacaaacataaagacagagacaaggaaaaacgaaaagaggaaaaggttcgagcctctggggatgcaaaaataaagaaggagaaggaaaatggcttctctagtccaccacaaattaaagatgaacctgaagatgatggctattttgttcctcctaaagaggatataaagccattaaagagacctcgagatgaggatgatgctgattataaacctaagaaaattaaaacagaagataccaagaaggagaagaaaagaaaactagaagaagaagaggatggtaaattgaaaaaacccaagaataaagataaagataaaaaagttcctgagccagataacaagaaaaagaagccgaagaaagaagaggaacagaagtggaaatggtgggaagaagagcgctatcctgaaggcatcaagtggaaattcctagaacataaaggtccagtatttgccccaccatatgagcctcttccagagaatgtcaagttttattatgatggtaaagtcatgaagctgagccccaaagcagaggaagtagctacgttctttgcaaaaatgctcgaccatgaatatactaccaaggaaatatttaggaaaaatttctttaaagactggagaaaggaaatgactaatgaagagaagaatattatcaccaacctaagcaaatgtgattttacccagatgagccagtatttcaaagcccagacggaagctcggaaacagatgagcaaggaagagaaactgaaaatcaaagaggagaatgaaaaattactgaaagaatatggattctgtattatggataaccacaaagagaggattgctaacttcaagatagagcctcctggacttttccgtggccgcggcaaccaccccaagatgggcatgctgaagagacgaatcatgcccgaggatataatcatcaactgtagcaaagatgccaaggttccttctcctcctccaggacataagtggaaagaagtccggcatgataacaaggttacttggctggtttcctggacagagaacatccaaggttccattaaatacatcatgcttaaccctagttcacgaatcaagggtgagaaggactggcagaaatacgagactgctcggcggctgaaaaaatgtgtggacaagatccggaaccagtatcgagaagactggaagtccaaagagatgaaagtccggcagagagctgtagccctgtacttcatcgacaagcttgctctgagagcaggcaatgaaaaggaggaaggagaaacagcggacactgtgggctgctgctcacttcgtgtggagcacatcaatctacacccagagttggatggtcaggaatatgtggtagagtttgacttcctcgggaaggactccatcagatactataacaaggtccctgttgagaaacgagtttttaagaacctacaactatttatggagaacaagcagcccgaggatgatctttttgatagactcaatactggtattctgaataagcatcttcaggatctcatggagggcttgacagccaaggtattccgtacatacaatgcctccatcacgctacagcagcagctaaaagaactgacagccccggatgagaacatcccagcgaagatcctttcttataaccgtgccaatcgagctgttgcaattctttgtaaccatcagagggcaccaccaaaaacttttgagaagtctatgatgaacttgcaaactaagattgatgccaagaaggaacagctagcagatgcccggagagacctgaaaagtgctaaggctgatgccaaggtcatgaaggatgcaaagacgaagaaggtagtagagtcaaagaagaaggctgttcagagactggaggaacagttgatgaagctggaagttcaagccacagaccgagaggaaaataaacagattgccctgggaacctccaaactcaattatctggaccctaggatcacagtggcttggtgcaagaagtggggtgtcccaattgagaagatttacaacaaaacccagcgggagaagtttgcctgggccattgacatggctgatgaagactatgagttttagccagtctcaagaggcagagttctgtgaagaggaacagtgtggtttgggaaagatggataaactgagcctcacttgccctcgtgcctgggggagagaggcagcaagtcttaacaaaccaacatctttgcgaaaagataaacctggagatattataagggagagctgagccagttgtcctatggacaacttatttaaaaatatttcagatatcaaaattctagctgtatgatttgttttgaattttgtttttattttcaagagggcaagtggatgggaatttgtcagcgttctaccaggcaaattcactgtttcactgaaatgtttggattctcttagctactgtatgcaaagtccgattatattggtgcgtttttacagttagggttttgcaataacttctatattttaatagaaataaattcctaaactcccttccctctctcccatttcaggaatttaaaattaagtagaacaaaaaacccagcgcacctgttagagtcgtcactctctattgtcatggggatcaattttcattaaacttgaagcagtcgtggctttggcagtgttttggttcagacacctgttcacagaaaaagcatgatgggaaaatatttcctgacttgagtgttcctttttaaatgtgaatttttatttctttttaattattttaaaatatttaaacctttttcttgatcttaaagatcgtgtagattggggttggggagggatgaagggcgagtgaatctaaggataatgaaataatcagtgactgaaaccattttcccatcatcctttgttctgagcattcgctgtaccctttaagatatccatctttttctttttaaccctaatctttcacttgaaagattttattgtataaaaagtttcacaggtcaataaacttagaggaaaatgagtatttggtccaaaaaaaggaaaaataatcaagattttagggcttttattttttcttttgtaattgtgtaaaaaatggaaaaaaacataaaaagcagaattttaatgtgaagacattttttgctataatcattagttttagaggcattgttagtttagtgtgtgtgcagagtccatttcccacatctttcctcaagtatcttctatttttatcatgaattcccttttaatcaactgtaggttatttaaaataaattcctacaacttaatggaaa

SEQ ID NO: 31789 - DNA, 1958 bp, Homo sapiens
  source 1..1958: mol_type = unassigned DNA
ggcccagcttgtcgctctttcccggaggctggcagatgcgcgtggtgcggctgctgcggctccgggcggctctgacgctgctcggggaggtcccccgccgcccggcctcccggggtgtcccgggctcgcgcaggacgcagaagggcagtggagccaggtgggagaaggagaagcacgaagacggggtgaagtggagacagctggagcacaagggcccgtacttcgcacccccatacgagccccttcccgacggagtgcgtttcttctatgaaggaaggcctgtgagattgagcgtggcagcggaggaggtcgccactttttatgggaggatgttagatcatgaatacacaacaaaggaggttttccggaagaacttcttcaatgactggcgaaaggaaatggcggtggaagagagggaagtcatcaagagcctggacaagtgtgacttcacggagatccacagatactttgtggacaaggccgcagcccggaaagtcctgagcagggaggagaagcagaagctaaaagaagaggcagaaaaacttcagcaagagttcggctactgtattttagatggtcaccaagaaaaaataggcaacttcaagattgagccgcctggcttgttccgtggccgtggcgaccatcccaagatggggatgctgaagagaaggatcacgccagaggatgtggttatcaactgcagcagggactcgaagatccccgagccgccggcggggcaccagtggaaggaggtgcgctccgataacaccgtcacgtggctggcagcttggaccgagagcgttcagaactccatcaagtacatcatgctgaacccttgctcgaagctgaagggggagacagcttggcagaagtttgaaacagctcgacgcctgcggggatttgtggacgagatccgctcccagtaccgggctgactggaagtctcgggaaatgaagacgagacagcgggcggtggccctgtatttcatcgataagctggcactgagagcaggaaatgagaaggaggacggtgaggcggccgacaccgtgggctgctgttccctccgcgtggagcacgtccagctgcacccggaggccgatggctgccaacacgtggtggaatttgacttcctggggaaggactgcatccgctactacaacagagtgccggtggagaagccggtgtacaagaacttacagctctttatggagaacaaggacccccgggacgacctcttcgacaggctgaccacgaccagcctgaacaagcacctccaggagctgatggacgggctgacggccaaggtgttccggacctacaacgcctccatcactctgcaggagcagctgcgggccctgacgcgcgccgaggacagcatagcagctaagatcttatcctacaaccgagccaaccgagtcgtggccattctctgcaaccatcagcgagcaacccccagtacgttcgagaagtcgatgcagaatctccagacgaagatccaggcaaagaaggagcaggtggctgaggccagggcagagctgaggagggcgagggctgagcacaaagcccaaggggatggcaagtccaggagtgtcctggagaagaagaggcggctcctggagaagctgcaggagcagctggcgcagctgagtgtgcaggccacggacaaggaggagaacaagcaggtggccctgggcacgtccaagctcaactacctggaccccaggatcagcattgcctggtgcaagcggttcagggtgccagtggagaagatctacagcaaaacacagcgggagaggttcgcctgggctctcgccatggcaggagaagactttgaattctaacgacgagccgtgttgaaacttcttttgtatgtgtgtgtgtttttttcactattaaagcagtactggggaattttgtacaataaaatgtgtgcaagtgcttgtacatcactagaaaaa

SEQ ID NO: 31790 - DNA, 1868 bp, Homo sapiens
  source 1..1868: mol_type = unassigned DNA
gctcgggccttcccggcgtctccgcgcaggcctcggggaagcggggtccgggggagccgtggtgcggtgggaccgcgtgggtcctggaagagctgcagaggaggtgggagaaggagaagcacgaagacggggtgaagtggagacagctggagcacaagggcccgtacttcgcacccccatacgagccccttcccgacggagtgcgtttcttctatgaaggaaggcctgtgagattgagcgtggcagcggaggaggtcgccactttttatgggaggatgttagatcatgaatacacaacaaaggaggttttccggaagaacttcttcaatgactggcgaaaggaaatggcggtggaagagagggaagtcatcaagagcctggacaagtgtgacttcacggagatccacagatactttgtggacaaggccgcagcccggaaagtcctgagcagggaggagaagcagaagctaaaagaagaggcagaaaaacttcagcaagagttcggctactgtattttagatggtcaccaagaaaaaataggcaacttcaagattgagccgcctggcttgttccgtggccgtggcgaccatcccaagatggggatgctgaagagaaggatcacgccagaggatgtggttatcaactgcagcagggactcgaagatccccgagccgccggcggggcaccagtggaaggaggtgcgctccgataacaccgtcacgtggctggcagcttggaccgagagcgttcagaactccatcaagtacatcatgctgaacccttgctcgaagctgaagggggagacagcttggcagaagtttgaaacagctcgacgcctgcggggatttgtggacgagatccgctcccagtaccgggctgactggaagtctcgggaaatgaagacgagacagcgggcggtggccctgtatttcatcgataagctggcactgagagcaggaaatgagaaggaggacggtgaggcggccgacaccgtgggctgctgttccctccgcgtggagcacgtccagctgcacccggaggccgatggctgccaacacgtggtggaatttgacttcctggggaaggactgcatccgctactacaacagagtgccggtggagaagccggtgtacaagaacttacagctctttatggagaacaaggacccccgggacgacctcttcgacaggctgaccacgaccagcctgaacaagcacctccaggagctgatggacgggctgacggccaaggtgttccggacctacaacgcctccatcactctgcaggagcagctgcgggccctgacgcgcgccgaggacagcatagcagctaagatcttatcctacaaccgagccaaccgagtcgtggccattctctgcaaccatcagcgagcaacccccagtacgttcgagaagtcgatgcagaatctccagacgaagatccaggcaaagaaggagcaggtggctgaggccagggcagagctgaggagggcgagggctgagcacaaagcccaaggggatggcaagtccaggagtgtcctggagaagaagaggcggctcctggagaagctgcaggagcagctggcgcagctgagtgtgcaggccacggacaaggaggagaacaagcaggtggccctgggcacgtccaagctcaactacctggaccccaggatcagcattgcctggtgcaagcggttcagggtgccagtggagaagatctacagcaaaacacagcgggagaggttcgcctgggctctcgccatggcaggagaagactttgaattctaacgacgagccgtgttgaaacttcttttgtatgtgtgtgtgtttttttcactattaaagcagtactggggaattttgtacaat

SEQ ID NO: 31791 - DNA, 1960 bp, Homo sapiens
  source 1..1960: mol_type = unassigned DNA
gagccgtggtgcggtgggaccgcgtgggtcctggaagagctgcagaggagagtgacggctttggatgcgctttgccccagggcctttcttcccggagttggccttttccctgcccttctcttctcctggcgtggtgacctgcctcccttctcctggatcgctttgctggcagccaccttgtaacacctcaggtgggagaaggagaagcacgaagacggggtgaagtggagacagctggagcacaagggcccgtacttcgcacccccatacgagccccttcccgacggagtgcgtttcttctatgaaggaaggcctgtgagattgagcgtggcagcggaggaggtcgccactttttatgggaggatgttagatcatgaatacacaacaaaggaggttttccggaagaacttcttcaatgactggcgaaaggaaatggcggtggaagagagggaagtcatcaagagcctggacaagtgtgacttcacggagatccacagatactttgtggacaaggccgcagcccggaaagtcctgagcagggaggagaagcagaagctaaaagaagaggcagaaaaacttcagcaagagttcggctactgtattttagatggtcaccaagaaaaaataggcaacttcaagattgagccgcctggcttgttccgtggccgtggcgaccatcccaagatggggatgctgaagagaaggatcacgccagaggatgtggttatcaactgcagcagggactcgaagatccccgagccgccggcggggcaccagtggaaggaggtgcgctccgataacaccgtcacgtggctggcagcttggaccgagagcgttcagaactccatcaagtacatcatgctgaacccttgctcgaagctgaagggggagacagcttggcagaagtttgaaacagctcgacgcctgcggggatttgtggacgagatccgctcccagtaccgggctgactggaagtctcgggaaatgaagacgagacagcgggcggtggccctgtatttcatcgataagctggcactgagagcaggaaatgagaaggaggacggtgaggcggccgacaccgtgggctgctgttccctccgcgtggagcacgtccagctgcacccggaggccgatggctgccaacacgtggtggaatttgacttcctggggaaggactgcatccgctactacaacagagtgccggtggagaagccggtgtacaagaacttacagctctttatggagaacaaggacccccgggacgacctcttcgacaggctgaccacgaccagcctgaacaagcacctccaggagctgatggacgggctgacggccaaggtgttccggacctacaacgcctccatcactctgcaggagcagctgcgggccctgacgcgcgccgaggacagcatagcagctaagatcttatcctacaaccgagccaaccgagtcgtggccattctctgcaaccatcagcgagcaacccccagtacgttcgagaagtcgatgcagaatctccagacgaagatccaggcaaagaaggagcaggtggctgaggccagggcagagctgaggagggcgagggctgagcacaaagcccaaggggatggcaagtccaggagtgtcctggagaagaagaggcggctcctggagaagctgcaggagcagctggcgcagctgagtgtgcaggccacggacaaggaggagaacaagcaggtggccctgggcacgtccaagctcaactacctggaccccaggatcagcattgcctggtgcaagcggttcagggtgccagtggagaagatctacagcaaaacacagcgggagaggttcgcctgggctctcgccatggcaggagaagactttgaattctaacgacgagccgtgttgaaacttcttttgtatgtgtgtgtgtttttttcactattaaagcagtactggggaattttgtacaataaaa

SEQ ID NO: 31792 - DNA, 1982 bp, Homo sapiens
  source 1..1982: mol_type = unassigned DNA
ccggcctcccggggtgtcccgggctcgcgcaggacgcagaagggcagtggagccaggcacaagccgcatggatccagtggccctggtggccgttggtggtcccaggcgctttcctggaggacatgtgagaagccctgccggcgcatactgggcctggggtagccgcatggggatgggtctctgcgcatgaaatgctggagtttccgaagagctggagagttgacagcctcactggtgggagaaggagaagcacgaagacggggtgaagtggagacagctggagcacaagggcccgtacttcgcacccccatacgagccccttcccgacggagtgcgtttcttctatgaaggaaggcctgtgagattgagcgtggcagcggaggaggtcgccactttttatgggaggatgttagatcatgaatacacaacaaaggaggttttccggaagaacttcttcaatgactggcgaaaggaaatggcggtggaagagagggaagtcatcaagagcctggacaagtgtgacttcacggagatccacagatactttgtggacaaggccgcagcccggaaagtcctgagcagggaggagaagcagaagctaaaagaagaggcagaaaaacttcagcaagagttcggctactgtattttagatggtcaccaagaaaaaataggcaacttcaagattgagccgcctggcttgttccgtggccgtggcgaccatcccaagatggggatgctgaagagaaggatcacgccagaggatgtggttatcaactgcagcagggactcgaagatccccgagccgccggcggggcaccagtggaaggaggtgcgctccgataacaccgtcacgtggctggcagcttggaccgagagcgttcagaactccatcaagtacatcatgctgaacccttgctcgaagctgaagggggagacagcttggcagaagtttgaaacagctcgacgcctgcggggatttgtggacgagatccgctcccagtaccgggctgactggaagtctcgggaaatgaagacgagacagcgggcggtggccctgtatttcatcgataagctggcactgagagcaggaaatgagaaggaggacggtgaggcggccgacaccgtgggctgctgttccctccgcgtggagcacgtccagctgcacccggaggccgatggctgccaacacgtggtggaatttgacttcctggggaaggactgcatccgctactacaacagagtgccggtggagaagccggtgtacaagaacttacagctctttatggagaacaaggacccccgggacgacctcttcgacaggctgaccacgaccagcctgaacaagcacctccaggagctgatggacgggctgacggccaaggtgttccggacctacaacgcctccatcactctgcaggagcagctgcgggccctgacgcgcgccgaggacagcatagcagctaagatcttatcctacaaccgagccaaccgagtcgtggccattctctgcaaccatcagcgagcaacccccagtacgttcgagaagtcgatgcagaatctccagacgaagatccaggcaaagaaggagcaggtggctgaggccagggcagagctgaggagggcgagggctgagcacaaagcccaaggggatggcaagtccaggagtgtcctggagaagaagaggcggctcctggagaagctgcaggagcagctggcgcagctgagtgtgcaggccacggacaaggaggagaacaagcaggtggccctgggcacgtccaagctcaactacctggaccccaggatcagcattgcctggtgcaagcggttcagggtgccagtggagaagatctacagcaaaacacagcgggagaggttcgcctgggctctcgccatggcaggagaagactttgaattctaacgacgagccgtgttgaaacttcttttgtatgtgtgtgtgtttttttcactattaaagcagtact

SEQ ID NO: 31793 - DNA, 5378 bp, Homo sapiens
  source 1..5378: mol_type = unassigned DNA
ggggtaggggcggcgccgagtcgggggagggggctgtgcgccgggctggcgcccgaccccagccaccgccctgcggccagcgcgtcccccgactcgccgcccggagaccccgaggctccaacgagttcagaaatgtccagaaatgacaaagaaccgttttttgtgaagtttttaaagtcttcagacaattccaaatgtttttttaaagctctcgagtccataaaagaattccaatcagaagaatatcttcagattattacagaagaagaggcattgaagataaaggagaatgatagatcactttatatctgtgacccttttagtggcgttgtctttgatcacctcaaaaagcttggctgcagaattgttggtcctcaagtagtcatattttgtatgcaccaccagcgatgtgtcccaagagccgaacatccagtttataatatggttatgtctgatgtaaccatatcttgtacaagtctggaaaaagaaaaaagggaagaagttcataaatatgtacaaatgatgggcggacgagtatacagagaccttaatgtatcagtaactcaccttattgcaggagaagttggtagcaaaaaatatttagttgctgcaaacctgaagaaacctattttgcttccctcttggataaaaacactttgggagaagtcacaagagaaaaaaataactagatatactgatataaacatggaagatttcaagtgtcctatttttcttggttgcataatctgtgtgactggcttatgtggcttagacaggaaagaagttcagcaactcacagttaagcatggaggtcaatacatgggacaattgaaaatgaatgaatgtacacacctcattgtgcaagaaccaaaaggtcagaagtatgagtgtgccaagagatggaatgtacactgtgtgaccacacagtggttttttgacagtattgagaaaggtttttgtcaggatgaatccatatacaagacagaacctagaccagaagcaaagactatgcccaattcttcaactcctaccagccagatcaacacaattgatagtcgtactctttcagatgtcagcaatatttccaacataaatgcaagttgcgtaagtgaatcaatatgtaattcacttaacagcaaactggagcctacacttgaaaatctagaaaatctggatgtcagtgcatttcaagcacctgaagatttattagatggttgtcggatatatctttgcggttttagtggcagaaagctagataaactgagaagacttattaacagtggaggtggagttcgttttaaccagctaaatgaagatgtaactcatgttattgtgggagattatgatgatgaattgaagcagttttggaataaatcagcccacaggcctcatgtagtgggagcaaagtggttgctagagtgtttcagtaaaggttatatgctttctgaagaaccatatatccatgctaattaccagccagtggaaattccagtttcacataagcctgaaagtaaagcagctcttttaaaaaagaagaacagcagcttctctaagaaagactttgctcctagtgaaaagcatgagcaagctgatgaagatctgctctctcaatatgaaaatggtagctccacagtagttgaggctaagacgtctgaagccaggccctttaatgattctactcatgctgagcccttgaatgattctactcacatttctttgcaagaagaaaaccagtcttctgtcagtcattgtgtccctgatgtttctacaattactgaagaaggcttatttagccaaaagagtttccttgttttgggttttagtaatgaaaatgaatctaacatcgcaaacatcataaaagaaaatgctgggaaaatcatgtcccttctgagcagaactgttgcggattatgctgtggttcctctgctggggtgtgaagtggaagccactgtgggagaagttgttacaaatacatggctggttacttgcatagactatcagactttgtttgatccaaagtcgaatcctctcttcacaccagttccagtaatgacaggaatgactcctttagaggattgtgttatttcatttagccagtgtgctggagcagaaaaagagtctttaacattcctagcaaacctccttggagcaagtgttcaagaatactttgttcgcaaatccaatgcaaagaaaggcatgtttgccagtactcatcttatactgaaagaacgtggtggctctaaatatgaagctgcaaagaagtggaatttacctgccgttactatagcttggctgttggagactgctagaacgggaaagagagcagacgaaagccattttctgattgaaaattcaactaaagaagaacgaagtttggaaacagaaataacaaatggaatcaatctaaattcagatactgcagagcatcctggcacacgcctgcaaactcacagaaaaaccgtcgttacacctttagatatgaaccgctttcagagtaaagctttccgtgctgtggtctcacaacatgccagacaggtcgcagcctccccagcagtaggacaaccacttcagaaggagccctcgttacacctggatacaccatcaaaattcctgtccaaggacaaactcttcaagccttcctttgatgtgaaggatgcacttgcagccttggaaactccaggacgtcccagccaacagaaaaggaaaccgagtacgccactctcagaagttattgtcaaaaacttgcaacttgctttggcaaatagctctcgaaatgctgtcgctctttctgccagccctcaactgaaagaggcccagtcagagaaggaagaagccccaaagccacttcacaaagtagtggtatgtgttagtaaaaaactcagtaagaagcagagtgaactaaatgggatcgcagcctctctaggagcagattacaggtggagttttgatgaaacagtgactcatttcatctatcaagggcggccaaatgacactaatcgggagtataaatctgtaaaagaaagaggagtacacattgtttccgagcactggcttttagattgtgcccaagagtgtaaacatcttcctgaatctctttatccacatacttataatcccaaaatgagcttggatatcagcgcagtgcaagatggccggctctgtaatagtcgactactctcagctgtgtcttcaacaaaggatgatgagccagatcctttgattttagaagaaaatgatgtagacaatatggccaccaataataaagagtcagcaccatcaaatggaagtggaaagaatgactctaaaggagttctgacacagaccttagagatgagagagaactttcagaagcagttacaggagataatgtctgcaacatcaatagtgaaaccccaagggcagaggacttccctttcaagaagtggttgtaacagcgcatcttcaacccctgacagcactcgctctgctcgcagtggacgaagtagagtcctagaggcactgaggcagtctcgtcagacagtacctgatgtcaacacagagccttcccaaaatgaacagatcatttgggatgaccctacagcaagggaggagagagcaaggcttgccagcaatttgcagtggcctagttgtcccacacaatactctgagcttcaggttgacattcaaaacttggaggattctccttttcaaaagcctttacatgattcagaaattgctaaacaggctgtctgtgatcctggaaacatacgtgtgactgaagctcccaaacacccaatctctgaagaactggaaactcccataaaagacagccacctgatccctacgcctcaagcccccagtattgcctttccactcgccaacccccctgtggctccgcaccctagagaaaagattataacgatagaggagactcatgaagaattaaaaaaacagtacatatttcagttatcatctctgaatcctcaagaacgtattgactattgtcatctgattgagaaactaggtggattggtgatagaaaagcagtgctttgatcccacctgtacacacattgttgtgggacatccacttcgaaacgagaagtatttagcctcagtggcagctgggaagtgggtgcttcatcgctcctaccttgaagcctgcaggactgctggacacttcgtgcaggaagaagactatgaatggggaagtagttccatacttgatgttctgactggaatcaatgtacagcaacgaagactagcacttgcagcaatgagatggagaaaaaaaatccagcaaagacaagaatctggcattgttgagggagcatttagtgggtggaaggttattttacatgtggatcagtctcgagaagcaggcttcaaacgccttcttcagtcaggaggagcaaaggtgctacctggtcattctgtacctttatttaaagaggccacacatcttttttctgacttgaataaactgaaaccagatgactcaggagttaatatagcagaagctgctgcccagaacgtgtactgcttgagaacagaatacattgctgattatctcatgcaggaatcacctcctcatgtagaaaattactgtctaccagaagctatttcatttattcagaataataaggaacttgggactggattatcacaaaagaggaaagctcctacagaaaaaaataaaatcaaacgacctagagtacactaatcgcatctaccctttagttaccaaacattaaatgtttttaaaaattgaaagcctgaatgtgactgtgatagatttgggtagtaatttaaagatgagtacctgaagaattctgcttcagagtataatgatgacccttcttgagttttgaacacctgaaattgtaatcactgaaatattaactgtttcttaataaaaagttacctgaaataacaacaaaatacaactcctcagctagcttgctgttaaaccacattgaagtctgttaaaagatatttatttttcttgtaaatatctgaagctgtagcttagtggaaattttagcaaggtaatggattttgctttaaaatgtctgccttacaaattcataacaacaagatttgtcagtcagcatttattcatgttttccctgatttttatcttctcaccattttacctcttttaacaggagcctgagcacaaggtttaatgaggaagctggggctataaatatgtgtgtatatatgtatatgtatgtttgtacaaatctccatgatgtttgccaagtttgaatgcgcaaaacttggaaaatgtgacaataaagaataaaagtagtaactcaaattagtattaagatgtgtttacatagataaattttttaaaagagcaccctggcatctgttcttctgttgaagcaacaa

SEQ ID NO: 31794 - DNA, 4098 bp, Homo sapiens
  source 1..4098: mol_type = unassigned DNA
tgaagaaatagggcctttccgcctgcgggcccagtgagtcgacacggtgggggcccgcgatccccgggacttaccactgaataaatccagtccagcgtgcgacgacttactggcttcatggggtcgcagccgccgctggggtctccgctgtctcgcgaggagggtgaagcgcccccgcctgctcccgcttcggagggtaggcggagaagtcgccgggtacgccttcgcggatcctgccgacaccgacctagctttctgggctgccgggagctcgcggcgagcgccccagccaggcctgcgccggcatcctccgagataatggcatcagctgctaaggaatttaaaatggacaacttttcacctaaagctggcactagcaaattgcaacagacagtaccagctgatgcatctcctgattctaagtgtcctatatgcttggatagatttgataatgtgtcttacttagatcgctgcttacataagttctgttttcgctgtgtacaggagtggtcaaaaaacaaagctgaatgcccactatgtaaacagccctttgattctattttccattctgtgagggcagaagatgacttcaaggagtatgtcctaaggccttcgtataatggttcttttgtcacccctgatcgacgatttcgctaccgtacaactctgacaagggaacgaaatgcttctgtgtattcacctagtggtcctgtgaacagaagaacaacaactccaccggatagtggagtactgtttgaagggttaggcatttcaacaagacctagagatgttgaaattcctcagtttatgagacagattgcagtaaggaggccaactacggcagatgaaagatctttgcggaaaattcaagaacaagatattattaattttagacgaactctttatcgtgctggtgctcgagttagaaatattgaagatggtggccgctacagggatatttcagctgaatttttccgtagaaatccagcttgccttcacagattagtcccctggttaaaacgtgaacttacagttctttttggagctcatggatctttagtgaatattgtccagcatattatcatgagtaatgttactcgctatgacttggagagtcaggcatttgtgtctgatttaagaccatttttacttaatcgaactgagcattttatacatgaatttatcagttttgcccgatctccttttaacatggcagcctttgaccagcatgccaattatgattgccctgctccttcatacgaagaaggcagccattctgattcttcagtcataacaatatctccagatgaggctgagacccaagagctggatattaatgtagccactgttagtcaggcaccatgggatgatgaaactccaggaccatcttactcaagctcagagcaggtacacgttactatgtcttctcttttaaatacttctgacagttcagatgaagaacttgtcacaggaggagccacgtctcagatacaaggagtacaaaccaatgacgacctaaataatgacagtgatgattcttcagataattgtgtcattgttgggtttgttaaaccactagctgagaggaccccagaacttgttgaactgtcctctgattctgaggacttaggttcttatgagaaaatggagacagtgaagacacaagaacaggagcaatcttacagttctggtgatagcgatgttagtagatgctcatctccacactctgtccttggaaaggatgaacaaataaataaaggtcattgtgattctagtacaagaatcaaatcaaagaaggaagagaaacgatctacatcattgtcatctcccagaaacctgaactcatctgtaagaggagacagagtatattctccatataaccatagacacagaaagaggggaagatcaagaagttcagattcacgttctcagagtagaagtgggcatgatcagaagaatcatagaaagcatcatgggaagaaaagaatgaaaagtaaacgatccagaagcagggaaagtagcagacctagagggagaagagacaaaaagagatcaagaactagagatagcagttggtccagaagaagccaaactctgtctctaagtagtgaaagcacaagcagatcaaggtctcgtagcagtgatcatggtaaaagaagatcacggagcagaaatagagatcgttattatttaagaaataattatggaagcagatacaaatgggagtatacttattacagtagaaacaaggacagggatgggtacgaatcatcttacaggaggaggactctgtccagagctcattattctagacagtcttcaagtccagaatttagagttcagtccttttctgaaagaacaaatgctaggaaaaaaaataatcacagtgagaggaagtattactactatgaaaggcacagatcaaggagcctgtctagtaacagatcaaggactgcatctaccgggactgaccgggtgagaaatgaaaagcctggagggaaacgaaaatacaaaacacggcatttggagggtactaacgaagtggctcagccatctcgtgaatttgcttctaaagcaaaggacagtcattaccaaaaatcttcatcaaaattggatggaaactacaaaaatgagagtgataccttttcagacagccgatcatcagacagagagacaaaacacaaaaggagaaaaaggaagacccggagcctaagtgtagagatagtttatgaaggaaaagctactgatacaactaaacaccataaaaagaaaaagaagaaacataagaagaagcataagaaacaccatggagataatgcttcacgttccccagttgtaattaccattgacagtgacagtgataaggattctgaagtaaaggaggatacagaatgtgacaatagtggtcctcaagaccctctacaaaatgagtttttggctccttccttggaaccatttgaaactaaagatgtagttacaatagaagctgaatttggtgtgctggacaaggaatgtgatattgccacacttagtaacaacttgaataatgccaacaaaactgtagataatattccacctctggcagcttcagttgaacaaactctcgatgtaagagaagagagcacctttgtttctgatttggagaaccagcccagtaacattgtgtctcttcaaactgagccatcaaggcaattgccatcgccacggacatcattaatgtcagtatgtcttggtagagactgtgatatgtcttaaaactgccaaagcatttcattgagaattatgatgttataaaaaggaaaaaggaagaatgtcgtctactgcagtctatttaaagatgacatttggtgaaaactctcttcctccttacaatattttaaatgattttttttttggtgttaatttgtaaaaatcattatttgttcaaaatgtatgtcccaccctcaaagatatgcacttttaagtgaagaaaatgatactgctagcagcttatttaaaacttggggtcctttttaaataagaaaaattatataaattttagaagttatttcataaagccatacggtattgacatatttttaaggtagtcaatgagtatttttgaattttttttttttgagagttattctggaaatgtgttataagctaggagaatccctttggacagtctttatttttcttcttaaaaatttatatgattcaaaaccatttcttcaggttaaattgaggcattttaatctgcacagtttatcttctgccaaaataaaaatttactatttcctttatatacttgtttatctggactgccagtaaaacaaatgtgtattcaacaaaagaaaaaaaataaaacagtaacactttaaaacaagaatcagacattttcctatgcagtatttttttttaaagtttattttagtaaagttaaaatcttgaaagtagctaagggcataattatgtcataaatactgaacttcaggtgaacaaatactttatagttttaattattttctttgattttgaggagtatcttatttgctttctatcatcagtaaaaacagcatttaacttgctaaataaacatgaaaaacccttgtcata

SEQ ID NO: 31795 - DNA, 3621 bp, Homo sapiens
  source 1..3621: mol_type = unassigned DNA
tgaagaaatagggcctttccgcctgcgggcccagtgagtcgacacggtgggggcccgcgatccccgggacttaccactgaataaatccagtccagcgtgcgacgacttactggcttcatgataatggcatcagctgctaaggaatttaaaatggacaacttttcacctaaagctggcactagcaaattgcaacagacagtaccagctgatgcatctcctgattctaagtgtcctatatgcttggatagatttgataatgtgtcttacttagatcgctgcttacataagttctgttttcgctgtgtacaggagtggtcaaaaaacaaagctgaatgcccactatgtaaacagccctttgattctattttccattctgtgagggcagaagatgacttcaaggagtatgtcctaaggccttcgtataatggttcttttgtcacccctgatcgacgatttcgctaccgtacaactctgacaagggaacgaaatgcttctgtgtattcacctagtggtcctgtgaacagaagaacaacaactccaccggatagtggagtactgtttgaagggttaggcatttcaacaagacctagagatgttgaaattcctcagtttatgagacagattgcagtaaggaggccaactacggcagatgaaagatctttgcggaaaattcaagaacaagatattattaattttagacgaactctttatcgtgctggtgctcgagttagaaatattgaagatggtggccgctacagggatatttcagctgaatttttccgtagaaatccagcttgccttcacagattagtcccctggttaaaacgtgaacttacagttctttttggagctcatggatctttagtgaatattgtccagcatattatcatgagtaatgttactcgctatgacttggagagtcaggcatttgtgtctgatttaagaccatttttacttaatcgaactgagcattttatacatgaatttatcagttttgcccgatctccttttaacatggcagcctttgaccagcatgccaattatgattgccctgctccttcatacgaagaaggcagccattctgattcttcagtcataacaatatctccagatgaggctgagacccaagagctggatattaatgtagccactgttagtcaggcaccatgggatgatgaaactccaggaccatcttactcaagctcagagcaggtacacgttactatgtcttctcttttaaatacttctgacagttcagatgaagaacttgtcacaggaggagccacgtctcagatacaaggagtacaaaccaatgacgacctaaataatgacagtgatgattcttcagataattgtgtcattgttgggtttgttaaaccactagctgagaggaccccagaacttgttgaactgtcctctgattctgaggacttaggttcttatgagaaaatggagacagtgaagacacaagaacaggagcaatcttacagttctggtgatagcgatgttagtagatgctcatctccacactctgtccttggaaaggatgaacaaataaataaaggtcattgtgattctagtacaagaatcaaatcaaagaaggaagagaaacgatctacatcattgtcatctcccagaaacctgaactcatctgtaagaggagacagagtatattctccatataaccatagacacagaaagaggggaagatcaagaagttcagattcacgttctcagagtagaagtgggcatgatcagaagaatcatagaaagcatcatgggaagaaaagaatgaaaagtaaacgatccagaagcagggaaagtagcagacctagagggagaagagacaaaaagagatcaagaactagagatagcagttggtccagaagaagccaaactctgtctctaagtagtgaaagcacaagcagatcaaggtctcgtagcagtgatcatggtaaaagaagatcacggagcagaaatagagatcgttattatttaagaaataattatggaagcagatacaaatgggagtatacttattacagtagaaacaaggacagggatgggtacgaatcatcttacaggaggaggactctgtccagagctcattattctagacagtcttcaagtccagaatttagagttcagtccttttctgaaagaacaaatgctaggaaaaaaaataatcacagtgagaggaagtattactactatgaaaggcacagatcaaggagcctgtctagtaacagatcaaggactgcatctaccgggactgaccgggtgagaaatgaaaagcctggagggaaacgaaaatacaaaacacggcatttggagggtactaacgaagtggctcagccatctcgtgaatttgcttctaaagcaaaggacagtcattaccaaaaatcttcatcaaaattggatggaaactacaaaaatgagagtgataccttttcagacagccgatcatcagacagagagacaaaacacaaaaggagaaaaaggaagacccggagcctaagtgtagagatagtttatgaaggaaaagctactgatacaactaaacaccataaaaagaaaaagaagaaacataagaagaagcataagaaacaccatggagataatgcttcacgttccccagttgtaattaccattgacagtgacagtgataaggattctgaagtaaaggaggatacagaatgtgacaatagtggtcctcaagaccctctacaaaatgagtttttggctccttccttggaaccatttgaaactaaagatgtagttacaatagaagctgaatttggtgtgctggacaaggaatgtgatattgccacacttagtaacaacttgaataatgccaacaaaactgtagataatattccacctctggcagcttcagttgaacaaactctcgatgtaagagaagagagcacctttgtttctgatttggagaaccagcccagtaacattgtgtctcttcaaactgagccatcaaggcaattgccatcgccacggacatcattaatgtcagtatgtcttggtagagactgtgatatgtcttaaaactgccaaagcatttcattgagaattatgatgttataaaaaggaaaaaggaagaatgtcgtctactgcagtctatttaaagatgacatttggtgaaaactctcttcctccttacaatattttaaatgattttttttttggtgttaatttgtaaaaatcattatttgttcaaaatgtatgtcccaccctcaaagatatgcacttttaagtgaagaaaatgatactgctagcagcttatttaaaacttggggtcctttttaaataagaaaaattatataaattttagaagttatttcataaagccatacggtattgacatatttttaaggtagtcaatgagtatttttgaattttttttttttgagagttattctggaaatgtgttataagctaggagaatccctttggacagtctttatttttcttcttaaaaatttatatgattcaaaaccatttcttcaggttaaattgaggcattttaatctgcacagtttatcttctgccaaaataaaaatttactatttcctttatatacttgtttatctggactgccagtaaaac

SEQ ID NO: 31796 - DNA, 2076 bp, Homo sapiens
  source 1..2076: mol_type = unassigned DNA
accggttcgcggtcggcgcgagaacaagcagggtggcgcgggtccgggcatgaagctgggccgggccgtgctgggcctgctgctgctggcgccgtccgtggtgcaggcggtggagcccatcagcctgggactggccctggccggcgtcctcaccggctacatctacccgcgtctctactgcctcttcgccgagtgctgcgggcagaagcggagccttagccgggaggcactgcagaaggatctggacgacaacctctttggacagcatcttgcaaagaaaatcatcttaaatgccgtgtttggtttcataaacaacccaaagcccaagaaacctctcacgctctccctgcacgggtggacaggcaccggcaaaaatttcgtcagcaagatcatcgcagagaatatttacgagggtggtctgaacagtgactatgtccacctgtttgtggccacattgcactttccacatgcttcaaacatcaccttgtacaaggatcagttacagttgtggattcgaggcaacgtgagtgcctgtgcgaggtccatcttcatatttgatgaaatggataagatgcatgcaggcctcatagatgccatcaagcctttcctcgactattatgacctggtggatggggtctcctaccagaaagccatgttcatatttctcagcaatgctggagcagaaaggatcacagatgtggctttggatttctggaggagtggaaagcagagggaagacatcaagctcaaagacattgaacacgcgttgtctgtgtcggttttcaataacaagaacagtggcttctggcacagcagcttaattgaccggaacctcattgattattttgttcccttcctccccctggaatacaaacacctaaaaatgtgtatccgagtggaaatgcagtcccgaggctatgaaattgatgaagacattgtaagcagagtggctgaggagatgacatttttccccaaagaggagagagttttctcagataaaggctgcaaaacggtgttcaccaagttagattattactacgatgattgacagtcatgattggcagccggagtcactgcctggagttggaaaagaaacaacactcagtccttccacacttccacccccagctcctttccctggaagaggaatccagtgaatgttcctgtttgatgtgacaggaattctccctggcattgtttccaccccctggtgcctgcaggccacccagggaccacgggcgaggacgtgaagcctcccgaacacgcacagaaggaaggagccagctcccagcccactcatcgcagggctcatgattttttacaaattatgttttaattccaagtgtttctgtttcaaggaaggatgaataagttttattgaaaatgtggtaactttatttaaaatgatttttaacattatgagagactgctcagattctaagttgttggccttgtgtgtgtgtttttttttaagttctcatcattattacatagactgtgatgtatctttactggaaatgagcccaagcacacatgcatggcatttgttccacaggagggcatccctggggatgtggctggagcatgagccagctctgtcccaggatggtcccagcggatgctgccaggggcagtgaagtgtttaggtgaaggacaagtaggtaagaggacgccttcaggcaccacagataagcctgaaacagcctctccaagggttttcaccttagcaacaatgggagctgtgggagtgattttggccacactgtcaacatttgttagaaccagtcttttgaaagaaaagtatttccaacttgtcacttgccagtcactccgttttgcaaaaggtggcccttcactgtccattccaaatagcccacacgtgctctctgctggattctaaattatgtgaattttgccatattaaatcttcctcatttatactattatttgttacgttcaatcagaatccccgaaacctcctataaagcttagctgccccttctgaggatgctgagaacggtgtctttctttataaatgcaaatggctaccgttttacaataaaattttgcatgtgc

SEQ ID NO: 31797 - DNA, 1984 bp, Homo sapiens
  source 1..1984: mol_type = unassigned DNA
accggttcgcggtcggcgcgagaacaagcagggtggcgcgggtccgggcatgaagctgggccgggccgtgctgggcctgctgctgctggcgccgtccgtggtgcaggcggtggagcccatcagcctgggactggccctggccggcgtcctcaccggctacatctacccgcgtctctactgcctcttcgccgagtgctgcgggcagaagcggagccttagccgggaggcactgcagaaggatctggacgacaacctctttggacagcatcttgcaaagaaaatcatcttaaatgccgtgtttggtttcataaacaacccaaagcccaagaaacctctcacgctctccctgtttgtggccacattgcactttccacatgcttcaaacatcaccttgtacaaggatcagttacagttgtggattcgaggcaacgtgagtgcctgtgcgaggtccatcttcatatttgatgaaatggataagatgcatgcaggcctcatagatgccatcaagcctttcctcgactattatgacctggtggatggggtctcctaccagaaagccatgttcatatttctcagcaatgctggagcagaaaggatcacagatgtggctttggatttctggaggagtggaaagcagagggaagacatcaagctcaaagacattgaacacgcgttgtctgtgtcggttttcaataacaagaacagtggcttctggcacagcagcttaattgaccggaacctcattgattattttgttcccttcctccccctggaatacaaacacctaaaaatgtgtatccgagtggaaatgcagtcccgaggctatgaaattgatgaagacattgtaagcagagtggctgaggagatgacatttttccccaaagaggagagagttttctcagataaaggctgcaaaacggtgttcaccaagttagattattactacgatgattgacagtcatgattggcagccggagtcactgcctggagttggaaaagaaacaacactcagtccttccacacttccacccccagctcctttccctggaagaggaatccagtgaatgttcctgtttgatgtgacaggaattctccctggcattgtttccaccccctggtgcctgcaggccacccagggaccacgggcgaggacgtgaagcctcccgaacacgcacagaaggaaggagccagctcccagcccactcatcgcagggctcatgattttttacaaattatgttttaattccaagtgtttctgtttcaaggaaggatgaataagttttattgaaaatgtggtaactttatttaaaatgatttttaacattatgagagactgctcagattctaagttgttggccttgtgtgtgtgtttttttttaagttctcatcattattacatagactgtgatgtatctttactggaaatgagcccaagcacacatgcatggcatttgttccacaggagggcatccctggggatgtggctggagcatgagccagctctgtcccaggatggtcccagcggatgctgccaggggcagtgaagtgtttaggtgaaggacaagtaggtaagaggacgccttcaggcaccacagataagcctgaaacagcctctccaagggttttcaccttagcaacaatgggagctgtgggagtgattttggccacactgtcaacatttgttagaaccagtcttttgaaagaaaagtatttccaacttgtcacttgccagtcactccgttttgcaaaaggtggcccttcactgtccattccaaatagcccacacgtgctctctgctggattctaaattatgtgaattttgccatattaaatcttcctcatttatactattatttgttacgttcaatcagaatccccgaaacctcctataaagcttagctgccccttctgaggatgctgagaacggtgtctttctttataaatgcaaatggctaccgttttacaataaaattttgcatgtgcc

SEQ ID NO: 31798 - DNA, 2769 bp, Homo sapiens
  source 1..2769: mol_type = unassigned DNA
tcctgccgcttggccgcggggcgcctggctcagtggcttctgcgggcttcgaggagcgggatgttgcgggctgggtggctccggggcgcggcggcgctggcgctgctgctggcggcccgagtggtggcggcgttcgagcccatcaccgtgggcctagccatcggggccgcgtcggccatcaccggctacctgtcctacaatgacatctactgccgcttcgccgagtgctgccgcgaggagcggccgctcaacgcttcggctctcaagctggatttggaggagaagctgtttggacagcatctagccacggaagtgattttcaaggcgctgactggcttcaggaacaacaaaaatcccaagaaaccactgaccctttccttacacggctgggctggcacaggcaagaattttgtcagtcaaattgtggctgaaaatcttcacccaaaaggtctgaagagtaactttgtccacctgtttgtatcgactctgcacttccctcatgagcagaagataaaactgtaccaggaccagttacagaagtggatccgcggtaatgtgagtgcatgtgcgaactctgttttcatatttgacgagatggataaattgcaccccgggatcattgacgcaatcaagccgtttctagactactacgagcaggttgacggagtgtcttaccgcaaagccatcttcatctttctcagcaatgcaggcggggaccttataactaagacggctcttgacttttggcgggccggaagaaagagggaagacattcagctgaaggacctggaacctgtactgtctgtcggagtcttcaataataaacacagtggcctgtggcacagtggactgatcgacaaaaacctcattgattactttatccccttcctgcctttggagtacagacatgtgaaaatgtgtgtgagggccgagatgagggcccgtggttctgccatagatgaagacattgtcacaagagtggcagaggaaatgacgtttttccccagagacgagaaaatctactcagacaagggctgcaagactgtgcagtcgcggctggatttccactgagctcctatccagatggggtaggagacagctgggaggctccgcacgccagaggccttgcctttcagaagaaccctgaagaccgctttggggttttgcctgtttgcaccttagacttttgggtatagaatcttttttttgagaagaggtctcactccgtcatccaagctggagtgcagtggtgcaatcctcaactcactgcaacctccgctcccggtttgagtgattctcatgcctcagcctcccgagtagctgggattacaggcatgagccactgtgcccagctgggatatagaatctaagagttgattgtggaaaacacgtgaatctattgcgcgcatttgtcatttagcaagatggcagcagtccagctgttctttgcagctggagatgaacttttaaaaatccccttcacacttaatgtactgaccgagacagaagtacctgaaaacagctgtgcatggcaggcccggcaatagcttctgacccacagcacccgcgcctcagaagctacggtcacaactaaaggagtccagggacttgctgcaggctggggggcactgggtggttctcaccagcaggctgcggggcactgtgttctcattggccaaaaacatccttttgctctgtctcgttctttacacagagttcactgacttgaagtatactcagttaaaatcggggctggaggtgcagacggtgtctgaccggaggatgtggccgtgcccgccgagcactcttgatctgagctgacctgtgtgtgtgtgtgtgggggggtggggccttcacctaagacctctgcagcagacctggacagacaggcccctcccgcctgtccatcgctctagctgctaatacagccctggctgtggaatccttcaccgtctcagctggtatcagccccagcctgccttgtgccatatctcagcttggatctctgctagagtccccccaaccatatatcatagagttgaatcacaatgagaccgttggctttgaatttgagtcgttggttcccatggtgagatgcttgttaagactttatacttgggtcaatctctcactttattttgtagaaccatttgaaatcctaggatgtgcttgttctggaaggatgacatgggcccagactgaacaagtcagcttgatgatcttaaatgatggaagtataggacgttgcttattttaaaacaagggaaggacacaaaatggaatgactgcttagtcctttctcagatactcttaaaacaattttttattgttaaatttgtggtaatacatggtcacaaccgtggatcaaacaaggtcagtctaaagtggcaggtcctaggtgtgacctgataccaccaccctttgtggcagcaccgggctggactgccctgatccctgggacgtgagacttagcttccagccagtgtgaatcattgtatctgtctcataatcacagcacagctgcagacacaacaacgtgcagcattttttacataaaaatatggtagaattaatttatgacatggaaatgccttacgtggtatcacacttagtcttgaaaaaaacaccaaggtgacgtttaaaatttttagtacatatcctcaaattggagctaagttatacttcttttataaccttttgggcatctggtcgagagaagacaagattttctctatttacagtgaggcaataaatatgtttgccaccttt

SEQ ID NO: 31799 - DNA, 702 bp, Homo sapiens
  source 1..702: mol_type = unassigned DNA
cccgagtggtggcggcgttcgagcccatcaccgtgggcctagccatcggggccgcgtcggccatcaccggctacctgtcctacaatgacatctactgccgcttcgccgagtgctgccgcgaggagcggccgctcaacgcttcggctctcaagctggatttggaggagaagctgtttggacagcatctagccacggaagtgattttcaaggcgctgactggcttcaggaacaacaaaaatcccaagaaaccactgaccctttccttacacggctgggctggcacaggcaagaattttgtcagtcaaattgtggctgaaaatcttcacccaaaaggtctgaagagtaactttgtccacctgtttgtatcgactctgcacttccctcatgagcagaagataaaactgtaccagagttcactgacttgaagtatactcagttaaaatcggggctggaggtgcagacggtgtctgaccggaggatgtggccgtgcccgccgagcactcttgatctgagctgacctgtgtgtgtgtgtgtgggggggtggggccttcacctaagacctctgcagcagacctggacagacaggcccctcccgcctgtccatcgctctagctgctaatacagccctggctgtggaatccttcaccgtctcagctggtatcagccccagcctgccttgtgccatatctcagcttggatctc

SEQ ID NO: 31800 - DNA, 2631 bp, Homo sapiens
  source 1..2631: mol_type = unassigned DNA
gcttcgaggagcgggatgttgcgggctgggtggctccggggcgcggcggcgctggcgctgctgctggcggcccgagtggtggcggcgttcgagcccatcaccgtgggcctagccatcggggccgcgtcggccatcaccggctacctgtcctacaatgacatctactgccgcttcgccgagtgctgccgcgaggagcggccgctcaacgcttcggctctcaagctggatttggaggagaagctgtttggacagcatctagccacggaagtgattttcaaggcgctgactggcttcaggaacaacaaaaatcccaagaaaccactgaccctttccctgtttgtatcgactctgcacttccctcatgagcagaagataaaactgtaccaggaccagttacagaagtggatccgcggtaatgtgagtgcatgtgcgaactctgttttcatatttgacgagatggataaattgcaccccgggatcattgacgcaatcaagccgtttctagactactacgagcaggttgacggagtgtcttaccgcaaagccatcttcatctttctcagcaatgcaggcggggaccttataactaagacggctcttgacttttggcgggccggaagaaagagggaagacattcagctgaaggacctggaacctgtactgtctgtcggagtcttcaataataaacacagtggcctgtggcacagtggactgatcgacaaaaacctcattgattactttatccccttcctgcctttggagtacagacatgtgaaaatgtgtgtgagggccgagatgagggcccgtggttctgccatagatgaagacattgtcacaagagtggcagaggaaatgacgtttttccccagagacgagaaaatctactcagacaagggctgcaagactgtgcagtcgcggctggatttccactgagctcctatccagatggggtaggagacagctgggaggctccgcacgccagaggccttgcctttcagaagaaccctgaagaccgctttggggttttgcctgtttgcaccttagacttttgggtatagaatcttttttttgagaagaggtctcactccgtcatccaagctggagtgcagtggtgcaatcctcaactcactgcaacctccgctcccggtttgagtgattctcatgcctcagcctcccgagtagctgggattacaggcatgagccactgtgcccagctgggatatagaatctaagagttgattgtggaaaacacgtgaatctattgcgcgcatttgtcatttagcaagatggcagcagtccagctgttctttgcagctggagatgaacttttaaaaatccccttcacacttaatgtactgaccgagacagaagtacctgaaaacagctgtgcatggcaggcccggcaatagcttctgacccacagcacccgcgcctcagaagctacggtcacaactaaaggagtccagggacttgctgcaggctggggggcactgggtggttctcaccagcaggctgcggggcactgtgttctcattggccaaaaacatccttttgctctgtctcgttctttacacagagttcactgacttgaagtatactcagttaaaatcggggctggaggtgcagacggtgtctgaccggaggatgtggccgtgcccgccgagcactcttgatctgagctgacctgtgtgtgtgtgtgtgggggggtggggccttcacctaagacctctgcagcagacctggacagacaggcccctcccgcctgtccatcgctctagctgctaatacagccctggctgtggaatccttcaccgtctcagctggtatcagccccagcctgccttgtgccatatctcagcttggatctctgctagagtccccccaaccatatatcatagagttgaatcacaatgagaccgttggctttgaatttgagtcgttggttcccatggtgagatgcttgttaagactttatacttgggtcaatctctcactttattttgtagaaccatttgaaatcctaggatgtgcttgttctggaaggatgacatgggcccagactgaacaagtcagcttgatgatcttaaatgatggaagtataggacgttgcttattttaaaacaagggaaggacacaaaatggaatgactgcttagtcctttctcagatactcttaaaacaattttttattgttaaatttgtggtaatacatggtcacaaccgtggatcaaacaaggtcagtctaaagtggcaggtcctaggtgtgacctgataccaccaccctttgtggcagcaccgggctggactgccctgatccctgggacgtgagacttagcttccagccagtgtgaatcattgtatctgtctcataatcacagcacagctgcagacacaacaacgtgcagcattttttacataaaaatatggtagaattaatttatgacatggaaatgccttacgtggtatcacacttagtcttgaaaaaaacaccaaggtgacgtttaaaatttttagtacatatcctcaaattggagctaagttatacttcttttataaccttttgggcatctggtcgagagaagacaagattttctctatttacagtgaggcaataaatatgtttgccaccttt

SEQ ID NO: 31801 - DNA, 1182 bp, Homo sapiens
  source 1..1182: mol_type = unassigned DNA
ggctaggccggcagccggatggtcccgcagctcggggccggccatgcttcgcggtccgtggcgccagctttggctctttttcctgctgctgctcccgggcgcgcctgagccccgcggcgcctccaggccgtgggagggaaccgacgagccgggctcggcctgggcctggccgggcttccagcgcctgcaggagcagctcagggcggcgggtgccctctccaagcggtactggacgctcttcagctgccaggtgtggcccgacgactgtgacgaggacgaggaggcagccacggggcccctgggctggcgccttcctctgttgggccagcggtacctggacctcctgaccacgtggtactgcagcttcaaagactgctgccctagaggggattgcagaatctccaacaactttacaggcttagagtgggacctgaatgtgcggctgcatggccagcatttggtccagcagctggtcctaagaacagtgaggggctacttagagacgccccagccagaaaaggcccttgctctgtcgttccacggctggtctggcacaggcaagaacttcgtggcacggatgctggtggagaacctgtatcgggacgggctgatgagtgactgtgtcaggatgttcatcgccacgttccactttcctcaccccaaatatgtggacctgtacaaggagcagctgatgagccagatccgggagacgcagcagctctgccaccagaccctgttcatcttcgatgaagcggagaagctgcacccagggctgctggaggtccttgggccacacttagaacgccgggcccctgagggccacagggctgagtctccatggactatctttctgtttctcagtaatctcaggggcgatataatcaatgaggtggtcctaaagttgctcaaggctggatggtcccgggaagaaattacgatggaacacctggagccccacctccaggcggagattgtggagaccataggtttttcatttctaacaaccagatggccccacctggacctgccaaccagttctgtggcccccacctaggaactgactcagcagaagagaacagcttcgattccccatgcttttactcaccaaattatccttaaaaactctgatccccaagttttctgagactgatttgagtaataataaaactccggtctcccgca

SEQ ID NO: 31802 - DNA, 519 bp, Homo sapiens
  source 1..519: mol_type = unassigned DNA
gggcttaagggagcctggctaggccggcagccggatggtcccgcagctcggggccggccatgcttcgcggtccgtggcgccagctttggctctttttcctgctgctgctcccgggcgcgcctgagccccgcggcgcctccaggccgtgggagggaaccgacgagccgggctcggcctgggcctggccgggcttccagcgcctgcaggagcagctcagggcggcgggtgccctctccaagcggtactggacgctcttcagctgccaggtgtggcccgacgactgtgacgaggacgaggaggcagccacggggcccctgggctggcgccttcctctgttgggccagcggtacctggacctcctgaccacgtggtactgcagcttcaaagactgctgccctagaggggattgcagaatctccaacaactttacaggcaagaacttcgtggcacggatgctggtggagaacctgtatcgggacgggctgatgagtgactgtgtcaggatgttcatcgccacgt

SEQ ID NO: 31803 - DNA, 2724 bp, Homo sapiens
  source 1..2724: mol_type = unassigned DNA
cggatttttatgagatataattacattgacatgacgcctcatgatttacccatgactcggggggtttccaaactccaaacacctccagactggagcccgtcaatcagcttcctcttgcttttcgtggactcccactgtggaaacctgctggtgttttgctgcggtttcatttccctctgcggaggagccagggcaaccttggccagacaggcacctagctgtgcccttctttccagggcctcttctccactcagctgactcccctggcctgcctaacgctcctgactgagacggttttccggcttcctctaacaggttggcgggaagttgatctgcaaacgcgaggcaaagcaggagtgtccttattcggtaggcctctgatgggccaccagagccgtccgaaagtcctagcggagtgattgacagtggccatttcaaagcctgagttcaccttctttgcaaccacaatcacgacccagaataaactgcttcctggaagccggctagttgcacctggcctgaagtcagtctcgggactgcctctcaggaccccagacagggtttcgggttcccgcctgggtcacgtgtacggaggctgccagtgcgcactcagcccggcccgccggtcgccacagcaacaccaatcccgggttcaagcccgcctaggaagtgcggtccccgcctgaccgccccgggcttaagggagcctggctaggccggcagccggatggtcccgcagctcggggccggccatgcttcgcggtccgtggcgccagctttggctctttttcctgctgctgctcccgggcgcgcctgagccccgcggcgcctccaggccgtgggagggaaccgacgagccgggctcggcctgggcctggccgggcttccagcgcctgcaggagcagctcagggcggcgggtgccctctccaagcggtactggacgctcttcagctgccaggtgtggcccgacgactgtgacgaggacgaggaggcagccacggggcccctgggctggcgccttcctctgttgggccagcggtacctggacctcctgaccacgtggtactgcagcttcaaagactgctgccctagaggggattgcagaatctccaacaactttacaggcttagagtgggacctgaatgtgcggctgcatggccagcatttggtccagcagctggtcctaagaacagtgaggggctacttagagacgccccagccagaaaaggcccttgctctgtcgttccacggctggtctggcacaggcaagaacttcgtggcacggatgctggtggagaacctgtatcgggacgggctgatgagtgactgtgtcaggatgttcatcgccacgttccactttcctcaccccaaatatgtggacctgtacaaggagcagctgatgagccagatccgggagacgcagcagctctgccaccagaccctgttcatcttcgatgaagcggagaagctgcacccagggctgctggaggtccttgggccacacttagaacgccgggcccctgagggccacagggctgagtctccatggactatctttctgtttctcagtaatctcaggggcgatataatcaatgaggtggtcctaaagttgctcaaggctggatggtcccgggaagaaattacgatggaacacctggagccccacctccaggcggagattgtggagaccatagacaatggctttggccacagccgtcttgtgaaggaaaacctgattgactacttcatccccttcctgcctttggagtaccgtcacgtgaggctgtgtgcacgggatgccttcctgagccaggagctcctgtataaagaagagacactggatgaaatagcccagatgatggtgtatgtccccaaggaggaacaactcttttcttcccagggctgcaagtctatttcccagaggattaactacttcctgtcatgaaggctagaggaagacttcctggaactgcctttcttccactaacaggaccctgggacctgtaggagcaccccgtttgggactgtgaggtgtttgagggtgtggactggcatccagcagccactaacaaacacacaactggtgtgtaaaaggcaggccttacattagaagccaagccaatcctttttcttttttttggaggtcccaccgagatagataggaacttggattgctgaattcaaaaacagagcccattcttaagatcacttggtgccttaaagacacgcattccaaagtggaatgtggttgaagaaagtgggccaggtggttgaagaaagccatgtgggagctcagcaaatcccaagggcttattatgacactccagatggtctccttagcatctcagctcttctgcaaggaagagcttgggtgttaggcctcagaggctgtagggtccttgggttacagagccggggagaacgaagttctgtgacccaggggtggagaatacactctaggtttgcaggctggtgggctttcaaattggtacttccagaggaaagccaagctgcttctgttgtgagcgaatcagccaagagcctgaggctgaagggaaaagtacacagaggaagatattttacaaaccaggtcagtgtaggccaagacttatggtctacagattttggcgggggaggggggaccttttcaaagacaatagggggtcttgacatgtttgttgtatgtaaagatgataagattaaaatttttgattttcctaaaa

SEQ ID NO: 31804 - DNA, 730 bp, Homo sapiens
  source 1..730: mol_type = unassigned DNA
tgagattgcgccactgcactccagcctggtgacagagcaagactccatctcaaaaaaaaaaaaaaaaagaaagtagtccttgaatcccttctgctacaaagtctgccctctggcttcttattctaaggccaaacaggaggagtaactgattccacccgagagagattcagagttgcttggtttcttggctgttggctgttgtggtggatgggcctgtgtgtgccttttgctgtgactacctctttcctgtccttaggcttagagtgggacctgaatgtgcggctgcatggccagcatttggtccagcagctggtcctaagaacagtgaggggctacttagagacgccccagccagaaaaggcccttgctctgtcgttccacggctggtctggcacaggcaagaacttcgtggcacggatgctggtggagaacctgtatcgggacgggctgatgagtgactgtgtcaggatgttcatcgccacgttccactttcctcaccccaaatatgtggacctgtacaaggagcagctgatgagccagatccgggagacgcagcagctctgccaccagaccctgttcatcttcgatgaagcggagaagctgcacccagggctgctggaggtccttgggccacacttagaacgccgggcccctgagggccacagggctgagtctccatggactatctttctgtttctcagtaatctcaggggcgatataatcaatgagg

SEQ ID NO: 31805 - DNA, 4520 bp, Homo sapiens
  source 1..4520: mol_type = unassigned DNA
agcagagagaacacacgtccttgcggaagtgacggcagttccgagtccagtgggggcggtgggagcgatgagggtctgagacggtgggagcggttgtgtgaagatggagtttcccggaggaaatgacaattacctgacgatcacagggccttcgcaccccttcctgtcaggggccgagacattccatacaccaagcttgggtgatgaggaatttgaaatcccacctatctccttggattctgatccctcattggctgtctcagatgtggttggccactttgatgacctggcagacccttcctcttcacaggatggcagtttttcagcccagtatggggtccagacattggacatgcctgtgggcatgacccatggcttgatggagcagggcggggggctcctgagtgggggcttgaccatggacttggaccactctataggaactcagtatagtgccaacccacctgttacaattgatgtaccaatgacagacatgacatctggcttgatggggcatagccagttgaccaccattgatcagtcagaactgagttcccagctgggtttgagcctagggggtggcaccatcctgccacctgcccagtcacctgaagatcgtctttcaaccaccccttcacctactagttcacttcacgaggatggtgttgaggatttccggaggcaacttcccagccagaagacagtcgtggtggaagcagggaaaaagcagaaggccccaaagaagagaaaaaagaaagatcctaatgaacctcagaaaccagtttcagcatatgctttattctttcgtgatacacaggctgccatcaagggacagaatcctaatgccacttttggtgaggtttcaaaaattgtggcctccatgtgggatagtcttggagaggagcaaaaacaggtatataagaggaaaactgaggctgccaagaaagagtatctgaaggcactggctgcttacaaagacaaccaggagtgtcaggccactgtggaaacagtggaattggatccagcaccaccatcacaaactccttctccacctcctatggctactgttgacccagcatctccagcaccagcttcaatagagccccctgccctgtccccatccattgttgttaactccaccctttcatcctatgtggcaaaccaggcatcttctggagctgggggtcagcccaatatcaccaagttgattattaccaaacaaatgttgccctcttctattactatgtctcaaggagggatggttactgttatcccagccacagtggtgacctcccgggggctccaactaggccaaaccagtacagctactatccagcccagtcaacaagcccagattgtcactcggtcagtgttgcaggcagcagcagctgctgctgctgctgcttctatgcaactgcctccaccccgactacagccccctccattacaacagatgccacagcccccgactcagcagcaagttaccattctgcagcagcctcctccactccaggccatgcaacagcctccacctcagaaagttcgaatcaatttacagcaacagcctcctcctctgcagatcaagagtgtgcctctacccactttgaaaatgcagactaccttagtcccaccaactgtggaaagtagtcctgagcggcctatgaacaacagccctgaggcccatacagtggaggcaccttctcctgagactatctgtgagatgatcacagatgtagttcctgaggttgagtctccttctcagatggatgttgaattggtgagtgggtctcctgtggcactctcaccccagcctcgatgtgtgaggtctggttgtgagaaccctcccattgtgagtaaggactgggacaatgaatactgcagcaatgagtgtgtggtgaagcactgcagggatgtattcttggcctgggtagcctctagaaattcaaacacagtggtgtttgtgaaatagtccttcctgttctccaagccagtgaagagttatctgctgggaaagtgtccaagagcctgtttttgaaacacaagctgggcttctggtagtgcctcatcacaacccatgatggctgttcatgtttcaccccttttcttccttcagcagaggccaggctatggagcagggccactgaatttgctgtaatctggagatgctttttactttcaaccataagcggtaatagcagaggaaagggtgaagggagtctgggcaagcaaagcatagagatggtggggtggtggtggggttgaagaaacttgttggtataattgtcataggacttgcctaaaatattattaaaattacgggagtgtactcagctttgagcctaggagaaaatgccactgtgtgcatccattttaaagggttccctcataaaaaaatgttattccccattatcacatcagtacactgctttgaaaacaaaacttttcaacatgggcatactgggctacatggaaaatgacatcacccaggagtgatttctctttatatatattatttctgcagttaccatccttatctgagttatcacagttcatgaatctaagaggcggaactctacatcattagtaagaggttccaccaaagtctaaagttgtattcacttgtgtttgatgaactatctttaaaagaccataggtctatcattatttcttagacataatctaaagaaaaacagactagagaagccacctggttgtaacagaataagcagaagtttacagcatgatagtccaagtggtgataactttaaataaaactcaaatttttactgtttgtagacaggaatgctgtcctagagaacctcctcctcaaccagctacgtacatagttttatcctatgcattcctgttttctgtgttttttgttttttttttttgagacagagtctcgctctgtcacccaggctggagtgcagtggtgcgacctcagctcactgaaacctctgcctcccgggttcaagcgattctcctgcatcagcctcccgagtagctaggattacaggcgcccgccactacgcccagctaatttgtggtatttttagtagagacagggtttcaccatgttggccaggctggtctcgaactcctgacctcatgatccgcccgccttgacctcccaaagtgctgggattacaggcatgagccaccgcacccagcctgcattcctgtttttttaatggttttggagggtagcagtagagatggggtctcactatgttgcccagtctagtcttgaactcctgggctacagttaccctcctacctcggcttcccaaagtgctcggattacaggtgtgagccactgtgcctagcctataatgatcattttaatgtttcccatgcactcatttagtttgaaccttcacagcaacccaatgaggtaatactcccatttcacatataatactgagagatgagttgcacaagattatacactgttaagtagcagagccagaatggacttcagaatcccaactacaatacaaatgtttatttaaataaagaagaaagctattgtacaaatatcactcttcaggtttagcttacagagccatggctatggattcttagctctgtaaggaagtgcttctataaattcttaggtttagagatgataccatctgggtacctttgcttgaaccgtgcaaccacatctgggtctagtaggtggatcccatccagttggtttccaagggtgatcctgaaacagtgtaaaaggaggggcaaaccagaaatcctggaattagagggtttaatattgttaaaaaatgcataccaaatgaagactgcctatcatcatatcaaatatgccaattctaaaaagagcttaacattagaatagtatatggtagaattactagttcagaattggcatagattctggtgttaaaatagactggatctgtattatctgagggttagtaactaatgcttagccaggcctgcttcacagagttgctaccagggagtattctttggataagcaaaatgctagcagcatgtgttttaagctctgttaaggggtgaaagatgtaattattgacagattaaatagataacttcgtaaccaccagggggcagattcaatacatcacagaatggctgaggaagatccttgggttgtgaagagagtagaaaccctagggagcagtgcttttgggtcctagaacctgttgagtttctaatgaatatttgtagaatctcataaaacagtttaaatacaagcttaagtggcttatgaatcctgtgaagctcatttatggactagtgtaaaacaatgtgaagctctactaagttctgtccttaatcataaataatagccccttgaggactagcctgttctctggtcaccttaccagttgggttgcacattgtgtggtcgtccaaataactcaatcttgcgagtgccaggagatagtctttcaatcatgccatagatttcatctggtttatgactggtggaacgaacctaggaaataaaaactagctgctttttaagttac

SEQ ID NO: 31806 - DNA, 4697 bp, Homo sapiens
  source 1..4697: mol_type = unassigned DNA
ccgcccccgccacccaatttgggagcttcgaatgcccgcccgagccttgaaggcgaaccacctgagggttacctgtgtctccgatgatgatatacttgaagagataagcataagtcatgggggcgatagcccagcgcctgactctctgcagccccacggcgctccttccaatcagcagagagaacacacgtccttgcggaagtgacggcagttccgagtccagtgggggcggtgggagcgatgagggtctgagacggtgggagcggttgtgtgaagatggagtttcccggaggaaatgacaattacctgacgatcacagggccttcgcaccccttcctgtcaggggccgagacattccatacaccaagcttgggtgatgaggaatttgaaatcccacctatctccttggattctgatccctcattggctgtctcagatgtggttggccactttgatgacctggcagacccttcctcttcacaggatggcagtttttcagcccagtatggggtccagacattggacatgcctgtgggcatgacccatggcttgatggagcagggcggggggctcctgagtgggggcttgaccatggacttggaccactctataggaactcagtatagtgccaacccacctgttacaattgatgtaccaatgacagacatgacatctggcttgatggggcatagccagttgaccaccattgatcagtcagaactgagttcccagctgggtttgagcctagggggtggcaccatcctgccacctgcccagtcacctgaagatcgtctttcaaccaccccttcacctactagttcacttcacgaggatggtgttgaggatttccggaggcaacttcccagccagaagacagtcgtggtggaagcagggaaaaagcagaaggccccaaagaagagaaaaaagaaagatcctaatgaacctcagaaaccagtttcagcatatgctttattctttcgtgatacacaggctgccatcaagggacagaatcctaatgccacttttggtgaggtttcaaaaattgtggcctccatgtgggatagtcttggagaggagcaaaaacaggtatataagaggaaaactgaggctgccaagaaagagtatctgaaggcactggctgcttacaaagacaaccaggagtgtcaggccactgtggaaacagtggaattggatccagcaccaccatcacaaactccttctccacctcctatggctactgttgacccagcatctccagcaccagcttcaatagagccccctgccctgtccccatccattgttgttaactccaccctttcatcctatgtggcaaaccaggcatcttctggagctgggggtcagcccaatatcaccaagttgattattaccaaacaaatgttgccctcttctattactatgtctcaaggagggatggttactgttatcccagccacagtggtgacctcccgggggctccaactaggccaaaccagtacagctactatccagcccagtcaacaagcccagattgtcactcggtcagtgttgcaggcagcagcagctgctgctgctgctgcttctatgcaactgcctccaccccgactacagccccctccattacaacagatgccacagcccccgactcagcagcaagttaccattctgcagcagcctcctccactccaggccatgcaacagcctccacctcagaaagttcgaatcaatttacagcaacagcctcctcctctgcagatcaagagtgtgcctctacccactttgaaaatgcagactaccttagtcccaccaactgtggaaagtagtcctgagcggcctatgaacaacagccctgaggcccatacagtggaggcaccttctcctgagactatctgtgagatgatcacagatgtagttcctgaggttgagtctccttctcagatggatgttgaattggtgagtgggtctcctgtggcactctcaccccagcctcgatgtgtgaggtctggttgtgagaaccctcccattgtgagtaaggactgggacaatgaatactgcagcaatgagtgtgtggtgaagcactgcagggatgtattcttggcctgggtagcctctagaaattcaaacacagtggtgtttgtgaaatagtccttcctgttctccaagccagtgaagagttatctgctgggaaagtgtccaagagcctgtttttgaaacacaagctgggcttctggtagtgcctcatcacaacccatgatggctgttcatgtttcaccccttttcttccttcagcagaggccaggctatggagcagggccactgaatttgctgtaatctggagatgctttttactttcaaccataagcggtaatagcagaggaaagggtgaagggagtctgggcaagcaaagcatagagatggtggggtggtggtggggttgaagaaacttgttggtataattgtcataggacttgcctaaaatattattaaaattacgggagtgtactcagctttgagcctaggagaaaatgccactgtgtgcatccattttaaagggttccctcataaaaaaatgttattccccattatcacatcagtacactgctttgaaaacaaaacttttcaacatgggcatactgggctacatggaaaatgacatcacccaggagtgatttctctttatatatattatttctgcagttaccatccttatctgagttatcacagttcatgaatctaagaggcggaactctacatcattagtaagaggttccaccaaagtctaaagttgtattcacttgtgtttgatgaactatctttaaaagaccataggtctatcattatttcttagacataatctaaagaaaaacagactagagaagccacctggttgtaacagaataagcagaagtttacagcatgatagtccaagtggtgataactttaaataaaactcaaatttttactgtttgtagacaggaatgctgtcctagagaacctcctcctcaaccagctacgtacatagttttatcctatgcattcctgttttctgtgttttttgttttttttttttgagacagagtctcgctctgtcacccaggctggagtgcagtggtgcgacctcagctcactgaaacctctgcctcccgggttcaagcgattctcctgcatcagcctcccgagtagctaggattacaggcgcccgccactacgcccagctaatttgtggtatttttagtagagacagggtttcaccatgttggccaggctggtctcgaactcctgacctcatgatccgcccgccttgacctcccaaagtgctgggattacaggcatgagccaccgcacccagcctgcattcctgtttttttaatggttttggagggtagcagtagagatggggtctcactatgttgcccagtctagtcttgaactcctgggctacagttaccctcctacctcggcttcccaaagtgctcggattacaggtgtgagccactgtgcctagcctataatgatcattttaatgtttcccatgcactcatttagtttgaaccttcacagcaacccaatgaggtaatactcccatttcacatataatactgagagatgagttgcacaagattatacactgttaagtagcagagccagaatggacttcagaatcccaactacaatacaaatgtttatttaaataaagaagaaagctattgtacaaatatcactcttcaggtttagcttacagagccatggctatggattcttagctctgtaaggaagtgcttctataaattcttaggtttagagatgataccatctgggtacctttgcttgaaccgtgcaaccacatctgggtctagtaggtggatcccatccagttggtttccaagggtgatcctgaaacagtgtaaaaggaggggcaaaccagaaatcctggaattagagggtttaatattgttaaaaaatgcataccaaatgaagactgcctatcatcatatcaaatatgccaattctaaaaagagcttaacattagaatagtatatggtagaattactagttcagaattggcatagattctggtgttaaaatagactggatctgtattatctgagggttagtaactaatgcttagccaggcctgcttcacagagttgctaccagggagtattctttggataagcaaaatgctagcagcatgtgttttaagctctgttaaggggtgaaagatgtaattattgacagattaaatagataacttcgtaaccaccagggggcagattcaatacatcacagaatggctgaggaagatccttgggttgtgaagagagtagaaaccctagggagcagtgcttttgggtcctagaacctgttgagtttctaatgaatatttgtagaatctcataaaacagtttaaatacaagcttaagtggcttatgaatcctgtgaagctcatttatggactagtgtaaaacaatgtgaagctctactaagttctgtccttaatcataaataatagccccttgaggactagcctgttctctggtcaccttaccagttgggttgcacattgtgtggtcgtccaaataactcaatcttgcgagtgccaggagatagtctttcaatcatgccatagatttcatctggtttatgactggtggaacgaacctaggaaataaaaactagctgctttttaagttacacaa

SEQ ID NO: 31807 - DNA, 2017 bp, Homo sapiens
  source 1..2017: mol_type = unassigned DNA
agtgggggcggtgggagcgatgagggtctgagacggtgggagcggttgtgtgaagatggagacattccatacaccaagcttgggtgatgaggaatttgaaatcccacctatctccttggattctgatccctcattggctgtctcagatgtggttggccactttgatgacctggcagacccttcctcttcacaggatggcagtttttcagcccagtatggggtccagacattggacatgcctgtgggcatgacccatggcttgatggagcagggcggggggctcctgagtgggggcttgaccatggacttggaccactctataggaactcagtatagtgccaacccacctgttacaattgatgtaccaatgacagacatgacatctggcttgatggggcatagccagttgaccaccattgatcagtcagaactgagttcccagctgggtttgagcctagggggtggcaccatcctgccacctgcccagtcacctgaagatcgtctttcaaccaccccttcacctactagttcacttcacgaggatggtgttgaggatttccggaggcaacttcccagccagaagacagtcgtggtggaagcagggaaaaagcagaaggccccaaagaagagaaaaaagaaagatcctaatgaacctcagaaaccagtttcagcatatgctttattctttcgtgatacacaggctgccatcaagggacagaatcctaatgccacttttggtgaggtttcaaaaattgtggcctccatgtgggatagtcttggagaggagcaaaaacaggtatataagaggaaaactgaggctgccaagaaagagtatctgaaggcactggctgcttacaaagacaaccaggagtgtcaggccactgtggaaacagtggaattggatccagcaccaccatcacaaactccttctccacctcctatggctactgttgacccagcatctccagcaccagcttcaatagagccccctgccctgtccccatccattgttgttaactccaccctttcatcctatgtggcaaaccaggcatcttctggagctgggggtcagcccaatatcaccaagttgattattaccaaacaaatgttgccctcttctattactatgtctcaaggagggatggttactgttatcccagccacagtggtgacctcccgggggctccaactaggccaaaccagtacagctactatccagcccagtcaacaagcccagattgtcactcggtcagtgttgcaggcagcagcagctgctgctgctgctgcttctatgcaactgcctccaccccgactacagccccctccattacaacagatgccacagcccccgactcagcagcaagttaccattctgcagcagcctcctccactccaggccatgcaacagcctccacctcagaaagttcgaatcaatttacagcaacagcctcctcctctgcagatcaagagtgtgcctctacccactttgaaaatgcagactaccttagtcccaccaactgtggaaagtagtcctgagcggcctatgaacaacagccctgaggcccatacagtggaggcaccttctcctgagactatctgtgagatgatcacagatgtagttcctgaggttgagtctccttctcagatggatgttgaattggtgagtgggtctcctgtggcactctcaccccagcctcgatgtgtgaggtctggttgtgagaaccctcccattgtgagtaaggactgggacaatgaatactgcagcaatgagtgtgtggtgaagcactgcagggatgtattcttggcctgggtagcctctagaaattcaaacacagtggtgtttgtgaaatagtccttcctgttctccaagccagtgaagagttatctgctgggaaagtgtccaagagcctgtttttgaaacacaagctgggcttctggtagtgcctcatcacaacccatgatggctgttcatgtttcaccccttttcttccttcagcagaggccaggctatggagca

SEQ ID NO: 31808 - DNA, 4201 bp, Homo sapiens
  source 1..4201: mol_type = unassigned DNA
atgaggaatttgaaatcccacctatctccttggattctgatccctcattggctgtctcagatgtggttggccactttgatgacctggcagtttttcagcccagacttggaccactctataggaactcagtatagtgccaacccacctgttacaattgatgtaccaatgacagacatgacatctggcttgatggggcatagccagttgaccaccattgatcagtcagaactgagttcccagctgggtttgagcctagggggtggcaccatcctgccacctgcccagtcacctgaagatcgtctttcaaccaccccttcacctactagttcacttcacgaggatggtgttgaggatttccggaggcaacttcccagccagaagacagtcgtggtggaagcagggaaaaagcagaaggccccaaagaagagaaaaaagaaagatcctaatgaacctcagaaaccagtttcagcatatgctttattctttcgtgatacacaggctgccatcaagggacagaatcctaatgccacttttggtgaggtttcaaaaattgtggcctccatgtgggatagtcttggagaggagcaaaaacaggtatataagaggaaaactgaggctgccaagaaagagtatctgaaggcactggctgcttacaaagacaaccaggagtgtcaggccactgtggaaacagtggaattggatccagcaccaccatcacaaactccttctccacctcctatggctactgttgacccagcatctccagcaccagcttcaatagagccccctgccctgtccccatccattgttgttaactccaccctttcatcctatgtggcaaaccaggcatcttctggagctgggggtcagcccaatatcaccaagttgattattaccaaacaaatgttgccctcttctattactatgtctcaaggagggatggttactgttatcccagccacagtggtgacctcccgggggctccaactaggccaaaccagtacagctactatccagcccagtcaacaagcccagattgtcactcggtcagtgttgcaggcagcagcagctgctgctgctgctgcttctatgcaactgcctccaccccgactacagccccctccattacaacagatgccacagcccccgactcagcagcaagttaccattctgcagcagcctcctccactccaggccatgcaacagcctccacctcagaaagttcgaatcaatttacagcaacagcctcctcctctgcagatcaagagtgtgcctctacccactttgaaaatgcagactaccttagtcccaccaactgtggaaagtagtcctgagcggcctatgaacaacagccctgaggcccatacagtggaggcaccttctcctgagactatctgtgagatgatcacagatgtagttcctgaggttgagtctccttctcagatggatgttgaattggtgagtgggtctcctgtggcactctcaccccagcctcgatgtgtgaggtctggttgtgagaaccctcccattgtgagtaaggactgggacaatgaatactgcagcaatgagtgtgtggtgaagcactgcagggatgtattcttggcctgggtagcctctagaaattcaaacacagtggtgtttgtgaaatagtccttcctgttctccaagccagtgaagagttatctgctgggaaagtgtccaagagcctgtttttgaaacacaagctgggcttctggtagtgcctcatcacaacccatgatggctgttcatgtttcaccccttttcttccttcagcagaggccaggctatggagcagggccactgaatttgctgtaatctggagatgctttttactttcaaccataagcggtaatagcagaggaaagggtgaagggagtctgggcaagcaaagcatagagatggtggggtggtggtggggttgaagaaacttgttggtataattgtcataggacttgcctaaaatattattaaaattacgggagtgtactcagctttgagcctaggagaaaatgccactgtgtgcatccattttaaagggttccctcataaaaaaatgttattccccattatcacatcagtacactgctttgaaaacaaaacttttcaacatgggcatactgggctacatggaaaatgacatcacccaggagtgatttctctttatatatattatttctgcagttaccatccttatctgagttatcacagttcatgaatctaagaggcggaactctacatcattagtaagaggttccaccaaagtctaaagttgtattcacttgtgtttgatgaactatctttaaaagaccataggtctatcattatttcttagacataatctaaagaaaaacagactagagaagccacctggttgtaacagaataagcagaagtttacagcatgatagtccaagtggtgataactttaaataaaactcaaatttttactgtttgtagacaggaatgctgtcctagagaacctcctcctcaaccagctacgtacatagttttatcctatgcattcctgttttctgtgttttttgttttttttttttgagacagagtctcgctctgtcacccaggctggagtgcagtggtgcgacctcagctcactgaaacctctgcctcccgggttcaagcgattctcctgcatcagcctcccgagtagctaggattacaggcgcccgccactacgcccagctaatttgtggtatttttagtagagacagggtttcaccatgttggccaggctggtctcgaactcctgacctcatgatccgcccgccttgacctcccaaagtgctgggattacaggcatgagccaccgcacccagcctgcattcctgtttttttaatggttttggagggtagcagtagagatggggtctcactatgttgcccagtctagtcttgaactcctgggctacagttaccctcctacctcggcttcccaaagtgctcggattacaggtgtgagccactgtgcctagcctataatgatcattttaatgtttcccatgcactcatttagtttgaaccttcacagcaacccaatgaggtaatactcccatttcacatataatactgagagatgagttgcacaagattatacactgttaagtagcagagccagaatggacttcagaatcccaactacaatacaaatgtttatttaaataaagaagaaagctattgtacaaatatcactcttcaggtttagcttacagagccatggctatggattcttagctctgtaaggaagtgcttctataaattcttaggtttagagatgataccatctgggtacctttgcttgaaccgtgcaaccacatctgggtctagtaggtggatcccatccagttggtttccaagggtgatcctgaaacagtgtaaaaggaggggcaaaccagaaatcctggaattagagggtttaatattgttaaaaaatgcataccaaatgaagactgcctatcatcatatcaaatatgccaattctaaaaagagcttaacattagaatagtatatggtagaattactagttcagaattggcatagattctggtgttaaaatagactggatctgtattatctgagggttagtaactaatgcttagccaggcctgcttcacagagttgctaccagggagtattctttggataagcaaaatgctagcagcatgtgttttaagctctgttaaggggtgaaagatgtaattattgacagattaaatagataacttcgtaaccaccagggggcagattcaatacatcacagaatggctgaggaagatccttgggttgtgaagagagtagaaaccctagggagcagtgcttttgggtcctagaacctgttgagtttctaatgaatatttgtagaatctcataaaacagtttaaatacaagcttaagtggcttatgaatcctgtgaagctcatttatggactagtgtaaaacaatgtgaagctctactaagttctgtccttaatcataaataatagccccttgaggactagcctgttctctggtcaccttaccagttgggttgcacattgtgtggtcgtccaaataactcaatcttgcgagtgccaggagatagtctttcaatcatgccatagatttcatctggtttatgactggtggaacgaacctaggaaataaaaactagctgctttttaagttac

SEQ ID NO: 31809 - DNA, 1020 bp, Homo sapiens
  source 1..1020: mol_type = unassigned DNA
atgatgcccttttgccacaatataattaatatttcctgtgtgaaaaacaactggtcaaatgatgtccgtgcttccctgtacagtttaatggtgctcataattctgaccacactcgttggcaatctgatagttattgtttctatatcacacttcaaacaacttcataccccaacaaattggctcattcattccatggccactgtggactttcttctggggtgtctggtcatgccttacagtatggtgagatctgctgagcactgttggtattttggagaagtcttctgtaaaattcacacaagcaccgacattatgctgagctcagcctccattttccatttgtctttcatctccattgaccgctactatgctgtgtgtgatccactgagatataaagccaagatgaatatcttggttatttgtgtgatgatcttcattagttggagtgtccctgctgtttttgcatttggaatgatctttctggagctaaacttcaaaggcgctgaagagatatattacaaacatgttcactgcagaggaggttgctctgtcttctttagcaaaatatctggggtactgacctttatgacttctttttatatacctggatctattatgttatgtgtctattacagaatatatcttatcgctaaagaacaggcaagattaattagtgatgccaatcagaagctccaaattggattggaaatgaaaaatggaatttcacaaagcaaagaaaggaaagctgtgaagacattggggattgtgatgggagttttcctaatatgctggtgccctttctttatctgtacagtcatggacccttttcttcactacattattccacctactttgaatgatgtattgatttggtttggctacttgaactctacatttaatccaatggtttatgcatttttctatccttggtttagaaaagcactgaagatgatgctgtttggtaaaattttccaaaaagattcatccaggtgtaaattatttttggaattgagttcatag

SEQ ID NO: 31810 - DNA, 1157 bp, Homo sapiens
  source 1..1157: mol_type = unassigned DNA
tgacaaaattctatctgttcttgttttttgaaggaaaaattcaattgctctgaatatggaaatagatcttgcccagaaaatgaaagatctctgggtgtccgagtggctatgtattcatttatggcaggatccatattcatcacaatatttggcaatcttgccatgataatttccatttcctacttcaagcagcttcacacaccaaccaacttcctcatcctctccatggccatcactgatttcctcctgggattcaccatcatgccatatagtatgatcagatcggtggagaactgctggtattttgggcttacattttgcaagatttattatagttttgacctgatgcttagcataacatccatttttcatctttgctcagtggccattgatagattttatgctatatgttacccattactttattccaccaaaataactattccagtcattaaaagattgctacttctatgttggtcggtccctggagcatttgccttcggggtggtcttctcagaggcctatgcagatggaatagagggctatgacatcttggttgcttgttccagttcctgcccagtgatgttcaacaagctatgggggaccaccttgtttatggcaggtttcttcactcctgggtctatgatggtggggatttatggcaaaatttttgcagtatccagaaaacatgctcatgccatcaataacttgcgagaaaatcaaaataatcaagtgaagaaagacaaaaaagctgccaaaactttaggaatagtgataggagttttcttattatgttggtttccttgtttcttcacaattttattggatccctttttgaacttctctactcctgtagttttgtttgatgccttgacatggtttggctattttaactccacatgtaatccgttaatatatggtttcttctatccctggtttcgcagagcactgaagtacattttgctaggtaaaattttcagctcatgtttccataatactattttgtgtatgcaaaaagaaagtgagtaggctttttctgcatgaataaattgaagcaaaaaactagaatttagaagaatgaagttgtttaagatgtgtgtttttgtgcatgtgtgtattattttagctaccatagaaagctgttggtttctaagacg

SEQ ID NO: 31811 - DNA, 1056 bp, Homo sapiens
  source 1..1056: mol_type = unassigned DNA
atggctgtctcatcagagcaacatgaactttcacatttcaaaagaacacagacaaaaaaggaaaaattcaattgctctgaatatggaaatagatcttgcccagaaaatgaaagatctctgggtgtccgagtggctatgtattcatttatggcaggatccatattcatcacaatatttggcaatcttgccatgataatttccatttcctacttcaagcagcttcacacaccaaccaacttcctcatcctctccatggccatcactgatttcctcctgggattcaccatcatgccatatagtatgatcagatcggtggagaactgctggtattttgggcttacattttgcaagatttattatagttttgacctgatgcttagcataacatccatttttcatctttgctcagtggccattgatagattttatgctatatgttacccattactttattccaccaaaataactattccagtcattaaaagattgctacttctatgttggtcggtccctggagcatttgccttcggggtggtcttctcagaggcctatgcagatggaatagagggctatgacatcttggttgcttgttccagttcctgcccagtgatgttcaacaagctatgggggaccaccttgtttatggcaggtttcttcactcctgggtctatgatggtggggatttatggcaaaatttttgcagtatccagaaaacatgctcatgccatcaataacttgcgagaaaatcaaaataatcaagtgaagaaagacaaaaaagctgccaaaactttaggaatagtgataggagttttcttattatgttggtttccttgtttcttcacaattttattggatccctttttgaacttctctactcctgtagttttgtttgatgccttgacatggtttggctattttaactccacatgtaatccgttaatatatggtttcttctatccctggtttcgcagagcactgaagtacattttgctaggtaaaattttcagctcatgtttccataatactattttgtgtatgcaaaaagaaagtgagtag

SEQ ID NO: 31812 - DNA, 1056 bp, Homo sapiens; identical to SEQ ID NO: 31811
  source 1..1056: mol_type = unassigned DNA

SEQ ID NO: 31813 - DNA, 1038 bp, Homo sapiens
  source 1..1038: mol_type = unassigned DNA
atgagcagcaattcatccctgctggtggctgtgcagctgtgctacgcgaacgtgaatgggtcctgtgtgaaaatccccttctcgccgggatcccgggtgattctgtacatagtgtttggctttggggctgtgctggctgtgtttggaaacctcctggtgatgatttcaatcctccatttcaagcagctgcactctccgaccaattttctcgttgcctctctggcctgcgctgatttcttggtgggtgtgactgtgatgcccttcagcatggtcaggacggtggagagctgctggtattttgggaggagtttttgtactttccacacctgctgtgatgtggcattttgttactcttctctctttcacttgtgcttcatctccatcgacaggtacattgcggttactgaccccctggtctatcctaccaagttcaccgtatctgtgtcaggaatttgcatcagcgtgtcctggatcctgcccctcatgtacagcggtgctgtgttctacacaggtgtctatgacgatgggctggaggaattatctgatgccctaaactgtataggaggttgtcagaccgttgtaaatcaaaactgggtgttgacagattttctatccttctttatacctacctttattatgataattctgtatggtaacatatttcttgtggctagacgacaggcgaaaaagatagaaaatactggtagcaagacagaatcatcctcagagagttacaaagccagagtggccaggagagagagaaaagcagctaaaaccctgggggtcacagtggtagcatttatgatttcatggttaccatatagcattgattcattaattgatgcctttatgggctttataacccctgcctgtatttatgagatttgctgttggtgtgcttattataactcagccatgaatcctttgatttatgctttattttacccatggtttaggaaagcaataaaagttattgtaactggtcaggttttaaagaacagttcagcaaccatgaatttgttttctgaacatatataa

SEQ ID NO: 31814 - DNA, 954 bp, Homo sapiens
  source 1..954: mol_type = unassigned DNA
gtgaatgggtcctgtgtgaaaatccccttctcgccgggatcccgggtgattctgtacatagtgtttggctttggggctgtgctggctgtgtttggaaacctcctggtgatgatttcaatcctccatttcaagcagctgcactctccgaccaattttctcgttgcctctctggcctgcgctgatttcttggtgggtgtgactgtgatgcccttcagcatggtcaggacggtggagagctgctggtattttgggaggagtttttgtactttccacacctgctgtgatgtggcattttgttactcttctctctttcacttgtgcttcatctccatcgacaggtacattgcggttactgaccccctggtctatcctaccaagttcaccgtatctgtgtcaggaatttgcatcagcgtgtcctggatcctgcccctcatgtacagcggtgctgtgttctacacaggtgtctatgacgatgggctggaggaattatctgatgccctaaactgtataggaggttgtcagaccgttgtaaatcaaaactgggtgttgacagattttctatccttctttatacctacctttattatgataattctgtatggtaacatatttcttgtggctagacgacaggcgaaaaagatagaaaatactgagagttacaaagccagagtggccaggagagagagaaaagcagctaaaaccctgggggtcacagtggtagcatttatgatttcatggttaccatatagcattgattcattaattgatgcctttatgggctttataacccctgcctgtatttatgagatttgctgttggtgtgcttattataactcagccatgaatcctttgatttatgctttattttacccatggtttaggaaagcaataaaagttattgtaactggtcaggttttaaagaacagttcagcaaccatgaatttgttttctgaa

SEQ ID NO: 31815 - DNA, 2026 bp, Homo sapiens
  source 1..2026: mol_type = unassigned DNA
aggaagtcgtgctgcggagccaaatttgaagcaagcggaggcgcgggggcgcgtctacgaagccggacctgtagcagtttctttggctgcctgggccccttgagtccagccatcatgcctatccgtgctctgtgcactatctgctccgacttcttcgatcactcccgcgacgtggccgccatccactgcggccacaccttccacttgcagtgcctaattcagtggtttgagacagcaccaagtcggacctgcccacagtgccgaatccaggttggcaaaagaaccattatcaataagctcttctttgatcttgcccaggaggaggagaatgtcttggatgcagaattcttaaagaatgaactggacaatgtcagagcccagctttcccagaaagacaaggagaaacgagacagccaggtcatcatcgacactctgcgggatacgctggaagaacgcaatgctactgtggtatctctgcagcaggccttgggcaaggccgagatgctgtgctccacactgaaaaagcagatgaagtacttagagcagcagcaggatgagaccaaacaagcacaagaggaggcccgccggctcaggagcaagatgaagaccatggagcagattgagcttctactccagagccagcgccctgaggtggaggagatgatccgagacatgggtgtgggacagtcagcggtggaacagctggctgtgtactgtgtgtctctcaagaaagagtacgagaatctaaaagaggcacggaaggcctcaggggaggtggctgacaagctgaggaaggatttgttttcctccagaagcaagttgcagacagtctactctgaattggatcaggccaagttagaactgaagtcagcccagaaggacttacagagtgctgacaaggaaatcatgagcctgaaaaagaagctaacgatgctgcaggaaaccttgaacctgccaccagtggccagtgagactgtcgaccgcctggttttagagagcccagcccctgtggaggtgaatctgaagctccgccggccatccttccgtgatgatattgatctcaatgctacctttgatgtggatactcccccagcccggccctccagctcccagcatggttactacgaaaaactttgcctagagaagtcacactccccaattcaggatgtccccaagaagatatgcaaaggccccaggaaggagtcccagctctcactgggtggccagagctgtgcaggagagccagatgaggaactggttggtgccttccctatttttgtccggaatgccatcctaggccagaaacagcccaagaggcccaggtcagagtcctcttgcagcaaagatgtggtaaggacaggcttcgatgggctcggtggccggacaaaattcatccagcctactgacacagtcatgatccgcccattgcctgttaagcccaagaccaaggttaagcagagggtgagggtgaagacagtgccttctctcttccaggccaagctggacaccttcctgtggtcgtgagaacagtgagtctgaccaatggccagacacatgcctgcaacttgtaggtcaaggactgtccaggcaggggttttgtggacagagccccactttcgggaccagcctgaggtgtaagggcagacaaacaggtgagggtgagtgtggcacccagagactgctcttcctgccctcaccctgccccactcctacgactgggagctgacatgaccagcccactgatcctgtcagcaggtcctgctcctgttgccaggctcctgtttatagccatgatcagatgtggtcagactctttctgggcctggagaccacggtcacttgttgactgtctctgtggaccagagtgcttgaggcatctcaggcagcctcagcccaagcttctacctgcctttgacttgcttctaggcatagcctgggccaagcagggtggggaatggaggatagcatgggatgtatggagaggatggaagattttcatgtaaaataaaattaaaaaaaaaaaacaa

SEQ ID NO: 31816 - DNA, 4059 bp, Homo sapiens
  source 1..4059: mol_type = unassigned DNA
atggcgagcgactccccggctcgaagcctggatgaaatagatctctcggctctgagggaccccgcagggatctttgaattggtggaacttgttggaaatggaacatacgggcaagtttataagggtcgtcatgtcaaaacgggccagcttgcagccatcaaggttatggatgtcacaggggatgaagaggaagaaatcaaacaagaaattaacatgttgaagaaatattctcatcaccggaatattgctacatactatggtgcttttatcaaaaagaacccaccaggcatggatgaccaactttggttggtgatggagttttgtggtgctggctctgtcaccgacctgatcaagaacacaaaaggtaacacgttgaaagaggagtggattgcatacatctgcagggaaatcttacgggggctgagtcacctgcaccagcataaagtgattcatcgagatattaaagggcaaaatgtcttgctgactgaaaatgcagaagttaaactagtggactttggagtcagtgctcagcttgatcgaacagtgggcaggaggaatactttcattggaactccctactggatggcaccagaagttattgcctgtgatgaaaacccagatgccacatatgatttcaagagtgacttgtggtctttgggtatcaccgccattgaaatggcagaaggtgctccccctctctgtgacatgcaccccatgagagctctcttcctcatcccccggaacccagcgcctcggctgaagtctaagaagtggtcaaaaaaattccagtcatttattgagagctgcttggtaaagaatcacagccagcgaccagcaacagaacaattgatgaagcatccatttatacgagaccaacctaatgagcgacaggtccgcattcaactcaaggaccatattgatagaacaaagaagaagcgaggagaaaaagatgagacagagtatgagtacagtggaagtgaggaagaagaggaggagaatgactcaggagagcccagctccatcctgaatctgccaggggagtcgacgctgcggagggactttctgaggctgcagctggccaacaaggagcgttctgaggccctacggaggcagcagctggagcagcagcagcgggagaatgaggagcacaagcggcagctgctggccgagcgtcagaagcgcatcgaggagcagaaagagcagaggcggcggctggaggagcaacaaaggcgagagaaggagctgcggaagcagcaggagagggagcagcgccggcactatgaggagcagatgcgccgggaggaggagaggaggcgtgcggagcatgaacaggaatacatcaggcgacagttagaggaggagcagagacagttagagatcttgcagcagcagctactgcatgaacaagctctacttctggaatataagcgcaaacaattggaagaacagagacaagcagaaagactgcagaggcagctaaagcaagaaagagactacttagtttcccttcagcatcagcggcaggagcagaggcctgtggagaagaagccactgtaccattacaaagaaggaatgagtcctagtgagaagccagcatgggccaaggaggtagaagaacggtcaaggctcaaccggcaaagttcccctgccatgcctcacaaggttgccaacaggatatctgaccccaacctgcccccaaggtcggagtccttcagcattagtggagttcagcctgctcgaacaccccccatgctcagaccagtcgatccccagatcccacatctggtagctgtaaaatcccagggacctgccttgaccgcctcccagtcagtgcacgagcagcccacaaagggcctctctgggtttcaggaggctctgaacgtgacctcccaccgcgtggagatgccacgccagaactcagatcccacctcggaaaatcctcctctccccactcgcattgaaaagtttgaccgaagctcttggttacgacaggaagaagacattccaccaaaggtgcctcaaagaacaacttctatatccccagcattagccagaaagaattctcctgggaatggtagtgctctgggacccagactaggatctcaacccatcagagcaagcaaccctgatctccggagaactgagcccatcttggagagccccttgcagaggaccagcagtggcagttcctccagctccagcacccctagctcccagcccagctcccaaggaggctcccagcctggatcacaagcaggatccagtgaacgcaccagagttcgagccaacagtaagtcagaaggatcacctgtgctcccccatgagcctgcgaaggtgaaaccagaagaatccagggacattacccggcccagtcgaccagctgatctgacggcattagccaaagaactaagagaactccggattgaagaaacaaaccgcccaatgaagaaggtgactgattactcctcctccagtgaggagtcagaaagtagcgaggaagaggaggaagatggagagagcgagacccatgatgggacagtggctgtcagcgacatacccagactgataccaacaggagctccaggcagcaacgagcagtacaatgtgggaatggtggggacgcatgggctggagacctctcatgcggacagtttcagcggcagtatttcaagagaaggaaccttgatgattagagagacgtctggagagaagaagcgatctggccacagtgacagcaatggctttgctggccacatcaacctccctgacctggtgcagcagagccattctccagctggaaccccgactgagggactggggcgcgtctcaacccattcccaggagatggactctgggactgaatatggcatggggagcagcaccaaagcctccttcaccccctttgtggaccccagagtataccagacgtctcccactgatgaagatgaagaggatgaggaatcatcagccgcagctctgtttactagcgaacttcttaggcaagaacaggccaaactcaatgaagcaagaaagatttcggtggtaaatgtaaacccaaccaacattcggcctcatagcgacacaccagaaatcagaaaatacaagaaacgattcaactcagaaatactttgtgcagctctgtggggtgtaaaccttctggtggggactgaaaatggcctgatgcttttggaccgaagtgggcaaggcaaagtctataatctgatcaaccggaggcgatttcagcagatggatgtgctagagggactgaatgtccttgtgacaatttcaggaaagaagaataagctacgagtttactatctttcatggttaagaaacagaatactacataatgacccagaagtagaaaagaaacaaggctggatcactgttggggacttggaaggctgtatacattataaagttgttaaatatgaaaggatcaaatttttggtgattgccttaaagaatgctgtggaaatatatgcttgggctcctaaaccgtatcataaattcatggcatttaagtcttttgcagatctccagcacaagcctctgctagttgatctcacggtagaagaaggtcaaagattaaaggttatttttggttcacacactggtttccatgtaattgatgttgattcaggaaactcttatgatatctacataccatctcatattcagggcaatatcactcctcatgctattgtcatcttgcctaaaacagatggaatggaaatgcttgtttgctatgaggatgagggggtgtatgtaaacacctatggccggataactaaggatgtggtgctccaatggggagaaatgcccacgtctgtggcctacattcattccaatcagataatgggctggggcgagaaagctattgagatccggtcagtggaaacaggacatttggatggagtatttatgcataagcgagctcaaaggttaaagtttctatgtgaaagaaatgataaggtattttttgcatccgtgcgatctggaggaagtagccaagtgtttttcatgaccctcaacagaaattccatgatgaactggtaa

SEQ ID NO: 31817 - DNA, 4727 bp, Homo sapiens
  source 1..4727: mol_type = unassigned DNA
attataacagccaatgcagccgccatccacgcacaagcaaagaagcatgtcccatttaaatacacccacgcagccccagcgcccttagccgatcggggcgctcagcccacacgcaccgctgctcggggcttggagatccgcgcaggctgggctcccggacccggcggaccgacgcgcggaggatcgggatccggcgctgtggggctggggtgggcgggggaggctgggcccggggcctctggcgcgacacccgcatgaggacgcgagtgaaatagaccaaggtggaatttccaagggaaaagcttcggggtggttttggtccatttctccagcgaagaagtagacatggcgagcgactccccggctcgaagcctggatgaaatagatctctcggctctgagggaccccgcagggatctttgaattggtggaacttgttggaaatggaacatacgggcaagtttataagggtcgtcatgtcaaaacgggccagcttgcagccatcaaggttatggatgtcacaggggatgaagaggaagaaatcaaacaagaaattaacatgttgaagaaatattctcatcaccggaatattgctacatactatggtgcttttatcaaaaagaacccaccaggcatggatgaccaactttggttggtgatggagttttgtggtgctggctctgtcaccgacctgatcaagaacacaaaaggtaacacgttgaaagaggagtggattgcatacatctgcagggaaatcttacgggggctgagtcacctgcaccagcataaagtgattcatcgagatattaaagggcaaaatgtcttgctgactgaaaatgcagaagttaaactagtggactttggagtcagtgctcagcttgatcgaacagtgggcaggaggaatactttcattggaactccctactggatggcaccagaagttattgcctgtgatgaaaacccagatgccacatatgatttcaagagtgacttgtggtctttgggtatcaccgccattgaaatggcagaaggtgctccccctctctgtgacatgcaccccatgagagctctcttcctcatcccccggaacccagcgcctcggctgaagtctaagaagtggtcaaaaaaattccagtcatttattgagagctgcttggtaaagaatcacagccagcgaccagcaacagaacaattgatgaagcatccatttatacgagaccaacctaatgagcgacaggtccgcattcaactcaaggaccatattgatagaacaaagaagaagcgaggagaaaaagatgagacagagtatgagtacagtggaagtgaggaagaagaggaggagaatgactcaggagagcccagctccatcctgaatctgccaggggagtcgacgctgcggagggactttctgaggctgcagctggccaacaaggagcgttctgaggccctacggaggcagcagctggagcagcagcagcgggagaatgaggagcacaagcggcagctgctggccgagcgtcagaagcgcatcgaggagcagaaagagcagaggcggcggctggaggagcaacaaaggcgagagaaggagctgcggaagcagcaggagagggagcagcgccggcactatgaggagcagatgcgccgggaggaggagaggaggcgtgcggagcatgaacaggaatataagcgcaaacaattggaagaacagagacaagcagaaagactgcagaggcagctaaagcaagaaagagactacttagtttcccttcagcatcagcggcaggagcagaggcctgtggagaagaagccactgtaccattacaaagaaggaatgagtcctagtgagaagccagcatgggccaaggagatcccacatctggtagctgtaaaatcccagggacctgccttgaccgcctcccagtcagtgcacgagcagcccacaaagggcctctctgggtttcaggaggctctgaacgtgacctcccaccgcgtggagatgccacgccagaactcagatcccacctcggaaaatcctcctctccccactcgcattgaaaagtttgaccgaagctcttggttacgacaggaagaagacattccaccaaaggtgcctcaaagaacaacttctatatccccagcattagccagaaagaattctcctgggaatggtagtgctctgggacccagactaggatctcaacccatcagagcaagcaaccctgatctccggagaactgagcccatcttggagagccccttgcagaggaccagcagtggcagttcctccagctccagcacccctagctcccagcccagctcccaaggaggctcccagcctggatcacaagcaggatccagtgaacgcaccagagttcgagccaacagtaagtcagaaggatcacctgtgctcccccatgagcctgcgaaggtgaaaccagaagaatccagggacattacccggcccagtcgaccagctagctacaaaaaagctatagatgaggatctgacggcattagccaaagaactaagagaactccggattgaagaaacaaaccgcccaatgaagaaggtgactgattactcctcctccagtgaggagtcagaaagtagcgaggaagaggaggaagatggagagagcgagacccatgatgggacagtggctgtcagcgacatacccagactgataccaacaggagctccaggcagcaacgagcagtacaatgtgggaatggtggggacgcatgggctggagacctctcatgcggacagtttcagcggcagtatttcaagagaaggaaccttgatgattagagagacgtctggagagaagaagcgatctggccacagtgacagcaatggctttgctggccacatcaacctccctgacctggtgcagcagagccattctccagctggaaccccgactgagggactggggcgcgtctcaacccattcccaggagatggactctgggactgaatatggcatggggagcagcaccaaagcctccttcaccccctttgtggaccccagagtataccagacgtctcccactgatgaagatgaagaggatgaggaatcatcagccgcagctctgtttactagcgaacttcttaggcaagaacaggccaaactcaatgaagcaagaaagatttcggtggtaaatgtaaacccaaccaacattcggcctcatagcgacacaccagaaatcagaaaatacaagaaacgattcaactcagaaatactttgtgcagctctgtggggtgtaaaccttctggtggggactgaaaatggcctgatgcttttggaccgaagtgggcaaggcaaagtctataatctgatcaaccggaggcgatttcagcagatggatgtgctagagggactgaatgtccttgtgacaatttcaggaaagaagaataagctacgagtttactatctttcatggttaagaaacagaatactacataatgacccagaagtagaaaagaaacaaggctggatcactgttggggacttggaaggctgtatacattataaagttgttaaatatgaaaggatcaaatttttggtgattgccttaaagaatgctgtggaaatatatgcttgggctcctaaaccgtatcataaattcatggcatttaagtcttttgcagatctccagcacaagcctctgctagttgatctcacggtagaagaaggtcaaagattaaaggttatttttggttcacacactggtttccatgtaattgatgttgattcaggaaactcttatgatatctacataccatctcatattcagggcaatatcactcctcatgctattgtcatcttgcctaaaacagatggaatggaaatgcttgtttgctatgaggatgagggggtgtatgtaaacacctatggccggataactaaggatgtggtgctccaatggggagaaatgcccacgtctgtggcctacattcattccaatcagataatgggctggggcgagaaagctattgagatccggtcagtggaaacaggacatttggatggagtatttatgcataagcgagctcaaaggttaaagtttctatgtgaaagaaatgataaggtattttttgcatccgtgcgatctggaggaagtagccaagtgtttttcatgaccctcaacagaaattccatgatgaactggtaacagaagagcacttggcacttatcttcatggcgttatttctaatttaaaagaacataactcatgtggacttatgccagtctagaggcagaatcagaaggcttggttgaacatatcgctttccctttttcctctccctccgcccctcccagtacagtccatctttcaatgttgcagcctggttgagaaggagagaaaaaggtggcaggaatttccaggagatccccaagaatgctgccttgtctgtggacaaagatggaccatgtgcccttcggaattagggatagaaacaaatattgtgtgctcttaacgattaagctgtgttatggtgggttttcaggtttttaccttttttctttacccctttactctgcaagaatggggaaagaatgcatactgcgaaaatgagtcttttaaattctgtctgcctactagttttaagtatatggtatgttgtaaaatttccaatgatgagagacagcacaataaatgtaccttatctccttaggctgaaggccataactacatagtggagtaatttaagaactctcttg

SEQ ID NO: 31818 - DNA, 3996 bp, Homo sapiens
  source 1..3996: mol_type = unassigned DNA
atggcgagcgactccccggctcgaagcctggatgaaatagatctctcggctctgagggaccccgcagggatctttgaattggtggaacttgttggaaatggaacatacgggcaagtttataagggtcgtcatgtcaaaacgggccagcttgcagccatcaaggttatggatgtcacaggggatgaagaggaagaaatcaaacaagaaattaacatgttgaagaaatattctcatcaccggaatattgctacatactatggtgcttttatcaaaaagaacccaccaggcatggatgaccaactttggttggtgatggagttttgtggtgctggctctgtcaccgacctgatcaagaacacaaaaggtaacacgttgaaagaggagtggattgcatacatctgcagggaaatcttacgggggctgagtcacctgcaccagcataaagtgattcatcgagatattaaagggcaaaatgtcttgctgactgaaaatgcagaagttaaactagtggactttggagtcagtgctcagcttgatcgaacagtgggcaggaggaatactttcattggaactccctactggatggcaccagaagttattgcctgtgatgaaaacccagatgccacatatgatttcaagagtgacttgtggtctttgggtatcaccgccattgaaatggcagaaggtgctccccctctctgtgacatgcaccccatgagagctctcttcctcatcccccggaacccagcgcctcggctgaagtctaagaagtggtcaaaaaaattccagtcatttattgagagctgcttggtaaagaatcacagccagcgaccagcaacagaacaattgatgaagcatccatttatacgagaccaacctaatgagcgacaggtccgcattcaactcaaggaccatattgatagaacaaagaagaagcgaggagaaaaagatgagacagagtatgagtacagtggaagtgaggaagaagaggaggagaatgactcaggagagcccagctccatcctgaatctgccaggggagtcgacgctgcggagggactttctgaggctgcagctggccaacaaggagcgttctgaggccctacggaggcagcagctggagcagcagcagcgggagaatgaggagcacaagcggcagctgctggccgagcgtcagaagcgcatcgaggagcagaaagagcagaggcggcggctggaggagcaacaaaggcgagagaaggagctgcggaagcagcaggagagggagcagcgccggcactatgaggagcagatgcgccgggaggaggagaggaggcgtgcggagcatgaacaggaatataagcgcaaacaattggaagaacagagacaagcagaaagactgcagaggcagctaaagcaagaaagagactacttagtttcccttcagcatcagcggcaggagcagaggcctgtggagaagaagccactgtaccattacaaagaaggaatgagtcctagtgagaagccagcatgggccaaggaggtagaagaacggtcaaggctcaaccggcaaagttcccctgccatgcctcacaaggttgccaacaggatatctgaccccaacctgcccccaaggtcggagtccttcagcattagtggagttcagcctgctcgaacaccccccatgctcagaccagtcgatccccagatcccacatctggtagctgtaaaatcccagggacctgccttgaccgcctcccagtcagtgcacgagcagcccacaaagggcctctctgggtttcaggaggctctgaacgtgacctcccaccgcgtggagatgccacgccagaactcagatcccacctcggaaaatcctcctctccccactcgcattgaaaagtttgaccgaagctcttggttacgacaggaagaagacattccaccaaaggtgcctcaaagaacaacttctatatccccagcattagccagaaagaattctcctgggaatggtagtgctctgggacccagactaggatctcaacccatcagagcaagcaaccctgatctccggagaactgagcccatcttggagagccccttgcagaggaccagcagtggcagttcctccagctccagcacccctagctcccagcccagctcccaaggaggctcccagcctggatcacaagcaggatccagtgaacgcaccagagttcgagccaacagtaagtcagaaggatcacctgtgctcccccatgagcctgcgaaggtgaaaccagaagaatccagggacattacccggcccagtcgaccagctagctacaaaaaagctatagatgaggatctgacggcattagccaaagaactaagagaactccggattgaagaaacaaaccgcccaatgaagaaggtgactgattactcctcctccagtgaggagtcagaaagtagcgaggaagaggaggaagatggagagagcgagacccatgatgggacagtggctgtcagcgacatacccagactgataccaacaggagctccaggcagcaacgagcagtacaatgtgggaatggtggggacgcatgggctggagacctctcatgcggacagtttcagcggcagtatttcaagagaaggaaccttgatgattagagagacgtctggagagaagaagcgatctggccacagtgacagcaatggctttgctggccacatcaacctccctgacctggtgcagcagagccattctccagctggaaccccgactgagggactggggcgcgtctcaacccattcccaggagatggactctgggactgaatatggcatggggagcagcaccaaagcctccttcaccccctttgtggaccccagagtataccagacgtctcccactgatgaagatgaagaggatgaggaatcatcagccgcagctctgtttactagcgaacttcttaggcaagaacaggccaaactcaatgaagcaagaaagatttcggtggtaaatgtaaacccaaccaacattcggcctcatagcgacacaccagaaatcagaaaatacaagaaacgattcaactcagaaatactttgtgcagctctgtggggtgtaaaccttctggtggggactgaaaatggcctgatgcttttggaccgaagtgggcaaggcaaagtctataatctgatcaaccggaggcgatttcagcagatggatgtgctagagggactgaatgtccttgtgacaatttcaggaaagaagaataagctacgagtttactatctttcatggttaagaaacagaatactacataatgacccagaagtagaaaagaaacaaggctggatcactgttggggacttggaaggctgtatacattataaagttgttaaatatgaaaggatcaaatttttggtgattgccttaaagaatgctgtggaaatatatgcttgggctcctaaaccgtatcataaattcatggcatttaagtcttttgcagatctccagcacaagcctctgctagttgatctcacggtagaagaaggtcaaagattaaaggttatttttggttcacacactggtttccatgtaattgatgttgattcaggaaactcttatgatatctacataccatctcatattcagggcaatatcactcctcatgctattgtcatcttgcctaaaacagatggaatggaaatgcttgtttgctatgaggatgagggggtgtatgtaaacacctatggccggataactaaggatgtggtgctccaatggggagaaatgcccacgtctgtggcctacattcattccaatcagataatgggctggggcgagaaagctattgagatccggtcagtggaaacaggacatttggatggagtatttatgcataagcgagctcaaaggttaaagtttctatgtgaaagaaatgataaggtattttttgcatccgtgcgatctggaggaagtagccaagtgtttttcatgaccctcaacagaaattccatgatgaactggtaa

SEQ ID NO: 31819 - DNA, 5740 bp, Homo sapiens
  source 1..5740: mol_type = unassigned DNA
attataacagccaatgcagccgccatccacgcacaagcaaagaagcatgtcccatttaaatacacccacgcagccccagcgcccttagccgatcggggcgctcagcccacacgcaccgctgctcggggcttggagatccgcgcaggctgggctcccggacccggcggaccgacgcgcggaggatcgggatccggcgctgtggggctggggtgggcgggggaggctgggcccggggcctctggcgcgacacccgcatgaggacgcgagtgaaatagaccaaggtggaatttccaagggaaaagcttcggggtggttttggtccatttctccagcgaagaagtagacatggcgagcgactccccggctcgaagcctggatgaaatagatctctcggctctgagggaccccgcagggatctttgaattggtggaacttgttggaaatggaacatacgggcaagtttataagggtcgtcatgtcaaaacgggccagcttgcagccatcaaggttatggatgtcacaggggatgaagaggaagaaatcaaacaagaaattaacatgttgaagaaatattctcatcaccggaatattgctacatactatggtgcttttatcaaaaagaacccaccaggcatggatgaccaactttggttggtgatggagttttgtggtgctggctctgtcaccgacctgatcaagaacacaaaaggtaacacgttgaaagaggagtggattgcatacatctgcagggaaatcttacgggggctgagtcacctgcaccagcataaagtgattcatcgagatattaaagggcaaaatgtcttgctgactgaaaatgcagaagttaaaatagtggactttggagtcagtgctcagcttgatcgaacagtgggcaggaggaatactttcattggaactccctactggatggcaccagaagttattgcctgtgatgaaaacccagatgccacatatgatttcaagagtgacttgtggtctttgggtatcaccgccattgaaatggcagaaggtgctccccctctctgtgacatgcaccccatgagagctctcttcctcatcccccggaacccagcgcctcggctgaagtctaagaagtggtcaaaaaaattccagtcatttattgagagctgcttggtaaagaatcacagccagcgaccagcaacagaacaattgatgaagcatccatttatacgagaccaacctaatgagcgacaggtccgcattcaactcaaggaccatattgatagaacaaagaagaagcgaggagaaaaagatgagacagagtatgagtacagtggaagtgaggaagaagaggaggagaatgactcaggagagcccagctccatcctgaatctgccaggggagtcgacgctgcggagggactttctgaggctgcagctggccaacaaggagcgttctgaggccctacggaggcagcagctggagcagcagcagcgggagaatgaggagcacaagcggcagctgctggccgagcgtcagaagcgcatcgaggagcagaaagagcagaggcggcggctggaggagcaacaaaggcgagagaaggagctgcggaagcagcaggagagggagcagcgccggcactatgaggagcagatgcgccgggaggaggagaggaggcgtgcggagcatgaacaggaatataagcgcaaacaattggaagaacagagacaagcagaaagactgcagaggcagctaaagcaagaaagagactacttagtttcccttcagcatcagcggcaggagcagaggcctgtggagaagaagccactgtaccattacaaagaaggaatgagtcctagtgagaagccagcatgggccaaggaggtagaagaacggtcaaggctcaaccggcaaagttcccctgccatgcctcacaaggttgccaacaggatatctgaccccaacctgcccccaaggtcggagtccttcagcattagtggagttcagcctgctcgaacaccccccatgctcagaccagtcgatccccagatcccacatctggtagctgtaaaatcccagggacctgccttgaccgcctcccagtcagtgcacgagcagcccacaaagggcctctctgggtttcaggaggctctgaacgtgacctcccaccgcgtggagatgccacgccagaactcagatcccacctcggaaaatcctcctctccccactcgcattgaaaagtttgaccgaagctcttggttacgacaggaagaagacattccaccaaaggtgcctcaaagaacaacttctatatccccagcattagccagaaagaattctcctgggaatggtagtgctctgggacccagactaggatctcaacccatcagagcaagcaaccctgatctccggagaactgagcccatcttggagagccccttgcagaggaccagcagtggcagttcctccagctccagcacccctagctcccagcccagctcccaaggaggctcccagcctggatcacaagcaggatccagtgaacgcaccagagttcgagccaacagtaagtcagaaggatcacctgtgctcccccatgagcctgcgaaggtgaaaccagaagaatccagggacattacccggcccagtcgaccagctgtgagtgcttttctctccaagagttttgaactcttaatttaccaggatctgacggcattagccaaagaactaagagaactccggattgaagaaacaaaccgcccaatgaagaaggtgactgattactcctcctccagtgaggagtcagaaagtagcgaggaagaggaggaagatggagagagcgagacccatgatgggacagtggctgtcagcgacatacccagactgataccaacaggagctccaggcagcaacgagcagtacaatgtgggaatggtggggacgcatgggctggagacctctcatgcggacagtttcagcggcagtatttcaagagaaggaaccttgatgattagagagacgtctggagagaagaagcgatctggccacagtgacagcaatggctttgctggccacatcaacctccctgacctggtgcagcagagccattctccagctggaaccccgactgagggactggggcgcgtctcaacccattcccaggagatggactctgggactgaatatggcatggggagcagcaccaaagcctccttcaccccctttgtggaccccagagtataccagacgtctcccactgatgaagatgaagaggatgaggaatcatcagccgcagctctgtttactagcgaacttcttaggcaagaacaggccaaactcaatgaagcaagaaagatttcggtggtaaatgtaaacccaaccaacattcggcctcatagcgacacaccagaaatcagaaaatacaagaaacgattcaactcagaaatactttgtgcagctctgtggggtgtaaaccttctggtggggactgaaaatggcctgatgcttttggaccgaagtgggcaaggcaaagtctataatctgatcaaccggaggcgatttcagcagatggatgtgctagagggactgaatgtccttgtgacaatttcaggaaagaagaataagctacgagtttactatctttcatggttaagaaacagaatactacataatgacccagaagtagaaaagaaacaaggctggatcactgttggggacttggaaggctgtatacattataaagttgttaaatatgaaaggatcaaatttttggtgattgccttaaagaatgctgtggaaatatatgcttgggctcctaaaccgtatcataaattcatggcatttaagtcttttgcagatctccagcacaagcctctgctagttgatctcacggtagaagaaggtcaaagattaaaggttatttttggttcacacactggtttccatgtaattgatgttgattcaggaaactcttatgatatctacataccatctcatattcagggcaatatcactcctcatgctattgtcatcttgcctaaaacagatggaatggaaatgcttgtttgctatgaggatgagggggtgtatgtaaacacctatggccggataactaaggatgtggtgctccaatggggagaaatgcccacgtctgtggcctacattcattccaatcagataatgggctggggcgagaaagctattgagatccggtcagtggaaacaggacatttggatggagtatttatgcataagcgagctcaaaggttaaagtttctatgtgaaagaaatgataaggtattttttgcatccgtgcgatctggaggaagtagccaagtgtttttcatgaccctcaacagaaattccatgatgaactggtaacagaagagcacttggcacttatcttcatggcgttatttctaatttaaaagaacataactcatgtggacttatgccagtctagaggcagaatcagaaggcttggttgaacatatcgctttccctttttcctctccctccgcccctcccagtacagtccatctttcaatgttgcagcctggttgagaaggagagaaaaaggtggcaggaatttccaggagatccccaagaatgctgccttgtctgtggacaaagatggaccatgtgcccttcggaattagggatagaaacaaatattgtgtgctcttaacgattaagctgtgttatggtgggttttcaggtttttaccttttttctttacccctttactctgcaagaatggggaaagaatgcatactgcgaaaatgagtcttttaaattctgtctgcctactagttttaagtatatggtatgttgtaaaatttccaatgatgagagacagcacaataaatgtaccttatctccttaggctgaaggccataactacatagtggagtaatttaagaactctcttgccttcaccaacccaaaaggttgctttttgatagcaactggctaatgaatttttaaaaagagaagaaaaatactagttttcccctcttttgggaaatagattttaaatggctaaactactagccttaaaactactagtctaataaaatcaactaccacttttgtgaatctgacaggccacatttttatatggccctttacagaatggagtgtgttgaacaggatactaacgccattgagttgagctggcctagcgatggagggacactctaacacaactttccctcagctattatgcaacagatcagggaaaaagatgggatgacagatggggtcagacagaaagagcttctgggaaacaagcttacatagtcttttttaaaatgcacaaagcctcccagctaagaggtcacttggtttgggcttcattaggactgagactttgttgagttctttctgggacttggagagtggatgatattcaggctctgaacattcccagcgctctcccgagggtgccactttctcaagatgaaaactgtgactgaaaaaattaataataaatgtttctgagctgcctgtgttctccctgtgtgggtgagagaagggactagactcctaagcctgcctcagatacaagaggcatcattggctccaattttagagaacttgaaagcaaggctttggacaaaattttgagaccctaatcactttaccttcctccaaattacccaacatacggtaaacaacatttgtgcagaagtatgtatgtatttagttcaggttgacttgtgtccttataaactcttactcaaatgatttgaacttt

SEQ ID NO: 31820 - DNA, 6970 bp, Homo sapiens
  source 1..6970: mol_type = unassigned DNA
attataacagccaatgcagccgccatccacgcacaagcaaagaagcatgtcccatttaaatacacccacgcagccccagcgcccttagccgatcggggcgctcagcccacacgcaccgctgctcggggcttggagatccgcgcaggctgggctcccggacccggcggaccgacgcgcggaggatcgggatccggcgctgtggggctggggtgggcgggggaggctgggcccggggcctctggcgcgacacccgcatgaggacgcgagtgaaatagaccaaggtggaatttccaagggaaaagcttcggggtggttttggtccatttctccagcgaagaagtagacatggcgagcgactccccggctcgaagcctggatgaaatagatctctcggctctgagggaccccgcagggatctttgaattggtggaacttgttggaaatggaacatacgggcaagtttataagggtcgtcatgtcaaaacgggccagcttgcagccatcaaggttatggatgtcacaggggatgaagaggaagaaatcaaacaagaaattaacatgttgaagaaatattctcatcaccggaatattgctacatactatggtgcttttatcaaaaagaacccaccaggcatggatgaccaactttggttggtgatggagttttgtggtgctggctctgtcaccgacctgatcaagaacacaaaaggtaacacgttgaaagaggagtggattgcatacatctgcagggaaatcttacgggggctgagtcacctgcaccagcataaagtgattcatcgagatattaaagggcaaaatgtcttgctgactgaaaatgcagaagttaaactagtggactttggagtcagtgctcagcttgatcgaacagtgggcaggaggaatactttcattggaactccctactggatggcaccagaagttattgcctgtgatgaaaacccagatgccacatatgatttcaagagtgacttgtggtctttgggtatcaccgccattgaaatggcagaaggtgctccccctctctgtgacatgcaccccatgagagctctcttcctcatcccccggaacccagcgcctcggctgaagtctaagaagtggtcaaaaaaattccagtcatttattgagagctgcttggtaaagaatcacagccagcgaccagcaacagaacaattgatgaagcatccatttatacgagaccaacctaatgagcgacaggtccgcattcaactcaaggaccatattgatagaacaaagaagaagcgaggagaaaaagatgagacagagtatgagtacagtggaagtgaggaagaagaggaggagaatgactcaggagagcccagctccatcctgaatctgccaggggagtcgacgctgcggagggactttctgaggctgcagctggccaacaaggagcgttctgaggccctacggaggcagcagctggagcagcagcagcgggagaatgaggagcacaagcggcagctgctggccgagcgtcagaagcgcatcgaggagcagaaagagcagaggcggcggctggaggagcaacaaaggcgagagaaggagctgcggaagcagcaggagagggagcagcgccggcactatgaggagcagatgcgccgggaggaggagaggaggcgtgcggagcatgaacaggaatacatcaggcgacagttagaggaggagcagagacagttagagatcttgcagcagcagctactgcatgaacaagctctacttctggaatataagcgcaaacaattggaagaacagagacaagcagaaagactgcagaggcagctaaagcaagaaagagactacttagtttcccttcagcatcagcggcaggagcagaggcctgtggagaagaagccactgtaccattacaaagaaggaatgagtcctagtgagaagccagcatgggccaaggaggtagaagaacggtcaaggctcaaccggcaaagttcccctgccatgcctcacaaggttgccaacaggatatctgaccccaacctgcccccaaggtcggagtccttcagcattagtggagttcagcctgctcgaacaccccccatgctcagaccagtcgatccccagatcccacatctggtagctgtaaaatcccagggacctgccttgaccgcctcccagtcagtgcacgagcagcccacaaagggcctctctgggtttcaggaggctctgaacgtgacctcccaccgcgtggagatgccacgccagaactcagatcccacctcggaaaatcctcctctccccactcgcattgaaaagtttgaccgaagctcttggttacgacaggaagaagacattccaccaaaggtgcctcaaagaacaacttctatatccccagcattagccagaaagaattctcctgggaatggtagtgctctgggacccagactaggatctcaacccatcagagcaagcaaccctgatctccggagaactgagcccatcttggagagccccttgcagaggaccagcagtggcagttcctccagctccagcacccctagctcccagcccagctcccaaggaggctcccagcctggatcacaagcaggatccagtgaacgcaccagagttcgagccaacagtaagtcagaaggatcacctgtgctcccccatgagcctgcgaaggtgaaaccagaagaatccagggacattacccggcccagtcgaccagctagctacaaaaaagctatagatgaggatctgacggcattagccaaagaactaagagaactccggattgaagaaacaaaccgcccaatgaagaaggtgactgattactcctcctccagtgaggagtcagaaagtagcgaggaagaggaggaagatggagagagcgagacccatgatgggacagtggctgtcagcgacatacccagactgataccaacaggagctccaggcagcaacgagcagtacaatgtgggaatggtggggacgcatgggctggagacctctcatgcggacagtttcagcggcagtatttcaagagaaggaaccttgatgattagagagacgtctggagagaagaagcgatctggccacagtgacagcaatggctttgctggccacatcaacctccctgacctggtgcagcagagccattctccagctggaaccccgactgagggactggggcgcgtctcaacccattcccaggagatggactctgggactgaatatggcatggggagcagcaccaaagcctccttcaccccctttgtggaccccagagtataccagacgtctcccactgatgaagatgaagaggatgaggaatcatcagccgcagctctgtttactagcgaacttcttaggcaagaacaggccaaactcaatgaagcaagaaagatttcggtggtaaatgtaaacccaaccaacattcggcctcatagcgacacaccagaaatcagaaaatacaagaaacgattcaactcagaaatactttgtgcagctctgtggggtgtaaaccttctggtggggactgaaaatggcctgatgcttttggaccgaagtgggcaaggcaaagtctataatctgatcaaccggaggcgatttcagcagatggatgtgctagagggactgaatgtccttgtgacaatttcaggaaagaagaataagctacgagtttactatctttcatggttaagaaacagaatactacataatgacccagaagtagaaaagaaacaaggctggatcactgttggggacttggaaggctgtatacattataaagttgttaaatatgaaaggatcaaatttttggtgattgccttaaagaatgctgtggaaatatatgcttgggctcctaaaccgtatcataaattcatggcatttaagtcttttgcagatctccagcacaagcctctgctagttgatctcacggtagaagaaggtcaaagattaaaggttatttttggttcacacactggtttccatgtaattgatgttgattcaggaaactcttatgatatctacataccatctcatattcagggcaatatcactcctcatgctattgtcatcttgcctaaaacagatggaatggaaatgcttgtttgctatgaggatgagggggtgtatgtaaacacctatggccggataactaaggatgtggtgctccaatggggagaaatgcccacgtctgtggcctacattcattccaatcagataatgggctggggcgagaaagctattgagatccggtcagtggaaacaggacatttggatggagtatttatgcataagcgagctcaaaggttaaagtttctatgtgaaagaaatgataaggtattttttgcatccgtgcgatctggaggaagtagccaagtgtttttcatgaccctcaacagaaattccatgatgaactggtaacagaagagcacttggcacttatcttcatggcgttatttctaatttaaaagaacataactcatgtggacttatgccagtctagaggcagaatcagaaggcttggttgaacatatcgctttccctttttcctctccctccgcccctcccagtacagtccatctttcaatgttgcagcctggttgagaaggagagaaaaaggtggcaggaatttccaggagatccccaagaatgctgccttgtctgtggacaaagatggaccatgtgcccttcggaattagggatagaaacaaatattgtgtgctcttaacgattaagctgtgttatggtgggttttcaggtttttaccttttttctttacccctttactctgcaagaatggggaaagaatgcatactgcgaaaatgagtcttttaaattctgtctgcctactagttttaagtatatggtatgttgtaaaatttccaatgatgagagacagcacaataaatgtaccttatctccttaggctgaaggccataactacatagtggagtaatttaagaactctcttgccttcaccaacccaaaaggttgctttttgatagcaactggctaatgaatttttaaaaagagaagaaaaatactagttttcccctcttttgggaaatagattttaaatggctaaactactagccttaaaactactagtctaataaaatcaactaccacttttgtgaatctgacaggccacatttttatatggccctttacagaatggagtgtgttgaacaggatactaacgccattgagttgagctggcctagcgatggagggacactctaacacaactttccctcagctattatgcaacagatcagggaaaaagatgggatgacagatggggtcagacagaaagagcttctgggaaacaagcttacatagtcttttttaaaatgcacaaagcctcccagctaagaggtcacttggtttgggcttcattaggactgagactttgttgagttctttctgggacttggagagtggatgatattcaggctctgaacattcccagcgctctcccgagggtgccactttctcaagatgaaaactgtgactgaaaaaattaataataaatgtttctgagctgcctgtgttctccctgtgtgggtgagagaagggactagactcctaagcctgcctcagatacaagaggcatcattggctccaattttagagaacttgaaagcaaggctttggacaaaattttgagaccctaatcactttaccttcctccaaattacccaacatacggtaaacaacatttgtgcagaagtatgtatgtatttagttcaggttgacttgtgtccttataaactcttactcaaatgatttgaacttttatgcgactgggattttttttttccaaagctacaagcatggccgcctgtggtatcgaggtgttgcaaacaatatctgtgttgcgcttcctgttttaacctacctcgttttgtttgtttttgtttcactgttcatcacagcagtgttatctccaggagacatatagagagctcaaccggcaatctcaggtgcatttaacatttttaaaacgaaacagtagttgaccaaatttttcttcttaaaaaattggaagtggggggaatccaatgacaaaaactaatgtggcttgtttctggagaaaataattactgtaaatggaacaacaacaacaaaaaaaactacgatcttactgactttgcctaaatacacaagcagctgatgtactattaatgagaacgaaatacacattaggaaaatggagccatttcaatctagtggtttgggcaagatggggaagagaaggggaaacattctagtttctggattacattattatgcccctcctgaaaaggtggttgtcatttgcatttatttaaagcaggtaatatgcaggaatgtaactgaggattatcttcaggcaatcagcaagatatcctcctcatggtccctttagctctcaaaagcaatgaaatcctcctgttctcatttttactgctgtggttgtgctgctgaacaatactatcttctcaaattccatgccacaaattcagcaataactttttggattgaatttaacaactactgtaattggatgctgatgtggacaaaatatattgatttcgatttcactcccgaatgtgattgccaccagctctttatattgctgctgtggtattttaaaccagaagcttctttaaattatgttgcaaactgatctttgtttttatgttttgttttgtttttatttctaagtgataagtttgaaacacacagctttaaatgatttttttattgtgggattttgggtacagttaagaaataaaagggaatcattgtgtttaaacataaggtagtttgtgaatgtattttttaaaatctagagtcattgaaacaaatcataagaaaacaatattaatgcagtcttgtttacagtatgtacagtgacataacatagaacatgagcttttctggtgccaacaacaataaaacacacgttaaacatcaa

SEQ ID NO: 31821 - DNA, 3894 bp, Homo sapiens
  source 1..3894: mol_type = unassigned DNA
atggcgagcgactccccggctcgaagcctggatgaaatagatctctcggctctgagggaccccgcagggatctttgaattggtggaacttgttggaaatggaacatacgggcaagtttataagggtcgtcatgtcaaaacgggccagcttgcagccatcaaggttatggatgtcacaggggatgaagaggaagaaatcaaacaagaaattaacatgttgaagaaatattctcatcaccggaatattgctacatactatggtgcttttatcaaaaagaacccaccaggcatggatgaccaactttggttggtgatggagttttgtggtgctggctctgtcaccgacctgatcaagaacacaaaaggtaacacgttgaaagaggagtggattgcatacatctgcagggaaatcttacgggggctgagtcacctgcaccagcataaagtgattcatcgagatattaaagggcaaaatgtcttgctgactgaaaatgcagaagttaaactagtggactttggagtcagtgctcagcttgatcgaacagtgggcaggaggaatactttcattggaactccctactggatggcaccagaagttattgcctgtgatgaaaacccagatgccacatatgatttcaagagtgacttgtggtctttgggtatcaccgccattgaaatggcagaaggtgctccccctctctgtgacatgcaccccatgagagctctcttcctcatcccccggaacccagcgcctcggctgaagtctaagaagtggtcaaaaaaattccagtcatttattgagagctgcttggtaaagaatcacagccagcgaccagcaacagaacaattgatgaagcatccatttatacgagaccaacctaatgagcgacaggtccgcattcaactcaaggaccatattgatagaacaaagaagaagcgaggagaaaaagatgagacagagtatgagtacagtggaagtgaggaagaagaggaggagaatgactcaggagagcccagctccatcctgaatctgccaggggagtcgacgctgcggagggactttctgaggctgcagctggccaacaaggagcgttctgaggccctacggaggcagcagctggagcagcagcagcgggagaatgaggagcacaagcggcagctgctggccgagcgtcagaagcgcatcgaggagcagaaagagcagaggcggcggctggaggagcaacaaaggcgagagaaggagctgcggaagcagcaggagagggagcagcgccggcactatgaggagcagatgcgccgggaggaggagaggaggcgtgcggagcatgaacaggaatacatcaggcgacagttagaggaggagcagagacagttagagatcttgcagcagcagctactgcatgaacaagctctacttctggaatataagcgcaaacaattggaagaacagagacaagcagaaagactgcagaggcagctaaagcaagaaagagactacttagtttcccttcagcatcagcggcaggagcagaggcctgtggagaagaagccactgtaccattacaaagaaggaatgagtcctagtgagaagccagcatgggccaaggagatcccacatctggtagctgtaaaatcccagggacctgccttgaccgcctcccagtcagtgcacgagcagcccacaaagggcctctctgggtttcaggaggctctgaacgtgacctcccaccgcgtggagatgccacgccagaactcagatcccacctcggaaaatcctcctctccccactcgcattgaaaagtttgaccgaagctcttggttacgacaggaagaagacattccaccaaaggtgcctcaaagaacaacttctatatccccagcattagccagaaagaattctcctgggaatggtagtgctctgggacccagactaggatctcaacccatcagagcaagcaaccctgatctccggagaactgagcccatcttggagagccccttgcagaggaccagcagtggcagttcctccagctccagcacccctagctcccagcccagctcccaaggaggctcccagcctggatcacaagcaggatccagtgaacgcaccagagttcgagccaacagtaagtcagaaggatcacctgtgctcccccatgagcctgcgaaggtgaaaccagaagaatccagggacattacccggcccagtcgaccagctgatctgacggcattagccaaagaactaagagaactccggattgaagaaacaaaccgcccaatgaagaaggtgactgattactcctcctccagtgaggagtcagaaagtagcgaggaagaggaggaagatggagagagcgagacccatgatgggacagtggctgtcagcgacatacccagactgataccaacaggagctccaggcagcaacgagcagtacaatgtgggaatggtggggacgcatgggctggagacctctcatgcggacagtttcagcggcagtatttcaagagaaggaaccttgatgattagagagacgtctggagagaagaagcgatctggccacagtgacagcaatggctttgctggccacatcaacctccctgacctggtgcagcagagccattctccagctggaaccccgactgagggactggggcgcgtctcaacccattcccaggagatggactctgggactgaatatggcatggggagcagcaccaaagcctccttcaccccctttgtggaccccagagtataccagacgtctcccactgatgaagatgaagaggatgaggaatcatcagccgcagctctgtttactagcgaacttcttaggcaagaacaggccaaactcaatgaagcaagaaagatttcggtggtaaatgtaaacccaaccaacattcggcctcatagcgacacaccagaaatcagaaaatacaagaaacgattcaactcagaaatactttgtgcagctctgtggggtgtaaaccttctggtggggactgaaaatggcctgatgcttttggaccgaagtgggcaaggcaaagtctataatctgatcaaccggaggcgatttcagcagatggatgtgctagagggactgaatgtccttgtgacaatttcaggaaagaagaataagctacgagtttactatctttcatggttaagaaacagaatactacataatgacccagaagtagaaaagaaacaaggctggatcactgttggggacttggaaggctgtatacattataaagttgttaaatatgaaaggatcaaatttttggtgattgccttaaagaatgctgtggaaatatatgcttgggctcctaaaccgtatcataaattcatggcatttaagtcttttgcagatctccagcacaagcctctgctagttgatctcacggtagaagaaggtcaaagattaaaggttatttttggttcacacactggtttccatgtaattgatgttgattcaggaaactcttatgatatctacataccatctcatattcagggcaatatcactcctcatgctattgtcatcttgcctaaaacagatggaatggaaatgcttgtttgctatgaggatgagggggtgtatgtaaacacctatggccggataactaaggatgtggtgctccaatggggagaaatgcccacgtctgtggcctacattcattccaatcagataatgggctggggcgagaaagctattgagatccggtcagtggaaacaggacatttggatggagtatttatgcataagcgagctcaaaggttaaagtttctatgtgaaagaaatgataaggtattttttgcatccgtgcgatctggaggaagtagccaagtgtttttcatgaccctcaacagaaattccatgatgaactggtaa

SEQ ID NO: 31822 - DNA, 3972 bp, Homo sapiens
  source 1..3972: mol_type = unassigned DNA
atggcgagcgactccccggctcgaagcctggatgaaatagatctctcggctctgagggaccccgcagggatctttgaattggtggaacttgttggaaatggaacatacgggcaagtttataagggtcgtcatgtcaaaacgggccagcttgcagccatcaaggttatggatgtcacaggggatgaagaggaagaaatcaaacaagaaattaacatgttgaagaaatattctcatcaccggaatattgctacatactatggtgcttttatcaaaaagaacccaccaggcatggatgaccaactttggttggtgatggagttttgtggtgctggctctgtcaccgacctgatcaagaacacaaaaggtaacacgttgaaagaggagtggattgcatacatctgcagggaaatcttacgggggctgagtcacctgcaccagcataaagtgattcatcgagatattaaagggcaaaatgtcttgctgactgaaaatgcagaagttaaactagtggactttggagtcagtgctcagcttgatcgaacagtgggcaggaggaatactttcattggaactccctactggatggcaccagaagttattgcctgtgatgaaaacccagatgccacatatgatttcaagagtgacttgtggtctttgggtatcaccgccattgaaatggcagaaggtgctccccctctctgtgacatgcaccccatgagagctctcttcctcatcccccggaacccagcgcctcggctgaagtctaagaagtggtcaaaaaaattccagtcatttattgagagctgcttggtaaagaatcacagccagcgaccagcaacagaacaattgatgaagcatccatttatacgagaccaacctaatgagcgacaggtccgcattcaactcaaggaccatattgatagaacaaagaagaagcgaggagaaaaagatgagacagagtatgagtacagtggaagtgaggaagaagaggaggagaatgactcaggagagcccagctccatcctgaatctgccaggggagtcgacgctgcggagggactttctgaggctgcagctggccaacaaggagcgttctgaggccctacggaggcagcagctggagcagcagcagcgggagaatgaggagcacaagcggcagctgctggccgagcgtcagaagcgcatcgaggagcagaaagagcagaggcggcggctggaggagcaacaaaggcgagagaaggagctgcggaagcagcaggagagggagcagcgccggcactatgaggagcagatgcgccgggaggaggagaggaggcgtgcggagcatgaacaggaatataagcgcaaacaattggaagaacagagacaagcagaaagactgcagaggcagctaaagcaagaaagagactacttagtttcccttcagcatcagcggcaggagcagaggcctgtggagaagaagccactgtaccattacaaagaaggaatgagtcctagtgagaagccagcatgggccaaggaggtagaagaacggtcaaggctcaaccggcaaagttcccctgccatgcctcacaaggttgccaacaggatatctgaccccaacctgcccccaaggtcggagtccttcagcattagtggagttcagcctgctcgaacaccccccatgctcagaccagtcgatccccagatcccacatctggtagctgtaaaatcccagggacctgccttgaccgcctcccagtcagtgcacgagcagcccacaaagggcctctctgggtttcaggaggctctgaacgtgacctcccaccgcgtggagatgccacgccagaactcagatcccacctcggaaaatcctcctctccccactcgcattgaaaagtttgaccgaagctcttggttacgacaggaagaagacattccaccaaaggtgcctcaaagaacaacttctatatccccagcattagccagaaagaattctcctgggaatggtagtgctctgggacccagactaggatctcaacccatcagagcaagcaaccctgatctccggagaactgagcccatcttggagagccccttgcagaggaccagcagtggcagttcctccagctccagcacccctagctcccagcccagctcccaaggaggctcccagcctggatcacaagcaggatccagtgaacgcaccagagttcgagccaacagtaagtcagaaggatcacctgtgctcccccatgagcctgcgaaggtgaaaccagaagaatccagggacattacccggcccagtcgaccagctgatctgacggcattagccaaagaactaagagaactccggattgaagaaacaaaccgcccaatgaagaaggtgactgattactcctcctccagtgaggagtcagaaagtagcgaggaagaggaggaagatggagagagcgagacccatgatgggacagtggctgtcagcgacatacccagactgataccaacaggagctccaggcagcaacgagcagtacaatgtgggaatggtggggacgcatgggctggagacctctcatgcggacagtttcagcggcagtatttcaagagaaggaaccttgatgattagagagacgtctggagagaagaagcgatctggccacagtgacagcaatggctttgctggccacatcaacctccctgacctggtgcagcagagccattctccagctggaaccccgactgagggactggggcgcgtctcaacccattcccaggagatggactctgggactgaatatggcatggggagcagcaccaaagcctccttcaccccctttgtggaccccagagtataccagacgtctcccactgatgaagatgaagaggatgaggaatcatcagccgcagctctgtttactagcgaacttcttaggcaagaacaggccaaactcaatgaagcaagaaagatttcggtggtaaatgtaaacccaaccaacattcggcctcatagcgacacaccagaaatcagaaaatacaagaaacgattcaactcagaaatactttgtgcagctctgtggggtgtaaaccttctggtggggactgaaaatggcctgatgcttttggaccgaagtgggcaaggcaaagtctataatctgatcaaccggaggcgatttcagcagatggatgtgctagagggactgaatgtccttgtgacaatttcaggaaagaagaataagctacgagtttactatctttcatggttaagaaacagaatactacataatgacccagaagtagaaaagaaacaaggctggatcactgttggggacttggaaggctgtatacattataaagttgttaaatatgaaaggatcaaatttttggtgattgccttaaagaatgctgtggaaatatatgcttgggctcctaaaccgtatcataaattcatggcatttaagtcttttgcagatctccagcacaagcctctgctagttgatctcacggtagaagaaggtcaaagattaaaggttatttttggttcacacactggtttccatgtaattgatgttgattcaggaaactcttatgatatctacataccatctcatattcagggcaatatcactcctcatgctattgtcatcttgcctaaaacagatggaatggaaatgcttgtttgctatgaggatgagggggtgtatgtaaacacctatggccggataactaaggatgtggtgctccaatggggagaaatgcccacgtctgtggcctacattcattccaatcagataatgggctggggcgagaaagctattgagatccggtcagtggaaacaggacatttggatggagtatttatgcataagcgagctcaaaggttaaagtttctatgtgaaagaaatgataaggtattttttgcatccgtgcgatctggaggaagtagccaagtgtttttcatgaccctcaacagaaattccatgatgaactggtaa

SEQ ID NO: 31823 - DNA, 3807 bp, Homo sapiens
  source 1..3807: mol_type = unassigned DNA
atggcgagcgactccccggctcgaagcctggatgaaatagatctctcggctctgagggaccccgcagggatctttgaattggtggaacttgttggaaatggaacatacgggcaagtttataagggtcgtcatgtcaaaacgggccagcttgcagccatcaaggttatggatgtcacaggggatgaagaggaagaaatcaaacaagaaattaacatgttgaagaaatattctcatcaccggaatattgctacatactatggtgcttttatcaaaaagaacccaccaggcatggatgaccaactttggttggtgatggagttttgtggtgctggctctgtcaccgacctgatcaagaacacaaaaggtaacacgttgaaagaggagtggattgcatacatctgcagggaaatcttacgggggctgagtcacctgcaccagcataaagtgattcatcgagatattaaagggcaaaatgtcttgctgactgaaaatgcagaagttaaactagtggactttggagtcagtgctcagcttgatcgaacagtgggcaggaggaatactttcattggaactccctactggatggcaccagaagttattgcctgtgatgaaaacccagatgccacatatgatttcaagagtgacttgtggtctttgggtatcaccgccattgaaatggcagaaggtgctccccctctctgtgacatgcaccccatgagagctctcttcctcatcccccggaacccagcgcctcggctgaagtctaagaagtggtcaaaaaaattccagtcatttattgagagctgcttggtaaagaatcacagccagcgaccagcaacagaacaattgatgaagcatccatttatacgagaccaacctaatgagcgacaggtccgcattcaactcaaggaccatattgatagaacaaagaagaagcgaggagaaaaagatgagacagagtatgagtacagtggaagtgaggaagaagaggaggagaatgactcaggagagcccagctccatcctgaatctgccaggggagtcgacgctgcggagggactttctgaggctgcagctggccaacaaggagcgttctgaggccctacggaggcagcagctggagcagcagcagcgggagaatgaggagcacaagcggcagctgctggccgagcgtcagaagcgcatcgaggagcagaaagagcagaggcggcggctggaggagcaacaaaggcgagagaaggagctgcggaagcagcaggagagggagcagcgccggcactatgaggagcagatgcgccgggaggaggagaggaggcgtgcggagcatgaacaggaatataagcgcaaacaattggaagaacagagacaagcagaaagactgcagaggcagctaaagcaagaaagagactacttagtttcccttcagcatcagcggcaggagcagaggcctgtggagaagaagccactgtaccattacaaagaaggaatgagtcctagtgagaagccagcatgggccaaggagatcccacatctggtagctgtaaaatcccagggacctgccttgaccgcctcccagtcagtgcacgagcagcccacaaagggcctctctgggtttcaggaggctctgaacgtgacctcccaccgcgtggagatgccacgccagaactcagatcccacctcggaaaatcctcctctccccactcgcattgaaaagtttgaccgaagctcttggttacgacaggaagaagacattccaccaaaggtgcctcaaagaacaacttctatatccccagcattagccagaaagaattctcctgggaatggtagtgctctgggacccagactaggatctcaacccatcagagcaagcaaccctgatctccggagaactgagcccatcttggagagccccttgcagaggaccagcagtggcagttcctccagctccagcacccctagctcccagcccagctcccaaggaggctcccagcctggatcacaagcaggatccagtgaacgcaccagagttcgagccaacagtaagtcagaaggatcacctgtgctcccccatgagcctgcgaaggtgaaaccagaagaatccagggacattacccggcccagtcgaccagctgatctgacggcattagccaaagaactaagagaactccggattgaagaaacaaaccgcccaatgaagaaggtgactgattactcctcctccagtgaggagtcagaaagtagcgaggaagaggaggaagatggagagagcgagacccatgatgggacagtggctgtcagcgacatacccagactgataccaacaggagctccaggcagcaacgagcagtacaatgtgggaatggtggggacgcatgggctggagacctctcatgcggacagtttcagcggcagtatttcaagagaaggaaccttgatgattagagagacgtctggagagaagaagcgatctggccacagtgacagcaatggctttgctggccacatcaacctccctgacctggtgcagcagagccattctccagctggaaccccgactgagggactggggcgcgtctcaacccattcccaggagatggactctgggactgaatatggcatggggagcagcaccaaagcctccttcaccccctttgtggaccccagagtataccagacgtctcccactgatgaagatgaagaggatgaggaatcatcagccgcagctctgtttactagcgaacttcttaggcaagaacaggccaaactcaatgaagcaagaaagatttcggtggtaaatgtaaacccaaccaacattcggcctcatagcgacacaccagaaatcagaaaatacaagaaacgattcaactcagaaatactttgtgcagctctgtggggtgtaaaccttctggtggggactgaaaatggcctgatgcttttggaccgaagtgggcaaggcaaagtctataatctgatcaaccggaggcgatttcagcagatggatgtgctagagggactgaatgtccttgtgacaatttcaggaaagaagaataagctacgagtttactatctttcatggttaagaaacagaatactacataatgacccagaagtagaaaagaaacaaggctggatcactgttggggacttggaaggctgtatacattataaagttgttaaatatgaaaggatcaaatttttggtgattgccttaaagaatgctgtggaaatatatgcttgggctcctaaaccgtatcataaattcatggcatttaagtcttttgcagatctccagcacaagcctctgctagttgatctcacggtagaagaaggtcaaagattaaaggttatttttggttcacacactggtttccatgtaattgatgttgattcaggaaactcttatgatatctacataccatctcatattcagggcaatatcactcctcatgctattgtcatcttgcctaaaacagatggaatggaaatgcttgtttgctatgaggatgagggggtgtatgtaaacacctatggccggataactaaggatgtggtgctccaatggggagaaatgcccacgtctgtggcctacattcattccaatcagataatgggctggggcgagaaagctattgagatccggtcagtggaaacaggacatttggatggagtatttatgcataagcgagctcaaaggttaaagtttctatgtgaaagaaatgataaggtattttttgcatccgtgcgatctggaggaagtagccaagtgtttttcatgaccctcaacagaaattccatgatgaactggtaa

SEQ ID NO: 31824 - DNA, 3918 bp, Homo sapiens
  source 1..3918: mol_type = unassigned DNA
atggcgagcgactccccggctcgaagcctggatgaaatagatctctcggctctgagggaccccgcagggatctttgaattggtggaacttgttggaaatggaacatacgggcaagtttataagggtcgtcatgtcaaaacgggccagcttgcagccatcaaggttatggatgtcacaggggatgaagaggaagaaatcaaacaagaaattaacatgttgaagaaatattctcatcaccggaatattgctacatactatggtgcttttatcaaaaagaacccaccaggcatggatgaccaactttggttggtgatggagttttgtggtgctggctctgtcaccgacctgatcaagaacacaaaaggtaacacgttgaaagaggagtggattgcatacatctgcagggaaatcttacgggggctgagtcacctgcaccagcataaagtgattcatcgagatattaaagggcaaaatgtcttgctgactgaaaatgcagaagttaaactagtggactttggagtcagtgctcagcttgatcgaacagtgggcaggaggaatactttcattggaactccctactggatggcaccagaagttattgcctgtgatgaaaacccagatgccacatatgatttcaagagtgacttgtggtctttgggtatcaccgccattgaaatggcagaaggtgctccccctctctgtgacatgcaccccatgagagctctcttcctcatcccccggaacccagcgcctcggctgaagtctaagaagtggtcaaaaaaattccagtcatttattgagagctgcttggtaaagaatcacagccagcgaccagcaacagaacaattgatgaagcatccatttatacgagaccaacctaatgagcgacaggtccgcattcaactcaaggaccatattgatagaacaaagaagaagcgaggagaaaaagatgagacagagtatgagtacagtggaagtgaggaagaagaggaggagaatgactcaggagagcccagctccatcctgaatctgccaggggagtcgacgctgcggagggactttctgaggctgcagctggccaacaaggagcgttctgaggccctacggaggcagcagctggagcagcagcagcgggagaatgaggagcacaagcggcagctgctggccgagcgtcagaagcgcatcgaggagcagaaagagcagaggcggcggctggaggagcaacaaaggcgagagaaggagctgcggaagcagcaggagagggagcagcgccggcactatgaggagcagatgcgccgggaggaggagaggaggcgtgcggagcatgaacaggaatacatcaggcgacagttagaggaggagcagagacagttagagatcttgcagcagcagctactgcatgaacaagctctacttctggaatataagcgcaaacaattggaagaacagagacaagcagaaagactgcagaggcagctaaagcaagaaagagactacttagtttcccttcagcatcagcggcaggagcagaggcctgtggagaagaagccactgtaccattacaaagaaggaatgagtcctagtgagaagccagcatgggccaaggagatcccacatctggtagctgtaaaatcccagggacctgccttgaccgcctcccagtcagtgcacgagcagcccacaaagggcctctctgggtttcaggaggctctgaacgtgacctcccaccgcgtggagatgccacgccagaactcagatcccacctcggaaaatcctcctctccccactcgcattgaaaagtttgaccgaagctcttggttacgacaggaagaagacattccaccaaaggtgcctcaaagaacaacttctatatccccagcattagccagaaagaattctcctgggaatggtagtgctctgggacccagactaggatctcaacccatcagagcaagcaaccctgatctccggagaactgagcccatcttggagagccccttgcagaggaccagcagtggcagttcctccagctccagcacccctagctcccagcccagctcccaaggaggctcccagcctggatcacaagcaggatccagtgaacgcaccagagttcgagccaacagtaagtcagaaggatcacctgtgctcccccatgagcctgcgaaggtgaaaccagaagaatccagggacattacccggcccagtcgaccagctagctacaaaaaagctatagatgaggatctgacggcattagccaaagaactaagagaactccggattgaagaaacaaaccgcccaatgaagaaggtgactgattactcctcctccagtgaggagtcagaaagtagcgaggaagaggaggaagatggagagagcgagacccatgatgggacagtggctgtcagcgacatacccagactgataccaacaggagctccaggcagcaacgagcagtacaatgtgggaatggtggggacgcatgggctggagacctctcatgcggacagtttcagcggcagtatttcaagagaaggaaccttgatgattagagagacgtctggagagaagaagcgatctggccacagtgacagcaatggctttgctggccacatcaacctccctgacctggtgcagcagagccattctccagctggaaccccgactgagggactggggcgcgtctcaacccattcccaggagatggactctgggactgaatatggcatggggagcagcaccaaagcctccttcaccccctttgtggaccccagagtataccagacgtctcccactgatgaagatgaagaggatgaggaatcatcagccgcagctctgtttactagcgaacttcttaggcaagaacaggccaaactcaatgaagcaagaaagatttcggtggtaaatgtaaacccaaccaacattcggcctcatagcgacacaccagaaatcagaaaatacaagaaacgattcaactcagaaatactttgtgcagctctgtggggtgtaaaccttctggtggggactgaaaatggcctgatgcttttggaccgaagtgggcaaggcaaagtctataatctgatcaaccggaggcgatttcagcagatggatgtgctagagggactgaatgtccttgtgacaatttcaggaaagaagaataagctacgagtttactatctttcatggttaagaaacagaatactacataatgacccagaagtagaaaagaaacaaggctggatcactgttggggacttggaaggctgtatacattataaagttgttaaatatgaaaggatcaaatttttggtgattgccttaaagaatgctgtggaaatatatgcttgggctcctaaaccgtatcataaattcatggcatttaagtcttttgcagatctccagcacaagcctctgctagttgatctcacggtagaagaaggtcaaagattaaaggttatttttggttcacacactggtttccatgtaattgatgttgattcaggaaactcttatgatatctacataccatctcatattcagggcaatatcactcctcatgctattgtcatcttgcctaaaacagatggaatggaaatgcttgtttgctatgaggatgagggggtgtatgtaaacacctatggccggataactaaggatgtggtgctccaatggggagaaatgcccacgtctgtggcctacattcattccaatcagataatgggctggggcgagaaagctattgagatccggtcagtggaaacaggacatttggatggagtatttatgcataagcgagctcaaaggttaaagtttctatgtgaaagaaatgataaggtattttttgcatccgtgcgatctggaggaagtagccaagtgtttttcatgaccctcaacagaaattccatgatgaactggtaa

SEQ ID NO: 31825 - DNA, 5662 bp, Homo sapiens
  source 1..5662: mol_type = unassigned DNA
attataacagccaatgcagccgccatccacgcacaagcaaagaagcatgtcccatttaaatacacccacgcagccccagcgcccttagccgatcggggcgctcagcccacacgcaccgctgctcggggcttggagatccgcgcaggctgggctcccggacccggcggaccgacgcgcggaggatcgggatccggcgctgtggggctggggtgggcgggggaggctgggcccggggcctctggcgcgacacccgcatgaggacgcgagtgaaatagaccaaggtggaatttccaagggaaaagcttcggggtggttttggtccatttctccagcgaagaagtagacatggcgagcgactccccggctcgaagcctggatgaaatagatctctcggctctgagggaccccgcagggatctttgaattggtggaacttgttggaaatggaacatacgggcaagtttataagggtcgtcatgtcaaaacgggccagcttgcagccatcaaggttatggatgtcacaggggatgaagaggaagaaatcaaacaagaaattaacatgttgaagaaatattctcatcaccggaatattgctacatactatggtgcttttatcaaaaagaacccaccaggcatggatgaccaactttggttggtgatggagttttgtggtgctggctctgtcaccgacctgatcaagaacacaaaaggtaacacgttgaaagaggagtggattgcatacatctgcagggaaatcttacgggggctgagtcacctgcaccagcataaagtgattcatcgagatattaaagggcaaaatgtcttgctgactgaaaatgcagaagttaaaatagtggactttggagtcagtgctcagcttgatcgaacagtgggcaggaggaatactttcattggaactccctactggatggcaccagaagttattgcctgtgatgaaaacccagatgccacatatgatttcaagagtgacttgtggtctttgggtatcaccgccattgaaatggcagaaggtgctccccctctctgtgacatgcaccccatgagagctctcttcctcatcccccggaacccagcgcctcggctgaagtctaagaagtggtcaaaaaaattccagtcatttattgagagctgcttggtaaagaatcacagccagcgaccagcaacagaacaattgatgaagcatccatttatacgagaccaacctaatgagcgacaggtccgcattcaactcaaggaccatattgatagaacaaagaagaagcgaggagaaaaagatgagacagagtatgagtacagtggaagtgaggaagaagaggaggagaatgactcaggagagcccagctccatcctgaatctgccaggggagtcgacgctgcggagggactttctgaggctgcagctggccaacaaggagcgttctgaggccctacggaggcagcagctggagcagcagcagcgggagaatgaggagcacaagcggcagctgctggccgagcgtcagaagcgcatcgaggagcagaaagagcagaggcggcggctggaggagcaacaaaggcgagagaaggagctgcggaagcagcaggagagggagcagcgccggcactatgaggagcagatgcgccgggaggaggagaggaggcgtgcggagcatgaacaggaatacatcaggcgacagttagaggaggagcagagacagttagagatcttgcagcagcagctactgcatgaacaagctctacttctggaatataagcgcaaacaattggaagaacagagacaagcagaaagactgcagaggcagctaaagcaagaaagagactacttagtttcccttcagcatcagcggcaggagcagaggcctgtggagaagaagccactgtaccattacaaagaaggaatgagtcctagtgagaagccagcatgggccaaggagatcccacatctggtagctgtaaaatcccagggacctgccttgaccgcctcccagtcagtgcacgagcagcccacaaagggcctctctgggtttcaggaggctctgaacgtgacctcccaccgcgtggagatgccacgccagaactcagatcccacctcggaaaatcctcctctccccactcgcattgaaaagtttgaccgaagctcttggttacgacaggaagaagacattccaccaaaggtgcctcaaagaacaacttctatatccccagcattagccagaaagaattctcctgggaatggtagtgctctgggacccagactaggatctcaacccatcagagcaagcaaccctgatctccggagaactgagcccatcttggagagccccttgcagaggaccagcagtggcagttcctccagctccagcacccctagctcccagcccagctcccaaggaggctcccagcctggatcacaagcaggatccagtgaacgcaccagagttcgagccaacagtaagtcagaaggatcacctgtgctcccccatgagcctgcgaaggtgaaaccagaagaatccagggacattacccggcccagtcgaccagctgtgagtgcttttctctccaagagttttgaactcttaatttaccaggatctgacggcattagccaaagaactaagagaactccggattgaagaaacaaaccgcccaatgaagaaggtgactgattactcctcctccagtgaggagtcagaaagtagcgaggaagaggaggaagatggagagagcgagacccatgatgggacagtggctgtcagcgacatacccagactgataccaacaggagctccaggcagcaacgagcagtacaatgtgggaatggtggggacgcatgggctggagacctctcatgcggacagtttcagcggcagtatttcaagagaaggaaccttgatgattagagagacgtctggagagaagaagcgatctggccacagtgacagcaatggctttgctggccacatcaacctccctgacctggtgcagcagagccattctccagctggaaccccgactgagggactggggcgcgtctcaacccattcccaggagatggactctgggactgaatatggcatggggagcagcaccaaagcctccttcaccccctttgtggaccccagagtataccagacgtctcccactgatgaagatgaagaggatgaggaatcatcagccgcagctctgtttactagcgaacttcttaggcaagaacaggccaaactcaatgaagcaagaaagatttcggtggtaaatgtaaacccaaccaacattcggcctcatagcgacacaccagaaatcagaaaatacaagaaacgattcaactcagaaatactttgtgcagctctgtggggtgtaaaccttctggtggggactgaaaatggcctgatgcttttggaccgaagtgggcaaggcaaagtctataatctgatcaaccggaggcgatttcagcagatggatgtgctagagggactgaatgtccttgtgacaatttcaggaaagaagaataagctacgagtttactatctttcatggttaagaaacagaatactacataatgacccagaagtagaaaagaaacaaggctggatcactgttggggacttggaaggctgtatacattataaagttgttaaatatgaaaggatcaaatttttggtgattgccttaaagaatgctgtggaaatatatgcttgggctcctaaaccgtatcataaattcatggcatttaagtcttttgcagatctccagcacaagcctctgctagttgatctcacggtagaagaaggtcaaagattaaaggttatttttggttcacacactggtttccatgtaattgatgttgattcaggaaactcttatgatatctacataccatctcatattcagggcaatatcactcctcatgctattgtcatcttgcctaaaacagatggaatggaaatgcttgtttgctatgaggatgagggggtgtatgtaaacacctatggccggataactaaggatgtggtgctccaatggggagaaatgcccacgtctgtggcctacattcattccaatcagataatgggctggggcgagaaagctattgagatccggtcagtggaaacaggacatttggatggagtatttatgcataagcgagctcaaaggttaaagtttctatgtgaaagaaatgataaggtattttttgcatccgtgcgatctggaggaagtagccaagtgtttttcatgaccctcaacagaaattccatgatgaactggtaacagaagagcacttggcacttatcttcatggcgttatttctaatttaaaagaacataactcatgtggacttatgccagtctagaggcagaatcagaaggcttggttgaacatatcgctttccctttttcctctccctccgcccctcccagtacagtccatctttcaatgttgcagcctggttgagaaggagagaaaaaggtggcaggaatttccaggagatccccaagaatgctgccttgtctgtggacaaagatggaccatgtgcccttcggaattagggatagaaacaaatattgtgtgctcttaacgattaagctgtgttatggtgggttttcaggtttttaccttttttctttacccctttactctgcaagaatggggaaagaatgcatactgcgaaaatgagtcttttaaattctgtctgcctactagttttaagtatatggtatgttgtaaaatttccaatgatgagagacagcacaataaatgtaccttatctccttaggctgaaggccataactacatagtggagtaatttaagaactctcttgccttcaccaacccaaaaggttgctttttgatagcaactggctaatgaatttttaaaaagagaagaaaaatactagttttcccctcttttgggaaatagattttaaatggctaaactactagccttaaaactactagtctaataaaatcaactaccacttttgtgaatctgacaggccacatttttatatggccctttacagaatggagtgtgttgaacaggatactaacgccattgagttgagctggcctagcgatggagggacactctaacacaactttccctcagctattatgcaacagatcagggaaaaagatgggatgacagatggggtcagacagaaagagcttctgggaaacaagcttacatagtcttttttaaaatgcacaaagcctcccagctaagaggtcacttggtttgggcttcattaggactgagactttgttgagttctttctgggacttggagagtggatgatattcaggctctgaacattcccagcgctctcccgagggtgccactttctcaagatgaaaactgtgactgaaaaaattaataataaatgtttctgagctgcctgtgttctccctgtgtgggtgagagaagggactagactcctaagcctgcctcagatacaagaggcatcattggctccaattttagagaacttgaaagcaaggctttggacaaaattttgagaccctaatcactttaccttcctccaaattacccaacatacggtaaacaacatttgtgcagaagtatgtatgtatttagttcaggttgacttgtgtccttataaactcttactcaaatgatttgaacttt

SEQ ID NO: 31826 - DNA, 2785 bp, Homo sapiens
  source 1..2785: mol_type = unassigned DNA
cggcaatgctgatgttttaagcagttagaggaggtggaagaagctcgactccctcttcttccccattatctgcccacaatcccctcctttggagctgctaatgattactaattcttaacattcgagttcaatctcctcccggagacaccctcccaggcgagggcactgcgactacactgaggttctgcccactcctgggcagcttcttagctgggtggcgaaaacaaaaatgccgcctaattggtcactggccctttctcatgaatgaaggaggtttctgttttaagaaataaagtgactcctcagccgttgattcactgcccacagggagattttgagcagaggcttcctaggctccgtagaaatttgcatacagcttccacttcctgcttcagagcctgttcttctacttacctgggcccggagaaggtggagggagacgagaagccgccgagagccgactaccctccgggcccagtctgtctgtccgtggtggatctaagcctcatctgtatcctcttgtgatggcgtgaaggaaagccatggcagatttccagcctggtgatgctgtacagaacacaggtggcctgcttccatgcctcctcagcttcaagaaactagaatgaaccgaagcattcctgtggaggttgatgaatcagaaccatacccaagtcagttgctgaaaccaatcccagaatattccccggaagaggaatcagaaccacctgctccaaatataaggaacatggcacccaacagcttgtctgcacccacaatgcttcacaattcctccggagacttttctcaagctcactcaaccctgaaacttgcaaatcaccagcggcctgtatcccggcaggtcacctgcctgcgcactcaagttctggaggacagtgaagacagtttctgcaggagacacccaggcctgggcaaagctttcccttctgggtgctctgcagtcagcgagcctgcgtctgagtctgtggttggagccctccctgcagagcatcagttttcatttatggaaaaacgtaatcaatggctggtatctcagctttcagcggcttctcctgacactggccatgactcagacaaatcagaccaaagtttacctaatgcctcagcagactccttgggcggtagccaggagatggtgcaacggccccagcctcacaggaaccgagcaggcctggatctgccaaccatagacacgggatatgattcccagccccaggatgtcctgggcatcaggcagctggaaaggcccctgcccctcacctccgtgtgttacccccaggacctccccagacctctcaggtccagggagttccctcagtttgaacctcagaggtatccagcatgtgcacagatgctgcctcccaatctttccccacatgctccatggaactatcattaccattgtcctggaagtcccgatcaccaggtgccatatggccatgactaccctcgagcagcctaccagcaagtgatccagccggctctgcctgggcagcccctgcctggagccagtgtgagaggcctgcaccctgtgcagaaggttatcctgaattatcccagcccctgggaccacgaagagaggcccgcacagagagactgctcctttccggggcttccaaggcaccaggaccagccacatcaccagccacctaatagagctggtgctcctggggagtccttggagtgccctgcagagctgagaccacaggttccccagcctccgtccccagctgctgtgcctagaccccctagcaaccctccagccagaggaactctaaaaacaagcaatttgccagaagaattgcggaaagtctttatcacttattcgatggacacagctatggaggtggtgaaattcgtgaactttttgttggtaaatggcttccaaactgcaattgacatatttgaggatagaatccgaggcattgatatcattaaatggatggagcgctaccttagggataagaccgtgatgataatcgtagcaatcagccccaaatacaaacaggacgtggaaggcgctgagtcgcagctggacgaggatgagcatggcttacatactaagtacattcatcgaatgatgcagattgagttcataaaacaaggaagcatgaatttcagattcatccctgtgctcttcccaaatgctaagaaggagcatgtgcccacctggcttcagaacactcatgtctacagctggcccaagaataaaaaaaacatcctgctgcggctgctgagagaggaagagtatgtggctcctccacgggggcctctgcccacccttcaggtggttcccttgtgacaccgttcatccccagatcactgaggccaggccatgtttggggccttgttctgacagcattctggctgaggctggtcggtagcactcctggctggtttttttctgttcctccccgagaggccctctggcccccaggaaacctgttgtgcagagctcttccccggagacctccacacaccctggctttgaagtggagtctgtgactgctctgcattctctgcttttaaaaaaaccattgcaggtgccagtgtcccatatgttcctcctgacagtttgatgtgtccattctgggcctctcagtgcttagcaagtagataatgtaagggatgtggcagcaaatggaaatgactacaaacactctcctatcaatcacttcaggctacttttatgagttagccagatgcttgtgtatcctcagaccaaactgattcatgtacaaataataaaatgtttactcttttgtaa

SEQ ID NO: 31827 - DNA, 2264 bp, Homo sapiens
  source 1..2264: mol_type = unassigned DNA
tacttacctgggcccggagaaggtggagggagacgagaagccgccgagagccgactaccctccgggcccagtctgtctgtccgtggtggatctaagaaactagaatgaaccgaagcattcctgtggaggttgatgaatcagaaccatacccaagtcagttgctgaaaccaatcccagaatattccccggaagaggaatcagaaccacctgctccaaatataaggaacatggcacccaacagcttgtctgcacccacaatgcttcacaattcctccggagacttttctcaagctcactcaaccctgaaacttgcaaatcaccagcggcctgtatcccggcaggtcacctgcctgcgcactcaagttctggaggacagtgaagacagtttctgcaggagacacccaggcctgggcaaagctttcccttctgggtgctctgcagtcagcgagcctgcgtctgagtctgtggttggagccctccctgcagagcatcagttttcatttatggaaaaacgtaatcaatggctggtatctcagctttcagcggcttctcctgacactggccatgactcagacaaatcagaccaaagtttacctaatgcctcagcagactccttgggcggtagccaggagatggtgcaacggccccagcctcacaggaaccgagcaggcctggatctgccaaccatagacacgggatatgattcccagccccaggatgtcctgggcatcaggcagctggaaaggcccctgcccctcacctccgtgtgttacccccaggacctccccagacctctcaggtccagggagttccctcagtttgaacctcagaggtatccagcatgtgcacagatgctgcctcccaatctttccccacatgctccatggaactatcattaccattgtcctggaagtcccgatcaccaggtgccatatggccatgactaccctcgagcagcctaccagcaagtgatccagccggctctgcctgggcagcccctgcctggagccagtgtgagaggcctgcaccctgtgcagaaggttatcctgaattatcccagcccctgggaccacgaagagaggcccgcacagagagactgctcctttccggggcttccaaggcaccaggaccagccacatcaccagccacctaatagagctggtgctcctggggagtccttggagtgccctgcagagctgagaccacaggttccccagcctccgtccccagctgctgtgcctagaccccctagcaaccctccagccagaggaactctaaaaacaagcaatttgccagaagaattgcggaaagtctttatcacttattcgatggacacagctatggaggtggtgaaattcgtgaactttttgttggtaaatggcttccaaactgcaattgacatatttgaggatagaatccgaggcattgatatcattaaatggatggagcgctaccttagggataccgtgatgataatcgtagcaatcagccccaaatacaaacaggacgtggaaggcgctgagtcgcagctggacgaggatgagcatggcttacatactaagtacattcatcgaatgatgcagattgagttcataaaacaaggaagcatgaatttcagattcatccctgtgctcttcccaaatgctaagaaggagcatgtgcccacctggcttcagaacactcatgtctacagctggcccaagaataaaaaaaacatcctgctgcggctgctgagagaggaagagtatgtggctcctccacgggggcctctgcccacccttcaggtggttcccttgtgacaccgttcatccccagatcactgaggccaggccatgtttggggccttgttctgacagcattctggctgaggctggtcggtagcactcctggctggtttttttctgttcctccccgagaggccctctggcccccaggaaacctgttgtgcagagctcttccccggagacctccacacaccctggctttgaagtggagtctgtgactgctctgcattctctgcttttaaaaaaaccattgcaggtgccagtgtcccatatgttcctcctgacagtttgatgtgtccattctgggcctctcagtgcttagcaagtagataatgtaagggatgtggcagcaaatggaaatgactacaaacactctcctatcaatcacttcaggctacttttatgagttagccagatgcttgtgtatcctcagaccaaactgattcatgtacaaataataaaatgtttactcttttgtaa

SEQ ID NO: 31828 - DNA, 5128 bp, Homo sapiens
  source 1..5128: mol_type = unassigned DNA
ggtggaagaagctcgactccctcttcttccccattatctgcccacaatcccctcctttggagctgctaatgattactaattcttaacattcgagttcaatctcctcccggagacaccctcccaggcgagggcactgcgactacactgaggttctgcccactcctgggcagcttcttagctgggtggcgaaaacaaaaatgccgcctaattggtcactggccctttctcatgaatgaaggaggtttctgttttaagaaataaagtgactcctcagccgttgattcactgcccacagggagattttgagcagaggcttcctaggctccgtagaaatttgcatacagcttccacttcctgcttcagagcctgttcttctacttacctgggcccggagaaggtggagggagacgagaagccgccgagagccgactaccctccgggcccagtctgtctgtccgtggtggatctaagaaactagaatgaaccgaagcattcctgtggaggttgatgaatcagaaccatacccaagtcagttgctgaaaccaatcccagaatattccccggaagaggaatcagaaccacctgctccaaatataaggaacatggcacccaacagcttgtctgcacccacaatgcttcacaattcctccggagacttttctcaagctcactcaaccctgaaacttgcaaatcaccagcggcctgtatcccggcaggtcacctgcctgcgcactcaagttctggaggacagtgaagacagtttctgcaggagacacccaggcctgggcaaagctttcccttctgggtgctctgcagtcagcgagcctgcgtctgagtctgtggttggagccctccctgcagagcatcagttttcatttatggaaaaacgtaatcaatggctggtatctcagctttcagcggcttctcctgacactggccatgactcagacaaatcagaccaaagtttacctaatgcctcagcagactccttgggcggtagccaggagatggtgcaacggccccagcctcacaggaaccgagcaggcctggatctgccaaccatagacacgggatatgattcccagccccaggatgtcctgggcatcaggcagctggaaaggcccctgcccctcacctccgtgtgttacccccaggacctccccagacctctcaggtccagggagttccctcagtttgaacctcagaggtatccagcatgtgcacagatgctgcctcccaatctttccccacatgctccatggaactatcattaccattgtcctggaagtcccgatcaccaggtgccatatggccatgactaccctcgagcagcctaccagcaagtgatccagccggctctgcctgggcagcccctgcctggagccagtgtgagaggcctgcaccctgtgcagaaggttatcctgaattatcccagcccctgggaccacgaagagaggcccgcacagagagactgctcctttccggggcttccaaggcaccaggaccagccacatcaccagccacctaatagagctggtgctcctggggagtccttggagtgccctgcagagctgagaccacaggttccccagcctccgtccccagctgctgtgcctagaccccctagcaaccctccagccagaggaactctaaaaacaagcaatttgccagaagaattgcggaaagtctttatcacttattcgatggacacagctatggaggtggtgaaattcgtgaactttttgttggtaaatggcttccaaactgcaattgacatatttgaggatagaatccgaggcattgatatcattaaatggatggagcgctaccttagggataagaccgtgatgataatcgtagcaatcagccccaaatacaaacaggacgtggaaggcgctgagtcgcagctggacgaggatgagcatggcttacatactaagtacattcatcgaatgatgcagattgagttcataaaacaaggaagcatgaatttcagattcatccctgtgctcttcccaaatgctaagaaggagcatgtgcccacctggcttcagaacactcatgtctacagctggcccaagaataaaaaaaacatcctgctgcggctgctgagagaggaagagtatgtggctcctccacgggggcctctgcccacccttcaggtggttcccttgtgacaccgttcatccccagatcactgaggccaggccatgtttggggccttgttctgacagcattctggctgaggctggtcggtagcactcctggctggtttttttctgttcctccccgagaggccctctggcccccaggaaacctgttgtgcagagctcttccccggagacctccacacaccctggctttgaagtggagtctgtgactgctctgcattctctgcttttaaaaaaaccattgcaggtgccagtgtcccatatgttcctcctgacagtttgatgtgtccattctgggcctctcagtgcttagcaagtagataatgtaagggatgtggcagcaaatggaaatgactacaaacactctcctatcaatcacttcaggctacttttatgagttagccagatgcttgtgtatcctcagaccaaactgattcatgtacaaataataaaatgtttactcttttgtaagattatgttttacttatctcaaaggagatacatataatttataatgatatgggcagttgcttccagggacatcaacaaagctgcttagatataatattagataaatataacagaccactctgtattaatggattaaagccagctagttaaacaaccctttttaaccataatcatggaagctttattcttgcaataaagatttttaggctgggcgcagtgactcacacctgtaatcccagcactttgggaagctaaggcaggcagatcatttgaggtcaggagtttgagaccagcctggccaacatggtgaaaccccatctctgctaaaattacaaaaaagttagccgggcatggtggtgtgcacctgtaatcccagctactcgggaggctgaggcaggagaatcacttgaacccgggaggcagaggttgcagtgagccgagatcatgtcactgcactctagcttgggagacagagcgagactccgtctcaaaaaacaaacaaacaaataaaaacacccatttttaacaaaacaactttatatagcatacagccatgattctaaatagtatgattatggttctcaggatctgactacataggtaaaaatatttgcatatgtgtatgaagtgttgggggatgtaggctagaattgtagtctgtgttctaattttggttctaccaccaattagctgtatgacctttagcaagtcctttaacttttcttagattccagggactcatttataaaatgacatggacaaaagcatctctaatcactctaaaagatttgaagtctaggacctaaattctaaatactcttttgaggagtgactgagttttcattttcataattatgtctctcagaggacaaatttacattttcttaacagagacattttcttcttctttttttttgtttgagacagagtctcgctctgtcgtccaggctggagtgcagtgctgcaatcttggctcactgcaacctgcgcctcctgggttcaagtgattcttctgcctcaacctcccaagtagctagacctataggcgcctgccaccatgcccagctaatttttgtatttttagtagagacagggtttcatattggccagactggtctcgaactcctgaccttgtgatccgcccacctcggcctcccaaagtgctgggattacaggtgtgagccaccacacccagccaacattttcctcttttaaaaaatatcttctcacgcctgtaatcccagcactttgggaggctgaggcaggcggatcatgaggtcaggagatcaagaccatcctggctaacacggtgaaactccatctctactaaaaatacaaaaaaaatagccgggcgtggtggcaggcgcctgtagtcccagctactggggaggctgaggcaggaaaatggtgtcaacccgggaggcggagcttgcagtgagccgagattgcgccactgcactccagcctgggcaatagagtgagactccgtctcaaaaaaaaaaaaaaaaaaaaaaacttcaacaataccctcaggttgataattttggatatctatctgtatctatatatcttgtttacctggtctccagaaaaagaacacatacacatatccatatataaaatatgtatacatgtatcaaatctacgtaaactataaaggtgggatggctttaattatggcccaagctactaagacaatgaagactttttggggctgcaagctactgcttcccttctttatctactagcctcttaaacaaggctcacttgtgctacaagacagtccaccgttttgttttttttttcttttttttgagacagggtctcactctttcccaggctgcagtacagtgacacagtctcagctcactgcagctttgaccttgccgggctcaggtgacccttacacttcagcctcccaagtagcagggactataggtgtgcaccaacatgcttggttaatttttgtattttttgtagagacagggttttgccatgttgtccaggctagtctcgaattcctgggctcaagtgattcacctgccttggcctcccaaagtgctaggattacagatgggagccaccacgcccagcccagtccagctcttatatgtagcacagggaaaggacaaatacttgtcaactataaataagaaacattgctaatgcattgcaaagaacactagtttcatttactttataacttagatgtctactgggtgagacgaatgtctttgttctttaaaaaataggaaaagagaagaaaaactagcataacataagtactcatttgtaagactttctgacatgtaacattagttccgtagttttgagacctggtagaactgactttcatatttggataacctggaaaacacccaaacacaaacttcaagtcttctttctcttttttcattatcttttttagtctgaggtgacaccatcattaaggattcgacacccgtttgtaaataaaatgacatcag

SEQ ID NO: 31829 - DNA, 4676 bp, Homo sapiens
  source 1..4676: mol_type = unassigned DNA
atggctcctcagctagaagaaactagaatgaaccgaagcattcctgtggaggttgatgaatcagaaccatacccaagtcagttgctgaaaccaatcccagaatattccccggaagaggaatcagaaccacctgctccaaatataaggaacatggcacccaacagcttgtctgcacccacaatgcttcacaattcctccggagacttttctcaagctcactcaaccctgaaacttgcaaatcaccagcggcctgtatcccggcaggtcacctgcctgcgcactcaagttctggaggacagtgaagacagtttctgcaggagacacccaggcctgggcaaagctttcccttctgggtgctctgcagtcagcgagcctgcgtctgagtctgtggttggagccctccctgcagagcatcagttttcatttatggaaaaacgtaatcaatggctggtatctcagctttcagcggcttctcctgacactggccatgactcagacaaatcagaccaaagtttacctaatgcctcagcagactccttgggcggtagccaggagatggtgcaacggccccagcctcacaggaaccgagcaggcctggatctgccaaccatagacacgggatatgattcccagccccaggatgtcctgggcatcaggcagctggaaaggcccctgcccctcacctccgtgtgttacccccaggacctccccagacctctcaggtccagggagttccctcagtttgaacctcagaggtatccagcatgtgcacagatgctgcctcccaatctttccccacatgctccatggaactatcattaccattgtcctggaagtcccgatcaccaggtgccatatggccatgactaccctcgagcagcctaccagcaagtgatccagccggctctgcctgggcagcccctgcctggagccagtgtgagaggcctgcaccctgtgcagaaggttatcctgaattatcccagcccctgggaccacgaagagaggcccgcacagagagactgctcctttccggggcttccaaggcaccaggaccagccacatcaccagccacctaatagagctggtgctcctggggagtccttggagtgccctgcagagctgagaccacaggttccccagcctccgtccccagctgctgtgcctagaccccctagcaaccctccagccagaggaactctaaaaacaagcaatttgccagaagaattgcggaaagtctttatcacttattcgatggacacagctatggaggtggtgaaattcgtgaactttttgttggtaaatggcttccaaactgcaattgacatatttgaggatagaatccgaggcattgatatcattaaatggatggagcgctaccttagggataagaccgtgatgataatcgtagcaatcagccccaaatacaaacaggacgtggaaggcgctgagtcgcagctggacgaggatgagcatggcttacatactaagtacattcatcgaatgatgcagattgagttcataaaacaaggaagcatgaatttcagattcatccctgtgctcttcccaaatgctaagaaggagcatgtgcccacctggcttcagaacactcatgtctacagctggcccaagaataaaaaaaacatcctgctgcggctgctgagagaggaagagtatgtggctcctccacgggggcctctgcccacccttcaggtggttcccttgtgacaccgttcatccccagatcactgaggccaggccatgtttggggccttgttctgacagcattctggctgaggctggtcggtagcactcctggctggtttttttctgttcctccccgagaggccctctggcccccaggaaacctgttgtgcagagctcttccccggagacctccacacaccctggctttgaagtggagtctgtgactgctctgcattctctgcttttaaaaaaaccattgcaggtgccagtgtcccatatgttcctcctgacagtttgatgtgtccattctgggcctctcagtgcttagcaagtagataatgtaagggatgtggcagcaaatggaaatgactacaaacactctcctatcaatcacttcaggctacttttatgagttagccagatgcttgtgtatcctcagaccaaactgattcatgtacaaataataaaatgtttactcttttgtaagattatgttttacttatctcaaaggagatacatataatttataatgatatgggcagttgcttccagggacatcaacaaagctgcttagatataatattagataaatataacagaccactctgtattaatggattaaagccagctagttaaacaaccctttttaaccataatcatggaagctttattcttgcaataaagatttttaggctgggcgcagtgactcacacctgtaatcccagcactttgggaagctaaggcaggcagatcatttgaggtcaggagtttgagaccagcctggccaacatggtgaaaccccatctctgctaaaattacaaaaaagttagccgggcatggtggtgtgcacctgtaatcccagctactcgggaggctgaggcaggagaatcacttgaacccgggaggcagaggttgcagtgagccgagatcatgtcactgcactctagcttgggagacagagcgagactccgtctcaaaaaacaaacaaacaaataaaaacacccatttttaacaaaacaactttatatagcatacagccatgattctaaatagtatgattatggttctcaggatctgactacataggtaaaaatatttgcatatgtgtatgaagtgttgggggatgtaggctagaattgtagtctgtgttctaattttggttctaccaccaattagctgtatgacctttagcaagtcctttaacttttcttagattccagggactcatttataaaatgacatggacaaaagcatctctaatcactctaaaagatttgaagtctaggacctaaattctaaatactcttttgaggagtgactgagttttcattttcataattatgtctctcagaggacaaatttacattttcttaacagagacattttcttcttctttttttttgtttgagacagagtctcgctctgtcgtccaggctggagtgcagtgctgcaatcttggctcactgcaacctgcgcctcctgggttcaagtgattcttctgcctcaacctcccaagtagctagacctataggcgcctgccaccatgcccagctaatttttgtatttttagtagagacagggtttcatattggccagactggtctcgaactcctgaccttgtgatccgcccacctcggcctcccaaagtgctgggattacaggtgtgagccaccacacccagccaacattttcctcttttaaaaaatatcttctcacgcctgtaatcccagcactttgggaggctgaggcaggcggatcatgaggtcaggagatcaagaccatcctggctaacacggtgaaactccatctctactaaaaatacaaaaaaaatagccgggcgtggtggcaggcgcctgtagtcccagctactggggaggctgaggcaggaaaatggtgtcaacccgggaggcggagcttgcagtgagccgagattgcgccactgcactccagcctgggcaatagagtgagactccgtctcaaaaaaaaaaaaaaaaaaaaaaacttcaacaataccctcaggttgataattttggatatctatctgtatctatatatcttgtttacctggtctccagaaaaagaacacatacacatatccatatataaaatatgtatacatgtatcaaatctacgtaaactataaaggtgggatggctttaattatggcccaagctactaagacaatgaagactttttggggctgcaagctactgcttcccttctttatctactagcctcttaaacaaggctcacttgtgctacaagacagtccaccgttttgttttttttttcttttttttgagacagggtctcactctttcccaggctgcagtacagtgacacagtctcagctcactgcagctttgaccttgccgggctcaggtgacccttacacttcagcctcccaagtagcagggactataggtgtgcaccaacatgcttggttaatttttgtattttttgtagagacagggttttgccatgttgtccaggctagtctcgaattcctgggctcaagtgattcacctgccttggcctcccaaagtgctaggattacagatgggagccaccacgcccagcccagtccagctcttatatgtagcacagggaaaggacaaatacttgtcaactataaataagaaacattgctaatgcattgcaaagaacactagtttcatttactttataacttagatgtctactgggtgagacgaatgtctttgttctttaaaaaataggaaaagagaagaaaaactagcataacataagtactcatttgtaagactttctgacatgtaacattagttccgtagttttgagacctggtagaactgactttcatatttggataacctggaaaacacccaaacacaaacttcaagtcttctttctcttttttcattatcttttttagtctgaggtgacaccatcattaaggattcgacacccgtttgtaaataaaatgacatcag

SEQ ID NO: 31830 - DNA, 2778 bp, Homo sapiens
  source 1..2778: mol_type = unassigned DNA
gctgatgttttaagcagttagaggaggtggaagaagctcgactccctcttcttccccattatctgcccacaatcccctcctttggagctgctaatgattactaattcttaacattcgagttcaatctcctcccggagacaccctcccaggcgagggcactgcgactacactgaggttctgcccactcctgggcagcttcttagctgggtggcgaaaacaaaaatgccgcctaattggtcactggccctttctcatgaatgaaggaggtttctgttttaagaaataaagtgactcctcagccgttgattcactgcccacagggagattttgagcagaggcttcctaggctccgtagaaatttgcatacagcttccacttcctgcttcagagcctgttcttctacttacctgggcccggagaaggtggagggagacgagaagccgccgagagccgactaccctccgggcccagtctgtctgtccgtggtggatctaagcctcatctgtatcctcttgtgatggcgtgaaggaaagccatggcagatttccagcctggtgatgctgtacagaacacaggtggcctgcttccatgcctcctcagcttcaagaaactagaatgaaccgaagcattcctgtggaggttgatgaatcagaaccatacccaagtcagttgctgaaaccaatcccagaatattccccggaagaggaatcagaaccacctgctccaaatataaggaacatggcacccaacagcttgtctgcacccacaatgcttcacaattcctccggagacttttctcaagctcactcaaccctgaaacttgcaaatcaccagcggcctgtatcccggcaggtcacctgcctgcgcactcaagttctggaggacagtgaagacagtttctgcaggagacacccaggcctgggcaaagctttcccttctgggtgctctgcagtcagcgagcctgcgtctgagtctgtggttggagccctccctgcagagcatcagttttcatttatggaaaaacgtaatcaatggctggtatctcagctttcagcggcttctcctgacactggccatgactcagacaaatcagaccaaagtttacctaatgcctcagcagactccttgggcggtagccaggagatggtgcaacggccccagcctcacaggaaccgagcaggcctggatctgccaaccatagacacgggatatgattcccagccccaggatgtcctgggcatcaggcagctggaaaggcccctgcccctcacctccgtgtgttacccccaggacctccccagacctctcaggtccagggagttccctcagtttgaacctcagaggtatccagcatgtgcacagatgctgcctcccaatctttccccacatgctccatggaactatcattaccattgtcctggaagtcccgatcaccaggtgccatatggccatgactaccctcgagcagcctaccagcaagtgatccagccggctctgcctgggcagcccctgcctggagccagtgtgagaggcctgcaccctgtgcagaaggttatcctgaattatcccagcccctgggaccacgaagagaggcccgcacagagagactgctcctttccggggcttccaaggcaccaggaccagccacatcaccagccacctaatagagctggtgctcctggggagtccttggagtgccctgcagagctgagaccacaggttccccagcctccgtccccagctgctgtgcctagaccccctagcaaccctccagccagaggaactctaaaaacaagcaatttgccagaagaattgcggaaagtctttatcacttattcgatggacacagctatggaggtggtgaaattcgtgaactttttgttggtaaatggcttccaaactgcaattgacatatttgaggatagaatccgaggcattgatatcattaaatggatggagcgctaccttagggataagaccgtgatgataatcgtagcaatcagccccaaatacaaacaggacgtggaaggcgctgagtcgcagctggacgaggatgagcatggcttacatactaagtacattcatcgaatgatgcagattgagttcataaaacaaggaagcatgaatttcagattcatccctgtgctcttcccaaatgctaagaaggagcatgtgcccacctggcttcagaacactcatgtctacagctggcccaagaataaaaaaaacatcctgctgcggctgctgagagaggaagagtatgtggctcctccacgggggcctctgcccacccttcaggtggttcccttgtgacaccgttcatccccagatcactgaggccaggccatgtttggggccttgttctgacagcattctggctgaggctggtcggtagcactcctggctggtttttttctgttcctccccgagaggccctctggcccccaggaaacctgttgtgcagagctcttccccggagacctccacacaccctggctttgaagtggagtctgtgactgctctgcattctctgcttttaaaaaaaccattgcaggtgccagtgtcccatatgttcctcctgacagtttgatgtgtccattctgggcctctcagtgcttagcaagtagataatgtaagggatgtggcagcaaatggaaatgactacaaacactctcctatcaatcacttcaggctacttttatgagttagccagatgcttgtgtatcctcagaccaaactgattcatgtacaaataataaaatgtttactcttttgtaa

SEQ ID NO: 31831 - DNA, 903 bp, Homo sapiens
  source 1..903: mol_type = unassigned DNA
ataggaaagaaggaaatgaaggcggagagtggggagagagcagcagaattcaatttaatctgaggccaccccaagtgttttgtagaattgggctgaagaggtttcctaggcagcctcgcaggctgcacagcacaccacccccgagaagaccgtgatgataatcgtagcaatcagccccaaatacaaacaggacgtggaaggcgctgagtcgcagctggacgaggatgagcatggcttacatactaagtacattcatcgaatgatgcagattgagttcataaaacaaggaagcatgaatttcagattcatccctgtgctcttcccaaatgctaagaaggagcatgtgcccacctggcttcagaacactcatgtctacagctggcccaagaataaaaaaaacatcctgctgcggctgctgagagaggaagagtatgtggctcctccacgggggcctctgcccacccttcaggtggttcccttgtgacaccgttcatccccagatcactgaggccaggccatgtttggggccttgttctgacagcattctggctgaggctggtcggtagcactcctggctggtttttttctgttcctccccgagaggccctctggcccccaggaaacctgttgtgcagagctcttccccggagacctccacacaccctggctttgaagtggagtctgtgactgctctgcattctctgcttttaaaaaaaccattgcaggtgccagtgtcccatatgttcctcctgacagtttgatgtgtccattctgggcctctcagtgcttagcaagtagataatgtaagggatgtggcagcaaatggaaatgactacaaacactctcctatcaatcacttcaggctacttttatgagttagccagatgcttgtgtatcctcaga

SEQ ID NO: 31832 - DNA, 1767 bp, Homo sapiens
  source 1..1767: mol_type = unassigned DNA
atgatcagcccagaccccaggccctcccctggcttggcccggtgggctgagagctatgaggccaagtgtgagcgcaggcaagagatccgtgaaagccgccgctgccgtcccaatgtgaccacttgccgccaggtggggaagacgctgaggatccaacagagagagcagctccagagagctcgactgcagcagttcttcaggaggaggaacctggagctagaggagaagggcaaagcgcagcatccccaggccagggagcaagggccctccaggcggccaggacaggtgacaggcaccagctctgaagtctttccagcccagcatcctcctccctcaggcatctgcagggatctgtctgaccacctctcctcacaggctgggggccttcctccacaggacactcccatcaagaagccacccaaacaccaccgtggtactcagacaaaggcagaaggaccaacaattaagaacgatgccagtcagcaaaccaattacggagttgcagttctggataaggaaatcatccagctttctgattacctcaaagaggccctacaaagggagctggtcctaaaacagaaaatggtgattctccaagacctactgtccactctgattcaggcctctgacagctcttggaagggacagcttaatgaagacaaactgaaggggaaactgagatccttagaaaaccagctatacacctgtacccagaaatactccccttggggaatgaaaaaagtactactggagatggaagaccagaaaaacagctatgagcagaaggccaaggagtcactgcagaaagtgctggaggagaaaatgaatgcagagcagcaactacagagcacacagcgatccctggccctggcagagcagaagtgtgaagagtggaggagccagtatgaggctctgaaggaggactggaggacccttgggacccagcacagggagctggagagccaactccacgtgcttcagtccaaactgcagggagcagatagcagggacttacagatgaaccaggccctgcgatttttggaaaatgagcaccagcaactgcaggccaagattgaatgcctgcaaggggacagagacctgtgcagcttggatacccaggacctacaagatcaactaaaaaggtcagaggcagagaaactcaccctggtgaccagagtacagcagttgcagggtttgcttcaaaatcaatccttacagcttcaagaacaggagaaactcttaacaaagaaagatcaggctttgcccgtgtggagtccaaagtccttccctaacgaagtggagcctgagggtacagggaaggagaaagactgggatctcagagaccagctgcaaaagaagactttgcagctccaggccaaggaaaaggagtgcagagaactgcattcagaattagacaacctcagtgacgagtatctctcctgcctgcgtaagctgcagcactgtcgagaagagctgaaccagagccagcagctgcctcccagaaggcaatgtgggcgatggctcccagtgctgatggtggtgattgctgcagcactggcagtgttcctggccaataaagacaacctgatgatctgaataatttgtgacaactgccttgggtgaaaatcagaagcaagcaactcagcgaaaaactcagaaggtttgggtacattacagcttgggttttccaactgacttaggatttctgactttttattaatttcttaacctactgtaaataaacttcacctgaccagattgttcctc

SEQ ID NO: 31833 - DNA, 1065 bp, Homo sapiens
  source 1..1065: mol_type = unassigned DNA
gagatgacagcgcagcggggattggctgaagccctaagcaacctctactagagcagagagatgagctgtgggctggtgcttctgtggtgaggtggtggtgtttctggagagcagatcagaggcaggggaaaaccacgcagaagcaggagctgaagacctcagaccggcaccagggacagcttaatgaagacaaactgaaggggaaactgagatccttagaaaaccagctatacacctgtacccagaaatactccccttggggaatgaaaaaagtactactggagatggaagaccagaaaaacagctatgagcagaaggccaaggagtcactgcagaaagtgctggaggagaaaatgaatgcagagcagcaactacagagcacacagcgatccctggccctggcagagcagaagtgtgaagagtggaggagccagtatgaggctctgaaggaggactggaggacccttgggacccagcacagggagctggagagccaactccacgtgcttcagtccaaactgcagggagcagatagcagggacttacagatgaaccaggccctgcgatttttggaaaatgagcaccagcaactgcaggccaagattgaatgcctgcaaggggacagagacctgtgcagcttggatacccaggacctacaagatcaactaaaaaggtcagaggcagagaaactcaccctggtgaccagagtacagcagttgcagggtttgcttcaaaatcaatccttacagcttcaagaacaggagaaactcttaacaaagaaaggtcagcaaatttattaccacaaattctaagatattgctcttctcttacctgcctagaggcagcgggatggactacatgacctcctggagtcccagccagttctgggagtctgttaagtccgggatgtgtgggagctttttaaggactgatcattggctctgaggacacttcaactagttagccttctatcttgaggtatataaactgtgaaaaagggtttctattctctctgaaagcacatgtctgtgttgaacatttcaataaatttattttgaactcagg

SEQ ID NO: 31834 - DNA, 2331 bp, Homo sapiens
  source 1..2331: mol_type = unassigned DNA
agagaattccagactgagccagagtagcgaagtcccagtaaaggggcagagagtctgctacctgttgagtctgtttggcctataaataaaccccaaggggttagagctagcaaatgcctgctagttggtgaagctgagataccctcctcccagggtggtgggtaatgaggtcgtgggaggaagagaagcagcagcagctgtgagggggagtccctcttccttcatcagtccctggtctgactccagtgatcagaggaggcaggacacagaatttccaacgctcaggatccagctcatccaaatccagcccaactcagcaaagtgaccagagggttctaggaggataaactacagaagcagccttattgaggtacaattcatgtgcttgtgggtttggatggcacaatctgtgtctgggctaaggaaagcagacttggcaccaacattaaccctgacagatccaggcatctattccaggaactggaagccaagcgcaacaggtgcttggaggtcatcatgatcagcccagaccccaggccctcccctggcttggcccggtgggctgagagctatgaggccaagtgtgagcgcaggcaagagatccgtgaaagccgccgctgccgtcccaatgtgaccacttgccgccaggtggggaagacgctgaggatccaacagagagagcagctccagagagctcgactgcagcagttcttcaggaggaggaacctggagctagaggagaagggcaaagcgcagcatccccaggccagggagcaagggccctccaggcggccaggacaggtgactgtcctcaaggaacccttgtcttgtgccagaaggatttcttctcccagagagcaggtgacaggcaccagctctgaagtctttccagcccagcatcctcctccctcaggcatctgcagggatctgtctgaccacctctcctcacaggctgggggccttcctccacaggacactcccatcaagaagccacccaaacaccaccgtggtactcagacaaaggcagaaggaccaacaattaagaacgatgccagtcagcaaaccaattacggagttgcagttctggataaggaaatcatccagctttctgattacctcaaagaggccctacaaagggagctggtcctaaaacagaaaatggtgattctccaagacctactgtccactctgattcaggcctctgacagctcttggaagggacagcttaatgaagacaaactgaaggggaaactgagatccttagaaaaccagctatacacctgtacccagaaatactccccttggggaatgaaaaaagtactactggagatggaagaccagaaaaacagctatgagcagaaggccaaggagtcactgcagaaagtgctggaggagaaaatgaatgcagagcagcaactacagagcacacagcgatccctggccctggcagagcagaagtgtgaagagtggaggagccagtatgaggctctgaaggaggactggaggacccttgggacccagcacagggagctggagagccaactccacgtgcttcagtccaaactgcagggagcagatagcagggacttacagatgaaccaggccctgcgatttttggaaaatgagcaccagcaactgcaggccaagattgaatgcctgcaaggggacagagacctgtgcagcttggatacccaggacctacaagatcaactaaaaaggtcagaggcagagaaactcaccctggtgaccagagtacagcagttgcagggtttgcttcaaaatcaatccttacagcttcaagaacaggagaaactcttaacaaagaaagatcaggctttgcccgtgtggagtccaaagtccttccctaacgaagtggagcctgagggtacagggaaggagaaagactgggatctcagagaccagctgcaaaagaagactttgcagctccaggccaaggaaaaggagtgcagagaactgcattcagaattagacaacctcagtgacgagtatctctcctgcctgcgtaagctgcagcactgtcgagaagagctgaaccagagccagcagctgcctcccagaaggcaatgtgggcgatggctcccagtgctgatggtggtgattgctgcagcactggcagtgttcctggccaataaagacaacctgatgatctgaataatttgtgacaactgccttgggtgaaaatcagaagcaagcaactcagcgaaaaactcagaaggtttgggtacattacagcttgggttttccaactgacttaggatttctgactttttattaatttcttaacctactgtaaataaacttcacctgacc

SEQ ID NO: 31835 - DNA, 2243 bp, Homo sapiens
  source 1..2243: mol_type = unassigned DNA
acttagatgataccagagagcaagagagaggaactggggtttgcgaaccttgtggctttgtctgtttcctgtttcagcaaggctgctgtgcaaaaagaaagacggtaccaagaagggacgtgttaatggggcccagacctatggattgaaagcgtgtgctttacccatctgctgtcttgctccatctgagaccagagccaagatctgcccaggactggaatgctttcccgagtggcttgagttggagcctgggactaggagcagccttattgaggtacaattcatgtgcttgtgggtttggatggcacaatctgtgtctgggctaaggaaagcagacttggcaccaacattaaccctgacagatccaggcatctattccaggaactggaagccaagcgcaacaggtgcttggaggtcatcatgatcagcccagaccccaggccctcccctggcttggcccggtgggctgagagctatgaggccaagtgtgagcgcaggcaagagatccgtgaaagccgccgctgccgtcccaatgtgaccacttgccgccaggtggggaagacgctgaggatccaacagagagagcagctccagagagctcgactgcagcagttcttcaggaggaggaacctggagctagaggagaagggcaaagcgcagcatccccaggccagggagcaagggccctccaggcggccaggacaggtgactgtcctcaaggaacccttgtcttgtgccagaaggatttcttctcccagagagcaggtgacaggcaccagctctgaagtctttccagcccagcatcctcctccctcaggcatctgcagggatctgtctgaccacctctcctcacaggctgggggccttcctccacaggacactcccatcaagaagccacccaaacaccaccgtggtactcagacaaaggcagaaggaccaacaattaagaacgatgccagtcagcaaaccaattacggagttgcagttctggataaggaaatcatccagctttctgattacctcaaagaggccctacaaagggagctggtcctaaaacagaaaatggtgattctccaagacctactgtccactctgattcaggcctctgacagctcttggaagggacagcttaatgaagacaaactgaaggggaaactgagatccttagaaaaccagctatacacctgtacccagaaatactccccttggggaatgaaaaaagtactactggagatggaagaccagaaaaacagctatgagcagaaggccaaggagtcactgcagaaagtgctggaggagaaaatgaatgcagagcagcaactacagagcacacagcgatccctggccctggcagagcagaagtgtgaagagtggaggagccagtatgaggctctgaaggaggactggaggacccttgggacccagcacagggagctggagagccaactccacgtgcttcagtccaaactgcagggagcagatagcagggacttacagatgaaccaggccctgcgatttttggaaaatgagcaccagcaactgcaggccaagattgaatgcctgcaaggggacagagacctgtgcagcttggatacccaggacctacaagatcaactaaaaaggtcagaggcagagaaactcaccctggtgaccagagtacagcagttgcagggtttgcttcaaaatcaatccttacagcttcaagaacaggagaaactcttaacaaagaaagatcaggctttgcccgtgtggagtccaaagtccttccctaacgaagtggagcctgagggtacagggaaggagaaagactgggatctcagagaccagctgcaaaagaagactttgcagctccaggccaaggaaaaggagtgcagagaactgcattcagaattagacaacctcagtgacgagtatctctcctgcctgcgtaagctgcagcactgtcgagaagagctgaaccagagccagcagctgcctcccagaaggcaatgtgggcgatggctcccagtgctgatggtggtgattgctgcagcactggcagtgttcctggccaataaagacaacctgatgatctgaataatttgtgacaactgccttgggtgaaaatcagaagcaagcaactcagcgaaaaactcagaaggtttgggtacattacagcttgggttttccaactgacttaggatttctgactttttattaatttcttaacctactgtaaataaacttcacctgaccagattgtt

SEQ ID NO: 31836 - DNA, 2058 bp, Homo sapiens
  source 1..2058: mol_type = unassigned DNA
gcccagacctatggattgaaagcgtgtgctttacccatctgctgtcttgctccatctgagaccagagccaagatctgcccaggactggaatgctttcccgagtggcttgagttggagcctgggactaggagcagccttattgaggtacaattcatgtgcttgtgggtttggatggcacaatctgtgtctgggctaaggaaagcagacttggcaccaacattaaccctgacagatccaggcatctattccaggaactggaagccaagcgcaacaggtgcttggaggtcatcatgatcagcccagaccccaggccctcccctggcttggcccggtgggctgagagctatgaggccaagtgtgagcgcaggcaagagatccgtgaaagccgccgctgccgtcccaatgtgaccacttgccgccaggtggggaagacgctgaggatccaacagagagagcagctccagagagctcgactgcagcagttcttcaggaggaggaacctggagctagaggagaagggcaaagcgcagcatccccaggccagggagcaagggccctccaggcggccaggacaggtgacaggcaccagctctgaagtctttccagcccagcatcctcctccctcaggcatctgcagggatctgtctgaccacctctcctcacaggctgggggccttcctccacaggacactcccatcaagaagccacccaaacaccaccgtggtactcagacaaaggcagaaggaccaacaattaagaacgatgccagtcagcaaaccaattacggagttgcagttctggataaggaaatcatccagctttctgattacctcaaagaggccctacaaagggagctggtcctaaaacagaaaatggtgattctccaagacctactgtccactctgattcaggcctctgacagctcttggaagggacagcttaatgaagacaaactgaaggggaaactgagatccttagaaaaccagctatacacctgtacccagaaatactccccttggggaatgaaaaaagtactactggagatggaagaccagaaaaacagctatgagcagaaggccaaggagtcactgcagaaagtgctggaggagaaaatgaatgcagagcagcaactacagagcacacagcgatccctggccctggcagagcagaagtgtgaagagtggaggagccagtatgaggctctgaaggaggactggaggacccttgggacccagcacagggagctggagagccaactccacgtgcttcagtccaaactgcagggagcagatagcagggacttacagatgaaccaggccctgcgatttttggaaaatgagcaccagcaactgcaggccaagattgaatgcctgcaaggggacagagacctgtgcagcttggatacccaggacctacaagatcaactaaaaaggtcagaggcagagaaactcaccctggtgaccagagtacagcagttgcagggtttgcttcaaaatcaatccttacagcttcaagaacaggagaaactcttaacaaagaaagatcaggctttgcccgtgtggagtccaaagtccttccctaacgaagtggagcctgagggtacagggaaggagaaagactgggatctcagagaccagctgcaaaagaagactttgcagctccaggccaaggaaaaggagtgcagagaactgcattcagaattagacaacctcagtgacgagtatctctcctgcctgcgtaagctgcagcactgtcgagaagagctgaaccagagccagcagctgcctcccagaaggcaatgtgggcgatggctcccagtgctgatggtggtgattgctgcagcactggcagtgttcctggccaataaagacaacctgatgatctgaataatttgtgacaactgccttgggtgaaaatcagaagcaagcaactcagcgaaaaactcagaaggtttgggtacattacagcttgggttttccaactgacttaggatttctgactttttattaatttcttaacctactgtaaataaacttcacctgaccagattgttcctca

SEQ ID NO: 31837 - DNA, 1854 bp, Homo sapiens
  source 1..1854: mol_type = unassigned DNA
tcagagttcaggggcccacttagatgataccagagagcaagagagaggaactggggtttgcgaaccttgtggctttgtctgtttcctgtttcagcaaggctgctgtgcaaaaagaaagacggtaccaagaagggacgtgttaatggggcccagacctatggattgaaagcgtgtgctttacccatctgctgtcttgctccatctgagaccagagccaagatctgcccaggactggaatgctttcccgagtggcttgagttggagcctgggactaggagcagccttattgaggtacaattcatgtgcttgtgggtttggatggcacaatctgtgtctgggctaaggaaagcagacttggcaccaacattaaccctgacagatccaggcatctattccaggaactggaagccaagcgcaacaggtgcttggaggtcatcatgatcagcccagaccccaggccctcccctggcttggcccggtgggctgagagctatgaggccaagtgtgagcgcaggcaagagatccgtgaaagccgccgctgccgtcccaatgtgaccacttgccgccaggtggggaagacgctgaggatccaacagagagagcagctccagagagctcgactgcagcagttcttcaggaggaggaacctggagctagaggagaagggcaaagcgcagcatccccaggccagggagcaagggccctccaggcggccaggacaggtgacaggcaccagctctgaagtctttccagcccagcatcctcctccctcaggcatctgcagggatctgtctgaccacctctcctcacaggctgggggccttcctccacaggacactcccatcaagaagccacccaaacaccaccgtggtactcagacaaaggcagaaggaccaacaattaagaacgatgccagtcagcaaaccaattacggagttgcagttctggataaggaaatcatccagctttctgattacctcaaagaggccctacaaagggagctggtcctaaaacagaaaatggtgattctccaagacctactgtccactctgattcaggcctctgacagctcttggaagggacagcttaatgaagacaaactgaaggggaaactgagatccttagaaaaccagctatacacctgtacccagaaatactccccttggggaatgaaaaaagtactactggagatggaagaccagaaaaacagctatgagcagaaggccaaggagtcactgcagaaagtgctggaggagaaaatgaatgcagagcagcaactacagagcacacagcgatccctggccctggcagagcagaagtgtgaagagtggaggagccagtatgaggctctgaaggaggactggaggacccttgggacccagcacagggagctggagagccaactccacgtgcttcagtccaaactgcagggagcagatagcagggacttacagatgaaccaggccctgcgatttttggaaaatgagcaccagcaactgcaggccaagattgaatgcctgcaaggggacagagacctgtgcagcttggatacccaggacctacaagatcaactaaaaaggtcagaggcagagaaactcaccctggtgaccagagtacagcagttgcaggaggcagcgggatggactacatgacctcctggagtcccagccagttctgggagtctgttaagtccgggatgtgtgggagctttttaaggactgatcattggctctgaggacacttcaactagttagccttctatcttgaggtatataaactgtgaaaaagggtttctattctctctgaaagcacatgtctgtgttgaacatttcaataaatttattttgaactcag

SEQ ID NO: 31838 - DNA, 1303 bp, Homo sapiens
  source 1..1303: mol_type = unassigned DNA
gtgcaaaaagaaagacggtaccaagaagggacgtgttaatggggcccagacctatggattgaaagcgtgtgctttacccatctgctgtcttgctccatctgagaccagagccaagatctgcccaggactggaatgctttcccgagtggcttgagttggagcctgggactaggagcagccttattgaggtacaattcatgtgcttgtgggtttggatggcacaatctgtgtctgggctaaggaaagcagacttggcaccaacattaaccctgacagatccaggcatctattccaggaactggaagccaagcgcaacaggtgcttggaggtcatcatgatcagcccagaccccaggccctcccctggcttggcccggtgggctgagagctatgaggccaagtgtgagcgcaggcaagagatccgtgaaagccgccgctgccgtcccaatgtgaccacttgccgccaggtggggaagacgctgaggatccaacagagagagctagaggagaagggcaaagcgcagcatccccaggccagggagcaagggccctccaggcggccaggacaggtgactgtcctcaaggaacccttgtcttgtgccagaaggatttcttctcccagagagcaggtgacaggcaccagctctgaagtctttccagcccagcatcctcctccctcaggcatctgcagggatctgtctgaccacctctcctcacaggctgggggccttcctccacaggacactcccatcaagaagccacccaaacaccaccgtggtactcagacaaaggcagaaggaccaacaattaagaacgatgccagtcagcaaaccaattacggagttgcagttctggataaggaaatcatccagctttctgattacctcaaagaggccctacaaagggagctggtcctaaaacagaaaatggtgattctccaagacctactgtccactctgattcaggcctctgacagctcttggaagggacagcttaatgaagacaaactgaaggggaaactgagatccttagaaaaccagctatacacctgtacccagaaatactccccttggggaatgaaaaaagtactactggagatggaagaccagaaaaacagctatgagcagaaggccaaggagtcactgcagaaagtgctggaggagaaaatgaatgcagagcagcaactacagagcacacaggtatggggatgccacatagacatggggctggggactccaggcagcttggggaacaaggggagccagctgcacaactccctggagccctctcctctctgatctccct

SEQ ID NO: 31839 - DNA, 540 bp, Homo sapiens
  source 1..540: mol_type = unassigned DNA
gtgcaaaaagaaagacggtaccaagaagggacgtgttaatggggcccagacctatggattgaaagcgtgtgctttacccatctgctgtcttgctccatctgagaccagagccaagatctgcccaggactggaatgctttcccgagtggcttgagttggagcctgggactaggagtccctggtctgactccagtgatcagaggaggcaggacacagaatttccaacgctcaggatccagctcatccaaatccagcccaactcagcaaagtgaccagagggttctaggaggataaactacagaagcagccttattgaggtacaattcatgtgcttgtgggtttggatggcacaatctgtgtctgggctaaggaaagcagacttggcaccaacattaaccctgacagatccaggcatctattccaggaactggaagccaagcgcaacaggtgcttggaggtcatcatgatcagcccagaccccaggccctcccctggcttggcccggtgggctgagagctatgaggccaagtgtgagcgcagg

SEQ ID NO: 31840 - DNA, 3260 bp, Homo sapiens
  source 1..3260: mol_type = unassigned DNA
attcagggctgctgtccagtgctgctttattggcagtgctgccagggtctccgttagctctctgcaaattgccttcctttctgctcctcctactccctccttcccccatagaatttttcttttcattgcccactttactgttttggctccagactgtcgttaagaatgtacagcctaattctggtgtgtttcgggatattcttctgtccagtattctggaagggcggggaggcatggcagcgttttacttgacgttgatggtgctgtgaagtccattctttcctctgcaagactactgactatgcagaaatttatcgaagcggattattatgaactagactggtattatgaagaatgctcggatgttttatgtgctgaaagagttggccagatgactaagacatataatgacatagatgctgtcactcggcttcttgaggagaaagagcgggatttagaattggccgctcgcatcggccagtcgttgttgaagaagaacaagaccctaaccgagaggaacgagctgctggaggagcaggtggaacacatcagggaggaggtgtctcagctccggcatgagctgtccatgaaggatgagctgcttcagttctacaccagcgctgcggaggagagtgagcccgagtccgtttgctcaaccccgttgaagaggaatgagtcgtcctcctcagtccagaattactttcatttggattctcttcaaaagaagctgaaagaccttgaagaggagaatgttgtacttcgatccgaggccagccagctgaagacagagaccatcacctatgaggagaaggagcagcagctggtcaatgactgcgtgaaggagctgagggatgccaatgtccagattgctagtatctcagaggaactggccaagaagacggaagatgctgcccgccagcaagaggagatcacacacctgctatcgcaaatagttgatttgcagaaaaaggcaaaagcttgcgcagtggaaaatgaagaacttgtccagcatctgggggctgctaaggatgcccagcggcagctcacagccgagctgcgtgagctggaggacaagtacgcagagtgcatggagatgctgcatgaggcgcaggaggagctgaagaacctccggaacaaaaccatgcccaataccacgtctcggcgctaccactcactgggcctgtttcccatggattccttggcagcagagattgagggaacgatgcgcaaggagctgcagttggaagaggccgagtctccagacatcactcaccagaagcgtgtctttgagacagtaagaaacatcaaccaggttgtcaagcagagatctctgaccccttctcccatgaacatccccggctccaaccagtcctcggccatgaactccctcctgtccagctgcgtcagcaccccccggtccagcttctacggcagcgacataggcaacgtcgtcctcgacaacaagaccaacagcatcattctggaaacagaggcagccgacctgggaaacgatgagcggagtaagaagccggggacgccgggcaccccaggctcccacgacctggagacggcgctgaggcggctgtccctgcgccgggagaactacctctcggagaggaggttctttgaggaggagcaagagaggaagctccaggagctggcggagaagggcgagctgcgcagcggctccctcacacccactgagagcatcatgtccctgggcacgcactcccgcttctccgagttcaccggcttctctggcatgtccttcagcagccgctcctacctgcctgagaagctccagatcgtgaagccgctggaaggtgatcacgcggggcctcggcccctctctgtcctcctgggggactccctttggtccctgatccacctgcggaaggcggggcacctctgtcacgcctactcctttttcttccgcgacagccacccgcgctgctggtttgagttcctctgagggtggtgctcagcctaggcctccgtccctcccctctggctggcaggtgtgacaatgcacacataggccatgaaactcgccgaggaaagacaagcatgtgcactgtggtcttctagttctttcctttgcctttagaaccttagaaataaaaacttttgtggcggtagaggcactgctaactgattcaaaaattaattaggttttgcctgtgggtgtgaggaatgcagaaaattaatgctttagcttttctgcagttttggtgtcggggagaggttccaagcaaactctattaaatggggatttttttttccccataaccacctgaatgtgatttgtgggcttatgtgttctgatttgaacttcatatagcaaggttgtggcttttggcagatgcagtatgttctgagcgcggctcctagagtctacaatttggagtccaggaaggggtggctgtggagacaagtgagttttgtacctccgtaagccaccctttttcagggtcagttcatgtgttagtatcaggggcatctcagatgattaaactcatgggaaaaacttcctccttccctctctccctcttgccctcctgcctctttttttttttttttttttttaatttaggcacttataaaatgttttccctctacctgctgctactctgccaagagccaccaagtgcttatatttttcattttttactcctttagtttggaaagccatatacgtttgagaaggtgttttaaaactctgtgttacacttacgatgcaaagccaaatcagaacttctgtaaggcagaactttcccaactttaaaaaaattattgtcccctctaaggagccttcttagacgttttttcctaatcaccccccaaagacattttaataccacatatatattgtttatgtactatatgtatatacataaacaatacataagcaatacatctgtggtattaaaattaaaaagaatccaattatgtttacctcaaaagaacctgtttttgcttcttgggagcaatattgcccctgtgagactgcatgctataaggtaaggttgtgcttgttaaagacccaagacatgactgggttccacagtctccaaaggaagagggtgggctagtttgtttttattattattttaaaattgtataattggggtctttcttagagttcagaaaaggtatagcttactcttttttaattgtttatttagttgtaagcttggtgattgttttctgatccacattgtgtgtgttcttcaataaaatctttcatttctgcaatttta

SEQ ID NO: 31841 - DNA, 818 bp, Homo sapiens
  source 1..818: mol_type = unassigned DNA
gcagttccggtgagtccgtgggtggggtccccacctggttggaaggctgtgggtccgggaacccgagcccaaggagtgggggcggccccggagcgaggctcacactccctgccctgcagatgactgtccacaacctgtacctgtttgaccggaatggagtgtgtctgcactacagcgaatggcaccgcaagaagcaagcagggattcccaaggaggaggagtataagctgatgtacgggatgctcttctctatccgctcgtttgtcagcaagatgtccccgctagacatgaaggatggcttcctggccttccaaactagccgttacaaactccattactacgagacgcccactgggatcaaagttgtcatgaatactgacttgggcgtgggacccatccgagatgtgctgcaccacatctacagtgcgctgtatgtggagctggtggtgaagaatcccctgtgcccgctgggccaaactgtgcaaagtgagctctttcgctcccgactggactcctatgttcgctctctgcccttcttctccgcccgggctggctgaagcaacctacctcaagtctcaggagaattcatgtctgcctggggcccttccgaacctgtgccaactaagggcccccactgtaagcccccgcacccccaccccctgcccagagcaacagcctaaaggcctgccctgatgctctcctcctaccagagtgaagcccacagagtccctccacctccacaccaggccctctctccagttttatcccctgcctaatgctgcgagaagcacagaataaactttttgtcactctctgcg

SEQ ID NO: 31842 - DNA, 759 bp, Homo sapiens
  source 1..759: mol_type = unassigned DNA
aaggggcggagctccgtggaaaccggaagtaactcttgacgggcactcggagcagttccgatgactgtccacaacctgtacctgtttgaccggaatggagtgtgtctgcactacagcgaatggcaccgcaagaagcaagcagggattcccaaggaggaggagtataagctgatgtacgggatgctcttctctatccgctcgtttgtcagcaagatgtccccgctagacatgaaggatggcttcctggccttccaaactagccgttacaaactccattactacgagacgcccactgggatcaaagttgtcatgaatactgacttgggcgtgggacccatccgagatgtgctgcaccacatctacagtgcgctgtatgtggagctggtggtgaagaatcccctgtgcccgctgggccaaactgtgcaaagtgagctctttcgctcccgactggactcctatgttcgctctctgcccttcttctccgcccgggctggctgaagcaacctacctcaagtctcaggagaattcatgtctgcctggggcccttccgaacctgtgccaactaagggcccccactgtaagcccccgcacccccaccccctgcccagagcaacagcctaaaggcctgccctgatgctctcctcctaccagagtgaagcccacagagtccctccacctccacaccaggccctctctccagttttatcccctgcctaatgctgcgagaagcacagaataaactttttgtcactctctgcg

SEQ ID NO: 31843 - DNA, 4552 bp, Homo sapiens
  source 1..4552: mol_type = unassigned DNA
aaagtgcttcctgtgccgggggaggtgggtacagggaagtctcgcctgttggaactggctgtggggctgcggcggtggggacgggccacggcgttctgtgacatccccccgcctcccctcgtcttctcccggctggcggcgaccggcctcagctgcagcgggcccggggcgtggggcctgggttttttgtgacatcgtaaacatgagccccacacagtgggacttccctgtggaattatgttgccggcctatggcctttgttactctaacgggcctggatgtagtttataatgcagtccatcgagctgtctgggacgccttctgtgcaaatcggagagctgatcgagtaccaatttctttcaaggtgctcccaggtgaccatgagtatcccaaatgtagacccaagagaacttcatatgagtggtacattcctaaagggatcttaaagactggctggatgaataagcatctgaatctggtgccagccctggtggttgtgttctatgaactggactgggatgagcctcagtggaaagaaaagcagtctgagtgcgccaccagagtggaaatagtcaggcaaagtttacaaggaagaaacacaaaagttgcagtggttctgattcagaagaaaacccctttgcccccaggagaagatgtcattgcttcagaaagggctgcagctttatgcaatgcatgtgaactctcaggaaagtctttgtttgtactgccgcacactgaccaccttgtgggttatattataagattggaaaatgccttttatgaacatgcacagacttattactacactgagatcagaagagtgaaatctcataaagaatttttgaataaaacaacacaccagcttttatttgttaggcatcagttcaaaatagctttcttcagtgagttgaaacaagatacacaaaatgcgctgaagaattataggaccgcctataatcttgtacacgaattgagagcccatgaaactaatattctggaaattaagactatggcaggatttataaactacaagatctgtaggctgtgttttcaacacaacaccccattggatgcaattgctcagttccgaaaacacatcgacttgtgtaagaaaaagattggaagtgcagagctgtcttttgagcatgatgcatggatgtctaaacaattccaggcctttggagatttatttgatgaagctattaagttagggttaacagctattcaaactcagaatcctggtttctattaccagcaggcagcatactatgcccaggagcggaaacagcttgcaaaaaccctctgtaaccacgaagcttctgtaatgtatcccaatcctgatcccttagaaacacaaacaggcgttcttgacttttatggacaaagatcatggcgacaaggaatactaagttttgatctttctgatcctgaaaaagaaaaggtgggaattcttgccattcagctgaaggagagaaatgttgttcactctgagataatcataactcttctgagcaatgctgttgcacagttcaagaagtataagtgcccgcgaatgaaaagtcacctaatggttcagatgggagaggaatattattacgcaaaggattataccaaagctttgaagttgctggattatgtgatgtgtgattatcggagtgaaggatggtggactctgctcacttctgtattaactacagctctgaagtgctcctacctcatggcccaattaaaggattacattacttactccctagaactccttggtagagcttcaactctgaaagatgaccagaagtctcggatagaaaagaacctcataaatgttttaatgaatgaaagtcctgatccagaacccgactgtgatatcttagctgtgaaaactgctcagaagctgtgggcagaccgaatttctctggctggcagcaatattttcacaataggagtacaggactttgtgccatttgtgcagtgcaaagccaagtttcatgccccaagttttcatgttgatgttcctgttcagtttgatatttatctgaaggctgattgtccacatcccattaggttttccaagctctgtgtcagctttaataatcaggaatacaaccagttctgtgtaatagaagaagcatccaaagcaaatgaagttttagaaaatctgactcaaggaaagatgtgcctagttcctggcaaaacaagaaaactgttatttaagtttgttgcaaaaactgaagatgtgggaaagaaaattgagattacttcagtggatcttgctctgggcaatgagacgggaagatgtgtggttttaaattggcagggaggaggaggagatgctgcttcctcccaagaagccttacaggcagctcggtctttcaaaaggcgacctaagctacctgacaatgaagttcactgggacagcattataattcaggcaagcacaatgatcatatccagagtcccaaacatttctgtacatctgctacatgaaccccctgcactgactaatgaaatgtattgtttggttgtgactgttcagtcccatgaaaagacccaaatcagagatgtgaagctcaccgctggcttaaaaccaggacaggatgccaatttaactcagaagactcacgtgactcttcatggaacagaactgtgtgatgaatcctacccggctttactcactgacattcctgttggagacttacatccaggggaacagctggaaaaaatgttgtatgttcgctgtggaacagtgggttccagaatgtttcttgtatatgtttcttacctgataaatacaaccgttgaagaaaaagaaattgtttgcaagtgtcacaaggatgaaactgtaacaattgaaacagtctttccatttgatgttgcggttaaatttgtttctaccaagtttgagcacctggaaagggtttatgctgacatcccctttctgttgatgacggacctcttaagtgcctcaccctgggccctcactattgtttccagtgagctccagcttgctccatccatgaccacagtggaccagctcgagtctcaagtggacaatgttatcttacagactggagagagtgctagtgaatgcttttgtcttcaatgcccatctcttggaaatattgaaggtggagtagcaaccgggcattatattatctcttggaaaaggacctcagcaatggagaatatccccatcatcacaactgtcatcactctgccgcacgtgattgtggagaatatccctctccatgtgaatgcagatctgccgtcatttgggcgtgtcagagagtcgttacctgtcaagtatcacctacagaataagaccgacttagttcaagatgtagaaatttctgtggagcccagtgatgccttcatgttctcaggtctcaaacagattcgattacgtatcctccctggcacggagcaggaaatgctatataatttctatcctctgatggctggataccagcagctgccatctctcaacatcaacttgcttagatttcctaacttcacaaatcagctgctcaggcgttttatacctaccagtatttttgtcaagccacagggtcgactcatggatgatacctctattgctgctgcatgatgttcaagaccggcccttggctgttgttacagagatgttgggcagagctatgcaggtgtttcattgtgaactctagctttgatcatggtaaaaagttaaccttttctattttttaatggatgttataccaactattcagaggaactcatacttcaaaaatattaggaaaatctgtcttatagtttctctaataaatatctgaaatctcagtacgacatgaaagaatgtcagaccattgttattgttgaaagtcatttgatgaatggtaaattctatgaaaagtaagtgatttgcatgtataatatcaggaaaattaagcatcccaagtgtgactggacaaagagagcagatgcaccagtgcctgtgccataaagttccgaatcccccatgtgtctctttcagagctggccagaccggaaataaatcattctcataaattcagtgtgtactcagaacacatacacaacaacatagggagttgtatgactgatacggaaaacttccagaaagttttaatcaaagcagtttaattaaggtatcaaaaatatctttgcttactatcaagaagtgtcaaataggttcagcttgctgccaaaatatggatcatttatgaagcaggttcatattttagaggtgttaataaaatcctcatcggaaaagatccaaagtgcaaggatttgattataaacataatttcctagactgaaagtttttggaaaagatgcagggtctgagtcaggccttctggttatattgtgcagtttcaaaagaactatttaaaactcttgaaaactcatgtaaataaaaatcatagggtgaaaattgtatttgttaaaataccttaataatttaaaatgacctgatttcctggaaaattttattattcaaaaggtggaggcattgtaaaaaggaaatagtgatgtaaataaacatgttctctttcaagta

SEQ ID NO: 31844 - DNA, 4406 bp, Homo sapiens
  source 1..4406: mol_type = unassigned DNA
gggtacagggaagtctcgcctgttggaactggctgtggggctgcggcggtggggacgggccacggcgttctgtgacatccccccgcctcccctcgtcttctcccggctggcggcgaccggcctcagctgcagcgggcccggggcgtggggcctgggttttttgtgacatcgtaaacatgagccccacacagtgggacttccctgtggaattatgttgccggcctatggcctttgttactctaacgggcctggatgtagtttataatgcagtccatcgagctgtctgggacgccttctgtgcaaatcggagagctgatcgagtaccaatttctttcaaggtgctcccaggtgaccatgagtatcccaaatgtagacccaagagaacttcatatgagtggtacattcctaaagggatcttaaagactggctggatgaataagcatctgaatctggtgccagccctggtggttgtgttctatgaactggactgggatgagcctcagtggaaagaaaagcagtctgagtgcgccaccagagtggaaatagtcaggcaaagtttacaaggaagaaacacaaaagttgcagtggttctgattcagaagaaaacccctttgcccccaggagaagatgtcattgcttcagaaagggctgcagctttatgcaatgcatgtgaactctcaggaaagtctttgtttgtactgccgcacactgaccaccttgtgggttatattataagattggaaaatgccttttatgaacatgcacagacttattactacactgagatcagaagagtgaaatctcataaagaatttttgaataaaacaacacaccagcttttatttgttaggcatcagttcaaaatagctttcttcagtgagttgaaacaagatacacaaaatgcgctgaagaattataggaccgcctataatcttgtacacgaattgagagcccatgaaactaatattctggaaattaagactatggcaggatttataaactacaagatctgtaggctgtgttttcaacacaacaccccattggatgcaattgctcagttccgaaaacacatcgacttgtgtaagaaaaagattggaagtgcagagctgtcttttgagcatgatgcatggatgtctaaacaattccaggcctttggagatttatttgatgaagctattaagttagggttaacagctattcaaactcagaatcctggtttctattaccagcaggcagcatactatgcccaggagcggaaacagcttgcaaaaaccctctgtaaccacgaagcttctgtaatgtatcccaatcctgatcccttagaaacacaaacaggcgttcttgacttttatggacaaagatcatggcgacaaggaatactaagttttgatctttctgatcctgaaaaagaaaaggtgggaattcttgccattcagctgaaggagagaaatgttgttcactctgagataatcataactcttctgagcaatgctgttgcacagttcaagaagtataagtgcccgcgaatgaaaagtcacctaatggttcagatgggagaggaatattattacgcaaaggattataccaaagctttgaagttgctggattatgtgatgtgtgattatcggagtgaaggatggtggactctgctcacttctgtattaactacagctctgaagtgctcctacctcatggcccaattaaaggattacattacttactccctagaactccttggtagagcttcaactctgaaagatgaccagaagtctcggatagaaaagaacctcataaatgttttaatgaatgaaagtcctgatccagaacccgactgtgatatcttagctgtgaaaactgctcagaagctgtgggcagaccgaatttctctggctggcagcaatattttcacaataggagtacaggactttgtgccatttgtgcagtgcaaagccaagtttcatgccccaagttttcatgttgatgttcctgttcagtttgatatttatctgaaggctgattgtccacatcccattaggttttccaagctctgtgtcagctttaataatcaggaatacaaccagttctgtgtaatagaagaagcatccaaagcaaatgaagttttagaaaatctgactcaaggaaagatgtgcctagttcctggcaaaacaagaaaactgttatttaagtttgttgcaaaaactgaagatgtgggaaagaaaattgagattacttcagtggatcttgctctgggcaatgagacgggaagatgtgtggttttaaattggcagggaggaggaggagatgctgcttcctcccaagaagccttacaggcagctcggtctttcaaaaggcgacctaagctacctgacaatgaagttcactgggacagcattataattcaggcaagcacaatgatcatatccagagtcccaaacatttctgtacatctgctacatgaaccccctgcactgactaatgaaatgtattgtttggttgtgactgttcagtcccatgaaaagacccaaatcagagatgtgaagctcaccgctggcttaaaaccaggacaggatgccaatttaactcagaagactcacgtgactcttcatggaacagaactgtgtgatgaatcctacccggctttactcactgacattcctgttggagacttacatccaggggaacagctggaaaaaatgttgtatgttcgctgtggaacagtgggttccagaatgtttcttgtatatgtttcttacctgataaatacaaccgttgaagaaaaagaaattgtttgcaagtgtcacaaggatgaaactgtaacaattgaaacagtctttccatttgatgttgcggttaaatttgtttctaccaagtttgagcacctggaaagggtttatgctgacatcccctttctgttgatgacggacctcttaagtgcctcaccctgggccctcactattgtttccagtgagctccagcttgctccatccatgaccacagtggaccagctcgagtctcaagtggacaatgttatcttacagactggagagagtgctagtgaatgcttttgtcttcaatgcccatctcttggaaatattgaaggtggagtagcaaccgggcattatattatctcttggaaaaggacctcagcaatggagaatatccccatcatcacaactgtcatcactctgccgcacgtgattgtggagaatatccctctccatgtgaatgcagatctgccgtcatttgggcgtgtcagagagtcgttacctgtcaagtatcacctacagaataagaccgacttagttcaagatgtagaaatttctgtggagcccagtgatgccttcatgttctcaggtctcaaacagattcgattacctgctcaggcgttttatacctaccagtatttttgtcaagccacagggtcgactcatggatgatacctctattgctgctgcatgatgttcaagaccggcccttggctgttgttacagagatgttgggcagagctatgcaggtgtttcattgtgaactctagctttgatcatggtaaaaagttaaccttttctattttttaatggatgttataccaactattcagaggaactcatacttcaaaaatattaggaaaatctgtcttatagtttctctaataaatatctgaaatctcagtacgacatgaaagaatgtcagaccattgttattgttgaaagtcatttgatgaatggtaaattctatgaaaagtaagtgatttgcatgtataatatcaggaaaattaagcatcccaagtgtgactggacaaagagagcagatgcaccagtgcctgtgccataaagttccgaatcccccatgtgtctctttcagagctggccagaccggaaataaatcattctcataaattcagtgtgtactcagaacacatacacaacaacatagggagttgtatgactgatacggaaaacttccagaaagttttaatcaaagcagtttaattaaggtatcaaaaatatctttgcttactatcaagaagtgtcaaataggttcagcttgctgccaaaatatggatcatttatgaagcaggttcatattttagaggtgttaataaaatcctcatcggaaaagatccaaagtgcaaggatttgattataaacataatttcctagactgaaagtttttggaaaagatgcagggtctgagtcaggccttctggttatattgtgcagtttcaaaagaactatttaaaactcttgaaaactcatgtaaataaaaatcatagggtgaaaattgtatttgttaaaataccttaataatttaaaatgacctgatttcctggaaaattttattattcaaaaggtggaggcattgtaaaaaggaaatagtgatgtaaataaacatgttctctttcaagt

SEQ ID NO: 31845 - DNA, 4466 bp, Homo sapiens
  source 1..4466: mol_type = unassigned DNA
gggtacagggaagtctcgcctgttggaactggctgtggggctgcggcggtggggacgggccacggcgttctgtgacatccccccgcctcccctcgtcttctcccggctggcggcgaccggcctcagctgcagcgggcccggggcgtggggcctgggttttttgtgacatcgtaaacatgagccccacacagtgggacttccctgtggaattatgttgccggcctatggcctttgttactctaacgggcctggatgtagtttataatgcagtccatcgagctgtctgggacgccttctgtgcaaatcggagagctgatcgagtaccaatttctttcaaggtgctcccaggtgaccatgagtatcccaaatgtagacccaagagaacttcatatgagtggtacattcctaaagggatcttaaagactggctggatgaataagcatctgaatctggtgccagccctggtggttgtgttctatgaactggactgggatgagcctcagtggaaagaaaagcagtctgagtgcgccaccagagtggaaatagtcaggcaaagtttacaaggaagaaacacaaaagttgcagtggttctgattcagaagaaaacccctttgcccccaggagaagatgtcattgcttcagaaagggctgcagctttatgcaatgcatgtgaactctcaggaaagtctttgtttgtactgccgcacactgaccaccttgtgggttatattataagattggaaaatgccttttatgaacatgcacagacttattactacactgagatcagaagagtgaaatctcataaagaatttttgaataaaacaacacaccagcttttatttgttaggcatcagttcaaaatagctttcttcagtgagttgaaacaagatacacaaaatgcgctgaagaattataggaccgcctataatcttgtacacgaattgagagcccatgaaactaatattctggaaattaagactatggcaggatttataaactacaagatctgtaggctgtgttttcaacacaacaccccattggatgcaattgctcagttccgaaaacacatcgacttgtgtaagaaaaagattggaagtgcagagctgtcttttgagcatgatgcatggatgtctaaacaattccaggcctttggagatttatttgatgaagctattaagttagggttaacagctattcaaactcagaatcctggtttctattaccagcaggcagcatactatgcccaggagcggaaacagcttgcaaaaaccctctgtaaccacgaagcttctgtaatgtatcccaatcctgatcccttagaaacacaaacaggcgttcttgacttttatggacaaagatcatggcgacaaggaatactaagttttgatctttctgatcctgaaaaagaaaaggtgggaattcttgccattcagctgaaggagagaaatgttgttcactctgagataatcataactcttctgagcaatgctgttgcacagttcaagaagtataagtgcccgcgaatgaaaagtcacctaatggttcagatgggagaggaatattattacgcaaaggattataccaaagctttgaagttgctggattatgtgatgtgtgattatcggagtgaaggatggtggactctgctcacttctgtattaactacagctctgaagtgctcctacctcatggcccaattaaaggattacattacttactccctagaactccttggtagagcttcaactctgaaagatgaccagaagtctcggatagaaaagaacctcataaatgttttaatgaatgaaagtcctgatccagaacccgactgtgatatcttagctgtgaaaactgctcagaagctgtgggcagaccgaatttctctggctggcagcaatattttcacaataggagtacaggactttgtgccatttgtgcagtgcaaagccaagtttcatgccccaagttttcatgttgatgttcctgttcagtttgatatttatctgaaggctgattgtccacatcccattaggttttccaagctctgtgtcagctttaataatcaggaatacaaccagttctgtgtaatagaagaagcatccaaagcaaatgaagttttagaaaatctgactcaaggaaagatgtgcctagttcctggcaaaacaagaaaactgttatttaagtttgttgcaaaaactgaagatgtgggaaagaaaattgagattacttcagtggatcttgctctgggcaatgagacgggaagatgtgtggttttaaattggcagggaggaggaggagatgctgcttcctcccaagaagccttacaggcagctcggtctttcaaaaggcgacctaagctacctgacaatgaagttcactgggacagcattataattcaggcaagcacaatgatcatatccagagtcccaaacatttctgtacatctgctacatgaaccccctgcactgactaatgaaatgtattgtttggttgtgactgttcagtcccatgaaaagacccaaatcagagatgtgaagctcaccgctggcttaaaaccaggacaggatgccaatttaactcagaagactcacgtgactcttcatggaacagaactgtgtgatgaatcctacccggctttactcactgacattcctgttggagacttacatccaggggaacagctggaaaaaatgttgtatgttcgctgtggaacagtgggttccagaatgtttcttgtatatgtttcttacctgataaatacaaccgttgaagaaaaagaaattgtttgcaagtgtcacaaggatgaaactgtaacaattgaaacagtctttccatttgatgttgcggttaaatttgtttctaccaagtttgagcacctggaaagggtttatgctgacatcccctttctgttgatgacggacctcttaagtgcctcaccctgggccctcactattgtttccagtgagctccagcttgctccatccatgaccacagtggaccagctcgagtctcaagtggacaatgttatcttacagactggagagagtgctagtgcattatattatctcttggaaaaggacctcagcaatggagaatatccccatcatcacaactgtcatcactctgccgcacgtgattgtggagaatatccctctccatgtgaatgcagatctgccgtcatttgggcgtgtcagagagtcgttacctgtcaagtatcacctacagaataagaccgacttagttcaagatgtagaaatttctgtggagcccagtgatgccttcatgttctcaggtctcaaacagattcgattacgtatcctccctggcacggagcaggaaatgctatataatttctatcctctgatggctggataccagcagctgccatctctcaacatcaacttgcttagatttcctaacttcacaaatcagctgctcaggcgttttatacctaccagtatttttgtcaagccacagggtcgactcatggatgatacctctattgctgctgcatgatgttcaagaccggcccttggctgttgttacagagatgttgggcagagctatgcaggtgtttcattgtgaactctagctttgatcatggtaaaaagttaaccttttctattttttaatggatgttataccaactattcagaggaactcatacttcaaaaatattaggaaaatctgtcttatagtttctctaataaatatctgaaatctcagtacgacatgaaagaatgtcagaccattgttattgttgaaagtcatttgatgaatggtaaattctatgaaaagtaagtgatttgcatgtataatatcaggaaaattaagcatcccaagtgtgactggacaaagagagcagatgcaccagtgcctgtgccataaagttccgaatcccccatgtgtctctttcagagctggccagaccggaaataaatcattctcataaattcagtgtgtactcagaacacatacacaacaacatagggagttgtatgactgatacggaaaacttccagaaagttttaatcaaagcagtttaattaaggtatcaaaaatatctttgcttactatcaagaagtgtcaaataggttcagcttgctgccaaaatatggatcatttatgaagcaggttcatattttagaggtgttaataaaatcctcatcggaaaagatccaaagtgcaaggatttgattataaacataatttcctagactgaaagtttttggaaaagatgcagggtctgagtcaggccttctggttatattgtgcagtttcaaaagaactatttaaaactcttgaaaactcatgtaaataaaaatcatagggtgaaaattgtatttgttaaaataccttaataatttaaaatgacctgatttcctggaaaattttattattcaaaaggtggaggcattgtaaaaaggaaatagtgatgtaaataaacatgttctctttcaagt

SEQ ID NO: 31846 - DNA, 2505 bp, Homo sapiens
  source 1..2505: mol_type = unassigned DNA
tttccggcctgggggcagggcctcgggttcctgcatcgggcctgagcagaactaggcgcgccgcggcccggcacgcgcaggcgtacagagctccccgggggtgccagttcctctccgattcccggcttctgtcaccttcctcacggaccttggtcacggccgcaggtgaccccttagcccagctccagtgggcgggtggcagggtcatggaggacgctggcggcggcgaggagcaggggttgctcttccaggaggaaaccatcgatcttggcggagatgagtttggatccgaagagaacgagaccgcatcggaaggctcgagtcctctcgcggacaagctgaacgaacacatgatggagagcgtcctcatctctgactcccccaacagcgagggcgacgcgggcgacctgggccgagtgcgggacgaagctgagcccggaggggaaggcgacccaggcccggagcccgcgggcaccccgagtcccagcggcgaggccgacggcgactgtgcccccgaggacgcggcacccagtagcggaggggccccgaggcaggacgcggcccgcgaggtcccaggcagcgaagccgcgcgcccggagcaggagcctcccgttgcggagccggtcccggtgtgcaccatcttcagccagcgcgcgcccccagcctccggggacggcttcgagccgcagatggtgaagtcgcccagcttcggtggcgccagcgaggcctcggccaggacaccgccccaggtcgtgcagcccagccccagcctcagcacgttcttcggagacacggccgccagccactccttggcctcggacttcttcgactcctttactacctccgccttcatttccgtcagcaatcccggcgcgggctccccggcccccgccagcccgcctcccctcgctgtgcccgggaccgaggggcgccccgaacccgtggccatgcgagggccccaggcagctgcgcccccggcgtcgccagagcctttcgcgcacatccaggcagtgtttgcagggagtgacgacccctttgccaccgccctgagcatgagcgagatggaccggaggaacgacgcctggcttcccggcgaggctacgcgtggagtcctgcgggccgtggccacccagcagcgcggcgccgtgttcgtggacaaggagaacctcaccatgccgggcctcaggttcgacaacatccagggagatgcagttaaagacttgatgcttcgctttctgggtgaaaaagctgcagcaaagagacaagtcctaaatgccgactcagtggaacaatcttttgttggattgaaacagctaatcagctgcagaaactggagggcagcagtggacctgtgcggacgtctcctcacagcccacggccagggctacggcaagagcgggctgctcaccagccacacgacagattcactgcagctctggtttgtcaggctggcactactagtgaagttgggccttttccagaatgctgagatggaatttgaacccttcggaaatcttgatcagccagatctttattacgagtactacccgcacgtgtaccctgggcgcaggggctccatggtccccttctcgatgcgcatcttgcacgcggagcttcagcagtacctggggaacccacaggagtcgctggatagactgcacaaggtgaagactgtctgcagcaagatcctggccaatttggagcaaggcttagcagaagacggcggcatgagcagcgtgactcaggagggcagacaaggctgctcttaccttgtagcctctatccggctgtggaggtcacgtctgggccgggtgatgtactccatggcaaactgtctgctcctgatgaaggattatgtgctggccgtggaggcgtatcattcggttatcaagtattacccagagcaagagccccagctgctcagcggcatcggccggatttccctgcagattggagacataaaaacagctgaaaagtattttcaagacgttgagaaagtaacacagaaattagatggactacagggtaaaatcatggttttgatgaacagcgcgttccttcacctcgggcagaataactttgcagaagcccacaggttcttcacagagatcttaaggatggatccaagaaacgcagtgcagatgctgtcagcctcgcatcctacaggaaaggaaccatcgccaaaagacgctgaggaacatcccgagggtcacagggacagtgcagagccaggaccagcccggcccatggtcccccagcgtgcaccacctggcccggcactgtgtgctcagccatgaggactgggaagagtcctgcccacagctcaagtgtctacaccgcactgccatccaggctgtgagccgctgctgagcatggggaatgtggctgctgcagagacgttatgaaacacttctaaaagaatgtaaaagatctcattaataattttgagtacctgttaaaatgatagtaattttggatctagtagattaaataaaacatattatt

SEQ ID NO: 31847 - DNA, 2508 bp, Homo sapiens
  source 1..2508: mol_type = unassigned DNA
ggggcagggcctcgggttcctgcatcgggcctgagcagaactaggcgcgccgcggcccggcacgcgcaggcgtacagagctccccgggggtgccagttcctctccgattcccggcttctgtcaccttcctcacggaccttggtcacggccgcaggtgaccccttagcccagctccagtgggcgggtggcagggtcatggaggacgctggcggcggcgaggagaccccggccccggaggccccgcacccccctcagctcgcgcctccggaggagcaggggttgctcttccaggaggaaaccatcgatcttggcggagatgagtttggatccgaagagaacgagaccgcatcggaaggctcgagtcctctcgcggacaagctgaacgaacacatgatggagagcgtcctcatctctgactcccccaacagcgagggcgacgcgggcgacctgggccgagtgcgggacgaagctgagcccggaggggaaggcgacccaggcccggagcccgcgggcaccccgagtcccagcggcgaggccgacggcgactgtgcccccgaggacgcggcacccagtagcggaggggccccgaggcaggacgcggcccgcgaggtcccaggcagcgaagccgcgcgcccggagcaggagcctcccgttgcggagccggtcccggtgtgcaccatcttcagccagcgcgcgcccccagcctccggggacggcttcgagccgcagatggtgaagtcgcccagcttcggtggcgccagcgaggcctcggccaggacaccgccccaggtcgtgcagcccagccccagcctcagcacgttcttcggagacacggccgccagccactccttggcctcggacttcttcgactcctttactacctccgccttcatttccgtcagcaatcccggcgcgggctccccggcccccgccagcccgcctcccctcgctgtgcccgggaccgaggggcgccccgaacccgtggccatgcgagggccccaggcagctgcgcccccggcgtcgccagagcctttcgcgcacatccaggcagtgtttgcagggagtgacgacccctttgccaccgccctgagcatgagcgagatggaccggaggaacgacgcctggcttcccggcgaggctacgcgtggagtcctgcgggccgtggccacccagcagcgcggcgccgtgttcgtggacaaggagaacctcaccatgccgggcctcaggttcgacaacatccagggagatgcagttaaagacttgatgcttcgctttctgggtgaaaaagctgcagcaaagagacaagtcctaaatgccgactcagtggaacaatcttttgttggattgaaacagctaatcagctgcagaaactggagggcagcagtggacctgtgcggacgtctcctcacagcccacggccagggctacggcaagagcgggctgctcaccagccacacgacagattcactgcagctctggtttgtcaggctggcactactagtgaagttgggccttttccagaatgctgagatggaatttgaacccttcggaaatcttgatcagccagatctttattacgagtactacccgcacgtgtaccctgggcgcaggggctccatggtccccttctcgatgcgcatcttgcacgcggagcttcagcagtacctggggaacccacaggagtcgctggatagactgcacaaggtgaagactgtctgcagcaagatcctggccaatttggagcaaggcttagcagaagacggcggcatgagcagcgtgactcaggagggcagacaagcctctatccggctgtggaggtcacgtctgggccgggtgatgtactccatggcaaactgtctgctcctgatgaaggattatgtgctggccgtggaggcgtatcattcggttatcaagtattacccagagcaagagccccagctgctcagcggcatcggccggatttccctgcagattggagacataaaaacagctgaaaagtattttcaagacgttgagaaagtaacacagaaattagatggactacagggtaaaatcatggttttgatgaacagcgcgttccttcacctcgggcagaataactttgcagaagcccacaggttcttcacagagatcttaaggatggatccaagaaacgcagtggccaacaacaacgctgccgtgtgtctgctctacctgggcaagctcaaggactccctgcggcagctggaggccatggtccagcaggaccccaggcactacctgcacgagagcgtgctcttcaacctgaccaccatgtacgagctggagtcctcacggagcatgcagaagaaacaggccctgctggaggctgtcgccggcaaggagggggacagcttcaacacacagtgcctcaagctggcctagctgcctccaacacactacgtcagaaggacccgggtctttgaaactgtgtcttgaagctaatgtattaatgtgacatggaggaactcaataaaactcctgcttcac

SEQ ID NO: 31848 - DNA, 2483 bp, Homo sapiens
  source 1..2483: mol_type = unassigned DNA
tttccggcctgggggcagggcctcgggttcctgcatcgggcctgagcagaactaggcgcgccgcggcccggcacgcgcaggcgtacagagctccccgggggtgccagttcctctccgattcccggcttctgtcaccttcctcacggaccttggtcacggccgcagggtcatggaggacgctggcggcggcgaggagaccccggccccggaggccccgcacccccctcagctcgcgcctccggaggagcaggggttgctcttccaggaggaaaccatcgatcttggcggagatgagtttggatccgaagagaacgagaccgcatcggaaggctcgagtcctctcgcggacaagctgaacgaacacatgatggagagcgtcctcatctctgactcccccaacagcgagggcgacgcgggcgacctgggccgagtgcgggacgaagctgagcccggaggggaaggcgacccaggcccggagcccgcgggcaccccgagtcccagcggcgaggccgacggcgactgtgcccccgaggacgcggcacccagtagcggaggggccccgaggcaggacgcggcccgcgaggtcccaggcagcgaagccgcgcgcccggagcaggagcctcccgttgcggagccggtcccggtgtgcaccatcttcagccagcgcgcgcccccagcctccggggacggcttcgagccgcagatggtgaagtcgcccagcttcggtggcgccagcgaggcctcggccaggacaccgccccaggtcgtgcagcccagccccagcctcagcacgttcttcggagacacggccgccagccactccttggcctcggacttcttcgactcctttactacctccgccttcatttccgtcagcaatcccggcgcgggctccccggcccccgccagcccgcctcccctcgctgtgcccgggaccgaggggcgccccgaacccgtggccatgcgagggccccaggcagctgcgcccccggcgtcgccagagcctttcgcgcacatccaggcagtgtttgcagggagtgacgacccctttgccaccgccctgagcatgagcgagatggaccggaggaacgacgcctggcttcccggcgaggctacgcgtggagtcctgcgggccgtggccacccagcagcgcggcgccgtgttcgtggacaaggagaacctcaccatgccgggcctcaggttcgacaacatccagggagatgcagttaaagacttgatgcttcgctttctgggtgaaaaagctgcagcaaagagacaagtcctaaatgccgactcagtggaacaatcttttgttggattgaaacagctaatcagctgcagaaactggagggcagcagtggacctgtgcggacgtctcctcacagcccacggccagggctacggcaagagcgggctgctcaccagccacacgacagattcactgcagctctggtttgtcaggctggcactactagtgaagttgggccttttccagaatgctgagatggaatttgaacccttcggaaatcttgatcagccagatctttattacgagtactacccgcacgtgtaccctgggcgcaggggctccatggtccccttctcgatgcgcatcttgcacgcggagcttcagcagtacctggggaacccacaggagtcgctggatagactgcacaaggtgaagactgtctgcagcaagatcctggccaatttggagcaaggcttagcagaagacggcggcatgagcagcgtgactcaggagggcagacaagcctctatccggctgtggaggtcacgtctgggccgggtgatgtactccatggcaaactgtctgctcctgatgaaggattatgtgctggccgtggaggcgtatcattcggttatcaagtattacccagagcaagagccccagctgctcagcggcatcggccggatttccctgcagattggagacataaaaacagctgaaaagtattttcaagacgttgagaaagtaacacagaaattagatggactacagggtaaaatcatggttttgatgaacagcgcgttccttcacctcgggcagaataactttgcagaagcccacaggttcttcacagagatcttaaggatggatccaagaaacgcagtggccaacaacaacgctgccgtgtgtctgctctacctgggcaagctcaaggactccctgcggcagctggaggccatggtccagcaggaccccaggcactacctgcacgagagcgtgctcttcaacctgaccaccatgtacgagctggagtcctcacggagcatgcagaagaaacaggccctgctggaggctgtcgccggcaaggagggggacagcttcaacacacagtgcctcaagctggcctagctgcctccaacacactacgtcagaaggacccgggtctttgaaactgtgtcttgaagctaatgtattaatgtgacatggaggaactcaataaaactcctgcttcact

SEQ ID NO: 31849 - DNA, 1980 bp, Homo sapiens
  source 1..1980: mol_type = unassigned DNA
ggctacaggttcggggcgcgggtctcttccgcggaaactgacattgcgtttccgttgtcggcctcccactgcaggagccatatattgaagaccatgtctgggagcttctactttgtaattgttggccaccatgataatccagtttttgaaatggagtttttgccagctgggaaggcagaatccaaagacgaccatcgtcatctgaaccagttcatagctcatgctgctctcgacctcgtagatgagaacatgtggctatcgaacaacatgtacttgaaaactgtggacaagttcaacgagtggtttgtgtcggcatttgtcactgcggggcatatgaggtttattatgcttcatgacataagacaagaagatggaataaagaacttctttactgatgtttatgatttatatataaagttttcaatgaatccattttatgaacccaattctcctattcgatcaagtgcatttgacagaaaagttcagtttcttgggaagaaacaccttttaagctgaatgcagaaaattccaaaataaatgatgtcaccacaatggtgtatactcaggaatgtgtacattgtaagttacttgattaaatagcctggaaaacttttgtgtattctcagcttatctaaacctaatgaaattccttttatatttaaaaatagtacattctgtctcatgtcacgtatcaatagatcaattggtatttccttgtgaacagtgttatttataaagagttcattatcaataatcatgttttttttttttttttttttctgatacagagtctcactctgttgccaggctggagtgcagtggcgcaatcttggctcactgcaacctccgcctcccaggttcaggcgattctcctgcctcagcctccaagtagctgggactacaggcgcgtgccaccacgcccggctaatttttgtatttttagtagagacagggtttcaccatattggtcaggctggtcttgaactcctgacctcgtgatctgcccgcctcagcctcccaaagtgctaggattacaggcatgaaccaccgtgcccggccaggaataagcttttgacttacccaattcagataggttgatctttggggttttttttttttttttgagatggagtttcgctctgttgtccaggctggagtgcaatggcagttgtttcaccgtaacctctgcctcctgacttcaagcaattctcctgcctcagcctcccaaagtgctgggattacaggtgtgagccaccgtgcccggcccagataggttgatcttaatgtaacaacccaaaaataaatgtcatagtcaagatttggtagataaatttaaaattaaaatattctgcagttgggagtgaaatgtgatagcacatacgttgacattatgcatttagagatgttataaaaatgtataggcagtatacacagcactactcaagaagccaaagaaacacttgtgcagtgctaagtgtcacatgtctgcttccaccagaggctaggaatagtgatcctgctataatgtgagaacccaaatcatgtttataaaataggacgctgggagcagttgcaggccacagtgaagtgtgttgcttctgtcactttatattcttatatttcctttccctcagacagtaaactgttgatactcgtacttgtaaaaaattgtaaggcaatttttagtattgttgtcaaagaaaagcttggattacattaacatttgtattcagtcttttaggtgatacaccagagggggctgggaattgtctctttgttcctataagtagatcttaatgtaaaatagtaaatgtccattgaaaagcaagtaatacagcctgtgctaattgggagcacttgaacaattttgttccattctgagtaacttttgagcaagtaattctaagctttgtcttgtatccttgtgtgaaattgcataatttttaccctatttgatttcttaaataaagatgtttgctc

SEQ ID NO: 31850 - DNA, 2716 bp, Homo sapiens
  source 1..2716: mol_type = unassigned DNA
acatcccagggtatcgcgagaactgcttcggcgttctggctacaggttcggggcgcgggtctcttccgcggaaactgacattgcgtttccgttgtcggcctcccactgcaggagccatatattgaagaccatgtctgggagcttctactttgtaattgttggccaccatgataatccagtttttgaaatggagtttttgccagctgggaaggcagaatccaaagacgaccatcgtcatctgaaccagttcatagctcatgctgctctcgacctcgtagatgagaacatgtggctatcgaacaacatgtacttgaaaactgtggacaagttcaacgagtggtttgtgtcggcatttgtcactgcggggcatatgaggtttattatgcttcatgacataagacaagaagatggaataaagaacttctttactgatgtttatgatttatatataaagttttcaatgaatccattttatgaacccaattctcctattcgatcaagtgcatttgacagaaaagttcagtttcttgggaagaaacaccttttaagctgaatgcagaaaattccaaaataaatgatgtcaccacaatggtgtatactcaggaatgtgtacattgtaagttacttgattaaatagcctggaaaacttttgtgtattctcagcttatctaaacctaatgaaattccttttatatttaaaaatagtacattctgtctcatgtcacgtatcaatagatcaattggtatttccttgtgaacagtgttatttataaagagttcattatcaataatcatgttttttttttttttttttttctgatacagagtctcactctgttgccaggctggagtgcagtggcgcaatcttggctcactgcaacctccgcctcccaggttcaggcgattctcctgcctcagcctccaagtagctgggactacaggcgcgtgccaccacgcccggctaatttttgtatttttagtagagacagggtttcaccatattggtcaggctggtcttgaactcctgacctcgtgatctgcccgccttggcctcccaaagtactgggattacaggcgtgagccaccgtgcccaaccatgaaatatttttacttaaaaattgggaataagctcgctttttttttttttgagatggagtcttgctcctgttgtgcaggctgtagtgcagtggcacgatcttggctcactgcaacctccacctcccgggttcaagcaattctccttcttcagcctcccgagtagctgagattataggcgtgcaccaccacacctggctaatttttgtatttttagtagagacagggtttcaccatattggtcaggctggtcttgaactcctgacctcgtgatccacccacctcaggaagtgctgggattacaggcgtgtgagccaccacgcccggccatgaaatatttttacttaaaaattgggaataagctttttggttttttgtgggtttttgtttttgttttttgttttttgtttttttgagatggagtcttgctcctgttgtgcaggctggagtgcagtggcacagtcttggctcactgcaacctccacctcctgggttcaagcaattctccttcttcagcctcccgagtagctgggattacaggcatgcaccaccacacctggctaatttttgtgtttttagtagagacggggtttcgctattttggccgggctggtttcaaactcctgacctcagttgatccacccgcctcagcctcccaaagtgctaggattacaggcatgaaccaccgtgcccggccaggaataagcttttgacttacccaattcagataggttgatctttggggttttttttttttttttgagatggagtttcgctctgttgtccaggctggagtgcaatggcagttgtttcaccgtaacctctgcctcctgacttcaagcaattctcctgcctcagcctcccaaagtgctgggattacaggtgtgagccaccgtgcccggcccagataggttgatcttaatgtaacaacccaaaaataaatgtcatagtcaagatttggtagataaatttaaaattaaaatattctgcagttgggagtgaaatgtgatagcacatacgttgacattatgcatttagagatgttataaaaatgtataggcagtatacacagcactactcaagaagccaaagaaacacttgtgcagtgctaagtgtcacatgtctgcttccaccagaggctaggaatagtgatcctgctataatgtgagaacccaaatcatgtttataaaataggacgctgggagcagttgcaggccacagtgaagtgtgttgcttctgtcactttatattcttatatttcctttccctcagacagtaaactgttgatactcgtacttgtaaaaaattgtaaggcaatttttagtattgttgtcaaagaaaagcttggattacattaacatttgtattcagtcttttaggtgatacaccagagggggctgggaattgtctctttgttcctataagtagatcttaatgtaaaatagtaaatgtccattgaaaagcaagtaatacagcctgtgctaattgggagcacttgaacaattttgttccattctgagtaacttttgagcaagtaattctaagctttgtcttgtatccttgtgtgaaattgcataatttttaccctatttgatttcttaaataaagatgtttgctcaag

SEQ ID NO: 31851 - DNA, 2776 bp, Homo sapiens
  source 1..2776: mol_type = unassigned DNA
attgcgtttccgttgtcggcctcccactgcagtatcaccttctcccccaagtgtgacaaccaaagatgtctccagatattgccagatgtcctcttggaagcaagatcgctccgggttgagatccacagagctaaacgttttagagtaccaaccattgtgtgctgtgaggtaaaggagccatatattgaagaccatgtctgggagcttctactttgtaattgttggccaccatgataatccagtttttgaaatggagtttttgccagctgggaaggcagaatccaaagacgaccatcgtcatctgaaccagttcatagctcatgctgctctcgacctcgtagatgagaacatgtggctatcgaacaacatgtacttgaaaactgtggacaagttcaacgagtggtttgtgtcggcatttgtcactgcggggcatatgaggtttattatgcttcatgacataagacaagaagatggaataaagaacttctttactgatgtttatgatttatatataaagttttcaatgaatccattttatgaacccaattctcctattcgatcaagtgcatttgacagaaaagttcagtttcttgggaagaaacaccttttaagctgaatgcagaaaattccaaaataaatgatgtcaccacaatggtgtatactcaggaatgtgtacattgtaagttacttgattaaatagcctggaaaacttttgtgtattctcagcttatctaaacctaatgaaattccttttatatttaaaaatagtacattctgtctcatgtcacgtatcaatagatcaattggtatttccttgtgaacagtgttatttataaagagttcattatcaataatcatgttttttttttttttttttttctgatacagagtctcactctgttgccaggctggagtgcagtggcgcaatcttggctcactgcaacctccgcctcccaggttcaggcgattctcctgcctcagcctccaagtagctgggactacaggcgcgtgccaccacgcccggctaatttttgtatttttagtagagacagggtttcaccatattggtcaggctggtcttgaactcctgacctcgtgatctgcccgccttggcctcccaaagtactgggattacaggcgtgagccaccgtgcccaaccatgaaatatttttacttaaaaattgggaataagctcgctttttttttttttgagatggagtcttgctcctgttgtgcaggctgtagtgcagtggcacgatcttggctcactgcaacctccacctcccgggttcaagcaattctccttcttcagcctcccgagtagctgagattataggcgtgcaccaccacacctggctaatttttgtatttttagtagagacagggtttcaccatattggtcaggctggtcttgaactcctgacctcgtgatccacccacctcaggaagtgctgggattacaggcgtgtgagccaccacgcccggccatgaaatatttttacttaaaaattgggaataagctttttggttttttgtgggtttttgtttttgttttttgttttttgtttttttgagatggagtcttgctcctgttgtgcaggctggagtgcagtggcacagtcttggctcactgcaacctccacctcctgggttcaagcaattctccttcttcagcctcccgagtagctgggattacaggcatgcaccaccacacctggctaatttttgtgtttttagtagagacggggtttcgctattttggccgggctggtttcaaactcctgacctcagttgatccacccgcctcagcctcccaaagtgctaggattacaggcatgaaccaccgtgcccggccaggaataagcttttgacttacccaattcagataggttgatctttggggttttttttttttttttgagatggagtttcgctctgttgtccaggctggagtgcaatggcagttgtttcaccgtaacctctgcctcctgacttcaagcaattctcctgcctcagcctcccaaagtgctgggattacaggtgtgagccaccgtgcccggcccagataggttgatcttaatgtaacaacccaaaaataaatgtcatagtcaagatttggtagataaatttaaaattaaaatattctgcagttgggagtgaaatgtgatagcacatacgttgacattatgcatttagagatgttataaaaatgtataggcagtatacacagcactactcaagaagccaaagaaacacttgtgcagtgctaagtgtcacatgtctgcttccaccagaggctaggaatagtgatcctgctataatgtgagaacccaaatcatgtttataaaataggacgctgggagcagttgcaggccacagtgaagtgtgttgcttctgtcactttatattcttatatttcctttccctcagacagtaaactgttgatactcgtacttgtaaaaaattgtaaggcaatttttagtattgttgtcaaagaaaagcttggattacattaacatttgtattcagtcttttaggtgatacaccagagggggctgggaattgtctctttgttcctataagtagatcttaatgtaaaatagtaaatgtccattgaaaagcaagtaatacagcctgtgctaattgggagcacttgaacaattttgttccattctgagtaacttttgagcaagtaattctaagctttgtcttgtatccttgtgtgaaattgcataatttttaccctatttgatttcttaaataaagatgtttgctc

SEQ ID NO: 31852 - DNA, 1982 bp, Homo sapiens
  source 1..1982: mol_type = unassigned DNA
ggctacaggttcggggcgcgggtctcttccgcggaaactgacattgcgtttccgttgtcggcctcccactgcaggagccatatattgaagaccatgtctgggagcttctactttgtaattgttggccaccatgataatccagtttttgaaatggagtttttgccagctgggaaggcagaatccaaagacgaccatcgtcatctgaaccagttcatagctcatgctgctctcgacctcgtagatgagaacatgtggctatcgaacaacatgtacttgaaaactgtggacaagttcaacgagtggtttgtgtcggcatttgtcactgcggggcatatgaggtttattatgcttcatgacataagacaagaagatggaataaagaacttctttactgatgtttatgatttatatataaagttttcaatgaatccattttatgaacccaattctcctattcgatcaagtgcatttgacagaaaagttcagtttcttgggaagaaacaccttttaagctgaatgcagaaaattccaaaataaatgatgtcaccacaatggtgtatactcaggaatgtgtacattgtaagttacttgattaaatagcctggaaaacttttgtgtattctcagcttatctaaacctaatgaaattccttttatatttaaaaatagtacattctgtctcatgtcacgtatcaatagatcaattggtatttccttgtgaacagtgttatttataaagagttcattatcaataatcatgttttttttttttttttttttctgatacagagtctcactctgttgccaggctggagtgcagtggcgcaatcttggctcactgcaacctccgcctcccaggttcaggcgattctcctgcctcagcctccaagtagctgggactacaggcgcgtgccaccacgcccggctaatttttgtatttttagtagagacagggtttcaccatattggtcaggctggtcttgaactcctgacctcttgatccacccgcctcagcctcccaaagtgctaggattacaggcatgaaccaccgtgcccggccaggaataagcttttgacttacccaattcagataggttgatctttggggttttttttttttttttgagatggagtttcgctctgttgtccaggctggagtgcaatggcagttgtttcaccgtaacctctgcctcctgacttcaagcaattctcctgcctcagcctcccaaagtgctgggattacaggtgtgagccaccgtgcccggcccagataggttgatcttaatgtaacaacccaaaaataaatgtcatagtcaagatttggtagataaatttaaaattaaaatattctgcagttgggagtgaaatgtgatagcacatacgttgacattatgcatttagagatgttataaaaatgtataggcagtatacacagcactactcaagaagccaaagaaacacttgtgcagtgctaagtgtcacatgtctgcttccaccagaggctaggaatagtgatcctgctataatgtgagaacccaaatcatgtttataaaataggacgctgggagcagttgcaggccacagtgaagtgtgttgcttctgtcactttatattcttatatttcctttccctcagacagtaaactgttgatactcgtacttgtaaaaaattgtaaggcaatttttagtattgttgtcaaagaaaagcttggattacattaacatttgtattcagtcttttaggtgatacaccagagggggctgggaattgtctctttgttcctataagtagatcttaatgtaaaatagtaaatgtccattgaaaagcaagtaatacagcctgtgctaattgggagcacttgaacaattttgttccattctgagtaacttttgagcaagtaattctaagctttgtcttgtatccttgtgtgaaattgcataatttttaccctatttgatttcttaaataaagatgtttgctcaa

SEQ ID NO: 31853 - DNA, 2879 bp, Homo sapiens
  source 1..2879: mol_type = unassigned DNA
acatcccagggtatcgcgagaactgcttcggcgttctggctacaggttcggggcgcgggtctcttccgcggaaactgacattgcgtttccgttgtcggcctcccactgcagtatcaccttctcccccaagtgtgacaaccaaagatgtctccagatattgccagatgtcctcttggaagcaagatcgctccgggttgagatccacagagctaaacgttttagagtaccaaccattgtgtgctgtgaggtaaaggagccatatattgaagaccatgtctgggagcttctactttgtaattgttggccaccatgataatccagtttttgaaatggagtttttgccagctgggaaggcagaatccaaagacgaccatcgtcatctgaaccagttcatagctcatgctgctctcgacctcgtagatgagaacatgtggctatcgaacaacatgtacttgaaaactgtggacaagttcaacgagtggtttgtgtcggcatttgtcactgcggggcatatccttaccttcttagtaaagatgaggtttattatgcttcatgacataagacaagaagatggaataaagaacttctttactgatgtttatgatttatatataaagttttcaatgaatccattttatgaacccaattctcctattcgatcaagtgcatttgacagaaaagttcagtttcttgggaagaaacaccttttaagctgaatgcagaaaattccaaaataaatgatgtcaccacaatggtgtatactcaggaatgtgtacattgtaagttacttgattaaatagcctggaaaacttttgtgtattctcagcttatctaaacctaatgaaattccttttatatttaaaaatagtacattctgtctcatgtcacgtatcaatagatcaattggtatttccttgtgaacagtgttatttataaagagttcattatcaataatcatgttttttttttttttttttttctgatacagagtctcactctgttgccaggctggagtgcagtggcgcaatcttggctcactgcaacctccgcctcccaggttcaggcgattctcctgcctcagcctccaagtagctgggactacaggcgcgtgccaccacgcccggctaatttttgtatttttagtagagacagggtttcaccatattggtcaggctggtcttgaactcctgacctcgtgatctgcccgccttggcctcccaaagtactgggattacaggcgtgagccaccgtgcccaaccatgaaatatttttacttaaaaattgggaataagctcgctttttttttttttgagatggagtcttgctcctgttgtgcaggctgtagtgcagtggcacgatcttggctcactgcaacctccacctcccgggttcaagcaattctccttcttcagcctcccgagtagctgagattataggcgtgcaccaccacacctggctaatttttgtatttttagtagagacagggtttcaccatattggtcaggctggtcttgaactcctgacctcgtgatccacccacctcaggaagtgctgggattacaggcgtgtgagccaccacgcccggccatgaaatatttttacttaaaaattgggaataagctttttggttttttgtgggtttttgtttttgttttttgttttttgtttttttgagatggagtcttgctcctgttgtgcaggctggagtgcagtggcacagtcttggctcactgcaacctccacctcctgggttcaagcaattctccttcttcagcctcccgagtagctgggattacaggcatgcaccaccacacctggctaatttttgtgtttttagtagagacggggtttcgctattttggccgggctggtttcaaactcctgacctcagttgatccacccgcctcagcctcccaaagtgctaggattacaggcatgaaccaccgtgcccggccaggaataagcttttgacttacccaattcagataggttgatctttggggttttttttttttttttgagatggagtttcgctctgttgtccaggctggagtgcaatggcagttgtttcaccgtaacctctgcctcctgacttcaagcaattctcctgcctcagcctcccaaagtgctgggattacaggtgtgagccaccgtgcccggcccagataggttgatcttaatgtaacaacccaaaaataaatgtcatagtcaagatttggtagataaatttaaaattaaaatattctgcagttgggagtgaaatgtgatagcacatacgttgacattatgcatttagagatgttataaaaatgtataggcagtatacacagcactactcaagaagccaaagaaacacttgtgcagtgctaagtgtcacatgtctgcttccaccagaggctaggaatagtgatcctgctataatgtgagaacccaaatcatgtttataaaataggacgctgggagcagttgcaggccacagtgaagtgtgttgcttctgtcactttatattcttatatttcctttccctcagacagtaaactgttgatactcgtacttgtaaaaaattgtaaggcaatttttagtattgttgtcaaagaaaagcttggattacattaacatttgtattcagtcttttaggtgatacaccagagggggctgggaattgtctctttgttcctataagtagatcttaatgtaaaatagtaaatgtccattgaaaagcaagtaatacagcctgtgctaattgggagcacttgaacaattttgttccattctgagtaacttttgagcaagtaattctaagctttgtcttgtatccttgtgtgaaattgcataatttttaccctatttgatttcttaaataaagatgtttgctcaag

SEQ ID NO: 31854 - DNA, 678 bp, Homo sapiens
  source 1..678: mol_type = unassigned DNA
ctcttccgcggaaactgacattgcgtttccgttgtcggcctcccactgcagtatcaccttctcccccaagtgtgacaaccaaagatgtctccagatattgccagatgtcctcttggaagcaagatcgctccgggttgagatccacagagctaaacgttttagagtaccaaccattgtgtgctgtgaggagccatatattgaagaccatgtctgggagcttctactttgtaattgttggccaccatgataatccagtttttgaaatggagtttttgccagctgggaaggcagaatccaaagacgaccatcgtcatctgaaccagttcatagctcatgctgctctcgacctcgtagatgagaacatgtggctatcgaacaacatgtacttgaaaactgtggacaagttcaacgagtggtttgtgtcggcatttgtcactgcggggcatatgaggtttattatgcttcatgacataagacaagaagatggaataaagaacttctttactgatgtttatgatttatatataaagttttcaatgaatccattttatgaacccaattctcctattcgatcaagtgcatttgacagaaaagttcagtttcttgggaagaaacaccttttaagctgaatgcagaaaattccaaaataaatgatgtcaccacaatggtgtatactca

SEQ ID NO: 31855 - DNA, 562 bp, Homo sapiens
  source 1..562: mol_type = unassigned DNA
atcccagggtatcgcgagaactgcttcggcgttctggctacaggttcggggcgcgggtctcttccgcggaaactgacattgcgtttccgttgtcggcctcccactgcagtatcaccttctcccccaagtgtgacaaccaaagatgtctccagatattgccagatgtcctcttggaagcaagatcgctccgggttgagatccacagagctaaacgttttagagtaccaaccattgtgtgctgtgaggtaaaggtaagtgacatgaggtagagttggttttagcttcccccgacggatgcctcctggaaatttctaaggcaaggagccatatattgaagaccatgtctgggagcttctactttgtaattgttggccaccatgataatccagtttttgaaatggagtttttgccagctgggaaggcagaatccaaagacgaccatcgtcatctgaaccagttcatagctcatgctgctctcgacctcgtagatgagaacatgtggctatcgaacaacatgtacttgaaaactgtggacaagttcaacgagtggtttgtgtcggca

SEQ ID NO: 31856 - DNA, 2215 bp, Homo sapiens
  source 1..2215: mol_type = unassigned DNA
gctttggaggccgcgtgaccagcggcgggtcacgtgacgcggtgcctggcgccgagcctcccaagatggcggtgtgcatcgcggtgattgccaaggagaattaccccctctacattcgcagcacccctacggagaacgagctgaagttccactacatggtgcacacatctctggacgtggtggatgagaagatctccgcaatggggaaggccctggtcgaccagagggagctgtacctgggcctgctctaccccacggaggactacaaggtatacggctacgtcaccaactccaaggtgaagtttgtcatggtggtagattcctccaacacagcccttcgagacaacgaaattcgcagcatgttccggaagctacacaactcctacacagacgtgatgtgcaaccccttctacaacccgggggaccgcatccagtccagcagggcctttgataacatggtgacgtcgatgatgatacaggtgtgctgagtgagctgtgctgccagccatcgcagaggagcccgcgcacgactgtggtggggccgtcggtctgttctggttgcctcttcctgaatgggacgcctggggctttcagggcaggcagctgtgcatgttctctcaactaaaggtcttgtgagaggagatttggctttttccttccgtgtcagccaaggatttaattaagaagaattcaactaaggacttttctggggtgtgggcagaggtttgggatcagatggcgcaggtagcctgtcctcagttgtcccaaaggggcagaggcaggggtgcctggagccaagagttcctgagcctgcaggacctgtgaccatgtgggtcacccactggctgaacaggtgggctggtctggagggggtggcctcctgagcccagaaccagcctaggatctaggggcacaaggggagccggcgtggcttcccacaggggagggccctcctctttctggacttggcctccattctttgcatctggctcaatgtctggattccgcccggccttaaaaggagcccttgtgaaacctgggaagcctcgtggccccgcggcgttggctcagctgcagccctggtcctaaaccttggagcgcagacttgaggcaccccctcctgcctgttggtgctgagggggttgggtgctgtgtcacttgatgacgtggctgactaccacccagggcagcggccgagcccatagtggcgtcagtgccgccggcgtccttggggtccagcggtcaaggctcagcccgctgaggggacccccccggagttggttccagcactggtccaggactggagagtttctcaaggaccttgaggaccccagaagcccttgcagcaggaaaggctgtaagggggggtcagcctagggcaggacctagggaggggaactttcttgatacatatttgccttttcatcccatctagcaagcacagtgttaattttagaaattatagaagaaaaaatcagcaaggagtgtgggaaaactgcatgccccaggcctcccccgccccagggtgaattggaagccctggaatgggccgaggcacaccaggcagctgatctgggtgcatgtgggccacagaccactctcacaaggttaaatctttaacaagagcctcatgtttgttaggagaaggtgggaccccagcccaagcacttccccattgcagcctggcatgaaatctttgccttttagtggggatcactcctgcccgagtcctggctgtggtggggactctgcaagttgctaacccagcgtccattctctttcctccgtactaacagaaccccggtgcctctgcccagttccaatagcgggcagacgagagccatgtcctgggctcccttgcagcccggggtgtgcagctgtggcgtggaggtgggtggtgctgggagagacttgcagggaagctcctgtgaaggggactcagctgccacatgcaggacccttcccctttgccttcttcctgcctggaacatggatgtgatggctggtgctgggacagctgtcctgagagcgtgaggaaagggtcacaccctaaggacagtggagcagaacacaggaaggaccctgggcctttgctgacgcagaacgcgggaaggaccctgggcctttgctgacataccagccccagactacttaaattcagctttttttttaatgtgagaaaataaatgcacccctctctggtttaagccactga

SEQ ID NO: 31857 - DNA, 590 bp, Homo sapiens
  source 1..590: mol_type = unassigned DNA
gcagtgagtcagtgccggtcggtcttgtgggctgaggggcagcggcttaggctccggcgtctgcaggggtcgccgagctaacccgtggctaggcgagtggggcggggcggccggcaccatgtcgaggcaggcgaaccgtggcaccgagagcaagaaaatgagctctgagctcttcaccctgacctatggtgccctggtcacccagctatgtaaggactatgaaaatgatgaagatgtgaataaacagctggacaaaatgggctttaacattggagtccggctgattgaagatttcttggctcggtcaaatgttgggaggtgccatgactttcgggaaactgcggatgtcattgccaaggaaagaaaaatgtttctgggaaaacaaaacaaaacaaagcgacaggcaaaactgtatgatgccgtgaaggagaggggtgcagcatcatgtacagatgcttctcctttgttgtcctgagtatctgaagtgtcatcttgcagaggccacaggtggcgttcaagatgtacttgggcatcactccaagcattactaattggagcccagctggtgatgaattctccctcattttgga

SEQ ID NO: 31858 - DNA, 1056 bp, Homo sapiens
  source 1..1056: mol_type = unassigned DNA
cgcagtgagtcagtgccggtcggtcttgtgggctgaggggcagcggcttaggctccggcgtctgcaggggtcgccgagctaacccgtggctaggcgagtggggcggggcggccggcaccatgtcgaggcaggcgaaccgtggcaccgagagcaagaaaatggtaacttggagcgcgtgacctcggcgggcggggcgaaattgaggcgtacagggaaggggcccggcgccgagcgcgaggtgcgtttggaaaagggccttcctgtgagctctggcaaggggaagcctcttgctgggtcactccgggggcgttccaggcaggtgaggggaccgtcggagaagttccccggaggagaccccgcccccaaggcctgagtgcagctctgtgctaagccaacaacaacgacgagctctgagctcttcaccctgacctatggtgccctggtcacccagctatgtaaggactatgaaaatgatgaagatgtgaataaacagctggacaaaatgggctttaacattggagtccggctgattgaagatttcttggctcggtcaaatgttgggaggtgccatgactttcgggaaactgcggatgtcattgccaaggtggcgttcaagatgtacttgggcatcactccaagcattactaattggagcccagctggtgatgaattctccctcattttggaaaataaccccttggtggactttgtggaacttcctgataaccactcatcccttatttattccaatctcttgtgtggggtgttgcggggagctttggagatggtccagatggctgtggaggccaagtttgtccaggacaccctgaaaggagacggtgtgacagaaatccggatgagattcatcaggcggattgaggacaatcttccagctggagaggaataaccatccctacaactcgaggatagccatcaggagcactgttggaatcagcaggcctctgtgctccctctgccctccagaactcagtgactcttgaacatggatgttatatattcttataacctgtttccattctccattcaaataaagag

SEQ ID NO: 31859 - DNA, 951 bp, Homo sapiens
  source 1..951: mol_type = unassigned DNA
cttaggctccggcgtctgcaggggtcgccgagctaacccgtggctaggcgagtggggcggggcggccggcaccatgtcgaggcaggcgaaccgtggcaccgagagcaagaaaatggtaacttggagcgcgtgacctcggcgggcggggcgaaattgaggcgtacagggaaggggcccggcgccgagcgcgagagctctgagctcttcaccctgacctatggtgccctggtcacccagctatgtaaggactatgaaaatgatgaagatgtgaataaacagctggacaaaatgggctttaacattggagtccggctgattgaagatttcttggctcggtcaaatgttgggaggtgccatgactttcgggaaactgcggatgtcattgccaaggtggcgttcaagatgtacttgggcatcactccaagcattactaattggagcccagctggtgatgaattctccctcattttggaaaataaccccttggtggactttgtggaacttcctgataaccactcatcccttatttattccaatctcttgtgtggggtgttgcggggagctttggagatggtccagatggctgtggaggccaagtttgtccaggacaccctgaaaggagacggtgtgacagaaatccggatgagattcatcaggcggattgaggacaatcttccagctggagaggaataaccatccctacaactcgaggatagccatcaggagcactgttggaatcagcaggcctctgtgctccctctgccctccagaactcagtgactcttgaacatggatgttatatattcttataacctgtttccattctccattcaaataaagagcagactgcgatatagtccatttaccccatgtgtgcacattcaggagcgacagtctctgcccccattcccttgagaggggctggatgtaatcacctttggttggactaga

SEQ ID NO: 31860 - DNA, 1265 bp, Homo sapiens
  source 1..1265: mol_type = unassigned DNA
tgggctgaggggcagcggcttaggctccggcgtctgcaggggtcgccgagctaacccgtggctaggcgagtggggcggggcggccggcaccatgtcgaggcaggcgaaccgtggcaccgagagcaagaaaatgagctctgagctcttcaccctgacctatggtgccctggtcacccagctatgtaaggactatgaaaatgatgaagatgtgaataaacagctggacaaaatgggctttaacattggagtccggctgattgaagatttcttggctcggtcaaatgttgggaggtgccatgactttcgggaaactgcggatgtcattgccaaggtggcgttcaagatgtacttgggcatcactccaagcattactaattggagcccagctggtgatgaattctccctcattttggaaaataaccccttggtggactttgtggaacttcctgataaccactcatcccttatttattccaatctcttgtgtggggtgttgcggggagctttggagatggtccagatggctgtggaggccaagtttgtccaggacaccctgaaaggagacggtgtgacagaaatccggatgagattcatcaggcggattgaggacaatcttccagctggagaggaataaccatccctacaactcgaggatagccatcaggagcactgttggaatcagcaggcctctgtgctccctctgccctccagaactcagtgactcttgaacatggatgttatatattcttataacctgtttccattctccattcaaataaagagcagactgcgatatagtccatttaccccatgtgtgcacattcaggagcgacagtctctgcccccattcccttgagaggggctggatgtaatcacctttggttggactagaaagagctcaaaccattttacattcctgtttgaatttttccaaagcaaaactcactttgaccccattaagaggcaagcctggcacatctatccctgggcctttagaaagccatttgcctcaaatggctatagggttgtggggtggagggaggaagggctgggagggagtggggaggaattgctagctgtagtgtgacacattgtagtgtttgccaggaaaggagccagtcatgccggaaacactgacttctgggaagccacccaggtctcattcctccctgctgttggaggcaacatctcctctttttacagagggtacatccttttttcttacaaattcttcaataaagacacattcttgagtgaaatcccaa

SEQ ID NO: 31861 - DNA, 794 bp, Homo sapiens
  source 1..794: mol_type = unassigned DNA
gaataccagtttccgagcggcaaggcagcgatggcgatttttagtgtgtatgtggtgaacaaagctggcggcttgatttaccagttggacagctacgcgccacgggctgaggctgagaaaactttcagttatccgctggatctgctgctcaagctacacgatgagcgtgtgttggttgctttcggccagcgggacggcatccgagtgggtcatgcagtgctggccatcaatggcatggacgtgaatggcaggtacacggccgacgggaaagagatgctggagacagacacattcaaattgcactgctaccagacactgacagggatcaagtttgtggttctagcagatcctaggcaagctggaatagattctcttctccgaaagatttatgagatttactcagactttgccctcaagaatccattctattccttagaaatgcctatcaggtgtgagctctttgaccagaacctgaagctagctctggaggtggcagagaaggctggaacttttggacctgggtcataggctgaacctgttatggacccccaaattctgagagttcctgcaacaagaatactgctgttgacactccagtggaaatcccagcagccttgttagtgcacttgaaagtgggagaatgctgaccctgatgacttgtactgattcctgagccttaacactgtgctctttccttctgtatataccatggtcttactttccaactctgtacagatttatttatggaggagctaggtccataaatgttgtaataaatattcctttgatcttgg

SEQ ID NO: 31862 - DNA, 1759 bp, Homo sapiens
  source 1..1759: mol_type = unassigned DNA
cggcgaagcgctcgccctctagcctgaggcggaagacaggaagtggattctagttcccaagccgcaccgcctaaatactgccggagtctgcgctagttgtgacgcatactatagcgctgttttcctgcactgataaacgaaaagcaatccaccaggtctcggcagctaactttccggcactacttatgcccgagcgtgtcgctcccagtgcgcaagtgcagcaggtggctgcacggggggcgcgggaggaggaggaggaggaggaggaggctggggtggggccggcggcaagtgctgtgatgcggttccggggaggggccgtcgggtagaggctgaataccagtttccgagcggcaaggcagcgatggcgatttttagtgtgtatgtggtgaacaaagctggcggcttgatttaccagttggacagctacgcgccacgggctgaggctgagaaaactttcagttatccgctggatctgctgctcaagctacacgatgagcgtgtgttggttgctttcggccagcgggacggcatccgagtgggtcatgcagtgctggccatcaatggcatggacgtgaatggcaggtacacggccgacgggaaagaggtgctggagtatctgggtaaccctgctaattacccggtgtccattcgatttggccggccccgcctcacttctaatgagaagcttatgctggcctccatgttccactcgctctttgccatcggctcccagctgtctcctgaacagggaagctcaggcattgagatgctggagacagacacattcaaattgcactgctaccagacactgacagggatcaagtttgtggttctagcagatcctaggcaagctggaatagattctcttctccgaaagatttatgagatttactcagactttgccctcaagaatccattctattccttagaaatgcctatcaggtgtgagctctttgaccagaacctgaagctagctctggaggtggcagagaaggctggaacttttggacctgggtcataggctgaacctgttatggacccccaaattctgagagttcctgcaacaagaatactgctgttgacactccagtggaaatcccagcagccttgttagtgcacttgaaagtgggagaatgctgaccctgatgacttgtactgattcctgagccttaacactgtgctctttccttctgtatataccatggtcttactttccaactctgtacagatttatttatggaggagctaggtccataaatgttgtaataaatattcctttgatcttggtgtttgcaatctgtcttaatcgatggttttgggggaaagatacaggaagtgagtcaaaaatggttagggaattctgggaagatgattatgtgctagtaaaaaacataacaaatatgtgttcattaaataaatgaacataagattttgaagcatgagcattggatctagtcccagaattgctgctgatttcctggggtcctggggtggtggcagcagtggtggtggctgttatgatgatgatgatgatggaacatatttcaagcacttacagccaggcattcctgctttatctcacttgatcttcaccctaactccagggggtacattctgttacagataagagatttagcagactttctgcctcaaagtttccaagctagttactgacagtctgggtttgaaccaggctttctggctacacactcagtaaaccactgttacacttcttccctccatcaagttatttaat

SEQ ID NO: 31863 - DNA, 6226 bp, Homo sapiens
  source 1..6226: mol_type = unassigned DNA
ggcctcaacatggcggttccggccgggcagtgaccaaggttttgccgtccgaaggactaagtggtgactgtcggcgtctccacctatcggggtggaatgcgagcacgcggggacgagcgctgagaagcggcggtgacgggaaggggggggtcagtggattgtgccccagaaaccgaagcggcggcgtctgttccttcttgtttctaggctccagtgcgttcggggccccgcccggccgggccaggccggcgggcggcggcggtagctgctgcagccgcaggataacctcgcagggtgggccggagggcgggcgccgccgctgcctgtgctgcggcgatggcccagtgtgtacaatcagtgcaggagctaatcccggactccttcgtcccctgtgtcgctgcgctgtgcagcgacgaagccgagcggctcactcgtctcaatcacctcagcttcgcggagctgcttaagcccttctcccgcctcacttccgaggttcacatgagagatcctaataatcaacttcacgtaattaaaaatttgaagatagcagtaagcaacattgtcacccagccacctcagcctggagccatccggaagcttttgaatgatgttgtttctggcagtcagcctgcagaaggattagtagctaatgtgattacagcaggagattatgaccttaacatcagtgccactactccatggtttgagtcttacagagaaacctttcttcagtcgatgccagcattggatcatgaatttctgaaccactatttagcatgtatgttggtagcgtcatctagtgaagctgaacctgtggaacagttttcaaagttgtcacaagaacagcatcgaattcagcacaacagtgattattcctaccccaagtggtttataccaaatacacttaaatactatgtacttttacatgatgtaagtgcaggagatgaacagagagctgaatcaatttatgaagaaatgaaacagaaatatggaactcagggttgctatttacttaaaattaattctcgaacatctaatcgagcatcagatgaacagataccagatccttggagtcagtatctccagaaaaatagtattcaaaaccaggaatcatatgaagatggcccttgtactataacttcaaataagaattctgataataacttgctttcattggatggattagataacgaagtcaaagatggcttaccaaataactttagagctcacccacttcagttggagcaatccagtgacccttctaacagtattgatggcccagatcatctaagatctgcttcatcgttacatgaaacaaagaaaggaaatactggaataattcatggtgcatgtttaacacttactgatcatgatagaattcgacagtttatacaagagttcacatttcggggccttttgccacatatagagaaaacaattaggcaattaaacgatcagctaatatcaagaaaaggtttgagtcgatctctattttctgcaactaaaaaatggtttagtggcagtaaagttccagaaaagagcattaatgacctgaaaaatacatctggcttgctgtatccgccggaagcaccagaacttcaaatcaggaaaatggctgacttatgttttttggtgcagcattatgatttggcttacagttgctatcatactgcaaagaaagattttcttaatgatcaagcaatgctttatgcagctggtgccttggaaatggcagcagtgtctgcttttcttcaaccaggagcacctaggccatatcctgctcattacatggatacagcaattcagacatacagagatatctgcaagaatatggtgttggctgaaagatgtgtgttgcttagtgctgaacttttaaaaagccaaagcaaatattcagaggctgcagctctcctaatacggttgaccagtgaggattctgatcttcgaagtgcacttcttttggaacaggcagcacattgctttataaacatgaaaagtcccatggttagaaaatatgcatttcatatgatattggcaggccatcgatttagtaaagcagggcagaaaaagcatgctttacgctgttattgtcaagccatgcaagtttacaaaggaaaaggctggtctcttgcagaggatcacattaatttcactattgggcgccagtcctatactcttagacagctggataatgctgtgtctgcttttaggcatattctaattaatgaaagtaaacaatctgctgctcaacagggggctttcctcagagaatatctttatgtttacaagaatgtaagtcagctgtcaccagatggtcctttgccacagcttcctttaccgtatattaacagttcagcaacacgggttttttttggccatgacagacgaccagcggatggtgaaaaacaagcagctactcatgtaagtcttgatcaagaatatgattctgaatcctctcagcagtggcgagaacttgaggaacaagttgtttctgtggttaacaaaggagtaattccatccaattttcatcccacacaatactgtttgaacagttactcagataattcaagatttccacttgcagttgtagaagaaccaattacagtggaagtggcttttagaaaccctttgaaagttctacttttgttgactgatttgtcattgctttggaagtttcatcctaaagatttcagtggaaaggataatgaagaagttaaacaactagttacaagtgaacctgaaatgattggagctgaagttatttcagagttcttaattaatggcgaagaatcaaaagtggcaagactaaagctctttccccatcacataggggagctgcatattctgggagttgtttataatcttggcactattcagggctctatgacagtagatggcattggtgctcttcccggatgtcacacaggaaaatattccttgagtatgtcagtccgagggaagcaggatttagaaattcaaggtcctcgacttaacaacacaaaagaagagaaaacatctgttaaatatggccctgatcgacgtttagatcccataatcacagaagaaatgccactgttggaggtgttctttatacattttcctacagggcttctctgtggagaaatccgaaaagcatatgtagaatttgtcaatgtcagcaaatgtccacttactggattgaaggttgtttctaaacgtccagagttctttactttcggtggtaatactgctgttctaacaccactaagtccctcagcttctgagaattgtagtgcttacaagactgttgtgacagatgctacctctgtgtgtacagcactcatatcatcagcttcttctgtagactttggcattggcacaggaagtcaaccagaggtgattcctgttccccttcctgacactgttcttctacccggagcctcagtgcagctgccaatgtggttacgtgggcctgatgaagaaggtgtccatgaaattaactttttgttttactatgaaagtgtcaaaaagcagccaaaaatacggcacagaatattaagacacactgcaattatttgtaccagtcggtctttaaatgtacgggccactgtctgcagaagtaattctcttgaaaatgaagaaggcagaggaggcaatatgctagtctttgtggatgtggaaaataccaatactagtgaagcaggcgttaaggaattccacatagtgcaagtatcaagtagtagcaaacactggaagttacagaaatctgtaaatctttctgaaaacaaagataccaaacttgccagtagggagaagggaaagttttgctttaaggcaataagatgtgagaaagaagaagcggccacacagtcctctgaaaaatatacctttgcagatatcatctttggaaatgaacagataataagttcagcaagcccatgtgcagacttcttttatcgaagtttatcttctgaattgaaaaaaccacaagctcacttgcctgtgcatacagaaaaacagtcaacagaggatgctgtgagattgattcaaaaatgcagtgaggtagatttgaatattgtcatattatggaaggcatacgttgtggaagacagtaaacagcttattttggaaggtcaacatcatgttattcttcgcactataggaaaagaagccttttcatatcctcagaaacaggagccaccagaaatggaactattgaaatttttcaggccagaaaacattacagtttcctcaaggccatcagtagagcagctttctagtctcattaaaacgagtcttcactacccagaatcatttaatcatccatttcatcaaaaaagcctttgtttagtaccagtcactcttttactttccaattgttctaaggctgatgtagatgtcatagttgatcttcggcataaaacaacaagtccagaagcactggaaatccatggatcattcacatggcttggacaaacacagtataaacttcaacttaaaagccaggagattcacagtctgcagctgaaagcatgctttgttcatacaggtgtttataaccttggaactcctagggtatttgccaagttatcggaccaagttacagtgtttgaaacaagtcagcagaattccatgcctgccctgatcatcatcagtaatgtgtgacaacttggaaatttgtactgaaatccacaataatcagtttttgctggatgggttttacagcagtatttgatatacctaacttgttatggaggttgattgatatctgatccctgcaaaatactttgacttgtcattttgttgatgatgcaaagcacgttggactgagaatacttaacattctttttctgtatttctttaaaccctgagaataatttacatgctcataatacaggatatcagcatatttgtgcaccttattaagccccatcttaagaaaacacaaagtctaagtctgctgttacaacttgtcaatggtatacgaatattaggagatgattctgagaaaggaaaggccttgttggcagtactcctgttaagccattagtctctaaattccagctttactgtgaagttctatagagtgttaaatacaaattttcctgtcttgcttcacacagttccttaaaatcagttttgaactttggtcatagagtcttcatatttcagtatttggtggtccctatgacttatacataactttgtaaaaagaaaaaaaaattttttctgatgctttgaatatagttttgaaaggagttttgacttttttcccctcattcatctcagtatagagtgcgctatttcacaatacgatttttgtcattaaaattaccatattctttattatataacgttaactattgagttgatctgtttaaaatataaatctcaagttaattaaaaataagcttttcaaaaatgtattatatttataacaaatatactgtaaatagaataaagacatgctattcactgtatagcgtattagtatctgttgattagaaagtctggtttcaaaatatttttttattcagagaatgggcatttggacataagaaatttcaattcagccctgctgcagatagagaaatgggagcaaggttgtttcaatgaatatctcttgtcattggagaaggagggaagacagggtgtaggagtgggtggcagggagtacaagagccagggtcagtcaagtctggagcagatggggtccttgtgccattgacagctaccatggtttgttccagtctcaatctcggcactaatcggagcagactgcaccaaagtggggagagatcaaaagaccccgttttcagactgaagattccaaacctgtacttggaacaactcttcttgagagatgggtggctagtctgtgtgcctctctgcaactgctgcttatgcttctggatcttaagtgggtctctggcttttcagctccttccactctgtgtcttagcaggtgtgggacaagttggagaggaaggtcacattctaaggacactcatttccttcttgagagtttagggccatgggcttataaaaagtctgaggaggaaagacaagaatgaggaggcataatcacagtggtatctcatatttaaaccactcagctgaatattaaattgaaccgattgttaaacagacactaataaaaaaattaaactatataaacctacaactgaatatattaaaaataaaggtaataaagcactcaaaattacttcctgaatattactcagga

SEQ ID NO: 31864 - DNA, 4272 bp, Homo sapiens
  source 1..4272: mol_type = unassigned DNA
agcgccggctcggccgccagtaggaagcgccagcccagagcctgggaagtggccgcagaggctgctcggccccgctgcccgccaggtcgtgggctcccgctccgggcccggggccaccggctgtggacttcaaaatgagcgtccctgactacatgcagtgtgctgaggaccaccagacgctgctcgtggtggtccagcctgtgggcatcgtctccgaggagaacttcttcaggatctataagaggatttgctctgtgagtcagatcagcgtgcgggactcccagcgagtcctctacatccgctacaggcaccactacccacccgagaacaacgagtggggtgacttccagacccaccgcaaagtcgtgggcctcatcaccatcacagactgcttctcggccaaggactggccacagacctttgagaagttccacgtgcagaaggagatctacggctccacactgtatgactcccggctctttgtcttcgggctgcagggggagatcgtggagcagccgcgcaccgacgtggctttctaccccaactacgaggactgccagacggtggagaagagaatcgaggacttcatcgagtcactgttcatcgtgctggagtccaagcgtctggacagagccacagacaagtctggggataagatcccccttctctgtgtcccgtttgagaaaaaggactttgtaggactggacacagacagcagacattacaagaagcggtgccaaggccgcatgcggaagcacgtgggggacctgtgcctgcaggcagggatgctgcaggactccctggtgcattaccacatgtcggtggagctgctgcgttctgtgaatgactttctgtggcttggagctgccctggaaggattgtgttcagcttctgtcatctatcactatcctggtggaactggtgggaagagtggagctcggaggttccagggcagcacccttcctgctgaagcagccaatagacaccggccaggtgccctcaccaccaatggcatcaaccctgacaccagtactgagatcggacgtgctaagaactgccttagccctgaagacataattgacaagtataaagaggcgatttcctattacagcaagtataagaatgcgggagtgattgagttggaagcgtgcatcaaggctgtacgtgtccttgcaattcagaaacggagcatggaagcatcagaatttcttcagaatgcagtttacattaaccttcgacagctttctgaggaagagaaaattcagcgctacagcatcctctccgagctctatgagctgatcggcttccatcgcaagtctgcgttcttcaagcgcgtggccgccatgcagtgcgtggccccaagcatcgcggagcctgggtggagggcctgctacaaactcctcctggaaacgctgcccggctacagtctgtcgctggatcccaaagatttcagcagaggcacgcacagaggctgggctgcggtccagatgcgtttgctccatgaattggtctacgcctcccgaaggatggggaaccctgccctctctgtcagacacctgtccttccttctacagaccatgctggacttcttgtcggatcaggaaaagaaagatgtggcccaaagcctagagaactatacgtccaagtgtcctgggaccatggagcccatcgccctccctggcggcctcaccctgccaccggtgcccttcaccaagcttcccatcgtcaggcatgtgaaactattgaaccttcctgctagcctccggccacacaaaatgaaaagcttgctgggtcagaacgtgtcaaccaaaagtcctttcatctattcaccaattatcgcacacaaccgtggagaagagcggaacaagaaaatagatttccagtgggttcaaggagatgtgtgtgaagttcagctgatggtatataacccaatgccgtttgaacttcgagttgaaaacatggggctgctcaccagcggagtggagttcgagtctctccctgcggcgctttctcttccggctgaatctggtctgtacccagtgacgctcgtcggggtcccgcagacgactggaacgattactgtgaacggttaccataccacggtcttcggtgtgttcagtgactgtttgctggataacctgccgggaataaaaaccagtggctccacagtggaagtcattcccgcgttgccaagactgcagatcagcacctctctgcccagatctgcacattcattgcaaccttcttctggtgatgaaatatctactaatgtatctgtccagctttacaatggagaaagtcagcaactaatcattaaattggaaaatattggaatggaaccattggagaaactggaggtcacctcgaaagttctcaccactaaagaaaaattgtatggcgacttcttgagctggaagctagaggaaacccttgcccagttccctttgcagcctgggaaggtggccacgttcacaatcaacatcaaagtgaagctggatttctcctgccaggagaatctcctgcaggatctcagtgatgatggaatcagtgtgagtggctttcccctgtccagtccttttcggcaggtcgttcggccccgagtggagggcaaacctgtgaacccacccgagagcaacaaagcaggcgactacagccacgtgaagaccctggaagctgtcctgaatttcaaatactctggaggcccgggccacactgaaggatattacaggaatctctccctggggctgcatgtagaagtcgagccgtctgtatttttcacccgagtcagcaccctcccagcaaccagtacccggcagtgtcacctgctcctggatgtcttcaactccaccgagcatgagctgaccgtcagcaccaggagcagcgaggcactcatcctgcacgccggcgagtgccagcgaatggctattcaagtggacaagttcaactttgagagtttcccggagtcccctggggagaaggggcaatttgcaaaccccaagcagctggaggaagagcggcgggaagcccgaggcctggagatccacagcaagctgggcatctgctggagaatcccctccctgaagcgcagtggcgaggcgagtgtggaaggactcctgaaccagctcgtcctggagcacctgcagctggcgcctctgcagtgggatgtgctggtggacggacagccatgtgaccgcgaggctgtggcggcctgccaggtgggcgaccccgtgcgcctggaggtgcggctgaccaaccggagcccgcgcagcgtagggcccttcgccctcactgtggtccccttccaggaccaccagaacggcgtgcacaactacgacctgcacgacaccgtctccttcgtgggctccagcaccttctacctcgacgcggtgcagccgtccggccagtcggcctgcctcggggccctcctcttcctctacacgggagacttcttcctccacatccggttccacgaggacagcaccagcaaggagctgccaccctcttggttctgcctgcccagtgtgcacgtgtgtgccctggaggcgcaggcctgagcccgcctacttccgtccctctttctgcagggccagaggtgaccctgcctggcctcccacaccccctgcaatgagcaaggccttcactgcagccccatctcctcctcctcccccagacccctcccagccctctcctcctgttcctcctgtagcatctttgctgggctacgcagaagccccggacatggcagccccaccccatgccacgccccttcctacactgttccctggaccatacacaggctgaagcagaggaaatcccaaagcgggtgcccatccagcccaggtcccaggatccctgcacccatttctgtgacctggggccccagccgtgctgtgctgctcatcccagcagagggacctccctcgtccagcgacttccctttggccatagaaagaaatggtgagcatgagactgggcacagcctgagggcgtgggcagcttcccaccctccctgggccttggaatcccccaaggctggttttcttcctggagacccccatgggcaacttggcaggagagatggtgccgtaggaggtcgtggatggttgatgccaagagaggccctccacccgtggtgggcaaatgtccaggcctgggctggcagcccagggctgtttctgggtgctccctggccccagggtggcgtctggttaccatggctgtgtgtgtccatgtctgcaagcagttcttcaataaatggcctgcctccccctc

SEQ ID NO: 31865 - DNA, 4474 bp, Homo sapiens
  source 1..4474: mol_type = unassigned DNA
aaagtcgggagtgccatggtgccagctggggatcaagaccgcgcgccacacagggggaagccggcccaggctggggctcgcacctcacgtgcctcccgggccctgcgatcctggaggcgctcccaggccgcgcgcgccacggtcacccacccacgtggggggcacgaccgtgggagtcacggggggtaccgtgagggtcacagggggtgccgcagggatccacagtgggcttccgcggggcctccacccctgagcttcacagaggaagtgaaatttgagctgcgcgccctgaaggactgggacttcaaaatgagcgtccctgactacatgcagtgtgctgaggaccaccagacgctgctcgtggtggtccagcctgtgggcatcgtctccgaggagaacttcttcaggatctataagaggatttgctctgtgagtcagatcagcgtgcgggactcccagcgagtcctctacatccgctacaggcaccactacccacccgagaacaacgagtggggtgacttccagacccaccgcaaagtcgtgggcctcatcaccatcacagactgcttctcggccaaggactggccacagacctttgagaagttccacgtgcagaaggagatctacggctccacactgtatgactcccggctctttgtcttcgggctgcagggggagatcgtggagcagccgcgcaccgacgtggctttctaccccaactacgaggactgccagacggtggagaagagaatcgaggacttcatcgagtcactgttcatcgtgctggagtccaagcgtctggacagagccacagacaagtctggggataagatcccccttctctgtgtcccgtttgagaaaaaggactttgtaggactggacacagacagcagacattacaagaagcggtgccaaggccgcatgcggaagcacgtgggggacctgtgcctgcaggcagggatgctgcaggactccctggtgcattaccacatgtcggtggagctgctgcgttctgtgaatgactttctgtggcttggagctgccctggaaggattgtgttcagcttctgtcatctatcactatcctggtggaactggtgggaagagtggagctcggaggttccagggcagcacccttcctgctgaagcagccaatagacaccggccaggggcacaggaagttctcattgatccaggtgccctcaccaccaatggcatcaaccctgacaccagtactgagatcggacgtgctaagaactgccttagccctgaagacataattgacaagtataaagaggcgatttcctattacagcaagtataagaatgcgggagtgattgagttggaagcgtgcatcaaggctgtacgtgtccttgcaattcagaaacggagcatggaagcatcagaatttcttcagaatgcagtttacattaaccttcgacagctttctgaggaagagaaaattcagcgctacagcatcctctccgagctctatgagctgatcggcttccatcgcaagtctgcgttcttcaagcgcgtggccgccatgcagtgcgtggccccaagcatcgcggagcctgggtggagggcctgctacaaactcctcctggaaacgctgcccggctacagtctgtcgctggatcccaaagatttcagcagaggcacgcacagaggctgggctgcggtccagatgcgtttgctccatgaattggtctacgcctcccgaaggatggggaaccctgccctctctgtcagacacctgtccttccttctacagaccatgctggacttcttgtcggatcaggaaaagaaagatgtggcccaaagcctagagaactatacgtccaagtgtcctgggaccatggagcccatcgccctccctggcggcctcaccctgccaccggtgcccttcaccaagcttcccatcgtcaggcatgtgaaactattgaaccttcctgctagcctccggccacacaaaatgaaaagcttgctgggtcagaacgtgtcaaccaaaagtcctttcatctattcaccaattatcgcacacaaccgtggagaagagcggaacaagaaaatagatttccagtgggttcaaggagatgtgtgtgaagttcagctgatggtatataacccaatgccgtttgaacttcgagttgaaaacatggggctgctcaccagcggagtggagttcgagtctctccctgcggcgctttctcttccggctgaatctggtctgtacccagtgacgctcgtcggggtcccgcagacgactggaacgattactgtgaacggttaccataccacggtcttcggtgtgttcagtgactgtttgctggataacctgccgggaataaaaaccagtggctccacagtggaagtcattcccgcgttgccaagactgcagatcagcacctctctgcccagatctgcacattcattgcaaccttcttctggtgatgaaatatctactaatgtatctgtccagctttacaatggagaaagtcagcaactaatcattaaattggaaaatattggaatggaaccattggagaaactggaggtcacctcgaaagttctcaccactaaagaaaaattgtatggcgacttcttgagctggaagctagaggaaacccttgcccagttccctttgcagcctgggaaggtggccacgttcacaatcaacatcaaagtgaagctggatttctcctgccaggagaatctcctgcaggatctcagtgatgatggaatcagtgtgagtggctttcccctgtccagtccttttcggcaggtcgttcggccccgagtggagggcaaacctgtgaacccacccgagagcaacaaagcaggcgactacagccacgtgaagaccctggaagctgtcctgaatttcaaatactctggaggcccgggccacactgaaggatattacaggaatctctccctggggctgcatgtagaagtcgagccgtctgtatttttcacccgagtcagcaccctcccagcaaccagtacccggcagtgtcacctgctcctggatgtcttcaactccaccgagcatgagctgaccgtcagcaccaggagcagcgaggcactcatcctgcacgccggcgagtgccagcgaatggctattcaagtggacaagttcaactttgagagtttcccggagtcccctggggagaaggggcaatttgcaaaccccaagcagctggaggaagagcggcgggaagcccgaggcctggagatccacagcaagctgggcatctgctggagaatcccctccctgaagcgcagtggcgaggcgagtgtggaaggactcctgaaccagctcgtcctggagcacctgcagctggcgcctctgcagtgggatgtgctggtggacggacagccatgtgaccgcgaggctgtggcggcctgccaggtgggcgaccccgtgcgcctggaggtgcggctgaccaaccggagcccgcgcagcgtagggcccttcgccctcactgtggtccccttccaggaccaccagaacggcgtgcacaactacgacctgcacgacaccgtctccttcgtgggctccagcaccttctacctcgacgcggtgcagccgtccggccagtcggcctgcctcggggccctcctcttcctctacacgggagacttcttcctccacatccggttccacgaggacagcaccagcaaggagctgccaccctcttggttctgcctgcccagtgtgcacgtgtgtgccctggaggcgcaggcctgagcccgcctacttccgtccctctttctgcagggccagaggtgaccctgcctggcctcccacaccccctgcaatgagcaaggccttcactgcagccccatctcctcctcctcccccagacccctcccagccctctcctcctgttcctcctgtagcatctttgctgggctacgcagaagccccggacatggcagccccaccccatgccacgccccttcctacactgttccctggaccatacacaggctgaagcagaggaaatcccaaagcgggtgcccatccagcccaggtcccaggatccctgcacccatttctgtgacctggggccccagccgtgctgtgctgctcatcccagcagagggacctccctcgtccagcgacttccctttggccatagaaagaaatggtgagcatgagactgggcacagcctgagggcgtgggcagcttcccaccctccctgggccttggaatcccccaaggctggttttcttcctggagacccccatgggcaacttggcaggagagatggtgccgtaggaggtcgtggatggttgatgccaagagaggccctccacccgtggtgggcaaatgtccaggcctgggctggcagcccagggctgtttctgggtgctccctggccccagggtggcgtctggttaccatggctgtgtgtgtccatgtctgcaagcagttcttcaataaatggcctgcctccccctc

SEQ ID NO: 31866 - DNA, 4297 bp, Homo sapiens
  source 1..4297: mol_type = unassigned DNA
agcgccggctcggccgccagtaggaagcgccagcccagagcctgggaagtggccgcagaggctgctcggccccgctgcccgccaggtcgtgggctcccgctccgggcccggggccaccggctgtggacttcaaaatgagcgtccctgactacatgcagtgtgctgaggaccaccagacgctgctcgtggtggtccagcctgtgggcatcgtctccgaggagaacttcttcaggatctataagaggatttgctctgtgagtcagatcagcgtgcgggactcccagcgagtcctctacatccgctacaggcaccactacccacccgagaacaacgagtggggtgacttccagacccaccgcaaagtcgtgggcctcatcaccatcacagactgcttctcggccaaggactggccacagacctttgagaagttccacgtgcagaaggagatctacggctccacactgtatgactcccggctctttgtcttcgggctgcagggggagatcgtggagcagccgcgcaccgacgtggctttctaccccaactacgaggactgccagacggtggagaagagaatcgaggacttcatcgagtcactgttcatcgtgctggagtccaagcgtctggacagagccacagacaagtctggggataagatcccccttctctgtgtcccgtttgagaaaaaggactttgtaggactggacacagacagcagacattacaagaagcggtgccaaggccgcatgcggaagcacgtgggggacctgtgcctgcaggcagggatgctgcaggactccctggtgcattaccacatgtcggtggagctgctgcgttctgtgaatgactttctgtggcttggagctgccctggaaggattgtgttcagcttctgtcatctatcactatcctggtggaactggtgggaagagtggagctcggaggttccagggcagcacccttcctgctgaagcagccaatagacaccggccaggggcacaggaagttctcattgatccaggtgccctcaccaccaatggcatcaaccctgacaccagtactgagatcggacgtgctaagaactgccttagccctgaagacataattgacaagtataaagaggcgatttcctattacagcaagtataagaatgcgggagtgattgagttggaagcgtgcatcaaggctgtacgtgtccttgcaattcagaaacggagcatggaagcatcagaatttcttcagaatgcagtttacattaaccttcgacagctttctgaggaagagaaaattcagcgctacagcatcctctccgagctctatgagctgatcggcttccatcgcaagtctgcgttcttcaagcgcgtggccgccatgcagtgcgtggccccaagcatcgcggagcctgggtggagggcctgctacaaactcctcctggaaacgctgcccggctacagtctgtcgctggatcccaaagatttcagcagaggcacgcacagaggctgggctgcggtccagatgcgtttgctccatgaattggtctacgcctcccgaaggatggggaaccctgccctctctgtcagacacctgtccttccttctacagaccatgctggacttcttgtcggatcaggaaaagaaagatgtggcccaaagcctagagaactatacgtccaagtgtcctgggaccatggagcccatcgccctccctggcggcctcaccctgccaccggtgcccttcaccaagcttcccatcgtcaggcatgtgaaactattgaaccttcctgctagcctccggccacacaaaatgaaaagcttgctgggtcagaacgtgtcaaccaaaagtcctttcatctattcaccaattatcgcacacaaccgtggagaagagcggaacaagaaaatagatttccagtgggttcaaggagatgtgtgtgaagttcagctgatggtatataacccaatgccgtttgaacttcgagttgaaaacatggggctgctcaccagcggagtggagttcgagtctctccctgcggcgctttctcttccggctgaatctggtctgtacccagtgacgctcgtcggggtcccgcagacgactggaacgattactgtgaacggttaccataccacggtcttcggtgtgttcagtgactgtttgctggataacctgccgggaataaaaaccagtggctccacagtggaagtcattcccgcgttgccaagactgcagatcagcacctctctgcccagatctgcacattcattgcaaccttcttctggtgatgaaatatctactaatgtatctgtccagctttacaatggagaaagtcagcaactaatcattaaattggaaaatattggaatggaaccattggagaaactggaggtcacctcgaaagttctcaccactaaagaaaaattgtatggcgacttcttgagctggaagctagaggaaacccttgcccagttccctttgcagcctgggaaggtggccacgttcacaatcaacatcaaagtgaagctggatttctcctgccaggagaatctcctgcaggatctcagtgatgatggaatcagtgtgagtggctttcccctgtccagtccttttcggcaggtcgttcggccccgagtggagggcaaacctgtgaacccacccgagagcaacaaagcaggcgactacagccacgtgaagaccctggaagctgtcctgaatttcaaatactctggaggcccgggccacactgaaggatattacaggaatctctccctggggctgcatgtagaagtcgagccgtctgtatttttcacccgagtcagcaccctcccagcaaccagtacccggcagtgtcacctgctcctggatgtcttcaactccaccgagcatgagctgaccgtcagcaccaggagcagcgaggcactcatcctgcacgccggcgagtgccagcgaatggctattcaagtggacaagttcaactttgagagtttcccggagtcccctggggagaaggggcaatttgcaaaccccaagcagctggaggaagagcggcgggaagcccgaggcctggagatccacagcaagctgggcatctgctggagaatcccctccctgaagcgcagtggcgaggcgagtgtggaaggactcctgaaccagctcgtcctggagcacctgcagctggcgcctctgcagtgggatgtgctggtggacggacagccatgtgaccgcgaggctgtggcggcctgccaggtgggcgaccccgtgcgcctggaggtgcggctgaccaaccggagcccgcgcagcgtagggcccttcgccctcactgtggtccccttccaggaccaccagaacggcgtgcacaactacgacctgcacgacaccgtctccttcgtgggctccagcaccttctacctcgacgcggtgcagccgtccggccagtcggcctgcctcggggccctcctcttcctctacacgggagacttcttcctccacatccggttccacgaggacagcaccagcaaggagctgccaccctcttggttctgcctgcccagtgtgcacgtgtgtgccctggaggcgcaggcctgagcccgcctacttccgtccctctttctgcagggccagaggtgaccctgcctggcctcccacaccccctgcaatgagcaaggccttcactgcagccccatctcctcctcctcccccagacccctcccagccctctcctcctgttcctcctgtagcatctttgctgggctacgcagaagccccggacatggcagccccaccccatgccacgccccttcctacactgttccctggaccatacacaggctgaagcagaggaaatcccaaagcgggtgcccatccagcccaggtcccaggatccctgcacccatttctgtgacctggggccccagccgtgctgtgctgctcatcccagcagagggacctccctcgtccagcgacttccctttggccatagaaagaaatggtgagcatgagactgggcacagcctgagggcgtgggcagcttcccaccctccctgggccttggaatcccccaaggctggttttcttcctggagacccccatgggcaacttggcaggagagatggtgccgtaggaggtcgtggatggttgatgccaagagaggccctccacccgtggtgggcaaatgtccaggcctgggctggcagcccagggctgtttctgggtgctccctggccccagggtggcgtctggttaccatggctgtgtgtgtccatgtctgcaagcagttcttcaataaatggcctgcctccccc

SEQ ID NO: 31867 - DNA, 5293 bp, Homo sapiens
  source 1..5293: mol_type = unassigned DNA
gataaattcactcctcccccagttcccagcaagccctgagatgaacagcagactttttgttccactttaatttttaggcaaaaccgaatgcccatcacaaagccccgttctccttgctactccccttcccccaacctagaggtatcacatttttgggtgcgtcattttctgtttggggtggcttaacaagatgagctgatagggttcccaggctgcctggagttacataacccattgtgcttccaggacagctcacaatcttaggatttgccctaacaagcaaactcagaaaactgctgaggaaggcacgggagggtggctgtgcgaggtactgccggggctgagctctcatggaggctctctctgttctctgaagtgcctttggagtttatgtctgcacatggcattggtttttcaattcgggcagcccgtcagggctcagcctctgccaggactctgccacggcaagctcattcggacaaacgcctgtgatgtgtgcaacagcaccgatcttccggaagtcgagatcattagcctgctggaggagcagctgccccattataagttaagagccgacaccatctacggttatgaccacgacgactggctccatacacctctcatttctccagatgccaacattgacctcacaaccgagcaaattgaagagacgttaaaatacttccttttatgtgctgaaagagttggccagatgactaagacatataatgacatagatgctgtcactcggcttcttgaggagaaagagcgggatttagaattggccgctcgcatcggccagtcgttgttgaagaagaacaagaccctaaccgagaggaacgagctgctggaggagcaggtggaacacatcagggaggaggtgtctcagctccggcatgagctgtccatgaaggatgagctgcttcagttctacaccagcgctgcggaggagagtgagcccgagtccgtttgctcaaccccgttgaagaggaatgagtcgtcctcctcagtccagaattactttcatttggattctcttcaaaagaagctgaaagaccttgaagaggagaatgttgtacttcgatccgaggccagccagctgaagacagagaccatcacctatgaggagaaggagcagcagctggtcaatgactgcgtgaaggagctgagggatgccaatgtccagattgctagtatctcagaggaactggccaagaagacggaagatgctgcccgccagcaagaggagatcacacacctgctatcgcaaatagttgatttgcagaaaaaggcaaaagcttgcgcagtggaaaatgaagaacttgtccagcatctgggggctgctaaggatgcccagcggcagctcacagccgagctgcgtgagctggaggacaagtacgcagagtgcatggagatgctgcatgaggcgcaggaggagctgaagaacctccggaacaaaaccatgcccaataccacgtctcggcgctaccactcactgggcctgtttcccatggattccttggcagcagagattgagggaacgatgcgcaaggagctgcagttggaagaggccgagtctccagacatcactcaccagaagcgtgtctttgagacagtaagaaacatcaaccaggttgtcaagcagagatctctgaccccttctcccatgaacatccccggctccaaccagtcctcggccatgaactccctcctgtccagctgcgtcagcaccccccggtccagcttctacggcagcgacataggcaacgtcgtcctcgacaacaagaccaacagcatcattctggaaacagaggcagccgacctgggaaacgatgagcggagtaagaagccggggacgccgggcaccccaggctcccacgacctggagacggcgctgaggcggctgtccctgcgccgggagaactacctctcggagaggaggttctttgaggaggagcaagagaggaagctccaggagctggcggagaagggcgagctgcgcagcggctccctcacacccactgagagcatcatgtccctgggcacgcactcccgcttctccgagttcaccggcttctctggcatgtccttcagcagccgctcctacctgcctgagaagctccagatcgtgaagccgctggaaggttccgccacacttcaccactggcagcagttggcccaacctcaccttgggggcatcctggacccccggcccggtgtggtcaccaagggcttccggacgctggatgttgacctggacgaagtgtactgccttaacgactttgaagaagatgacacaggtgaccacatttctctcccacgcctagctacctccactccagttcagcacccagagacctcagcgcaccatcctgggaagtgcatgtctcagaccaactccaccttcaccttcaccacctgtcgcatcctgcatccttcagatgagctcactcgggtcacaccaagccttaactcagccccaactccagcttgtggcagcaccagccacttgaaatccacgccggtggccacaccatgcactccacggagactgagcctggctgagtccttcactaacacccgtgagtccacgaccaccatgagcacatccctggggctcgtgtggctgttgaaggagcggggcatttctgctgccgtgtacgacccccagagctgggacagggccggccggggctccctcctgcactcctacacgcccaagatggctgtgatcccctctactccgccgaactcgcctatgcagacacccacatcctccccaccctcctttgagttcaagtgcacgagccctccctacgacaatttcctggcttccaagccagccagctccatcctgagggaagtgagagaaaagaacgtccgcagcagcgagagccagaccgacgtgtccgtctccaacctcaacctcgtggacaaagtcaggaggtttggggtggccaaagtggtgaactcagggcgagcccatgtccccaccttgactgaggagcagggacccctcctctgtgggcccccggggccagcaccagcccttgttcccagaggcctggtacctgagggcctgcccctcagatgccccactgtcaccagtgccatcggtgggctgcagctcaatagtggcatccggcggaatcgcagcttccccaccatggtgggatctagcatgcagatgaaagctcctgtgactctcacctcgggcatcttgatgggtgctaagctctccaaacaaactagcttacggtgaggactggaggggggccggttgccctagaggagacccacgttctcctctcttgctcccacctccctctcttccccccacagtgcactccctccctctgcccttctctgtccaccccctcctaagctagacaaatcaacctcgtgcctaatggaggaagtgtggaaactttgtaaaatgtgtacataggacttggagaccttgtgtccgccctgctctttcttccgatcccacaggaagtgcccctgcactgtcatcactctcacgaggacgtcacctgtgctaacctgggggaaggtggggtcctttcttctttccttttgagaagcactgaaactcccaagtgtgttcttatcccatggataggaaaccagtgaattccgtggctggcacaccacgagctgtcacgcggcacgggtcataacacatctgggtgtcatcggacacctcacctcgcccaccctgtaggagcgtaaggagcctccatcctcagccacgtgcagctgacgtggctttcctgatcggagggcttttcttttatgggtggcccagcttcttcaagaccttcactgctctgcctcagtggacagtcgtttcttttttgaggtgtgaccttttgttttcatgccttccccttgaagtcatcctgtgttttgtaatcagctgtcaggccaaatgtctgacccgaaagagaatgtatttacactcatgctgcgttgttcagcagcccctctgtgttctgtgtgatttgttttatttttccttttttttacatatatatgcagggaagtaatggtactggtagtgtatgttttctatgtggttcaaatatgaatttcgaacacaccaagccgctaatgagatagcagcttttttctgggacccagagtcacaaccaaattgatttaagaccggacccaagacacctttaacaataggactgaaaggaaaaaggatagggaaaaagcttattaaagaaatgtgtcaacaccaaatgtagaggggaagaaccacaaccaggcataataccaaaccggttccagggggaaacaaggctttggtattccgctggctccagcgctttttctgaaacccgaggctggccagggtgctgtcaccatgcggtctttgattgcagccattcaatgcccacatgcttttccttcttgtttcagaacagcacatggtcacaacaagatattttctttccctccaaagccttttgtctccttgtgcctctttttatccttaggaaaagatccaggtgcttgtgaaaagaatcatgaatgcaacaagggaggctggtcctgttgctgtcgccgattaagttttaaacttttatttattatttatgtctgccgtattttaaataaacattctcgttccttccagtttcagtcatagtgtgtctgtggcattccagtccaaccatgtgacttatttattctaatttgagggctgcactgtacaccatggtgtcctgtgacaccgtgttccagacatttatggaaggaaaacatcccatataaatgaaactgtcatgctgtgtcctccccggcagcagaagatgtgtccttccattgagtgagggtaaccttatgtccaccaaggatactttgagaaagcccctaaggaacaagcctcagtcccacggtttcagactatttattctctgaacacaagagtattggttaattatgttctcagctctccctgctgttgtatgtgtgcattcactgcaagtaacttatatctttttatttgaatgtattttaaagcagtagatagaataacaaaggaatatgaaaaccatggactgaatggaccattttatgtattcagagagagaagccactcatcattgccagaaataccatgtaaaaattggcagttcagaggttgcaatacttagtatagtaaataaataaacggtcaacattgtgcaaccactaccaaaaagtgtgttgtaatgcatcaaaaatcaacacaattttattcactaatgagtatcaataaaataagttcaaatgatgg

SEQ ID NO: 31868 - DNA, 4620 bp, Homo sapiens
  source 1..4620: mol_type = unassigned DNA
gggtgatgctgggccaggagctttgtgtacacccctccacttcagctgagccagggcatgtctgcggcccaggccagggcgcagtgtgtgccctgggggcccaggcctgcatggctcctctgggtagggggtcgggggcacccccaaggatggtcccttagggtgatgttttggctttggggtgacttcagcaatgtccctgcgagacaagggcggggaagaagaatgttttgaatacgactgccaggatgaagagaggaagccaacccacaggcagcatgacacccaggacctcttggaagaggttttatgtgctgaaagagttggccagatgactaagacatataatgacatagatgctgtcactcggcttcttgaggagaaagagcgggatttagaattggccgctcgcatcggccagtcgttgttgaagaagaacaagaccctaaccgagaggaacgagctgctggaggagcaggtggaacacatcagggaggaggtgtctcagctccggcatgagctgtccatgaaggatgagctgcttcagttctacaccagcgctgcggaggagagtgagcccgagtccgtttgctcaaccccgttgaagaggaatgagtcgtcctcctcagtccagaattactttcatttggattctcttcaaaagaagctgaaagaccttgaagaggagaatgttgtacttcgatccgaggccagccagctgaagacagagaccatcacctatgaggagaaggagcagcagctggtcaatgactgcgtgaaggagctgagggatgccaatgtccagattgctagtatctcagaggaactggccaagaagacggaagatgctgcccgccagcaagaggagatcacacacctgctatcgcaaatagttgatttgcagaaaaaggcaaaagcttgcgcagtggaaaatgaagaacttgtccagcatctgggggctgctaaggatgcccagcggcagctcacagccgagctgcgtgagctggaggacaagtacgcagagtgcatggagatgctgcatgaggcgcaggaggagctgaagaacctccggaacaaaaccatgcccaataccacgtctcggcgctaccactcactgggcctgtttcccatggattccttggcagcagagattgagggaacgatgcgcaaggagctgcagttggaagaggccgagtctccagacatcactcaccagaagcgtgtctttgagacagtaagaaacatcaaccaggttgtcaagcagagatctctgaccccttctcccatgaacatccccggctccaaccagtcctcggccatgaactccctcctgtccagctgcgtcagcaccccccggtccagcttctacggcagcgacataggcaacgtcgtcctcgacaacaagaccaacagcatcattctggaaacagaggcagccgacctgggaaacgatgagcggagtaagaagccggggacgccgggcaccccaggctcccacgacctggagacggcgctgaggcggctgtccctgcgccgggagaactacctctcggagaggaggttctttgaggaggagcaagagaggaagctccaggagctggcggagaagggcgagctgcgcagcggctccctcacacccactgagagcatcatgtccctgggcacgcactcccgcttctccgagttcaccggcttctctggcatgtccttcagcagccgctcctacctgcctgagaagctccagatcgtgaagccgctggaaggttccgccacacttcaccactggcagcagttggcccaacctcaccttgggggcatcctggacccccggcccggtgtggtcaccaagggcttccggacgctggatgttgacctggacgaagtgtactgccttaacgactttgaagaagatgacacaggtgaccacatttctctcccacgcctagctacctccactccagttcagcacccagagacctcaggtgagaggtcccaagcacgtgtgactgtctcaggcagcagaagttacccgagccggcctcaggcttccccagaggagatgcaggagccgccagcggccacggaggaggaggaggaggaggaggaggaggaggggtctggtgagggcaccacgataagtcctgtaaacttggcacctttcccggaggcagagttttgggccattctcacctctgttccaggcaccatccgtagtggttctctgtctgtagcttccgctcgtctgtgtgggtgatgattaaagcattctcattgcacagttctgtttttaaatacagagtctgatgcctcctatttgtaacaatgggtgtagctcccctgcccatcttggaggtgcatggcccatcagggatctttaaagtgggagcaggaaaggctgctaaaaaaaaaaaaaaaaaaaaaagtgggcttttgggtccctgaaaacatcagtgcccttcttcctggtctgggtgtctccctgagtctaaggggaagattctcaagtcccctggtgatttccaagtggagctgagcagttttagggaaattgagtgctgggtcattcagaaggtaaatgagatcatctgttacctgtacgctgtattaaaatagaaccaggaaaggctcaggatttcagacatttcatcagccttttcactttcccagcttcaatggaggtatatatgtcattttcttttcagcttacacatgtgttcaaagtggatttttaaaaagtgttttagcaatactccttaaccaaataaaccttcggagaacgtcactaagcttttccagagagaagaccctagatgaagttggaaaagagctctggctgactccacccactgtccccaagcattaaaggtgtggccatgagtttacagaattacccacattccagttgccactgggatgaaaagctttgtgctcagagctctgggaatcatgggatcacatggttactgtttaccccaacagcatgctctgtctagactggacctcccagccccttgtgttgggaaggcaaagcttttgtggagtcaggggggagactgagaaaaaatgaattaaccctgtgttgtcatcctcatgacattcctgaggattcaccaggttagaagtgaggacgtttatctttgtgattcataattttcatttgtgaaggccacaacactccccttgaaatacagggcaggaaagagctgaggttcttggtggtgtctcccattcccctggctaatttcagacagctgtggtcaagggattttacttgggatcaacttttccttttttccttgacattaattttagagaagtcatcaagtcatgtgatttgtttagcacataggtttatttatggtttgattttttttaggcagttatattactagattaagcttgtgagggaatgaaaatgttttttatttgttatctacacactcgaaaaagagaaaccagctgcggtactgtcccatttttgtcatcagcaccagtgtccgtcaggaaggcaggtggtggtgcagaaacatgatgcctggctgattttcgtggctaaaggggtaggccttatgttgattgggatgctcccctacagccttacaggtagaatagaaggtgagttctggaagtgcaaagaagcaccattaagtgcatcttctagaagttgtacagaaggactaaagcttatcaagtcaacaaagaacttaccttggaggatagagagagagaagggaccaattatgaggactgacatcctggccactctccttaaaataaacactgacatttttcttgcttgttctctctgtactcaaacctgtggcaaattcatcctagcaacgttatttgacgaggggcatgaacatttatagttgaaactgtagaaagggtcaggttggaggtgtgtaataaaaaagaattacctaggttgccaaaggtaatttaggaagggtctgatcatttagatgagagttctttggggcttattttctgggtaaggctcatctttaaaaactggcttcagaggggagaggggagaacaatgaattggctctattttctctattgggaattacaggaccattttgattcttagaatgtaaaaagcatatcgctaagtaaatcatcctggaggtcccaagtagctctatgcctgcaatcatggagacacaggcagacagataagcttcatggggaaggcatggggcatcctctgtcttgggatttgtatccatggtggtctggtccctgccttttaatccgtcctctacgcttgggcttttctgttaccaaacagcactatcccaggaactattgtctgcctgggaacactcagtagggagacactttggagacaggaggtgatgaacctttttatgtgcagctggtatgatagaaggaaattgggaaaacttgtatgctaggcacttttgtccagagcctgctgtcccatggagaaaaagttttaagcactgaaaaaatttgattaatgtatttaaatgtattatttgaagcatcattcacttgttgatttttacaatcccatgtcttaaaaaggatgaatccatgttattgtattgtaaataatttagatgattaaaatggattgtttaaaaagtt

SEQ ID NO: 31869 - DNA, 5033 bp, Homo sapiens
  source 1..5033: mol_type = unassigned DNA
gggtgatgctgggccaggagctttgtgtacacccctccacttcagctgagccagggcatgtctgcggcccaggccagggcgcagtgtgtgccctgggggcccaggcctgcatggctcctctgggtagggggtcgggggcacccccaaggatggtcccttagggtgatgttttggctttggggtgacttcagcaatgtccctgcgagacaagggcggggaagaagaatgttttgaatacgactgccaggatgaagagaggaagccaacccacaggcagcatgacacccaggacctcttggaagaggttttatgtgctgaaagagttggccagatgactaagacatataatgacatagatgctgtcactcggcttcttgaggagaaagagcgggatttagaattggccgctcgcatcggccagtcgttgttgaagaagaacaagaccctaaccgagaggaacgagctgctggaggagcaggtggaacacatcagggaggaggtgtctcagctccggcatgagctgtccatgaaggatgagctgcttcagttctacaccagcgctgcggaggagagtgagcccgagtccgtttgctcaaccccgttgaagaggaatgagtcgtcctcctcagtccagaattactttcatttggattctcttcaaaagaagctgaaagaccttgaagaggagaatgttgtacttcgatccgaggccagccagctgaagacagagaccatcacctatgaggagaaggagcagcagctggtcaatgactgcgtgaaggagctgagggatgccaatgtccagattgctagtatctcagaggaactggccaagaagacggaagatgctgcccgccagcaagaggagatcacacacctgctatcgcaaatagttgatttgcagaaaaaggcaaaagcttgcgcagtggaaaatgaagaacttgtccagcatctgggggctgctaaggatgcccagcggcagctcacagccgagctgcgtgagctggaggacaagtacgcagagtgcatggagatgctgcatgaggcgcaggaggagctgaagaacctccggaacaaaaccatgcccaataccacgtctcggcgctaccactcactgggcctgtttcccatggattccttggcagcagagattgagggaacgatgcgcaaggagctgcagttggaagaggccgagtctccagacatcactcaccagaagcgtgtctttgagacagtaagaaacatcaaccaggttgtcaagcagagatctctgaccccttctcccatgaacatccccggctccaaccagtcctcggccatgaactccctcctgtccagctgcgtcagcaccccccggtccagcttctacggcagcgacataggcaacgtcgtcctcgacaacaagaccaacagcatcattctggaaacagaggcagccgacctgggaaacgatgagcggagtaagaagccggggacgccgggcaccccaggctcccacgacctggagacggcgctgaggcggctgtccctgcgccgggagaactacctctcggagaggaggttctttgaggaggagcaagagaggaagctccaggagctggcggagaagggcgagctgcgcagcggctccctcacacccactgagagcatcatgtccctgggcacgcactcccgcttctccgagttcaccggcttctctggcatgtccttcagcagccgctcctacctgcctgagaagctccagatcgtgaagccgctggaaggttccgccacacttcaccactggcagcagttggcccaacctcaccttgggggcatcctggacccccggcccggtgtggtcaccaagggcttccggacgctggatgttgacctggacgaagtgtactgccttaacgactttgaagaagatgacacaggtgaccacatttctctcccacgcctagctacctccactccagttcagcacccagagacctcagcgcaccatcctgggaagtgcatgtctcagaccaactccaccttcaccttcaccacctgtcgcatcctgcatccttcagatgagctcactcgggtcacaccaagccttaactcagccccaactccagcttgtggcagcaccagccacttgaaatccacgccggtggccacaccatgcactccacggagactgagcctggctgagtccttcactaacacccgtgagtccacgaccaccatgagcacatccctggggctcgtgtggctgttgaaggagcggggcatttctgctgccgtgtacgacccccagagctgggacagggccggccggggctccctcctgcactcctacacgcccaagatggctgtgatcccctctactccgccgaactcgcctatgcagacacccacatcctccccaccctcctttgagttcaagtgcacgagccctccctacgacaatttcctggcttccaagccagccagctccatcctgagggaagtgagagaaaagaacgtccgcagcagcgagagccagaccgacgtgtccgtctccaacctcaacctcgtggacaaagtcaggaggtttggggtggccaaagtggtgaactcagggcgagcccatgtccccaccttgactgaggagcagggacccctcctctgtgggcccccggggccagcaccagcccttgttcccagaggcctggtacctgagggcctgcccctcagatgccccactgtcaccagtgccatcggtgggctgcagctcaatagtggcatccggcggaatcgcagcttccccaccatggtgggatctagcatgcagatgaaagctcctgtgactctcacctcgggcatcttgatgggtgctaagctctccaaacaaactagcttacggtgaggactggaggggggccggttgccctagaggagacccacgttctcctctcttgctcccacctccctctcttccccccacagtgcactccctccctctgcccttctctgtccaccccctcctaagctagacaaatcaacctcgtgcctaatggaggaagtgtggaaactttgtaaaatgtgtacataggacttggagaccttgtgtccgccctgctctttcttccgatcccacaggaagtgcccctgcactgtcatcactctcacgaggacgtcacctgtgctaacctgggggaaggtggggtcctttcttctttccttttgagaagcactgaaactcccaagtgtgttcttatcccatggataggaaaccagtgaattccgtggctggcacaccacgagctgtcacgcggcacgggtcataacacatctgggtgtcatcggacacctcacctcgcccaccctgtaggagcgtaaggagcctccatcctcagccacgtgcagctgacgtggctttcctgatcggagggcttttcttttatgggtggcccagcttcttcaagaccttcactgctctgcctcagtggacagtcgtttcttttttgaggtgtgaccttttgttttcatgccttccccttgaagtcatcctgtgttttgtaatcagctgtcaggccaaatgtctgacccgaaagagaatgtatttacactcatgctgcgttgttcagcagcccctctgtgttctgtgtgatttgttttatttttccttttttttacatatatatgcagggaagtaatggtactggtagtgtatgttttctatgtggttcaaatatgaatttcgaacacaccaagccgctaatgagatagcagcttttttctgggacccagagtcacaaccaaattgatttaagaccggacccaagacacctttaacaataggactgaaaggaaaaaggatagggaaaaagcttattaaagaaatgtgtcaacaccaaatgtagaggggaagaaccacaaccaggcataataccaaaccggttccagggggaaacaaggctttggtattccgctggctccagcgctttttctgaaacccgaggctggccagggtgctgtcaccatgcggtctttgattgcagccattcaatgcccacatgcttttccttcttgtttcagaacagcacatggtcacaacaagatattttctttccctccaaagccttttgtctccttgtgcctctttttatccttaggaaaagatccaggtgcttgtgaaaagaatcatgaatgcaacaagggaggctggtcctgttgctgtcgccgattaagttttaaacttttatttattatttatgtctgccgtattttaaataaacattctcgttccttccagtttcagtcatagtgtgtctgtggcattccagtccaaccatgtgacttatttattctaatttgagggctgcactgtacaccatggtgtcctgtgacaccgtgttccagacatttatggaaggaaaacatcccatataaatgaaactgtcatgctgtgtcctccccggcagcagaagatgtgtccttccattgagtgagggtaaccttatgtccaccaaggatactttgagaaagcccctaaggaacaagcctcagtcccacggtttcagactatttattctctgaacacaagagtattggttaattatgttctcagctctccctgctgttgtatgtgtgcattcactgcaagtaacttatatctttttatttgaatgtattttaaagcagtagatagaataacaaaggaatatgaaaaccatggactgaatggaccattttatgtattcagagagagaagccactcatcattgccagaaataccatgtaaaaattggcagttcagaggttgcaatacttagtatagtaaataaataaacggtcaacattgtgcaaccactaccaaaaagtgtgttgtaatgcatcaaaaatcaacacaattttattcactaatgagtatcaataaaataagttcaaatgatggaaaccacactggtattctgatttgtattttgtttttatcttttcatcaaggagacgatctctttatgtaagacttgaaagtgtttagctctttgcaaaattaaatgaaaggcatatacttc

SEQ ID NO: 31870 - DNA, 2835 bp, Homo sapiens
  source 1..2835: mol_type = unassigned DNA
aagcaaactcagaaaactgctgaggaaggcacgggagggtggctgtgcgaggtactgccggggctgagctctcatggaggctctctctgttctctgaagtgcctttggagtttatgtctgcacatggcattggtttttcaattcgggcagcccgtcagggctcagcctctgccaggactctgccacggcaagctcattcggacaaacgcctgtgatgtgtgcaacagcaccgatcttccggaagtcgagatcattagcctgctggaggagcagctgccccattataagttaagagccgacaccatctacggttatgaccacgacgactggctccatacacctctcatttctccagatgccaacattgacctcacaaccgagcaaattgaagagacgttaaaatacttccttttatgtgctgaaagagttggccagatgactaagacatataatgacatagatgctgtcactcggcttcttgaggagaaagagcgggatttagaattggccgctcgcatcggccagtcgttgttgaagaagaacaagaccctaaccgagaggaacgagctgctggaggagcaggtggaacacatcagggaggaggtgtctcagctccggcatgagctgtccatgaaggatgagctgcttcagttctacaccagcgctgcggaggagagtgagcccgagtccgtttgctcaaccccgttgaagaggaatgagtcgtcctcctcagtccagaattactttcatttggattctcttcaaaagaagctgaaagaccttgaagaggagaatgttgtacttcgatccgaggccagccagctgaagacagagaccatcacctatgaggagaaggagcagcagctggtcaatgactgcgtgaaggagctgagggatgccaatgtccagattgctagtatctcagaggaactggccaagaagacggaagatgctgcccgccagcaagaggagatcacacacctgctatcgcaaatagttgatttgcagaaaaaggcaaaagcttgcgcagtggaaaatgaagaacttgtccagcatctgggggctgctaaggatgcccagcggcagctcacagccgagctgcgtgagctggaggacaagtacgcagagtgcatggagatgctgcatgaggcgcaggaggagctgaagaacctccggaacaaaaccatgcccaataccacgtctcggcgctaccactcactgggcctgtttcccatggattccttggcagcagagattgagggaacgatgcgcaaggagctgcagttggaagaggccgagtctccagacatcactcaccagaagcgtgtctttgagacagtaagaaacatcaaccaggttgtcaagcagagatctctgaccccttctcccatgaacatccccggctccaaccagtcctcggccatgaactccctcctgtccagctgcgtcagcaccccccggtccagcttctacggcagcgacataggcaacgtcgtcctcgacaacaagaccaacagcatcattctggaaacagaggcagccgacctgggaaacgatgagcggagtaagaagccggggacgccgggcaccccaggctcccacgacctggagacggcgctgaggcggctgtccctgcgccgggagaactacctctcggagaggaggttctttgaggaggagcaagagaggaagctccaggagctggcggagaagggcgagctgcgcagcggctccctcacacccactgagagcatcatgtccctgggcacgcactcccgcttctccgagttcaccggcttctctggcatgtccttcagcagccgctcctacctgcctgagaagctccagatcgtgaagccgctggaaggttccgccacacttcaccactggcagcagttggcccaacctcaccttgggggcatcctggacccccggcccggtgtggtcaccaagggcttccggacgctggatgttgacctggacgaagtgtactgccttaacgactttgaagaagatgacacagcgcaccatcctgggaagtgcatgtctcagaccaactccaccttcaccttcaccacctgtcgcatcctgcatccttcagatgagctcactcgggtcacaccaagccttaactcagccccaactccagcttgtggcagcaccagccacttgaaatccacgccggtggccacaccatgcactccacggagactgagcctggctgagtccttcactaacacccgtgagtccacgaccaccatgagcacatccctggggctcgtgtggctgttgaaggagcggggcatttctgctgccgtgtacgacccccagagctgggacagggccggccggggctccctcctgcactctcacgaggacgtcacctgtgctaacctgggggaaggtggggtcctttcttctttccttttgagaagcactgaaactcccaagtgtgttcttatcccatggataggaaaccagtgaattccgtggctggcacaccacgagctgtcacgcggcacgggtcataacacatctgggtgtcatcggacacctcacctcgcccaccctgtaggagcgtaaggagcctccatcctcagccacgtgcagctgacgtggctttcctgatcggagggcttttcttttatgggtggcccagcttcttcaagaccttcactgctctgcctcagtggacagtcgtttcttttttgaggtgtgaccttttgttttcatgccttccccttgaagtcatcctgtgttttgtaatcagctgtcaggccaaatgtctgacccgaaagagaatgtatttacactcatgctgcgttgttcagcagc

SEQ ID NO: 31871 - DNA, 6510 bp, Homo sapiens
  source 1..6510: mol_type = unassigned DNA
cctttggcttccccaattgtgtgggggctgccattgacccggtgtcgccgcagaaccgaggtcgccgagtgatgatgttgtgaagtcgcccgcctgtccctgccacgcccgggcggttgctggcagtgggagcagcggcagcagcttcggctgctgctttcaggctgccgctgcattaggggcttcctgaggaagcgcgggcggacgacagaggatgccgaaccactccagtcatgactgtccaaagtatgataatcacatgagagtgctcgttgctacggatgtcatttgactcatcagagaaaatctgtctaaaagaaaatatccatgtgaccaaatccatttcattattgaatggcttgatggatttcctttactctgattcataccaaagctgtccttctcaaccaaagcaagaaaggatcctgcatgagtcaatcccagaatgcaatttttacatcaccaacaggtgaagaaaacctcatgaatagcaatcacagagactcggagagcatcactgatgtctgctccaatgaggatctccctgaagttgagctggtgagtctgctagaagaacaactaccacagtataggctaaaagtagacactctctttctatatgaaaatcaagactggactcagtctccacaccagcggcagcatgcatctgatgctctctctccagtccttgctgaagagactttccgttacatgattctaggcacagacagggtggagcagatgaccaaaacttacaatgacatcgacatggttacacatctcctggcagagagggatcgtgatctggaactcgctgctcgaattggacaagctctcttaaagcggaaccatgtcttatctgagcagaacgaatccctggaggagcaattgggacaagcctttgatcaagttaatcagctgcagcatgagctatgcaagaaagatgagttacttcgaatcgtctccattgcttctgaagaaagtgaaactgattccagctgttctacacctcttcggttcaatgagtcctttagcttatctcaagggttgctgcagttggaaatgctgcaagaaaagctcaaggaactggaagaagagaatatggctcttcgatccaaggcttgtcacataaagacagaaactgttacctatgaagaaaaggaacaacagcttgtcagcgactgtgttaaagaacttcgtgaaacaaatgctcagatgtccagaatgactgaagaattgtcagggaagagtgatgagctgattcgataccaagaagagctttcctctcttttgtcacagattgtagaccttcagcacaaacttaaagaacatgtgattgagaaggaagaactaaaacttcacctgcaagcttccaaagatgcccaacggcaactgacaatggagctgcacgagttacaagacaggaatatggagtgtctaggaatgttacatgaatcccaagaagaaataaaggaacttcgtagtagatctggccctactgctcatctctacttctcccaatcatatggagcttttactggggaatctttggcagctgagattgaggggactatgcgtaaaaagctgagtttggatgaggaatcttctctctttaaacaaaaagcccaacagaagcgggtatttgataccgtcaggattgccaatgacacacggggccgctctatctcattcccagctctgttacccattccaggctccaaccgttcaagtgtcatcatgacagcaaaaccttttgagtctggtcttcagcaaacagaggacaaatcactcctgaaccaggggagcagctcagaggaggttgcagggagctcccagaagatgggccaaccaggaccctcaggagatagtgatttggctacagcactgcatcgccttagcttgcgtcgacaaaactatttaagtgagaagcagttctttgctgaagaatggcagcggaagatccaggttctggcagaccagaaggaaggagttagtggctgtgtcaccccgacagagagccttgcctctctctgcaccacccagtcagagatcacagacctcagcagtgccagttgccttcgaggttttatgccagaaaaattacaaattgtcaagccccttgaaggatcacaaactctgtatcactggcagcagcttgctcaaccaaacttgggaaccatccttgatccacgaccaggtgtcattactaaaggctttacccagttgcccggggatgctatttatcacatctcagatttagaagaggatgaagaggagggtattacttttcaggttcagcaacctcttgaagtggaagagaaactttcaacatccaagccagtaacagggatcttcctgccacccattacttcagcaggtggaccagttacagttgcaaccgccaacccaggaaagtgcctgtcgtgcacaaactcaacattcactttcaccacctgtagaatattacatccctctgacatcactcaggttacccccagctctgggttcccttcattatcctgtggaagtagcggtagcagttcatccaacacggctgtgaattctcctgccttgtcctatagactcagcattggtgagtccatcaccaaccgacgagattccactacaaccttcagtagcaccatgagcttggccaaacttctacaagagcgaggcatctctgccaaagtgtaccacagcccaatttcagagaaccccctccagcctctccctaaatccctggctatcccttccacaccaccaaattcaccatctcactcaccttgcccttctcctttaccctttgagcctcgagtgcatctctctgaaaattttttggcctctcgaccagctgagacattcctccaggagatgtatggcttgagaccctcccggaaccctcctgatgttggccagttgaagatgaacttagtggacaggctgaagagactggggatagccagagtggtcaagaaccctggtgcccaagagaatggaagatgccaggaggcagaaattggtcctcaaaaaccagattctgctgtttatttaaattcaggtagcagtttattaggtggactaaggaggaatcagagtcttccagtcataatgggtagctttgctgccccagtttgcacatcctcacccaaaatgggtgtcctgaaggaggactgaggttcagcagttaactgaccttttatacaagttagcacatgaaggatagatatgcactgaaacatgtggtctggtctgacttgagagaaaaggaatgttgcacaagggttgtgaatgtgaaagggggaatggaggaatggaaataaaattgggatgagccctaatggaggaagtcgggcaaattgaaagtataaatgaatgggccatgagtgttcagagggagaaaagaaaggtttaatatactccttcagttgagttttcttgtcttgaacataaaaagtgaatacaaataaattcagtaatactaaaacatacagagatactgaacttgctggcacatttacttctggtaagcataaagcagagagaacccaggttagaaggatgggaagagaaaaggagcagttttattgcttatagaaagccgttctgaggggttggtggggtaagctcagtctattactgagacaatagtgagatggcttatatgtttcccctgttaatatctggttaaattatgtatccatcaaatggtatgctcgcagcattagcaaaattaggagtttcatctttttcattgaatcacaggtggagactcctattttcctttctgttttcaggcctttgagcccctgggagcccaaataccactcaattattttgtatttatgattaataaaagttcattttttaaatttgtatttttatacaacctccaaaaaaaaaaacaactgggtagagggtgggagggatttacttttaagaggcaaaatgtgagtaaattgaaaccaagaaaacttgtttttagaatatttcgtctgaataagtacagtagccaaggaatacaaacataattgcatgtttttaaaaattccttggaggctggaaggggttaagccagaagtgcaatcaataggaattagggaatgttgtatatttatatatgtaaactttttttgtaagaaaagttggtgacaactaaaccaactttttccaaagtgcgctatgcatatttttaatgaaagatgacatgtatttgcacaaaaattctcaggcacattaaattattgtaaactgaagtaaaacccgggtgcttgctttgagattgtggttttttcttcctaatgtaaaataaaataaaacacatctgccttcttgatatttatagaattagagaataaactttttaatgggggagtcaaagctttttctttttctctaaggttctttttttttattcaaactgtatgaaatggcaaagtgaggctctggggttagatttcagcattcagcagttgacacaggctaagaaatggaaagaagtagatctgttttttctcaatgttgctgagcaaagtctgcttctcatcagatgacgtggctttgtctagacagcacgcagttcagaaagaaatgtctttatacaaaagacatgatagagaaaagatgagagaggggactaattattttgtttatgaaaatggcaagtaaattacttgatctttttggtgcttaatttgcaaatgttttgttcctttgtcctgacttaaaggcagttttctgaagaactcttgactcttgctcctatggttcccataggcacacctattcccaggccaaggagagtccttcctctccccttttgaggcatccccgccatccccccacttagagctatgtgctcaaaaagccaacatgaatgcagtggtaaaaatttgttagtttcttatactttttagaatctctcaataaaatttttctaaataaattccacaaaaacaaagggtgaagatggtctctccctttcgttccccttcactcagttgtgctgaggtcaatagagtgtagagtttcagaaaggattccagcaggtttatatgtgaatataagtgtccctgaatggggcaggcattaaatagaagaatccctgctgtttaaatttcccgcatattccaattcacttttaaaaaataccatttgaatttgtatttcataaagtgactctggggtgcttactttagtcaattcttaaaattttttatttgttccctaagaaagtaattactgtttctgttgcctggacagttacagtttccaggaaacatcaggaagtaggaaactgtagggccagagagtagtacaacgttaaattgtccgatttatgtgtattacttaaagctataaattgaactagatcttgccgtgctctgtattgagtataatttgtatacttttttataattaatgactaaatgatcactttggaggcagggtggtgggggtgtattagcagccaaataagcacatctgatcaaaaagaaccaggcttagattttttttaagtacattgatgttgatgttccaccagaaacaccttaagtgtatactgttgtgtaatgtctctagaaaggaatcctgtcttaaaactgggttttgctgttttttgaagtttctacctaaaatcatttttggtatatcctgataatctctataatactagaattgtctgcaaaatatagtaagaagaattggagcctaatagctgattcctcccaatttatctgttatgttttgtcactattcacattttagtcttttctacgataaaaattgtatgtgtactttcatgccagtataggaaacctcaatcttttttttttttcgcctttaagaaggttttcagtgattatacctcaggtatttctgagtgtcctattgtctaataggagaaatatcttcccgagctcagaattaaaagttctcctaaattatgaagatcccaaatcttatgtaaataaccttaggcatgagtccttagggagaagttaatgaccattgttaaagtgcttttttagaaaatgttgtgctgtatgttcttgatttgacataaatgaatagactttggcaagggaggaaataagttaaaaggcagcttacaagagcctattccctataaagggtataattttacacagtactcaaagcttgttatcttttctgaccattttagtacagaattagtacttggtggttactaacatcaacttgtgacatctagaactagggctcttagtgtttagtgggccacttctctgatgtcagatgcatgcagacctgtactccacatgcaacccaacagcagtgcagtgtgataactgagcggtcgcatggcagaggacatccccctcagagtgggcacaagtgccctctagggcagccaggggaatactattgttcgatacctgggatttgactttgtcaaacagctctttgtgcccctatctttgttttgtcaaatgtagatcagttaataaacatgagtagcttgaattttca

SEQ ID NO: 31872 - DNA, 1436 bp, Homo sapiens
  source 1..1436: mol_type = unassigned DNA
gtgaagtcgcccgcctgtccctgccacgcccgggcggttgctggcagtgggagcagcggcagcagcttcggctgctgctttcaggctgccgctgcattaggggcttcctgaggaagcgcgggcggacgacagaggatgccgaaccactccagtcatgactgtccaaagtatgataatcacatgagagtgctcgttgctacggatgtcatttgactcatcagagaaaatctgtctaaaagaaaatatccatgtgaccaaatccatttcattattgaatggcttgatggatttcctttactctgattcataccaaagctgtccttctcaaccaaagcaagaaaggatcctgcatgagtcaatcccagaatgcaatttttacatcaccaacaggtgaagaaaacctcatgaatagcaatcacagagactcggagagcatcactgatgtctgctccaatgaggatctccctgaagttgagctggtgagtctgctagaagaacaactaccacagtataggctaaaagtagacactctctttctatatgaaaatcaagactggactcagtctccacaccagcggcagcatgcatctgatgctctctctccagtccttgctgaagagactttccgttacatgattctaggcacagacagggtggagcagatgaccaaaacttacaatgacatcgacatggttacacatctcctggcagagagggatcgtgatctggaactcgctgctcgaattggacaagctctcttaaagcggaaccatgtcttatctgagcagaacgaatccctggaggagcaattgggacaagcctttgatcaagttaatcagctgcagcatgagctatgcaagaaagatgagttacttcgaatcgtctccattgcttctgaagaaagtgaaactgattccagctgttctacacctcttcggttcaatgagtcctttagcttatctcaagggttgctgcagttggaaatgctgcaagaaaagctcaaggaactggaagaagagaatatggctcttcgatccaaggcttgtcacataaagacagaaactgttacctatgaagaaaaggaacaacagcttgtcagcgactgtgttaaagaacttcgtgaaacaaatgctcagatgtccagaatgactgaagaattgtcagggaagagtgatgagctgattcgataccaagaagagctttcctctcttttgtcacagattgtagaccttcagcacaaacttaaagaagtaggtttattcattcattcaacagatatttgttaagcactcacatagtatcttgcaccatgctaagtgctagatacaataaacaaaataaacattgtccctgcccttttaaaatgccctaatctgattgctgttttaatcatctttatgtcatataagatatcatgaataaatactttcaagtca

SEQ ID NO: 31873 - DNA, 381 bp, Homo sapiens
  source 1..381: mol_type = unassigned DNA
ggaaatactgaccccataaacctaaatctcacacacggttttggacgtttaaacgaatggatttaacagccttttggaattcagcctgtttgtcatgactgtccaaagtatgataatcacatgagagtgctcgttgctacggatgtcatttgactcatcagagaaaatctgtctaaaagaaaatatccatgtgaccaaatccatttcattattgaatggcttgatggatttcctttactctgattcataccaaagctgtccttctcaaccaaagcaagaaaggatcctgcatgagtcaatcccagaatgcaatttttacatcaccaacaggtgaagaaaacctcatgaatagcaatcacagagactcggagagcatcactg

SEQ ID NO: 31874 - DNA, 3896 bp, Homo sapiens
  source 1..3896: mol_type = unassigned DNA
ggggccgtggaggccgctgggagagtggctctcctttggcttccccaattgtgtgggggctgccattgacccggtgtcgccgcagaaccgaggtcgccgagtgatgatgttgtgaagtcgcccgcctgtccctgccacgcccgggcggttgctggcagtgggagcagcggcagcagcttcggctgctgctttcaggctgccgctgcattaggggcttcctgaggaagcgcgggcggacgacagaggatgccgaaccactccagtcatgactgtccaaagtatgataatcacatgagagtgctcgttgctacggatgtcatttgactcatcagagaaaatctgtctaaaagaaaatatccatgtgaccaaatccatttcattattgaatggcttgatggatttcctttactctgattcataccaaagctgtccttctcaaccaaagcaagaaaggatcctgcatgagtcaatcccagaatgcaatttttacatcaccaacaggtgaagaaaacctcatgaatagcaatcacagagactcggagagcatcactgatgtctgctccaatgaggatctccctgaagttgagctggtgagtctgctagaagaacaactaccacagtataggctaaaagtagacactctctttctatatgaaaatcaagactggactcagtctccacaccagcggcagcatgcatctgatgctctctctccagtccttgctgaagagactttccgttacatgattctaggcacagacagggtggagcagatgaccaaaacttacaatgacatcgacatggttacacatctcctggcagagagggatcgtgatctggaactcgctgctcgaattggacaagctctcttaaagcggaaccatgtcttatctgagcagaacgaatccctggaggagcaattgggacaagcctttgatcaagttaatcagctgcagcatgagctatgcaagaaagatgagttacttcgaatcgtctccattgcttctgaagaaagtgaaactgattccagctgttctacacctcttcggttcaatgagtcctttagcttatctcaagggttgctgcagttggaaatgctgcaagaaaagctcaaggaactggaagaagagaatatggctcttcgatccaaggcttgtcacataaagacagaaactgttacctatgaagaaaaggaacaacagcttgtcagcgactgtgttaaagaacttcgtgaaacaaatgctcagatgtccagaatgactgaagaattgtcagggaagagtgatgagctgattcgataccaagaagagctttcctctcttttgtcacagattgtagaccttcagcacaaacttaaagaacatgtgattgagaaggaagaactaaaacttcacctgcaagcttccaaagatgcccaacggcaactgacaatggagctgcacgagttacaagacaggaatatggagtgtctaggaatgttacatgaatcccaagaagaaataaaggaacttcgtagtagatctggccctactgctcatctctacttctcccaatcatatggagcttttactggggaatctttggcagctgagattgaggggactatgcgtaaaaagctgagtttggatgaggaatcttctctctttaaacaaaaagcccaacagaagcgggtatttgataccgtcaggattgccaatgacacacggggccgctctatctcattcccagctctgttacccattccaggctccaaccgttcaagtgtcatcatgacagcaaaaccttttgagtctggtcttcagcaaacagaggacaaatcactcctgaaccaggggagcagctcagaggaggttgcagggagctcccagaagatgggccaaccaggaccctcaggagatagtgatttggctacagcactgcatcgccttagcttgcgtcgacaaaactatttaagtgagaagcagttctttgctgaagaatggcagcggaagatccaggttctggcagaccagaaggaaggagttagtggctgtgtcaccccgacagagagccttgcctctctctgcaccacccagtcagagatcacagacctcagcagtgccagttgccttcgaggttttatgccagaaaaattacaaattgtcaagccccttgaaggatcacaaactctgtatcactggcagcagcttgctcaaccaaacttgggaaccatccttgatccacgaccaggtgtcattactaaaggctttacccagttgcccggggatgctatttatcacatctcagatttagaagaggatgaagaggagggtattacttttcaggttcagcaacctcttgaagtggaagagaaactttcaacatccaagccagtaacagggatcttcctgccacccattacttcagcaggtggaccagttacagttgcaaccgccaacccaggaaagtgcctgtcgtgcacaaactcaacattcactttcaccacctgtagaatattacatccctctgacatcactcaggttacccccagctctgggttcccttcattatcctgtggaagtagcggtagcagttcatccaacacggctgtgaattctcctgccttgtcctatagactcagcattggtgagtccatcaccaaccgacgagattccactacaaccttcagtagcaccatgagcttggccaaacttctacaagagcgaggcatctctgccaaagtgtaccacagcccaatttcagagaaccccctccagcctctccctaaatccctggctatcccttccacaccaccaaattcaccatctcactcaccttgcccttctcctttaccctttgagcctcgagtgcatctctctgaaaattttttggcctctcgaccagctgagacattcctccaggagatgtatggcttgagaccctcccggaaccctcctgatgttggccagttgaagatgaacttagtggacaggctgaagagactggggatagccagagtggtcaagaaccctgtgcccaagagaatggaagatgccaggaggcagaaattggtcctcaaaaaccagattctgctgtttatttaaattcaggtagcagtttattaggtggactaaggaggaatcagagtcttccagtcataatgggtagctttgctgccccagtttgcacatcctcacccaaaatgggtgtcctgaaggaggactgaggttcagcagttaactgaccttttatacaagttagcacatgaaggatagatatgcactgaaacatgtggtctggtctgacttgagagaaaaggaatgttgcacaagggttgtgaatgtgaaagggggaatggaggaatggaaataaaattgggatgagccctaatggaggaagtcgggcaaattgaaagtataaatgaatgggccatgagtgttcagagggagaaaagaaaggtttaatatactccttcagttgagttttcttgtcttgaacataaaaagtgaatacaaataaattcagtaatactaaaacatacagagatactgaacttgctggcacatttacttctggtaagcataaagcagagagaacccaggttagaaggatgggaagagaaaaggagcagttttattgcttatagaaagccgttctgaggggttggtggggtaagctcagtctattactgagacaatagtgagatggcttatatgtttcccctgttaatatctggttaaattatgtatccatcaaatggtatgctcgcagcattagcaaaattaggagtttcatctttttcattgaatcacaggtggagactcctattttcctttctgttttcaggcctttgagcccctgggagcccaaataccactcaattattttgtatttatgattaataaaagttcattttt

SEQ ID NO: 31875 - DNA, 5923 bp, Homo sapiens
  source 1..5923: mol_type = unassigned DNA
ctgcaatgaaaaattacacttctattttctttcctaaagggaaaaaggaagaatgcaacaaaactgaagtatgttctgccacgttcctgaactgcagccataggagccctcccagccctacccaaaccagcctactccctctcaagagctcacagctgcaggactagagccagatgtgccccggcaataaggacttcttccatggagaagcccctcaccgtcctgcgagtgagcctgtaccatcccacgctgggcccatctgcctttgccaatgtcccaccacggctgcagcatgataccagccctctgcttctcggacgggggcaggacgcccacctccagctgcagctccctcgcctctcccgccgtcacctgtccctggagccctacctggagaaaggcagtgccctgctggccttctgcctcaaggccctgagccgcaagggctgtgtgtgggtcaatgggctgacgctgaggtacctggagcaggtccccctgagcaccgtcaacagggtctccttctcaggcatccagatgctggttcgcgtagaagaaggcacatccctggaggcttttgtctgctatttccatgtcagcccttcacccctgatttacagacctgaggctgaggaaactgacgaatgggaaggcatctcccaggggcagcctccccctggttcagggtagcagatccaggttgcctggggtttctccacggcccttcccagacttgggacagccctctccagccaagacctggaggaggaacagaaatacagctccagagggaacccccagacagtgcactctgctagccctgccactagagcaagcctttgctagatgaaacaggatttgaaatacttgagctgcatcatgcaaggttgacaagcaaaacccactggctgccttgctcataatgaaccaattctgcaaacaccgaacaaacagcccaggggggagaagcaccctctgtggccagagctatgcaatgtaatgggaacatcatatacttttagaggccctgaggggttctggggagcctctctcagcatttccacacatttctccctgttgtctgactaggagttactttatgtggttcattttgtgtgctgcttaagagcaggagtttgaggttgcaccaggaatgcgtggacacatgtaacaattacatttgtggtagcttggggttaccttcagctttcaaatacccacaggcacgcggggcttaggaaagcctgagtgtaataaactgcaagtatttcattaagctggcatacccaataggattccctgatccccagatgggccacatgcacgccacgctgtcatgcagacgtgggggtgggaaatatagacgaggtgtaagaggaaattggaaaggtgggactcacatttctggaaaggatgcaggcagggctcagggtttcctgaggatgggagctgggagctgggcctgcctggaaattcattgtcccccttatcatcctcatcctcacactccgcattctctgtcacttctggatcaaggccttggttgacttgagggcaaggtctttagggaatgaggggatggggtgggggtttgtgtaagaactcagcccagcagttatttcgctcagggtgagtcacacaccaatgggggtgggggaattccttccaaataagggactcgttaggagccaggtacgccaagggcaggaggattttctcggtgaacaagggcagcagctatttgccacgccatgctgagaaggggagagtgtggtttagaaacaacgttcactagtgtgatgcagggagggatctacatggtcaccatgatcccagaccccactctccagggaatctgaggcaccaagggcacagccctgttcccctggctgactcgaatctctgggtctgtagctgtcaacaatttctgttttctgcccaaaaggatgatcgttttgcacccagggcaagctacaaggaggtccaacttcactcacaggccctgagcatcttctccatcaggaaaacagaggtgggcaagacccaggcttgccctggtgtgggaagcttcctctccaatagggatgaagcaaaaacactcagatcacagccacaaggcagggagagcagggctgctaggaaggggctctctgatgctgtgaatgaccccttgggacccccaaagcagttcctcattcattcagcaaaccttcaccaagcacccaccttgtgccagatctgtgcaaagccacggaactgaaccagaagtgaataaggcaaactccctcagggagtttaccttgcactcaggaaagtcaagcattcaggagtgcattacttatttgatcactactatgattagtgctatagtcattgtatttttctctctcctccagctgggctcacattctcttgttaagtggccttgcctgttgagtgcctaccatgtgcttagcactctgctaggtgctgtgtgtattaactgcacttaacagataaggaaactgagacttggaaaggttacatatcttgcccaacatcacaccatcagtagctatgcgatttgggcaagtgatttagtctgctcttgcctctatttctcccgctggaaaatgggtaagataatagtactacctgctagagttacgagggtcttagaaggtgacacctgtaaagcattcaatcagtgcccagcacacacttaataagggttagctactatcatgagacctgagagaggagggctcaccatccacacggagctaaggaagactcacaccccagtaagctggctccagaacccaagggcttacctgtgctctgtgattccccaactagggatttagttgtagccacggacctggtaggcaacagggaggggattttaatctgctccttgcatcagaaggtccaataggcagggttagtataatgggagatgccctggtagggctggcaaggagaagaagccacatgtattttggtctgatgaaaagcagcagtgatctgtcactgaccaaaatggtcccccaactatgcattacggagcagcaacccacatacagaactcgagaagccacggcctggagactgtacctggacaccaaagactggagagaggagctggtggggaaaccccagagttcccagggtgccactccccagctccaccagagaactttgggaatgagctgctgcccctgagtgcccctctccagggcctcagtgagggtctctaccctccagggaggaacaaaaccttgccagctggggtcctgcgagagggggcagttcaattcctccacaggggactctgcaactccaatctttcgagtgaagcatctgcgaggccctcagggacccaggatgaactgcatagcagcagaaggaagacaggccagaccaggcgggagggagcccggaaacatctggtttgtagtttcagactctacccgttcacagttcacacagtctcaccgggaaactcacaccttgccctgtaccaagtttttaaggcagttaagctctgcccatccgagacttcatttttcttgagtagaaaatcactgaaatcatcagatccatggcacccaccttcactttctcctaacagctggaaccgtcaggctggcttcagggcctggtcttcgcacttgatatcactatccctcacctgctcagacagccagagcaggcgggtgagttcctcccaacaacctccactgcattctctcagctcccaccgcagggcagcccacgtgcctgagtgaacatgtgtgcgtgtgcacacacgcaagtatgcacagacatacactaaacacgaacatacagtgcacatgaacgctgctcccagctagggccctctggtcagactgctgcctgggttagaattcttgtccccacccccacttactatagttctgtgatcctggacaagtaactgaatctctccgtgccacagtttcttcttgtagaaaacgggaaagttcacagtacttacctccttagagtcattgtgaaggtcagtttgaggcatcacaaatttaaggcacccagacataagggtcaacagggttagctatcactgtccagtttggtgggaggaactgaatgcatgtaggcacatggacccagtctacactcaggcacaaaaggagctacattagttacattcaggcataccccagagcactacaattctctgagacattgtctggaaatctagaaatcatctccttgccctttaaggtattttaaccctcgcattcctctgcttttccaagaatgtgaatcttgccaagctgtccgtgagagacacgggctcccctcgagggagacttgcaaatgctccataaacagccacagtgtggggctctgccatgaggaagtcacagcagacacgctagacagcatagtcctggatgcaacctggaggaagggaggcccatggtggagcactcactccgtgcctgtctgcccggtgagacctcaagttccttgcagacaaaggccatgggttgttggctcttgtgttcccggtggcctttccagagctgaacagaggacagatgcacagacgggggggctctggtggtcaaggcagcagtccccttggatactaaagtctgagccaggcccctcaggcccggcatgggcagtgcgaggcccatagtggtgggaagccagttggccagctggggtgagaaggccgcgaagccatgggcagacaggaagtggaggtgaatgtctctgcctcctgtaggcctcagcagggacagcacagaccctctggctggggcagcgcagaccctctagctggggcagaacaaggctggtgcttccttctagtccttgagactttgtagctctaactcaagcagaaccctggggttttgggattctgtgtggtgactgctgaggaaggtttatggatttgacagggtgcatgtcacagagagacagttctcagtcagcacttcctgtcccctgcagaggctcataggggacagcccctgccaaggagaccctggaggggctctgaggatagcaatcagaggttgggctggctggactgagcccaggcctgttgcccaccaagtctccataggttctagtctgacccctctctccacccctgggctatgcaggccagcccgtgcagaccacccccgacgcgtccacttgcaacacccgcctcactgtgccaacactccatccacacaggaaaggactgagaacgtgatgcttaacccaaaggagtgagtttcataggatgggtggctttaacagtttcacagcaggacactgagggaatatttccctatcccttcaaatggacggtcactacagaaacgtgtagagcaagactttgtcaaggggctgtttccaggtctcccggtgtctaaatagcagagctggaatgggaactgagaaccgattctttccacaaccgcccactgagcagcaaggctgcagccagcaaagaggtgcggaggcaagcaagctccatgtggtggggacagcgcattgcgacctccaccacccctgcagtgggctgccagctgagccacctgtcttccactgtatctactgtacgaacttctccagctctgctctgttttctcttcctcagcatccaccccgtgacacgtagtggtggctgatgtcgccacagtaccatgaggttaacaggtcctccctccagcttccctcatggtggcagcctaacctgcattgcagccgttcaccggacaccgcaccagaccctcaaaacccatccaagactgtgggaggagtaaacaacccagcccagttaagaggagatgccgaatttaatgaaccctatttgaattgcagggctgtgattcctcttacctttaacgtgaactcacaggcggattaaagtgaaataaaacctaccatttga

SEQ ID NO: 31876 - DNA, 3178 bp, Homo sapiens
  source 1..3178: mol_type = unassigned DNA
agtgcggggtctgacagaggaggctccgtgtctgcagctagtgtgtcaactcagcgtttctcctctcgtccctggtgaggtgtagcggcggcacgcggctggagatcccctgtggcctccagtttaggaagggtccagcatcccaagggaggggtgtgtgggcgaggggtctctgggcccggggtcgcggctgtgaggagaggatgcccgcgcggcggcatctcaggcacctggaggaggccgcgctttctcctcagggaaccggcgccttggcagcccccggcgacgccgcccccttcgcggcctaggttggtctggtgagccgggaagcgggcgtcgttcgcagcgccgctgtgaccaccgcgtcccgggcggagctgggctcagtgccggcctgggcctagagtccgagcctcgagctgccggcgtggggggtcgcgagtggcctaatgcggcctcgaagccgaaggacccgagtccgagctcgcactccgacccgctggtgctgtggaaaactcaggtggccttccgctttcgtagcctctaaagtggggaccaagactttcacctcttaggattgtagtcgggattaaaagattttcccggaagagctaaagatggctgaatttctagatgaccaggaaactcgactgtgtgacaactgcaaaaaagaaattcctgtgtttaactttaccatccatgagatccactgtcaaaggaacattggtatgtgtcctacctgtaaggaaccatttcccaaatctgacatggagactcacatggctgcagaacactgtcaggtgacctgcaaatgtaacaagaagttggagaagaggctgttaaagaagcatgaggagactgagtgccctttgcggcttgctgtctgccagcactgtgatttagaactttccattctcaaactgaaggaacatgaagattattgtggtgcccggacggaactatgtggcaactgtggtcgcaatgtccttgtgaaagatctgaagactcaccctgaagtttgtgggagagagggggaggaaaagagaaatgaggttgccatacctcctaatgcatatgatgaatcttggggtcaggatggaatctggattgcatcccaactcctcagacaaattgaggctctggacccacccatgaggctgccgcgaaggcccctgagagcctttgaatcagatgttttccacaatagaactaccaaccaaaggaacattacagcccaggtttcaattcagaataatctgtttgaagaacaagagaggcaggaaaggaatagaggccaacagccccccaaagagggtggtgaagagagtgcaaacttggacttcatgttggccctaagtctgcaaaatgaaggccaagcctccagtgtggcagagcaggacttctggagggccgtatgtgaggccgaccagtctcatggcggtcccaggtctctcagtgacataaagggtgcagctgacgagatcatgttgccttgtgaattttgtgaggagctctacccagaggaactgctgattgaccatcagacaagctgtaacccttcacgtgccttaccttcactcaatactggcagctcttcccccagaggggtggaggaacctgatgtcatcttccagaacttcttgcaacaggctgcaagtaaccagttagactctttgatgggcctgagcaattcacaccctgtggaggagagcatcattatcccatgtgaattctgtggggtacagctggaagaggaggtgctgttccatcaccaggaccagtgtgaccaacgcccagccactgcaaccaaccatgtgacagaggggattcctagactggattcccagcctcaagagacctcaccagagctgcccaggaggcgtgtcagacaccagggagacctgtcttctggttacctggatgatactaagcaggaaacagctaatgggcccacctcctgtctgcctcccagccgacccattaacaatatgacagctacctataaccagctatcgagatcaacatcaggccccagacctgggtgccagcccagctctccttgtgtgccgaagctcagcaactcagacagccaggacatccaggggcggaatcgagacagccagaatggggccatagcccctgggcacgtttcagtgattcgccctcctcaaaatctctacccagaaaacattgtgccctctttctcccctgggccttcagggagatacggagctagtggtaggagtgaaggtggcaggaattcccgggtcacccctgcagctgccaactaccgcagcagaactgcaaaggcaaagccttccaagcaacagggagctggggatgcagaagaggaagaggaggagtaatggtgtctccagagactttacatcggttcctgtcttctgtgcacagcagcacttgccgctgtgcaggcccacctctttggctctttgggtgggagagtttttccagattttagatttttctaggttatggccattttgtgtcttttgaggttgtgctgtgggggtttgggtttgagggaagggagcagggtggcggttgaggaacgcttcagccttagctgctacctttcggcagcagtgaaatacaagctgcagcctcggctgccagggctcccttttgacttattgtcgccactgccccttggtgctgtgtggtcccagtggaaggaggggaagattttggaaacctggtagccaccagtaaggtgattctctgccctgttggggcctaaatttgggggcttttgggcaacctctccgtgtactgcgtctgtccacactcgattgggccccaggtgtgtatgaggcgctctggtaaggtgctcaggccagttgcaatgtctgtcagtaacgaggcttttgatgtgttgagctggaggtgagtggaccgggggctgtgttttaagctgcttccttggcatttggcatcactgccttctgttcccgggggagcatggatcttttgtcctcactgctttctaatggggagggctgagggctccctgtccccacagcaggtatgttgggctctgccccagccccacacttgctctgaaaaccaagtgtcagagccccttccccttgtttttattttactgttataataattattaacttccttgtaatagaaataaagtttgtacttggagttc

SEQ ID NO: 31877 - DNA, 2687 bp, Homo sapiens
  source 1..2687: mol_type = unassigned DNA
cgcgatgggcggaagtggtgaggcagctctgagggccgttgttcagtgcggggtctgacagaggaggctccgtgtctgcagctagtgtgtcaactcagcgtttctcctctcgtccctggaagagctaaagatggctgaatttctagatgaccaggaaactcgactgtgtgacaactgcaaaaaagaaattcctgtgtttaactttaccatccatgagatccactgtcaaaggaacattggtatgtgtcctacctgtaaggaaccatttcccaaatctgacatggagactcacatggctgcagaacactgtcaggtgacctgcaaatgtaacaagaagttggagaagaggctgttaaagaagcatgaggagactgagtgccctttgcggcttgctgtctgccagcactgtgatttagaactttccattctcaaactgaaggaacatgaagattattgtggtgcccggacggaactatgtggcaactgtggtcgcaatgtccttgtgaaagatctgaagactcaccctgaagtttgtgggagagagggggaggaaaagagaaatgaggttgccatacctcctaatgcatatgatgaatcttggggtcaggatggaatctggattgcatcccaactcctcagacaaattgaggctctggacccacccatgaggctgccgcgaaggcccctgagagcctttgaatcagatgttttccacaatagaactaccaaccaaaggaacattacagcccaggtttcaattcagaataatctgtttgaagaacaagagaggcaggaaaggaatagaggccaacagccccccaaagagggtggtgaagagagtgcaaacttggacttcatgttggccctaagtctgcaaaatgaaggccaagcctccagtgtggcagagcaggacttctggagggccgtatgtgaggccgaccagtctcatggcggtcccaggtctctcagtgacataaagggtgcagctgacgagatcatgttgccttgtgaattttgtgaggagctctacccagaggaactgctgattgaccatcagacaagctgtaacccttcacgtgccttaccttcactcaatactggcagctcttcccccagaggggtggaggaacctgatgtcatcttccagaacttcttgcaacaggctgcaagtaaccagttagactctttgatgggcctgagcaattcacaccctgtggaggagagcatcattatcccatgtgaattctgtggggtacagctggaagaggaggtgctgttccatcaccaggaccagtgtgaccaacgcccagccactgcaaccaaccatgtgacagaggggattcctagactggattcccagcctcaagagacctcaccagagctgcccaggaggcgtgtcagacaccagggagacctgtcttctggttacctggatgatactaagcaggaaacagctaatgggcccacctcctgtctgcctcccagccgacccattaacaatatgacagctacctataaccagctatcgagatcaacatcaggccccagacctgggtgccagcccagctctccttgtgtgccgaagctcagcaactcagacagccaggacatccaggggcggaatcgagacagccagaatggggccatagcccctgggcacgtttcagtgattcgccctcctcaaaatctctacccagaaaacattgtgccctctttctcccctgggccttcagggagatacggagctagtggtaggagtgaaggtggcaggaattcccgggtcacccctgcagctgccaactaccgcagcagaactgcaaaggcaaagccttccaagcaacagggagctggggatgcagaagaggaagaggaggagtaatggtgtctccagagactttacatcggttcctgtcttctgtgcacagcagcacttgccgctgtgcaggcccacctctttggctctttgggtgggagagtttttccagattttagatttttctaggttatggccattttgtgtcttttgaggttgtgctgtgggggtttgggtttgagggaagggagcagggtggcggttgaggaacgcttcagccttagctgctacctttcggcagcagtgaaatacaagctgcagcctcggctgccagggctcccttttgacttattgtcgccactgccccttggtgctgtgtggtcccagtggaaggaggggaagattttggaaacctggtagccaccagtaaggtgattctctgccctgttggggcctaaatttgggggcttttgggcaacctctccgtgtactgcgtctgtccacactcgattgggccccaggtgtgtatgaggcgctctggtaaggtgctcaggccagttgcaatgtctgtcagtaacgaggcttttgatgtgttgagctggaggtgagtggaccgggggctgtgttttaagctgcttccttggcatttggcatcactgccttctgttcccgggggagcatggatcttttgtcctcactgctttctaatggggagggctgagggctccctgtccccacagcaggtatgttgggctctgccccagccccacacttgctctgaaaaccaagtgtcagagccccttccccttgtttttattttactgttataataattattaacttccttgtaatagaaataaagtttgtacttgga

SEQ ID NO: 31878 - DNA, 532 bp, Homo sapiens
  source 1..532: mol_type = unassigned DNA
agtgcggggtctgacagaggaggctccgtgtctgcagctagtgtgtcaactcagcgtttctcctctcgtccctgaaatgaaagagaaagttcatgtcttcctttgtggttttcaggaagagctaaagatggctgaatttctagatgaccaggaaactcgactgtgtgacaactgcaaaaaagaaattcctgtgtttaactttaccatccatgagatccactgtcaaaggaacattggtatgtgtcctacctgtaaggaaccatttcccaaatctgacatggagactcacatggctgcagaacactgtcaggtgacctgcaaatgtaacaagaagttggagaagaggctgttaaagaagcatgaggagactgagtgccctttgcggcttgctgtctgccagcactgtgatttagaactttccattctcaaactgaaggaacatgaagattattgtggtgcccggacggaactatgtggcaactgtggtcgcaatgtccttgtgaaagatctgaagactcaccctgaagtttgt

SEQ ID NO: 31879 - DNA, 1043 bp, Homo sapiens
  source 1..1043: mol_type = unassigned DNA
agaggaggctccgtgtctgcagctagtgtgtcaactcagcgtttctcctctcgtccctggaagagctaaagatggctgaatttctagatgaccaggaaactcgactgtgtgacaactgcaaaaaagaaattcctgtgtttaactttaccatccatgagatccactgtcaaaggaacattggtatgtgtcctacctgtaaggaaccatttcccaaatctgacatggagactcacatggctgcagaacactgtcaggtgacctgcaaatgtaacaagaagttggagaagaggctgttaaagaagcatgaggagactgagtgccctttgcggcttgctgtctgccagcactgtgatttagaactttccattctcaaactgaaggaacatgaagattattgtggtgcccggacggaactatgtggcaactgtggtcgcaatgtccttgtgaaagatctgaagactcaccctgaattgaagaacaagagaggcaggaaaggaatagaggccaacagccccccaaagagggtggtgaagagagtgcaaacttggacttcatgttggccctaagtctgcaaaatgaaggccaagcctccagtgtggcagagcaggacttctggagggccgtatgtgaggccgaccagtctcatggcggtcccaggtctctcagtgacataaagggtgcagctgacgagatcatgttgccttgtgaattttgtgaggagctctacccagaggaactgctgattgaccatcagacaagctgtaacccttcacgtgccttaccttcactcaatactggcagctcttcccccagaggggtggaggaacctgatgtcatcttccagaacttcttgcaacaggctgcaagtaaccagttagactctttgatgggcctgagcaattcacaccctgtggaggagagcatcattatcccatgtgaattctgtggggtacagctggaagaggaggtgctgttccatcaccaggaccagtgtgaccaacgcccagccactgcaaccaaccatgtgacagaggggattccta

SEQ ID NO: 31880 - DNA, 983 bp, Homo sapiens
  source 1..983: mol_type = unassigned DNA
ggaggctccgtgtctgcagctagtgtgtcaactcagcgtttctcctctcgtccctgcctctaaagtggggaccaagactttcacctcttaggattgtagtcgggattaaaagattttcccggaagagctaaagatggctgaatttctagatgaccaggaaactcgactgtgtgacaactgcaaaaaagaaattcctgtgtttaactttaccatccatgagatccactgtcaaaggaacattggtatgtgtcctacctgtaaggaaccatttcccaaatctgacatggagactcacatggctgcagaacactgtcaggtgacctgcaaatgtaacaagaagttggagaagaggctgttaaagaagcatgaggagactgagtgccctttgcggcttgctgtctgccagcactgtgatttagaactttccattctcaaactgaaggaacatgaagattattgtggtgcccggacggaactatgtggcaactgtggtcgcaatgtccttgtgaaagatctgaagactcaccctgaagtttgtgggagagagggggaggaaaagagaaatgaggttgccatacctcctaatgcatatgatgaatcttggggtcaggatggaatctggattgcatcccaactcctcagacaaattgaggctctggacccacccatgaggctgccgcgaaggcccctgagagcctttgaatcagatgttttccacaatagaactaccaaccaaaggaacattacagcccaggtttcaattcagaataatctgtttgaagaacaagagaggcaggaaaggaatagaggccaacagccccccaaagagggtggtgaagagagtgcaaacttggacttcatgttggccctaagtctgcaaaatgaaggccaagcctccagtgtggcagagcaggacttctggagggccgtatgtgaggccgaccagtctcatggcggtcccaggtctctcagtgacataaagg

SEQ ID NO: 31881 - DNA, 1162 bp, Homo sapiens
  source 1..1162: mol_type = unassigned DNA
ggggcggggcggacgcagagccgcgtttagtctatcgctgcggttgcgagcgctgtagggagcctgtgctgtgccgcgcagttaggcagcagcagccgcggagcagtagccgccgtgggagggagccatgaagcattacgaggtggagattctggacgcaaagacaagggagaagctgtgtttcttggacaaggtggagccccacgccaccattgcggagatcaagaacctcttcactaagacccatccgcagtggtaccccgcccgccagtccctccgcctggaccccaagggcaagtccctgaaggatgaggatgttctgcagaagctgcccgtgggcaccacggccacactgtacttccgggacctgggggcccagatcagctgggtgacggtcttcctaacagagtacgcggggccccttttcatctacctgctcttctacttccgagtgcccttcatctatggccacaaatatgactttacgtccagtcggcatacagtggtgcacctcgcctgcatctgtcactcattccactacatcaagcgcctgctggagacgctcttcgtgcaccgcttctcccatggcactatgcctttgcgcaacatcttcaagaactgcacctactactggggcttcgccgcgtggatggcctattacatcaatcaccctctctacactccccctacctacggagctcagcaggtgaaactggcgctcgccatctttgtgatctgccagctcggcaacttctccatccacatggccctgcgggacctgcggcccgctgggtccaagacgcggaagatcccataccccaccaagaaccccttcacgtggctcttcctgctggtgtcctgccccaactacacctacgaggtggggtcctggatcggtttcgccatcatgacgcagtgtctcccagtggccctgttctccctggtgggcttcacccagatgaccatctgggccaagggcaagcaccgcagctacctgaaggagttccgggactacccgcccctgcgcatgcccatcatccccttcctgctctgagcgctcacccctgctgaggctcagcccctcaacccggtggcattctgggggaggagtggggcccacagctctccagcacccggaataaagcccgcctgccccagtcgg

SEQ ID NO: 31882 - DNA, 1202 bp, Homo sapiens
  source 1..1202: mol_type = unassigned DNA
tttagtctatcgctgcggttgcgagcgctgtagggagcctgtgctgtgccgcgcagttaggcagcagcagccgcggagcagtagccgccgtgggagggagccatgaagcattacgagcagagagatgattcttcaagaaaccaaagcagcctgtggcattccagcgattcctcattgctcaagggtggagattctggacgcaaagacaagggagaagctgtgtttcttggacaaggtggagccccacgccaccattgcggagatcaagaacctcttcactaagacccatccgcagtggtaccccgcccgccagtccctccgcctggaccccaagggcaagtccctgaaggatgaggatgttctgcagaagctgcccgtgggcaccacggccacactgtacttccgggacctgggggcccagatcagctgggtgacggtcttcctaacagagtacgcggggccccttttcatctacctgctcttctacttccgagtgcccttcatctatggccacaaatatgactttacgtccagtcggcatacagtggtgcacctcgcctgcatctgtcactcattccactacatcaagcgcctgctggagacgctcttcgtgcaccgcttctcccatggcactatgcctttgcgcaacatcttcaagaactgcacctactactggggcttcgccgcgtggatggcctattacatcaatcaccctctctacactccccctacctacggagctcagcaggtgaaactggcgctcgccatctttgtgatctgccagctcggcaacttctccatccacatggccctgcgggacctgcggcccgctgggtccaagacgcggaagatcccataccccaccaagaaccccttcacgtggctcttcctgctggtgtcctgccccaactacacctacgaggtggggtcctggatcggtttcgccatcatgacgcagtgtctcccagtggccctgttctccctggtgggcttcacccagatgaccatctgggccaagggcaagcaccgcagctacctgaaggagttccgggactacccgcccctgcgcatgcccatcatccccttcctgctctgagcgctcacccctgctgaggctcagcccctcaacccggtggcattctgggggaggagtggggcccacagctctccagcacccggaataaagcccgcctgccccagtc

SEQ ID NO: 31883 - DNA, 1346 bp, Homo sapiens
  source 1..1346: mol_type = unassigned DNA
cccgggggcggggcttcgtccaggcgcgcagggaccagcgggcctcgccctcccgcgccgctttccgattggcagccgcccgcggggcattgtgggccgtccgcgcgcccgtcccgtcgccgccgccgccgccgcagacccctcggtcttgctatgtcgagctcacccgtgaagcgtcagaggatggagtccgcgctggaccagctcaagcagttcaccaccgtggtggccgacacgggcgacttccacgccatcgacgagtacaagccccaggatgctaccaccaacccgtccctgatcctggccgcagcacagatgcccgcttaccaggagctggtggaggaggcgattgcctatggccggaagctgggcgggtcacaagaggaccagattaaaaatgctattgataaactttttgtgttgtttggagcagaaatactaaagaagattccgggccgagtatccacagaagtagacgcaaggctctcctttgataaagatgcgatggtggccagagccaggcggctcatcgagctctacaaggaagctgggatcagcaaggaccgaattcttataaagctgtcatcaacctgggaaggaattcaggctggaaaggagctcgaggagcagcacggcatccactgcaacatgacgttactcttctccttcgcccaggctgtggcctgtgccgaggcgggtgtgaccctcatctccccatttgttgggcgcatccttgattggcatgtggcaaacaccgacaagaaatcctatgagcccctggaagaccctggggtaaagagtgtcactaaaatctacaactactacaagaagtttagctacaaaaccattgtcatgggcgcctccttccgcaacacgggcgagatcaaagcactggccggctgtgacttcctcaccatctcacccaagctcctgggagagctgctgcaggacaacgccaagctggtgcctgtgctctcagccaaggcggcccaagccagtgacctggaaaaaatccacctggatgagaagtctttccgttggttgcacaacgaggaccagatggctgtggagaagctctctgacgggatccgcaagtttgccgctgatgcagtgaagctggagcggatgctgacagaacgaatgttcaatgcagagaatggaaagtagcgcatccctgaggctggactccagatctgcaccgccggccagctgggatctgactgcacgtggcttctgatgaatcttgcgttttttacaaattggagcagggacagatcatagatttctgattttatgtaaaattttgcctaatacattaaagcagtcacttttcctgtgctgtttca

SEQ ID NO: 31884 - DNA, 1231 bp, Homo sapiens
  source 1..1231: mol_type = unassigned DNA
tccgcgcgcccgtcccgtcgccgccgccgccgccgcagacccctcggtcttgctatgtcgagctcacccgtgaagcgtcagaggatggagtccgcgctggaccagctcaagcagttcaccaccgtggtggccgacacgggcgacttccacgccatcgacgagtacaagccccaggatgctaccaccaacccgtccctgatcctggccgcagcacagatgcccgcttaccaggagctggtggaggaggcgattgcctatggccggaagctgggcgggtcacaagaggaccagattaaaaatgctattgataaactttttgtgttgtttggagcagaaatactaaagaagattccgggccgagtatccacagaagtagacgcaaggctctcctttgataaagatgcgatggtggccagagccaggcggctcatcgagctctacaaggaagctgggatcagcaaggaccgaattcttataaagctgtcatcaacctgggaaggaattcaggctggaaaggagctcgaggagcagcacggcatccactgcaacatgacgttactcttctccttcgcccaggctgtggcctgtgccgaggcgggtgtgaccctcatctccccatttgttgggcgcatccttgattggcatgtggcaaacaccgacaagaaatcctatgagcccctggaagaccctggggtaaagagtgtcactaaaatctacaactactacaagaagtttagctacaaaaccattgtcatgggcgcctccttccgcaacacgggcgagatcaaagcactggccggctgtgacttcctcaccatctcacccaagctcctgggagagctgctgcaggacaacgccaagctggtgcctgtgctctcagccaagcccaagccagtgacctggaaaaaatccacctggatgagaagtctttccgttggttgcacaacgaggaccagatggctgtggagaagctctctgacgggatccgcaagtttgccgctgatgcagtgaagctggagcggatgctgacagaacgaatgttcaatgcagagaatggaaagtagcgcatccctgaggctggactccagatctgcaccgccggccagctgggatctgactgcacgtggcttctgatgaatcttgcgttttttacaaattggagcagggacagatcatagatttctgattttatgtaaaattttgcctaatacattaaagcagtcacttttcc

SEQ ID NO: 31885 - DNA, 1582 bp, Homo sapiens
  source 1..1582: mol_type = unassigned DNA
gaaaagaggctgaggcaacctgaaggaggagctctcattaccttctgcccatcacttaataaatagccagccaattcatcaacattctggtacactgttggagagatgagacagtcacaccagctgcccctagtggggctcttactgttttcttttattccaagccaactatgcgagatttgtgaggtaagtgaagaaaactacatccgcctaaaacctctgttgaatacaatgatccagtcaaactataacaggggaaccagcgctgtcaatgttgtgttgtccctcaaacttgttggaatccagatccaaaccctgatgcaaaagatgatccaacaaatcaaatacaatgtgaaaagcagattgtcagatgtaagctcgggagagcttgccttgattatactggctttgggagtatgtcgtaacgctgaggaaaacttaatatatgattaccacctgatcgacaagctagaaaataaattccaagcagaaattgaaaatatggaagcacacaatggcactcccctgactaactactaccagctcagcctggacgttttggccttgtgtctgttcaatgggaactactcaaccgccgaagttgtcaaccacttcactcctgaaaataaaaactattattttggtagccagttctcagtagatactggtgcaatggctgtcctggctctgacctgtgtgaagaagagtctaataaatgggcagatcaaagcagatgaaggcagtttaaagaacatcagtatttatacaaagtcactggtagaaaagattctgtctgagaaaaaagaaaatggtctcattggaaacacatttagcacaggagaagccatgcaggccctctttgtatcatcagactattataatgaaaatgactggaattgccaacaaactctgaatacagtgctcacggaaatttctcaaggagcattcagcaatccaaacgctgcagcccaggtcttacctgccctgatgggaaagaccttcttggatattaacaaagactcttcttgcgtctctgcttcaggtaacttcaacatctccgctgatgagcctataactgtgacacctcctgactcacaatcatatatctccgtcaattactctgtgagaatcaatgaaacatatttcaccaatgtcactgtgctaaatggttctgtcttcctcagtgtgatggagaaagcccagaaaatgaatgatactatatttggtttcacaatggaggagcgctcatgggggccctatatcacctgtattcagggcctatgtgccaacaataatgacagaacctactgggaacttctgagtggaggcgaaccactgagccaaggagctggtagttacgttgtccgcaatggagaaaacttggaggttcgctggagcaaatactaataagcccaaactttcctcagctgcataaaatccatttgcagtggagttccatgtttattgtccttatgccttcttcttcatttatcccagtacgagcaggagagttaataacctccccttctctctctacatgttcaataaaagttgttgaaagattaacaactatacaaaaaga

SEQ ID NO: 31886 - DNA, 2535 bp, Homo sapiens
  source 1..2535: mol_type = unassigned DNA
actccttgtcctgggctaggtgggcactaccaggggctcctttggtaaggagtaccgggtaggcacccggtcctgccaatccaccactggaacagctggggggacagcagacaggcacggtcggacagacttgacagatcaggcatcaggccctctgcgctggtcccgggctctttaagcaggaacgtgaatggcctcaagatgtctcacatggtcccactagccctcctcctccctttgttccctacctccaggagggctgctctgcccttccttcctctgttctttggccttatgttccccgccaccacagaccttcccccgccccacccctctgcagacttagccgtgcattgcaggcatggaggattaatcagtgacaggaagctgcgtctctcggagcggtgaccagctgtggtcaggagagcctcagcagggccagccccaggagtctttcccgattcttgctcactgctcacccacctgctgctgccatgaggcaccttggggccttcctcttccttctgggggtcctgggggccctcactgagatgtgtgaaataccagagatggacagccatctggtagagaagttgggccagcacctcttaccttggatggaccggctttccctggagcacttgaaccccagcatctatgtgggcctacgcctctccagtctgcaggctgggaccaaggaagacctctacctgcacagcctcaagcttggttaccagcagtgcctcctagggtctgccttcagcgaggatgacggtgactgccagggcaagccttccatgggccagctggccctctacctgctcgctctcagagccaactgtgagtttgtcaggggccacaagggggacaggctggtctcacagctcaaatggttcctggaggatgagaagagagccattgggcatgatcacaagggccacccccacactagctactaccagtatggcctgggcattctggccctgtgtctccaccagaagcgggtccatgacagcgtggtggacaaacttctgtatgctgtggaacctttccaccagggccaccattctgtggacacagcagccatggcaggcttggcattcacctgtctgaagcgctcaaacttcaaccctggtcggagacaacggatcaccatggccatcagaacagtgcgagaggagatcttgaaggcccagacccccgagggccactttgggaatgtctacagcaccccattggcattacagttcctcatgacttcccccatgcgtggggcagaactgggaacagcatgtctcaaggcgagggttgctttgctggccagtctgcaggatggagccttccagaatgctctcatgatttcccagctgctgcccgttctgaaccacaagacctacattgatctgatcttcccagactgtctggcaccacgagtcatgttggaaccagctgctgagaccattcctcagacccaagagatcatcagtgtcacgctgcaggtgcttagtctcttgccgccgtacagacagtccatctctgttctggccgggtccaccgtggaagatgtcctgaagaaggcccatgagttaggaggattcacatatgaaacacaggcctccttgtcaggcccctacttaacctccgtgatggggaaagcggccggagaaagggagttctggcagcttctccgagaccccaacaccccactgttgcaaggtattgctgactacagacccaaggatggagaaaccattgagctgaggctggttagctggtagcccctgagctccctcatcccagcagcctcgcacactccctaggcttctaccctccctcctgatgtccctggaacaggaactcgcctgaccctgctgccacctcctgtgcactttgagcaatgccccctgggatcaccccagccacaagcccttcgagggccctataccatggcccaccttggagcagagagccaagcatcttccctgggaagtctttctggccaagtctggccagcctggccctgcaggtctcccatgaaggccaccccatggtctgatgggcatgaagcatctcagactccttggcaaaaaacggagtccgcaggccgcaggtgttgtgaagaccactcgttctgtggttggggtcctgcaagaaggcctcctcagcccgggggctatggccctgaccccagctctccactctgctgttagagtggcagctccgagctggttgtggcacagtagctggggagacctcagcagggctgctcagtgcctgcctctgacaaaattaaagcattgatggcctgtggacctgctacagtggcctggtgcctcatactcctcaggtgcaggggcagggacaagagaagggggaagtaaccccatcagggaggagtggagggtgcctgagccgccatgtgggcattgggggagtgatgggaatgccagcagtgatgacattgactactgactgagcacccactactatgactgagcactcactcgctagatactatcttgaactgctctgtga

SEQ ID NO: 31887 - DNA, 1870 bp, Homo sapiens
  source 1..1870: mol_type = unassigned DNA
ggattaatcagtgacaggaagctgcgtctctcggagcggtgaccagctgtggtcaggagagcctcagcagggccagccccaggagtctttcccgattcttgctcactgctcacccacctgctgctgccatgaggcaccttggggccttcctcttccttctgggggtcctgggggccctcactgagatgtgtgaaataccagagatggacagccatctggtagagaagttgggccagcacctcttaccttggatggaccggctttccctggagcacttgaaccccagcatctatgtgggcctacgcctctccagtctgcaggctgggaccaaggaagacctctacctgcacagcctcaagcttggttaccagcagtgcctcctagggtctgccttcagcgaggatgacggtgactgccagggcaagccttccatgggccagctggccctctacctgctcgctctcagagccaactggcatgatcacaagggccacccccacactagctactaccagtatggcctgggcattctggccctgtgtctccaccagaagcgggtccatgacagcgtggtggacaaacttctgtatgctgtggaacctttccaccagggccaccattctgtggacacagcagccatggcaggcttggcattcacctgtctgaagcgctcaaacttcaaccctggtcggagacaacggatcaccatggccatcagaacagtgcgagaggagatcttgaaggcccagacccccgagggccactttgggaatgtctacagcaccccattggcattacagttcctcatgacttcccccatgcgtggggcagaactgggaacagcatgtctcaaggcgagggttgctttgctggccagtctgcaggatggagccttccagaatgctctcatgatttcccagctgctgcccgttctgaaccacaagacctacattgatctgatcttcccagactgtctggcaccacgagtcatgttggaaccagctgctgagaccattcctcagacccaagagatcatcagtgtcacgctgcaggtgcttagtctcttgccgccgtacagacagtccatctctgttctggccgggtccaccgtggaagatgtcctgaagaaggcccatgagttaggaggattcacatatgaaacacaggcctccttgtcaggcccctacttaacctccgtgatggggaaagcggccggagaaagggagttctggcagcttctccgagaccccaacaccccactgttgcaaggtattgctgactacagacccaaggatggagaaaccattgagctgaggctggttagctggtagcccctgagctccctcatcccagcagcctcgcacactccctaggcttctaccctccctcctgatgtccctggaacaggaactcgcctgaccctgctgccacctcctgtgcactttgagcaatgccccctgggatcaccccagccacaagcccttcgagggccctataccatggcccaccttggagcagagagccaagcatcttccctgggaagtctttctggccaagtctggccagcctggccctgcaggtctcccatgaaggccaccccatggtctgatgggcatgaagcatctcagactccttggcaaaaaacggagtccgcaggccgcaggtgttgtgaagaccactcgttctgtggttggggtcctgcaagaaggcctcctcagcccgggggctatggccctgaccccagctctccactctgctgttagagtggcagctccgagctggttgtggcacagtagctggggagacctcagcagggctgctcagtgcctgcctctgacaaaattaaagcattgatggcctgtggacctgc

SEQ ID NO: 31888 - DNA, 2718 bp, Homo sapiens
  source 1..2718: mol_type = unassigned DNA
agccggaagccacgcctgcccactagcccgacgcccgcctggcgggaacatgggctcgcccctcaccagcgatctgcagtcagttggtagcgcctgcacgtcgcgcgcggtgttcgattgtcgctgcctggggaggaggagccggagccgccgccgccgccgccgccgccgcgggcttcgttcgtaaggaagggggcctaggcccgggcctgcggtggtgggggttgctgcgcgccgggggtcgctcctgctgtgtcttccgctccagcttcgcccacttccccttgccagcggggtgggcgcggagaagacctgccggagccatggaggacgaagtggtccgctttgccaagaagatggacaagatggtgcagaagaagaacgcgtccacaagaatcggaatgtcagttaatgctattcgcaagcagagtacagatgaggaagttacatctttggcaaagtctctcatcaaatcctggaaaaaattattagatgggccatcaactgagaaagaccttgacgaaaagaagaaagaacctgcaattacatcgcagaacagccctgaggcaagagaagaaagtacttccagcggcaatgtaagcaacagaaaggatgagacaaatgctcgagatacttatgtttcatcctttcctcgggcaccaagcacttctgattctgtgcggttgaagtgtagggagatgcttgctgcagctcttcgaacaggggatgactacattgcaattggagctgatgaggaagaattaggatctcaaattgaagaagctatatatcaagaaataaggaatacagacatgaaatacaaaaatagagtacgaagtaggatatcaaatcttaaagatgcaaaaaatccaaatttaaggaaaaatgtcctctgtgggaatattcctcctgacttatttgctagaatgacagcagaggaaatggctagtgatgagctgaaagagatgcggaaaaacttgaccaaagaagccatcagagagcatcagatggccaagactggtgggacccagactgacttgttcacatgtggcaaatgtaaaaagaagaattgcacttacacacaggtacaaacccgtagtgctgatgaaccaatgacaacatttgttgtctgtaatgaatgtggaaatcgatggaagttctgttgagttggaagaattggcaaaatatctggaccattaagaaaacggattttgtaactagctttaaactaggccaagcaactagttttcctgcaaatcaaatttttaaagcaacttgggttagactttgtttttgacctaacatcccttccttaaatgccttctgtagtttcagatcagtagggagaccatataataattttatggtacctgtttcaaaacatattttttctgtttttataagtaagttgatattaattaaactcttggcaatatttcttctttcttaaaggaaaatataccttaactttttttcttttacactgtgaaacatacacagtagaaattctgttactctctgttattaatacataaatgaaaatacatttttttccatattggcatgtagctacaaatattaaaggaggagaaaaggtaatataattttaggtttaccaaatatggtgtgtattcaaataatacttgaccagcttatctaaaatgtacataattttgaggtagcttatgaatttgattttaattattatgttcacaagcttggaatattagatattattttgcatctgtaactaaccgtgatcatcatttcttgtaatttcttgtacatgtatattacttgttcttaatagatttttggaaacaagactttattgagatcagtttggttttcctgttaatttacctgtttgactttataatgtgttttagttttgcagaagaacactgttgtagtttagaaggcttttcataaatcccctcataggcaaagatgaaaacttcccactatttttttcccctcttaggaagacatactggaaagaaaatgtttagcatcttagtgtagtatagctattgtaaacagttcatgactagattttgattcggaaatctatactgaccaaggattaatcttaaggattgtataattcattaaagctgtggtctttccatgtggagactgatagaaaataattttgtcccaagtcttatttgctgactttttctgtcatgagtgagattgttgaacaaactgaatatatgggctatagcaagtagctttacagtacagatcttacaattaagttttgcttttgttaaagtgtgtaccattttttctgtttggagtaagacaaaaattgttttgacataggttccctagggtacacttgctctagcatactttaaaggccactgttgcaaagtctacattttatgctgaatctgcattctgtcaggcacccgtagaaagacctcagtacatgctttgcactctcctttgctccctttttccaatttcttattgcatatcattttgttgtaatacagaaagcagcatttttaaatgtccgtgttaagaattggcccactggtaccaactcacctctattttgtcagttcatagttgaagattttgttttatttcaaaaacaaagtacatttttgaaataatgtttcagaataaaataatctcacttttaagtgatccattttaaaatttgtaattcaataaagttttttttgttgttaaacatatatc

SEQ ID NO: 31889 - DNA, 2858 bp, Homo sapiens
  source 1..2858: mol_type = unassigned DNA
agggggccgaaaacccgccccgtgagggggcgggaccggaggtgaacgcgcagcaaaaccgggcgccttccacgaccctctagccggaagccacgcctgcccactagcccgacgcccgcctggcgggaacatgggctcgcccctcaccagcgatctgcagtcagttggtagcgcctgcacgtcgcgcgcggtgttcgattgtcgctgcctggggaggaggagccggagccgccgccgccgccgccgccgccgcgggcttcgttcgtaaggaagggggcctaggcccgggcctgcggtggtgggggttgctgcgcgccgggggtcgctcctgctgtgtcttccgctccagcttcgcccacttccccttgccagcggggtgggcgcggagaagacctgccggagccatggaggacgaagtggtccgctttgccaagaagatggacaagatggtgcagaagaagaacgcggctggagcattggatttgctaaaggagcttaagaatattcctatgaccctggaattactgcagtccacaagaatcggaatgtcagttaatgctattcgcaagcagagtacagatgaggaagttacatctttggcaaagtctctcatcaaatcctggaaaaaattattagatgggccatcaactgagaaagaccttgacgaaaagaagaaagaacctgcaattacatcgcagaacagccctgaggcaagagaagaaagtacttccagcggcaatgtaagcaacagaaaggatgagacaaatgctcgagatacttatgtttcatcctttcctcgggcaccaagcacttctgattctgtgcggttgaagtgtagggagatgcttgctgcagctcttcgaacaggggatgactacattgcaattggagctgatgaggaagaattaggatctcaaattgaagaagctatatatcaagaaataaggaatacagacatgaaatacaaaaatagagtacgaagtaggatatcaaatcttaaagatgcaaaaaatccaaatttaaggaaaaatgtcctctgtgggaatattcctcctgacttatttgctagaatgacagcagaggaaatggctagtgatgagctgaaagagatgcggaaaaacttgaccaaagaagccatcagagagcatcagatggccaagactggtgggacccagactgacttgttcacatgtggcaaatgtaaaaagaagaattgcacttacacacaggtacaaacccgtagtgctgatgaaccaatgacaacatttgttgtctgtaatgaatgtggaaatcgatggaagttctgttgagttggaagaattggcaaaatatctggaccattaagaaaacggattttgtaactagctttaaactaggccaagcaactagttttcctgcaaatcaaatttttaaagcaacttgggttagactttgtttttgacctaacatcccttccttaaatgccttctgtagtttcagatcagtagggagaccatataataattttatggtacctgtttcaaaacatattttttctgtttttataagtaagttgatattaattaaactcttggcaatatttcttctttcttaaaggaaaatataccttaactttttttcttttacactgtgaaacatacacagtagaaattctgttactctctgttattaatacataaatgaaaatacatttttttccatattggcatgtagctacaaatattaaaggaggagaaaaggtaatataattttaggtttaccaaatatggtgtgtattcaaataatacttgaccagcttatctaaaatgtacataattttgaggtagcttatgaatttgattttaattattatgttcacaagcttggaatattagatattattttgcatctgtaactaaccgtgatcatcatttcttgtaatttcttgtacatgtatattacttgttcttaatagatttttggaaacaagactttattgagatcagtttggttttcctgttaatttacctgtttgactttataatgtgttttagttttgcagaagaacactgttgtagtttagaaggcttttcataaatcccctcataggcaaagatgaaaacttcccactatttttttcccctcttaggaagacatactggaaagaaaatgtttagcatcttagtgtagtatagctattgtaaacagttcatgactagattttgattcggaaatctatactgaccaaggattaatcttaaggattgtataattcattaaagctgtggtctttccatgtggagactgatagaaaataattttgtcccaagtcttatttgctgactttttctgtcatgagtgagattgttgaacaaactgaatatatgggctatagcaagtagctttacagtacagatcttacaattaagttttgcttttgttaaagtgtgtaccattttttctgtttggagtaagacaaaaattgttttgacataggttccctagggtacacttgctctagcatactttaaaggccactgttgcaaagtctacattttatgctgaatctgcattctgtcaggcacccgtagaaagacctcagtacatgctttgcactctcctttgctccctttttccaatttcttattgcatatcattttgttgtaatacagaaagcagcatttttaaatgtccgtgttaagaattggcccactggtaccaactcacctctattttgtcagttcatagttgaagattttgttttatttcaaaaacaaagtacatttttgaaataatgtttcagaataaaataatctcacttttaagtgatccattttaaaatttgtaattcaataaagttttttttgttgttaaacata

SEQ ID NO: 31890 - DNA, 1432 bp, Homo sapiens
  source 1..1432: mol_type = unassigned DNA
gttcgtaaggaagggggcctaggcccgggcctgcggtggtgggggttgctgcgcgccgggggtcgctcctgctgtgtcttccgctccagcttcgcccacttccccttgccagcggggtgggcgcggagaagacctgccggagccatggaggacgaagtggtccgctttgccaagaagatggacaagatggtgcagaagaagaacgcggctggagcattggatttgctaaaggagcttaagaatattcctatgaccctggaattactgcaggaaatggctagtgatgagctgaaagagatgcggaaaaacttgaccaaagaagccatcagagagcatcagatggccaagactggtgggacccagactgacttgttcacatgtggcaaatgtaaaaagaagaattgcacttacacacaggtacaaacccgtagtgctgatgaaccaatgacaacatttgttgtctgtaatgaatgtggaaatcgatggaagttctgttgagttggaagaattggcaaaatatctggaccattaagaaaacggattttgtaactagctttaaactaggccaagcaactagttttcctgcaaatcaaatttttaaagcaacttgggttagactttgtttttgacctaacatcccttccttaaatgccttctgtagtttcagatcagtagggagaccatataataattttatggtacctgtttcaaaacatattttttctgtttttataagtaagttgatattaattaaactcttggcaatatttcttctttcttaaaggaaaatataccttaactttttttcttttacactgtgaaacatacacagtagaaattctgttactctctgttattaatacataaatgaaaatacatttttttccatattggcatgtagctacaaatattaaaggaggagaaaaggtaatataattttaggtttaccaaatatggtgtgtattcaaataatacttgaccagcttatctaaaatgtacataattttgaggtagcttatgaatttgattttaattattatgttcacaagcttggaatattagatattattttgcatctgtaactaaccgtgatcatcatttcttgtaatttcttgtacatgtatattacttgttcttaatagatttttggaaacaagactttattgagatcagtttggttttcctgttaatttacctgtttgactttataatgtgttttagttttgcagaagaacactgttgtagtttagaaggcttttcataaatcccctcataggcaaagatgaaaacttcccactatttttttcccctcttaggaagacatactggaaagaaaatgtttagcatcttagtgtagtatagctattgtaaacagttcatgactagattttgattcggaaatctatactgaccaaggattaatcttaaggat

SEQ ID NO: 31891 - DNA, 1164 bp, Homo sapiens
  source 1..1164: mol_type = unassigned DNA
ctttggtcgagagggaaagcagaagaagtctgctggtcacagcggggcacctcgaggagaggacgactaggagcacacggcccggaaaggtccagaataactgtgcttgaagaagaaaattcccaacatggacaaaccacgcaaagaaaatgaagaagagccgcagagcgcgcccaagaccgatgaggagaggcctccggtggagcactctcccgaaaagcagtcccccgaggagcagtcttcggaggagcagtcctcggaggaggagttctttcctgaggagctcttgcctgagctcctgcctgagatgctcctctcggaggagcgccctccgcaggagggtctttccaggaaggacctgtttgaggggcgccctcccatggagcagcctccttgtggagtaggaaaacataagcttgaagaaggaagctttaaagaaaggttggctcgttctcgcccgcaatttagaggggacatacatggcagaaatttaagcaatgaggagatgatacaggcagcagatgagctagaagagatgaaaagagtaagaaacaaactgatgataatgcactggaaggcaaaacggagccgtccttatcctatttaatgtgttcggcctttaattctgttttgcctgctaatagtattgccattgccacctggactttctgtttgcattttcttaatgccttttcccatattctgaattttaactttttgtgaggctttattttagatgtttagcatgtaactcgcttaaagttgaggtttccccctaaaatctacaagtttccctctttcagtcatgagccctacacatttgcatgaaagatgtacattatatattgtgaaacgaaaaaagcaattttcaaatggtatatattgtatcccatttttgtaaaaaaaatgtatatttatatattaatatgcaaagaaaaagctaaaagtatagacttcaaaggcataacagtggttgtgtggtaagataataggtgattttttaaatttttgttttatctgaatttctcattttttcaggacaaacgttttacttgtgttgcaaaaatatataatgaaaaaatcacacaattttgaagaaaactgtcaatcagcttataacgacaatgtggcacttaataaatacttgtcagaactttaaaaaaa

SEQ ID NO: 31892 - DNA, 1201 bp, Homo sapiens
  source 1..1201: mol_type = unassigned DNA
gcctgtccaccatctccctattaccctttggtcgagagggaaagcagaagaagtctgctggtcacagcggggcacctcgaggagaggacgactaggagcacacggcccggaaaggtccaggtcagggaagggaataactgtgcttgaagaagaaaattcccaacatggacaaaccacgcaaagaaaatgaagaagagccgcagagcgcgcccaagaccgatgaggagaggcctccggtggagcactctcccgaaaagcagtcccccgaggagcagtcttcggaggagcagtcctcggaggaggagttctttcctgaggagctcttgcctgagctcctgcctgagatgctcctctcggaggagcgccctccgcaggagggtctttccaggaaggacctgtttgaggggcgccctcccatggagcagcctccttgtggagtaggaaaacataagcttgaagaaggaagctttaaagaaaggttggctcgttctcgcccgcaatttagaggggacatacatggcagaaatttaagcaatgaggagatgatacaggcagcagatgagctagaagagatgaaaagagtaagaaacaaactgatgataatgcactggaaggcaaaacggagccgtccttatcctatttaatgtgttcggcctttaattctgttttgcctgctaatagtattgccattgccacctggactttctgtttgcattttcttaatgccttttcccatattctgaattttaactttttgtgaggctttattttagatgtttagcatgtaactcgcttaaagttgaggtttccccctaaaatctacaagtttccctctttcagtcatgagccctacacatttgcatgaaagatgtacattatatattgtgaaacgaaaaaagcaattttcaaatggtatatattgtatcccatttttgtaaaaaaaatgtatatttatatattaatatgcaaagaaaaagctaaaagtatagacttcaaaggcataacagtggttgtgtggtaagataataggtgattttttaaatttttgttttatctgaatttctcattttttcaggacaaacgttttacttgtgttgcaaaaatatataatgaaaaaatcacacaattttgaagaaaactgtcaatcagcttataacgacaatgtggcacttaataaatacttgtcagaactttaaaaaaa

SEQ ID NO: 31893 - DNA, 721 bp, Homo sapiens
  source 1..721: mol_type = unassigned DNA
aggggaagtagcacagaggaagaggcaatactacccgagactagatgcggaccgtctctggcaaccaggaaaaggcaaatacaaagagaggtctgctggtcacagcggggcacctcgaggagaggacgactaggagcacacggcccggaaaggtccagaataactgtgcttgaagaagaaaattcccaacatggacaaaccacgcaaagaaaatgaagaagagccgcagagcgcgcccaagaccgatgaggagaggcctccggtggagcactctcccgaaaagcagtcccccgaggagcagtcttcggaggagcagtcctcggaggaggagttctttcctgaggagctcttgcctgagctcctgcctgagatgctcctctcggaggagcgccctccgcaggagggtctttccaggaaggacctgtttgaggggcgccctcccatggagcagcctccttgtggagtaggaaaacataagcttgaagaaggaagctttaaagaaaggttggctcgttctcgcccgcaatttagaggggacatacatggcagaaatttaagcaatgaggagatgatacaggcagcagatgagctagaagagatgaaaagagtaagaaacaaactgatgataatgcactggaaggcaaaacggagccgtccttatcctatttaatgtgttcggcctttaattctgttttgcctgctaatagtattgccattgcca

SEQ ID NO: 31894 - DNA, 1195 bp, Homo sapiens
  source 1..1195: mol_type = unassigned DNA
tcttttttttgcctgtccaccatctccctattaccctttggtcgagagggaaagcagaagaagtctgctggtcacagcggggcacctcgaggagaggacgactaggagcacacggcccggaaaggtccaggtcagggaagggaataactgtgcttgaagaagaaaattcccaacatggacaaaccacgcaaagaaaatgaagaagagccgcagcgcccaagaccgatgaggagaggcctccggtggagcactctcccgaaaagcagtcccccgaggagcagtcttcggaggagcagtcctcggaggaggagttctttcctgaggagctcttgcctgagctcctgcctgagatgctcctctcggaggagcccgcaggagggtctttccaggaaggacctgtttgaggggcgccctcccatggagcagcctccttgtggagtaggaaaacataagcttgaagaaggaagctttaaagaaaggttggctcgttctcgcccgcaatttagaggggacatacatggcagaaatttaagcaatgaggagatgatacaggcagcagatgagctagaagagatgaaaagagtaagaaacaaactgatgataatgcactggaaggcaaaacggagccgtccttatcctatttaatgtgttcggcctttaattctgttttgcctgctaatagtattgccattgccacctggactttctgtttgcattttcttaatgccttttcccatattctgaattttaactttttgtgaggctttattttagatgtttagcatgtaactcgcttaaagttgaggtttccccctaaaatctacaagtttccctctttcagtcatgagccctacacatttgcatgaaagatgtacattatatattgtgaaacgaaaaaagcaattttcaaatggtatatattgtatcccatttttgtaaaaaaaatgtatatttatatattaatatgcaaagaaaaagctaaaagtatagacttcaaaggcataacagtggttgtgtggtaagataataggtgattttttaaatttttgttttatctgaatttctcattttttcaggacaaacgttttacttgtgttgcaaaaatatataatgaaaaaatcacacaattttgaagaaaactgtcaatcagcttataacgacaatgtggcacttaataaatacttgtcagaacttt

SEQ ID NO: 31895 - DNA, 1177 bp, Homo sapiens
  source 1..1177: mol_type = unassigned DNA
gtgaaccgaagtccttatattcccgggcttctttctcctctgggtaccagctccttactgccctgcagacaagcgtgccgtgcgtgcttgtggccaagggaaggaagagctggttgatccacagatagctccttcctccccgccccttcctttttgtttggaggtcccaggatctgtgttcacagacatctgggggaagaaaaggagcaggaaactaccccgcacagagttaagcaggaaacaacaacaacatcatgcaaaaaccctgcaaagaaaacgaaggaaagccaaagtgcagcgtgccaaagagggaggaaaaacgcccgtatggagaatttgaacgccagcaaacagaagggaattttagacagaggctgcttcagtctctcgaagaatttaaagaggacatagactataggcattttaaagatgaagaaatgacaagggagggagatgagatggaaaggtgtttggaagagataaggggtctgagaaagaaatttagggctctgcattctaaccataggcattctcgggaccgtccttatcccatttaattaatttctctgacaattcaattattttctgttattaatgttgccactgctttctgtttgtctgcactttcttgataaatatttgctatcgttttactccagtcattcgatgttgctgagatttacatatgactcttgtcaacatctcatcttttgacccaatcttattcatttaataagaggtctcattcatttgcatggaaaaatgctcattgtatattgcaaagtgaaaataacgagttgcaaaacagtgtatacatatatgtgtgtatatatgtacactttatttgtacatttctatgtgacataatgcaaaggaaagtgtctgattttattatacaccaaaggttaacagtgaatctctgtgtgatctctttttttttctttttgcctatctgcatcttctcacttgccaaaaaatgaatatatgtttatgtgtgtatattacttgtgtcacaaaaaaccctaaagtagacagtaaaagaacttgtcaatcgcctttggaaggcaatgaaacacttaataaactctcaataacagaagcgtaaaaatgaaatgtaaacctccaattacctctggatctcttagccagagtaataaactggtaattattacagata

SEQ ID NO: 31896 - DNA, 852 bp, Homo sapiens
  source 1..852: mol_type = unassigned DNA
tctcctctgggtaccagctccttactgccctgcagacaagcgtgccgtgcgtgcttgtggccaagggaaggaagaggtcccaggatctgtgttcacagacatctgggggaagaaaaggagcaggaaactaccccgcacagagttaagcaggaaacaacaacaacatcatgcaaaaaccctgcaaagaaaacgaaggaaagccaaagtgcagcgtgccaaagagggaggaaaaacgcccgtatggagaatttgaacgccagcaaacagaagggaattttagacagaggctgcttcagtctctcgaagaatttaaagaggacatagactataggcattttaaagatgaagaaatgacaagggagggagatgagatggaaaggtgtttggaagagataaggggtctgagaaagaaatttagggctctgcattctaaccataggcattctcgggaccgtccttatcccatttaattaatttctctgacaattcaattattttctgttattaatgttgccactgctttctgtttgtctgcactttcttgataaatatttgctatcgttttactccagtcattcgatgttgctgagatttacatatgactcttgtcaacatctcatcttttgacccaatcttattcatttaataagaggtctcattcatttgcatggaaaaatgctcattgtatattgcaaagtgaaaataacgagttgcaaaacagtgtatacatatatgtgtgtatatatgtacactttatttgtacatttctatgtgacataatgcaaaggaaagtgtctgattttattatacaccaaaggttaacagtgaatctctgtgtgatctctttttttt

SEQ ID NO: 31897 - DNA, 1451 bp, Homo sapiens
  source 1..1451: mol_type = unassigned DNA
accggagcaggcagctgggggtgggggggcggccctgggataggggctgtggcagtacgcggggacccggctgcggtggctgcgggactgacgaatggagaggagaaaacctatggtggctgtgaaggacctgatgccatgtatgtcaaattgatatcatctgatggccatgaatttattgtaaaaagagaacatgcattaacatcaggcacgataaaagccatgttgagtggcccaggtcagtttgctgagaacgaaaccaatgaggtcaattttagagagataccttcacatgtgctatcgaaagtatgcatgtattttacgtacaaggttcgctacactaacagctccaccgagattcctgaattcccaattgcacctgaaattgcactggaactgctgatggctgcgaacttcttagattgttaaataaaataaattataataaactgttaactcttttcagtatttaatacctgtagttcagttagtaactttttcatatatagcatgttgcctgtatgcagttgaactatataaagttcattgcaaagcagattatcttgtttttttgcatagcaatcaaagttgaaatttgtttgctacatcaacaaattaaggacattttcacaaactgagaaataaacaaatatgccaattcgtaggtggttttgccttatcctttgaatgtgacttaaaatcagcaatgatgatatagtaaatactgaaatttaggtgtaaatcaatacgttctacagggaaataatgaggctaagtatttttatgtttttagtggttttttagaaacctaatcttatagccgccattagcattactagagttatgcaaataattgcattataaacatgtttataacttagccaaaacattgatttttataactctccaagtatgagttgaaatttcttatgtcttttgataaactgcagtattctttaagtgtactttgtccttttgtttattgctacaatttaagaactttatttaaaaacaattttggaaggttactaggtacagcttttgcagaagaaactgaactgtagccagatggtcagcaagtaaactacatgacttagagttcttgtgcattatacattttgggtaattcaaagtactgtatttgcattgactataaagcgtcgtttgcaatatttattcttccttcatagtcccttgttgtgattatacttccagttgtttaaatgtattttaaaagactcactattaactttattcagatcttaaaagctacacctttttgaactattccagtctttctccatccaattagaatgttatggaataacatgtgaagagatacagtgaaaatcatattataatgcattgaagatatcctacatgaattatcttctattaaaatatgtcccaataaatatacccataatcagtgggtcttctactgaaatcaa

SEQ ID NO: 31898 - DNA, 683 bp, Homo sapiens
  source 1..683: mol_type = unassigned DNA
acccggctgcggtggctgcgggactgacgagtgagtctcgggctggggcggaaacggagctccgggaaactactaaagttcctggggaagcaaagtagaatttcataagaacaaaatggatggagaggagaaaacctatggtggctgtgaaggacctgatgccatgtatgtcaaattgatatcatctgatggccatgaatttattgtaaaaagagaacatgcattaacatcaggcacgataaaagccatgttgagtggcccaggtcagtttgctgagaacgaaaccaatgaggtcaattttagagagataccttcacatgtgctatcgaaagtatgcatgtattttacgtacaaggttcgctacactaacagctccaccgagattcctgaattcccaattgcacctgaaattgcactggaactgctgatggctgcgaacttcttagattgttaaataaaataaattataataaactgttaactcttttcagtatttaatacctgtagttcagttagtaactttttcatatatagcatgttgcctgtatgcagttgaactatataaagttcattgcaaagcagattatcttgtttttttgcatagcaatcaaagttgaaatttgtttgctacatcaacaaattaaggacattttcacaaactgagaaataaacaaatatgccaa

SEQ ID NO: 31899 - DNA, 1943 bp, Homo sapiens
  source 1..1943: mol_type = unassigned DNA
cagacggaagtgagcgacacactctgcgtcctcgcctcaccaggaaactactaaagttcctggggaagcaaagtagaatttcataagaacaaaatggatggagaggagaaaacctatggtggctgtgaaggacctgatgccatgtatgtcaaattgatatcatctgatggccatgaatttattgtaaaaagagaacatgcattaacatcaggcacgataaaagccatgttgagtggcccaggtcagtttgctgagaacgaaaccaatgaggtcaattttagagagataccttcacatgtgctatcgaaagtatgcatgtattttacgtacaaggttcgctacactaacagctccaccgagattcctgaattcccaattgcacctgaaattgcactggaactgctgatggctgcgaacttcttagattgttaaataaaataaattataataaactgttaactcttttcagtatttaatacctgtagttcagttagtaactttttcatatatagcatgttgcctgtatgcagttgaactatataaagttcattgcaaagcagattatcttgtttttttgcatagcaatcaaagttgaaatttgtttgctacatcaacaaattaaggacattttcacaaactgagaaataaacaaatatgccaattcgtaggtggttttgccttatcctttgaatgtgacttaaaatcagcaatgatgatatagtaaatactgaaatttaggtgtaaatcaatacgttctacagggaaataatgaggctaagtatttttatgtttttagtggttttttagaaacctaatcttatagccgccattagcattactagagttatgcaaataattgcattataaacatgtttataacttagccaaaacattgatttttataactctccaagtatgagttgaaatttcttatgtcttttgataaactgcagtattctttaagtgtactttgtccttttgtttattgctacaatttaagaactttatttaaaaacaattttggaaggttactaggtacagcttttgcagaagaaactgaactgtagccagatggtcagcaagtaaactacatgacttagagttcttgtgcattatacattttgggtaattcaaagtactgtatttgcattgactataaagcgtcgtttgcaatatttattcttccttcatagtcccttgttgtgattatacttccagttgtttaaatgtattttaaaagactcactattaactttattcagatcttaaaagctacacctttttgaactattccagtctttctccatccaattagaatgttatggaataacatgtgaagagatacagtgaaaatcatattataatgcattgaagatatcctacatgaattatcttctattaaaatatgtcccaataaatatacccataatcagtgggtcttctactgaaatcaagctcattcagcttttctattaagcagccaaaaaattttttgaaaaaatatgacagcatcattccttatgcatggggaaagaagcactggagatgggtttagtattgtctttatctcagaggtggaacaaagttgtcattatagggtctataaacttaagtctccagcttatttgagactggcttaatatggctgagcccggtggctcatgcctgtaatcccagcactttcagaggacgaggcgggtagatcacttgaggccaggagtttgagaccagcctggccaccatggcaaaaccccatctctaccaaaaatgcaaaaattagctaggccatggtggcacacgcctgtaatcccagctacttgtgaggctgaggcatgagaatcgcttgaacctgggaggtggaggtggcagtgagccgagatcgcaccactgcactccagcctgggtgacagagcgagactgtctcaaaaaaaaaaaaaaaaaaa

SEQ ID NO: 31900 - DNA, 814 bp, Homo sapiens
  source 1..814: mol_type = unassigned DNA
tagcagtttacatgtggatttattcattctggagatacaatggcaaggaaacagctgtggaaactactaaagttcctggggaagcaaagtagaatttcataagaacaaaatggatggagaggagaaaacctatggtggctgtgaaggacctgatgccatgtatgtcaaattgatatcatctgatggccatgaatttattgtaaaaagagaacatgcattaacatcaggcacgataaaagccatgttgagtggcccaggtcagtttgctgagaacgaaaccaatgaggtcaattttagagagataccttcacatgtgctatcgaaagtatgcatgtattttacgtacaaggttcgctacactaacagctccaccgagattcctgaattcccaattgcacctgaaattgcactggaactgctgatggctgcgaacttcttagattgttaaataaaataaattataataaactgttaactcttttcagtatttaatacctgtagttcagttagtaactttttcatatatagcatgttgcctgtatgcagttgaactatataaagttcattgcaaagcagattatcttgtttttttgcatagcaatcaaagttgaaatttgtttgctacatcaacaaattaaggacattttcacaaactgagaaataaacaaatatgccaattcgtaggtggttttgccttatcctttgaatgtgacttaaaatcagcaatgatgatatagtaaatactgaaatttaggtgtaaatcaatacgttctacagggaaataatgaggctaagtatttttatgtttttagtg

SEQ ID NO: 31901 - DNA, 1573 bp, Homo sapiens
  source 1..1573: mol_type = unassigned DNA
caggtacggatctcccgcgcgtcgccgaaagcggctctgacccagcggaagtaattctttcgactgccccggaacccaccggagcaggcagctgggggtgggggggcggccctgggataggggctgtggcagtacgcggggacccggctgcggtggctgcgggactgacgagaaactactaaagttcctggggaagcaaagtagaatttcataagaacaaaatggatggagaggagaaaacctatggtggctgtgaaggacctgatgccatgtatgtcaaattgatatcatctgatggccatgaatttattgtaaaaagagaacatgcattaacatcaggcacgataaaagccatgttgagtggcccaggtcagtttgctgagaacgaaaccaatgaggtcaattttagagagataccttcacatgtgctatcgaaagtatgcatgtattttacgtacaaggttcgctacactaacagctccaccgagattcctgaattcccaattgcacctgaaattgcactggaactgctgatggctgcgaacttcttagattgttaaataaaataaattataataaactgttaactcttttcagtatttaatacctgtagttcagttagtaactttttcatatatagcatgttgcctgtatgcagttgaactatataaagttcattgcaaagcagattatcttgtttttttgcatagcaatcaaagttgaaatttgtttgctacatcaacaaattaaggacattttcacaaactgagaaataaacaaatatgccaattcgtaggtggttttgccttatcctttgaatgtgacttaaaatcagcaatgatgatatagtaaatactgaaatttaggtgtaaatcaatacgttctacagggaaataatgaggctaagtatttttatgtttttagtggttttttagaaacctaatcttatagccgccattagcattactagagttatgcaaataattgcattataaacatgtttataacttagccaaaacattgatttttataactctccaagtatgagttgaaatttcttatgtcttttgataaactgcagtattctttaagtgtactttgtccttttgtttattgctacaatttaagaactttatttaaaaacaattttggaaggttactaggtacagcttttgcagaagaaactgaactgtagccagatggtcagcaagtaaactacatgacttagagttcttgtgcattatacattttgggtaattcaaagtactgtatttgcattgactataaagcgtcgtttgcaatatttattcttccttcatagtcccttgttgtgattatacttccagttgtttaaatgtattttaaaagactcactattaactttattcagatcttaaaagctacacctttttgaactattccagtctttctccatccaattagaatgttatggaataacatgtgaagagatacagtgaaaatcatattataatgcattgaagatatcctacatgaattatcttctattaaaatatgtcccaataaatatacccataatcagtgggtcttctac

SEQ ID NO: 31902 - DNA, 816 bp, Homo sapiens
  source 1..816: mol_type = unassigned DNA
cgcgcgtcgccgaaagcggctctgacccagcggaagtaattctttcgactgccccggaacccaccggagcaggcagctgggggtgggggggcggccctgggataggggctgtggcagtacgcggggacccggctgcggtggctgcgggactgacgagatcatcagggaaggaagacctctctgaggagttgatgttttacctggagacctaaatgatgaggatttaaaagcttttcggacaacagcaattacaaatgcaaagaccttgaggaaactactaaagttcctggggaagcaaagtagaatttcataagaacaaaatggatggagaggagaaaacctatggtggctgtgaaggacctgatgccatgtatgtcaaattgatatcatctgatggccatgaatttattgtaaaaagagaacatgcattaacatcaggcacgataaaagccatgttgagtggcccaggtcagtttgctgagaacgaaaccaatgaggtcaattttagagagataccttcacatgtgctatcgaaagtatgcatgtattttacgtacaaggttcgctacactaacagctccaccgagattcctgaattcccaattgcacctgaaattgcactggaactgctgatggctgcgaacttcttagattgttaaataaaataaattataataaactgttaactcttttcagtatttaatacctgtagttcagttagtaactttttcatatatagcatgttgcctgtatgcagttgaactatataaagttcattgcaaagcagattatcttgtttttttgcatagcaatcaa

SEQ ID NO: 31903 - DNA, 719 bp, Homo sapiens
  source 1..719: mol_type = unassigned DNA
gggagaagagggcggcgggacctttcctggcgccgctcgcagtttacatgtggatttattcattctggagatacaatggcaaggaaacagctgtgagtcttgctgtgtggcccaggctggagtgcccggctggtctcaaattcctgacctcaagtgatctccctcccaaagtgttgcgattgcaggtgtgagccactgcacctggctgctgagaaatctttgcctacagtgagggaaactactaaagttcctggggaagcaaagtagaatttcataagaacaaaatggatggagaggagaaaacctatggtggctgtgaaggacctgatgccatgtatgtcaaattgatatcatctgatggccatgaatttattgtaaaaagagaacatgcattaacatcaggcacgataaaagccatgttgagtggcccaggtcagtttgctgagaacgaaaccaatgaggtcaattttagagagataccttcacatgtgctatcgaaagtatgcatgtattttacgtacaaggttcgctacactaacagctccaccgagattcctgaattcccaattgcacctgaaattgcactggaactgctgatggctgcgaacttcttagattgttaaataaaataaattataataaactgttaactcttttcagtatttaatacctgtagttcagttagtaactttttcatatatagcatgttgcctgtatgc

SEQ ID NO: 31904 - DNA, 5154 bp, Homo sapiens
  source 1..5154: mol_type = unassigned DNA
attccgtcttgaagtagaccctggagaggtcttccaggcttgggctcagcacgcgagcacagggagcgggggtgccggcggcggaggcgcgtacggcccgagcagcccccagcccccagcgcgcacacttgggccaggggcgcgaggagtgcgcggccgccgggtgggcgctggggagcgggccctgggggcggagcctgcagcccaccgccccccacacaccccagccgaggcccggaaggggccaggcgcgcttccgtctccgccggggatgcacggagggcggagctgcggcccgaggacgcgacgcgagcccagttccggcgaggaggccgcgccagtgacagcgatggcggcggagtcggcgctccaagttgtggagaagctgcaggcgcgcctggccgcgaacccggaccctaagaagctattgaaatatttgaagaaactctccaccctgcctattacagtagacattcttgcggagactggggttgggaaaacagtaaatagcttgcgaaaacacgagcatgttggaagctttgccagggacctagtggcccagtggaagaagctggttcctgtggaacgaaatgctgagcctgatgaacaggactttgagaagagcaattcccgaaagcgccctcgggatgccctgcagaaggaggaggagatggagggggactaccaagaaacctggaaagccacggggagccgatcctatagccctgaccacaggcagaagaaacataggaaactctcggagctcgagagacctcacaaagtgtctcacggtcatgagaggagagatgagagaaagaggtgtcacagaatgtcaccaacttactcttcagaccctgagtcttctgattatggccatgttcaatcccctccatcttgtaccagtcctcatcagatgtacgtcgaccactacagatccctggaggaggaccaggagcccattgtttcacaccagaagcctgggaaaggccacagcaatgcctttcaggacagactcggggccagccaagaacgacacctgggtgaaccccatgggaaaggggttgtgagtcaaaacaaggagcacaaatcttcccacaaggacaaacgccccgtggatgccaagagtgatgagaaggcctctgtggtgagcagagagaaatcacacaaggccctctccaaagaggagaaccgaaggccaccctcaggggacaatgcaagggagaaaccgccctctagtggcgtaaagaaagagaaggacagagagggcagcagcctgaagaagaagtgtttgcctccctcagaggccgcttcagacaaccacctgaaaaagccaaagcacagagacccagagaaagccaaattggacaaaagcaagcaaggtctggacagctttgacacaggaaaaggagcaggagacctgttgcccaaggtaaaagagaagggttctaacaacctaaagactccagaagggaaagtcaaaactaatttggatagaaagtcactgggctccctccctaaagttgaggagacagatatggaggatgaattcgagcagccaaccatgtcttttgaatcctacctcagctatgaccagccccggaagaaaaagaaaaagattgtgaaaacttcagccacggcacttggagataaaggacttaaaaaaaatgactctaaaagcactggtaaaaacttggactcagttcagaaattacccaaggtgaacaaaaccaagtcagagaagccggctggagctgatttagccaagctgagaaaggtgcctgatgtgttgccagtgttgccagacctcccgttacccgcgatacaggccaattaccgtccactgccttccctcgagctgatatcctccttccagccaaagcgaaaagcgttctcttcaccccaggaagaagaagaagctggatttactgggcgcagaatgaattccaagatgcaggtgtattctggttccaagtgtgcctatctccctaaaatgatgaccttgcaccagcaatgcatccgagtacttaaaaacaacatcgattcaatctttgaagtgggaggagtcccatactctgttcttgaacccgttttggagaggtgtacacctgatcagctgtatcgcatagaggaatacaatcatgtattaattgaagaaacagatcaattatggaaagttcattgtcaccgagactttaaggaagaaagacccgaagagtatgagtcgtggcgagagatgtacctgcggcttcaggacgcccgagagcagcggctacgagtactaacaaagaatatccagttcgcacatgccaataagcccaaaggccgacaagcaaagatggcctttgtcaactctgtggccaagccacctcgtgacgtccggaggaggcaggaaaagtttggaacgggaggagcagctgtccctgagaaaatcaagatcaagccagccccgtaccccatgggaagcagccatgcttccgccagtagcatcagctttaaccccagccctgaggagccggcctatgatggcccaagcaccagcagtgcccacttggcaccagtggtcagcagcactgtttcctatgatcctaggaaacccactgtgaagaaaattgccccaatgatggccaagacaattaaagctttcaagaacagattctcccgacgataaactgaggacttgccttggaaatggaatctggggaggcaggaatacaaggacagtgggggttggggaatggaattctacaggagactggagtcttgctttgtggatccttttggtctccgagtcctgcagtctgcaggtgctgcccctgggaacctgcgtgccacagccccgcctccctgcctggagcacactttagaattctgaagatgtgaagcctctgtctcactgaggattttaaaggtcaattatacttttgttgttcattagcatctttgtaaactataagacgtagttttaattaataaatattgcccccagattgtatttatattatcccccaggtttgtttttgttttttgtcctctaccacacatttagccttttatcttccaggtccttattaaaatcagatgaaagcctagtgaaagccagtctcctgccccagctcagctctgtgtggactctggtccagacagaggactgggcatctccagagcctgcacagtacctgctgcacgtagggcaaggaatgagcactagaccgcctgtccccaagggagcctcagtggggcgacagggtgctcggcggactccacctcaggccctccccactgttgctgtgcattcctgtgcaggtgcatctctttcttactaactggtatttattaagggaggtgctctgtaggtctggagcctttccctcatcctttttgcgagtccccacctttttgtttttttttttttctttgaggctcactagaggacgcagaaccttgggagattgatttgcacagaactccccacctcccacttttacaatttccagtttctgattgaaaattttagggtttctccccactgcccttccctatctttccttcccctcaacaccatgaaggaaaaacacacacggcagggctttttgtagccctgaaggcaactttagacatttaaaatccagcactttaatctcttgttctctgtgaatcactatgagaagtgaatggttttaaaggctgtaatgctatgttggaaattggtttgttttgccttttattgaaaaggtaagatcatgtgattggaagaacacaactgttggcttgggaagaggactttgctgctgaagtgttttctaccttctgagtgtgtttaaggcaggatttggagggaaggaccagcttagggagagtgtctgagccacagcgtcaggatgggggaaaccacatgggatccatcaagttccagttgaacaggagcaagatcagaacttaggagggcagtgtcagctcccttgttggctgtcaaggaacaccgatctagtagaaacccacttggttgtgacccaggtagaggtagatgccatacatttgagatatgcgtccttaaggaacctgacaagcagactgaagggatggtaagtgtgacagcctgataagttttctcaaagcccaggatacagagccagtgttttctgtaactggagacctcagttaggccaacttcgaattccagagcaacgtaggaagtctattcagcagaaactcgacattgttcagtgtgtattgctgtgcagggtgcctattgtgacaggacacaaatgttactatgttttaatttgctatatttttgaatgggtaaagcattactttacttctcttggttacttgtaccaccattccacccctatccctagcctgccccacaaatctaatattaggaagcctcttaactgaaaccaaatgaacatttgggtcaggtgccagatgtctgctgcctagaatagctttttctaggtgtctaccaccttgaatttatctcttaactgtgtgttcaagtctttgtcattgaaactagtttttcatatcttagattcagttgtgtatgatttaatgtcccttattaggagtctttaggcagggagggaagaaaaaacagatttgttcatagcaatgtcagtatccattttggcacataaagatttttgatgagccctgtttgcatagagccagatgttttcccctcccccaagagtatctacatcagggatgtgacttggtgcgaagagtcaggggaaagaggaaaaacccaatttctaaatgacctccttgcccagcttactaaaatggctgcagagcagacacaggatgaatttgaacctgacacaggatgaatttgaacctttggtctcatttatggaaaaacttgtgcaattttttttctgtgctacactacatacaaatcaccaaattacaaattacccttttgtgatccttggtgtactgagcagtttctttggggctttttctttctgggaagcgggagggaaaggagcaaggtgtcatcctgctcttcatttgtattttggtcccaaaatgtaaatacaattttctatgttacttttttgtggtaactaccgagatgaatattttaattagataagttatatgaaaaggaaaattccatgtctaaataaaaaacaaactcca

SEQ ID NO: 31905 - DNA, 4654 bp, Homo sapiens
  source 1..4654: mol_type = unassigned DNA
acgtcgggtcggcgggtggatgaacgcggccctctgtaatggcggagcgtggcggggacgggggcgagagtgaacgattcaacccgggggagctcaggatggcccaacagcaggccttgaggttccgaggtccggctcccccaccaaatgcagtgatgcgaggcccaccacctctgatgcgacctcctccaccttttggtatgatgcgaggccctcctccaccaccacggccgccctttggacgtcctccttttgatcctaatatgccgccaatgcctcctccaggagggatacctccacctatgggccctccacacctccagagaccacctttcatgcctcctcccatgagttccatgcctcctcctccgggtatgatgtttccaccaggaatgcctcctgtgactgctcctggtactccagcactacctcctacggaggagatatgggttgaaaataaaactccagatgggaaggtttattattataatgctcggacacgtgaatctgcatggaccaagccagatggagttaaggttattcagcaatcagaactgacacctatgcttgcagcccaggcacaggttcaggctcaggcccaggcgcaggctcaggcccaggcgcaggctcaggcccaggcacaagctcaggcccaggctcaggctcaggcccaggcccaggcccaggcccaggcccaggcccaagcccaagcccaggcccaggctcaggctcaggcacaagctcaggcccaggcccaggctcaggtccaggcccaggtccaggcacaagtgcaagcacaagcagttggagcttccacccctacgaccagtagcccagcacctgcagtatccacttcaacatcatcatccaccccttcctctaccacttctaccacaacaactgctacttcagttgcgcagacagtatcaacacccacaacacaagatcagaccccaagttctgctgtttcagttgccacgcctacagttagtgtttcaactcctgctcctacagccacacctgtgcaaaccgttccccagccgcaccctcagacgttacctcctgctgttcctcattcagtacctcagccaacaacagcaatacctgcttttccaccagtaatggtacctccgtttcgtgttccccttcctggcatgccaattccacttccaggtgtagcaatgatgcaaatagtcagctgcccgtatgtaaagacagtcgctaccaccaagaccggtgtattgccaggaatggcccctcctatcgtacccatgatacatccccaggttgctattgcagcttcacctgctaccttagctggagcaacagcagtttctgaatggactgaatataaaacagcagatgggaagacatattattataataatagaacattagaatcaacctgggaaaaaccccaagaactaaaggaaaaagaaaagttagaagagaagattaaagagccaattaaagaaccctctgaagagcctctgccaatggagacggaggaggaggatcctaaagaagagcctataaaggagataaaggaggagcccaaagaagaggagatgactgaagaagaaaaggctgcccagaaggcaaagccagttgctactgctcctattcctggtactccatggtgtgtcgtttggactggtgatgagcgggtcttcttttataatcccaccactcgtctttctatgtgggaccgacctgatgatctgattggcagggcagatgttgacaaaattattcaggagccccctcataaaaaaggaatggaggaattgaagaaactaaggcacccaactccgacaatgctgtcgatccaaaagtggcaattctctatgagtgcaattaaagaggaacaagaattaatggaagaaattaatgaagatgagcctgttaaagcaaaaaaacggaagagagacgataataaagacattgactcagagaaagaagctgccatggaagctgaaattaaagctgcccgagaaagggccattgtccctctggaggctcgaatgaagcagttcaaggacatgctgctagagagaggggtgtctgctttttcaacgtgggagaaggagttgcacaagatagtttttgatccccggtacttacttctcaatcctaaagagagaaaacaggtgtttgatcagtatgtaaagaccagggcagaggaagaacgcagggaaaagaaaaataaaataatgcaagccaaggaagatttcaaaaaaatgatggaagaagcaaaatttaatccaagagcaacttttagtgaatttgcagccaagcatgctaaagattcaagattcaaagcaattgaaaagatgaaagaccgagaagccttgtttaatgagtttgtggccgctgctaggaagaaagagaaagaagattcgaagaccagaggtgagaagattaaatcggatttctttgaactattatctaatcatcacttggacagtcagtctcgatggagcaaagtaaaagacaaagtagaaagtgatccacgttacaaagcagtagatagttcatcaatgagagaagaccttttcaaacagtacattgaaaaaatagccaagaatttagactcagaaaaagaaaaggagcttgaaaggcaagcccgcattgaggcaagccttcgagaacgagaaagggaggttcaaaaggcccgttcagaacaaacaaaagaaatagatcgagagagagagcagcacaaacgagaagaagctatccagaatttcaaagctcttctgtctgacatggtacgttcttcagatgtgtcatggtctgatactcgtaggaccctccgaaaagatcaccgctgggaatctggatccttattggaaagagaggagaaagagaagctttttaatgaacacattgaagcacttaccaaaaaaaagagagagcactttaggcaacttctggatgaaacttctgcaattaccttaacatccacgtggaaagaagtaaaaaaaatcattaaggaagatcctcgatgtattaagttctcctccagtgacaggaaaaaacaaagagaatttgaagaatatatcagagacaaatatatcacagccaaagctgacttcaggacgcttttgaaagagaccaaatttataacatatagatccaaaaaattaatccaagaatcagatcagcacctgaaagatgtagaaaaaattttacagaatgacaaacggtatctagtactggactgtgtgccagaggagaggcgtaaactgattgtggcatatgttgatgacctggatcgccggggtccacccccacctcccacagcatcggagcccacgagacgatcaacaaaataattctaaatactcttccataggggcatctattcaaaatgcttgcatgagccaattttcaggtttttacatatatgtgcattagtcaacctattgcgaaaccatctgacaaacagaaggagaagcatttgtgaacagtttctgaacagaacactttggaaatatttatgcttttctttgtgtggcatgactgacatacatactcaaatataggctgtctctagtaaatcttaaaatcttgaagctaaaattcatccttttatgaggtgtggaagtcagtgacttggtgacgttcttcctagcagtgttaatacatgcaagaagtaagagcatttgtggcttgaacttgccagatgcaaataccacagactccaagaaaacccgagttggggtttgttttgttttgattttttttttttaaagcgggtaaaagagaaaacactgaaaattgaattcttatcttccagaggctacaattattataatggacaatacttttacctttgtctctaaagatcagattagttttatttgttcacttacgtgctttgattatcccctctgaattatagaccgagtcttgttgtttagcctaagagaagatttatgtagtaatttcttctcaggtatggaaccacggtcataactaacatgttggccagaatagaaccactggttaaacatattttattcaccattaagtgatctttatcaatattctggattagacaacaaattacctttctgggtgtttcttgtaaactatactcctgtttgaatgttaaactttgttgctaaagtttaattttaagatgtttgaatgttcagtttatgtatttgaactacaataaaccaaccctttttatatatctgtattgtatatgattattgttacttaatttttaagagcttattttaacctgtttttaaaagcagcaaatagaatttcccacaaagtaagttgactctaaatcttaagtattacctagtttttaaaggtttgaatataataatgcagtatttgcagtataaaaaggaaggaatttgtagagaatcattttggtgctcaagtctcttagcagtgccttattgcctcatagcaagaagatgctggggttttttttgtttttgtcctttgtattaatgtatgatggtttgcgcctttttggcattctttcaacatgtcgtgtacatcacaccatgaatcagttcctaattgatatatctagctttacctcccgagttaaaaaaaaatctttttattttatgccttcataggttgctcgtttcagagtgccacataaataaaatgtttaacaaaa

SEQ ID NO: 31906 - DNA, 3633 bp, Homo sapiens
  source 1..3633: mol_type = unassigned DNA
tgaacgcggccctctgtaatggcggagcgtggcggggacgggggcgagagtgaacgattcaacccgggggagctcaggatggcccaacagcaggccttgaggttccgaggtccggctcccccaccaaatgcagtgatgcgaggcccaccacctctgatgcgacctcctccaccttttggtatgatgcgaggccctcctccaccaccacggccgccctttggacgtcctccttttgatcctaatatgccgccaatgcctcctccaggagggatacctccacctatgggccctccacacctccagagaccacctttcatgcctcctcccatgagttccatgcctcctcctccgggtatgatgtttccaccaggaatgcctcctgtgactgctcctggtactccagcactacctcctacggaggagatatgggttgaaaataaaactccagatgggaaggtttattattataatgctcggacacgtgaatctgcatggaccaagccagatggagttaaggttattcagcaatcagaactgacacctatgcttgcagcccaggcacaggttcaggctcaggcccaggcgcaggctcaggcccaggcgcaggctcaggcccaggcacaagctcaggcccaggctcaggctcaggcccaggcccaggcccaggcccaggcccaggcccaagcccaagcccaggcccaggctcaggctcaggcacaagctcaggcccaggcccaggctcaggtccaggcccaggtccaggcacaagtgcaagcacaagcagttggagcttccacccctacgaccagtagcccagcacctgcagtatccacttcaacatcatcatccaccccttcctctaccacttctaccacaacaactgctacttcagttgcgcagacagtatcaacacccacaacacaagatcagaccccaagttctgctgtttcagttgccacgcctacagttagtgtttcaactcctgctcctacagccacacctgtgcaaaccgttccccagccgcaccctcagacgttacctcctgctgttcctcattcagtacctcagccaacaacagcaatacctgcttttccaccagtaatggtacctccgtttcgtgttccccttcctggcatgccaattccacttccaggtgtattgccaggaatggcccctcctatcgtacccatgatacatccccaggttgctattgcagcttcacctgctaccttagctggagcaacagcagtttctgaatggactgaatataaaacagcagatgggaagacatattattataataatagaacattagaatcaacctgggaaaaaccccaagaactaaaggaaaaagaaaagttagaagagaagattaaagagccaattaaagaaccctctgaagagcctctgccaatggagacggaggaggaggatcctaaagaagagcctataaaggagataaaggaggagcccaaagaagaggagatgactgaagaagaaaaggctgcccagaaggcaaagccagttgctactgctcctattcctggtactccatggtgtgtcgtttggactggtgatgagcgggtcttcttttataatcccaccactcgtctttctatgtgggaccgacctgatgatctgattggcagggcagatgttgacaaaattattcaggagccccctcataaaaaaggaatggaggaattgaagaaactaaggcacccaactccgacaatgctgtcgatccaaaagtggcaattctctatgagtgcaattaaagaggaacaagaattaatggaagaaattaatgaagatgagcctgttaaagcaaaaaaacggaagagagacgataataaagacattgactcagagaaagaagctgccatggaagctgaaattaaagctgcccgagaaagggccattgtccctctggaggctcgaatgaagcagttcaaggacatgctgctagagagaggggtgtctgctttttcaacgtgggagaaggagttgcacaagatagtttttgatccccggtacttacttctcaatcctaaagagagaaaacaggtgtttgatcagtatgtaaagaccagggcagaggaagaacgcagggaaaagaaaaataaaataatgcaagccaaggaagatttcaaaaaaatgatggaagaagcaaaatttaatccaagagcaacttttagtgaatttgcagccaagcatgctaaagattcaagattcaaagcaattgaaaagatgaaagaccgagaagccttgtttaatgagtttgtggccgctgctaggaagaaagagaaagaagattcgaagaccagaggtgagaagattaaatcggatttctttgaactattatctaatcatcacttggacagtcagtctcgatggagcaaagtaaaagacaaagtagaaagtgatccacgttacaaagcagtagatagttcatcaatgagagaagaccttttcaaacagtacattgaaaaaatagccaagaatttagactcagaaaaagaaaaggagcttgaaaggcaagcccgcattgaggcaagccttcgagaacgagaaagggaggttcaaaaggcccgttcagaacaaacaaaagaaatagatcgagagagagagcagcacaaacgagaagaagctatccagaatttcaaagctcttctgtctgacatggtacgttcttcagatgtgtcatggtctgatactcgtaggaccctccgaaaagatcaccgctgggaatctggatccttattggaaagagaggagaaagagaagctttttaatgaacacattgaagcacttaccaaaaaaaagagagagcactttaggcaacttctggatgaaacttctgcaattaccttaacatccacgtggaaagaagtaaaaaaaatcattaaggaagatcctcgatgtattaagttctcctccagtgacaggaaaaaacaaagagaatttgaagaatatatcagagacaaatatatcacagccaaagctgacttcaggacgcttttgaaagagaccaaatttataacatatagatccaaaaaattaatccaagaatcagatcagcacctgaaagatgtagaaaaaattttacagaatgacaaacggtatctagtactggactgtgtgccagaggagaggcgtaaactgattgtggcatatgttgatgacctggatcgccggggtccacccccacctcccacagcatcggagcccacgagacgatcaacaaaataattctaaatactcttccataggggcatctattcaaaatgcttgcatgagccaattttcaggtttttacatatatgtgcattagtcaacctattgcgaaaccatctgacaaacagaaggagaagcatttgtgaacagtttctgaacagaacactttggaaatatttatgcttttctttgtgtggcatgactgacatacatactcaaatataggctgtctctagtaaatcttaaaatcttgaagctaaaattcatccttttatgaggtgtggaagtcagtgacttggtgacgttcttcctagcagtgttaatacatgcaagaagtaagagcatttgtggcttgaacttgccagatgcaaataccacagactccaagaaaacccg

SEQ ID NO: 31907 - DNA, 6061 bp, Homo sapiens
  source 1..6061: mol_type = unassigned DNA
cgcggagggatccggaggcgagccgagcgcggtggtgaggccgcctcagcgaaaaaaatgtccgcctgaagagacccacaagttctattcggggggaccgacagcccgccccgggaggaaggggcggccaggcccgaaagccgcctccccctcccagacccgagagctcgtgcggggcaaagtgaaccgagccgctgggcggtgcaaggggaagcccaagcccgttctcccggccaaagtgaactttaatcggggtggttggatgcggagacggggcggcaggacctgctagaagtggccgaagatgaatccccagcaacaacgcatggccgctatagggaccgacaaggagctgagcgacctactggacttcagtgcgatgttttccccacctgttaatagtgggaaaactagaccaactacactgggaagcagtcaattcagtggatcaggtattgatgaaagaggaggtacaacatcttggggaacaagtggtcaaccaagtccttcctatgattcatctagaggttttacagacagccctcattacagtgatcacttgaatgacagtcgattaggagcccatgaaggcttgtccccaacacctttcatgaactcaaatctgatgggaaaaacatcagagagaggctcattttccctgtacagcagagatactggattaccaggctgtcaatctagtctcctgagacaagatctggggcttgggagcccagcacagctatcttcttcaggaaaacctgggacagcatactattcattctctgctacaagttccaggaggagaccactccatgactctgcagcgcttgatcccttgcaagcaaaaaaagtcagaaaggtgcctcctggtttgccttcttctgtatatgcaccatccccaaattcagatgatttcaaccgtgaatctcctagttatccatctcctaagccaccaaccagtatgttcgctagcactttctttatgcaagatgggacccacaattcttctgacctttggagttcatcaaatgggatgagccagcctggttttggtggaattctggggacctccacttcccacatgtctcaatccagtagttatggcaaccttcattcacatgaccgcttgagttatcctccacactcagtttcaccaacagacataaacacgagtcttccaccaatgtccagctttcatcgcggcagtaccagcagttcaccttacgttgctgcctcacacactcctcccatcaatggatcagacagcattctaggaaccagagggaatgctgctggaagctcacagacaggtgatgcacttggaaaggctttggcatctatttattctcctgaccataccagcagtagttttccgtcaaatccatcaacaccagttggatcaccttcacctctcacaggtaccagtcagtggccaagacctggagggcaagcaccttcatccccaagctatgaaaactcactccactccctgcagtctcgaatggaggatcgtttagacagactggatgatgcaatccatgtgctgcggaaccatgctgtgggaccttccaccagtttgcctgctggtcacagtgatatacatagtttattgggaccatcccataatgcaccaattggaagcctcaattcaaactatggaggatcaagccttgttgcaagcagtcgatcagcttcaatggttggaactcatcgggaagactctgtcagtctcaatggcaatcattcagtcctgtctagtacagtcactacttcaagcacagacctgaaccataaaacacaagaaaattatagaggtggcttgcaaagtcagtctggaactgttgttacaacagaaatcaagactgaaaacaaagaaaaggatgaaaaccttcatgaacctccttcatcagatgacatgaagtcagatgatgaatcctcccaaaaagatatcaaggtttcatctagaggcagaacaagcagtactaatgaagatgaggatttgaaccctgaacagaagatagaaagggagaaggagaggcggatggctaacaatgccagagaacgcttacgcgtgcgggatattaatgaagcattcaaagagcttggccgaatgtgtcagcttcacttgaagagtgaaaaaccccaaacaaaactccttattcttcatcaagccgtggcagtcatccttagtctagaacagcaagtcagagagaggaaccttaaccccaaagcagcctgccttaagagaagggaagaagaaaaagtttctgccgtatcggcagagccgccaaccacactgccaggaacccatcctgggcttagtgaaactaccaaccctatgggtcatatgtaaacatcagccagttccagagttatcagtaggctagatagaaggtgacctctcctcataaggacttggacaactcagattatctgaagacacaaacctgacaggagggagaagaaaaaacaaaacacttgaaccaagaaactcaaatgtaatcctacgatcaaagcaactggtcaacacttccatcagaagtgaagataggaagctcatcagatagaacatcagcccatgagatgtttgcaacaaatcttttgttgcaagcagtgtgtcgcttctgcacaatcagagactgtctcgatctctccactcaccgtggaagttgccttgtgcctaaactgaattgacaaatgcattgtaactacaaattttatttattgttatgaaactgtaaggtctacatataaagggaaaaagttaatgtggaaagctgatctacactcagctgatgccagcatacattaaagcggttcacgtgcagagaacaaagcagtgacaaccattggcccttagcattcccggcatacctattagtgtcttaaaaaggaagggaaaagtcttttgttgccctctcctatcctcttgccatatgaatagcgttttccatgaaataggaaaatattacttggtatagcatttctcttgctctcattttttgatttatttttattttctctttgtgggtgttatatttgatctctaaatctgaacagtttatggtcacagtccagcctcctccgtgcagccctgtgtgctttgcacatttaccttacagtggtaagcagagaccatctgtgaccatagcctagctagcattttaaaaggggaaattttgttctctaggttttcccccaaataaacattgctttatttctaataataaccaagacttttcaagcttctagatctcataggaaagcttgtaatagcaaaattgtaaattacaagggaagaatctactttttagaaatcgctttgttttccaagcagtaagtactacatacagtacttgtaaagtgttagctgtaagtaagcacaaaatacatttaaaatacaaagacgattttttcaggctgtgattatggtgaacataacaaaacccagtagtcaccaaggcaggtagtgtgataaatgaacacaccactctgaggctaattacctaatggaatacaagagcaatggtcacccgtatttccttatcctagcctttatttctctgtcatttggatggctggtcaatggggaagaattgagtgggtgatttaatcaactgcaaaccatctgcccctgtcccaaaatgatgagccagattagcattaaaccagtacttgtcagtccatcttaatactgttcattaaggcactctctgtctctaatccttaggagttgttttaaaagacataatcactttgaacttccatgaaacctgtcttccaccacaacaaccctgggagagaaaaacatgctaaaggaggtatcttggcttaataattccttatagccaatatcaacagtggcaatcagcacacagaggaaaggacccaaatcactatgtagcttaaagatttctgttaatttgaaagaacaaaaacaagacagaacttctggtactctaatcaggatgattcctaacaagtcagtcatttgtgaacttagtggactttttggttactttaatttgcatatattctccagttacatcggactctatctgtggccttgttcttcatttcagtgttaatcagctaaacagaagttgttgcttatgatgtgtgagtgaacatatgccactgcctggcctttttttcttcagagcttgttgtctttttcgctatattagactttgcagtatgcccagaagctttccttcataaaatagaaagaaaaaaacatttggcttatttttcactgtagctagtcttttatacaataatcttgtaagaaaatttcttgaattctaaatattactctttctagatttttgaaatcaaaaagttttcagtaaaaagtttcttactttattttattatattaggtagtaaaaaatgtagggttatttaccataacctgttcattaatatcagaaatttacaatagcattttaagaccatagtaggattctagcataccgtgtagtacctatggagtattgtaagagctaattgttggagatgaattgcttctcatcttgttctccagtttccattgttggtttattgcagatttgtatcctgtgtcaaattcaaggtattattgataaaccttttcaaccagcagcaagaagttcaaatttttttctgtcactgtaacagaaaacacaatatgtatataacatttatgtagcaataaatgtgccatcttttttttaacacagtaaaatagtgagttttttacatttctctttctcaaataataatgtattttgttttattttctccatctcattcgtcccagaaacactcacactgcttttcctaactgcattaccgacattatctgggaaacccttcaggacagaatcaggcttgtggagctaagttggcaatctggtctagagcttctctagcttgtgcttttctcctcttgccctcactactgacggtggccttttaaccttttcctaaagattgaccaaacagcaactagtagttatagaaaatctactcatttgtagatacagagaaaaatgaagaagatggaaaaagactcaaaagaggctttttaagttattcttcaaagcacttttcacatttccccataccctttctcacaaaaaaagtgtcataattaagtaatggtattgtttactgtttaaaagttaaaagatcaaaaatttgcttttatcccagtttttaaccacaaaaaaaagcgtagggattatccatgaggacttcatgccaagcaagaacctcaaacaaactagacaaactttttttttgacagtgaatgactttttgtaggacctgtgcgtgcgaaacccatggcaattgtcacatcctcttggtatgctggcagattgcttctcttggtgaattatgaaatccactgttcacattgggtgcctaacagaacattttgcttcttgtgggatttagtgaaaactattaaacttgttaagttgattttatacaaaacgataaataaaaagctctaagaagaaaatgtataatcttagagctgaaataaaatatagagaccatctagtaaatgacctcattaatatatctgtgaaaactgagactcagattgtatgtctctaagaacacataattagtaacagatcaagacacttaaaactttccctacaaaacctccctgccttgactttctctttctctttgcagatttctaggccgcttctgctcagtgtcttcattttcttccatatttgttttatttcatttttcttttctatagttcatgttttctttttccttggaaactcaaaatttaaacacacgtcgtgtgtgtgtgtgtgtgtgtgtctgtgtgtgtgtgacttaaagaatcttaagctttggcattaaatagtcctcgattcaaatctaagctcaacatctgattaacttcattttcctatctgaaaaatggagataacattagaattgtgtaagtattgaatgaaacaatgtatggaaagctcttatggttcttgtcacctaagaagtacttaataaatgataaatatttttaaataaataatattataaccaa

SEQ ID NO: 31908 - DNA, 4786 bp, Homo sapiens
  source 1..4786: mol_type = unassigned DNA
ggcgcggagggatccggaggcgagccgagcgcggtggtgaggccgcctcagcgaaaaaaatgtccgcctgaagagacccacaagttctattcggggggaccgacagcccgccccgggaggaaggggcggccaggcccgaaagccgcctccccctcccagacccgagagctcgtgcggggcaaagtgaaccgagccgctgggcggtgcaaggggaagcccaagcccgttctcccggccaaagtgaactttaatcggggtggttggatgcggagacggggcggcagaagtggccgaagatgaatccccagcaacaacgcatggccgctatagggaccgacaaggagctgagcgacctactggacttcagtgcgatgttttccccacctgttaatagtgggaaaactagaccaactacactgggaagcagtcaattcagtggatcaggtattgatgaaagaggaggtacaacatcttggggaacaagtggtcaaccaagtccttcctatgattcatctagaggttttacagacagccctcattacagtgatcacttgaatgacagtcgattaggagcccatgaaggcttgtccccaacacctttcatgaactcaaatctgatgggaaaaacatcagagagaggctcattttccctgtacagcagagatactggattaccaggctgtcaatctagtctcctgagacaagatctggggcttgggagcccagcacagctatcttcttcaggaaaacctgggacagcatactattcattctctgctacaagttccaggaggagaccactccatgactctgcagcgcttgatcccttgcaagcaaaaaaagtcagaaaggtgcctcctggtttgccttcttctgtatatgcaccatccccaaattcagatgatttcaaccgtgaatctcctagttatccatctcctaagccaccaaccagtatgttcgctagcactttctttatgcaagatgggacccacaattcttctgacctttggagttcatcaaatgggatgagccagcctggttttggtggaattctggggacctccacttcccacatgtctcaatccagtagttatggcaaccttcattcacatgaccgcttgagttatcctccacactcagtttcaccaacagacataaacacgagtcttccaccaatgtccagctttcatcgcggcagtaccagcagttcaccttacgttgctgcctcacacactcctcccatcaatggatcagacagcattctaggaaccagagggaatgctgctggaagctcacagacaggtgatgcacttggaaaggctttggcatctatttattctcctgaccataccagcagtagttttccgtcaaatccatcaacaccagttggatcaccttcacctctcacaggtaccagtcagtggccaagacctggagggcaagcaccttcatccccaagctatgaaaactcactccactccctgaaaaatcgagttgagcagcaacttcacgagcatttgcaagatgcaatgtccttcttaaaggatgtctgtgagcagtctcgaatggaggatcgtttagacagactggatgatgcaatccatgtgctgcggaaccatgctgtgggaccttccaccagtttgcctgctggtcacagtgatatacatagtttattgggaccatcccataatgcaccaattggaagcctcaattcaaactatggaggatcaagccttgttgcaagcagtcgatcagcttcaatggttggaactcatcgggaagactctgtcagtctcaatggcaatcattcagtcctgtctagtacagtcactacttcaagcacagacctgaaccataaaacacaagaaaattatagaggtggcttgcaaagtcagtctggaactgttgttacaacagaaatcaagactgaaaacaaagaaaaggatgaaaaccttcatgaacctccttcatcagatgacatgaagtcagatgatgaatcctcccaaaaagatatcaaggtttcatctagaggcagaacaagcagtactaatgaagatgaggatttgaaccctgaacagaagatagaaagggagaaggagaggcggatggctaacaatgccagagaacgcttacgcgtgcgggatattaatgaagcattcaaagagcttggccgaatgtgtcagcttcacttgaagagtgaaaaaccccaaacaaaactccttattcttcatcaagccgtggcagtcatccttagtctagaacagcaagtcagagagaggaaccttaaccccaaagcagcctgccttaagagaagggaagaagaaaaagtttctgccgtatcggcagagccgccaaccacactgccaggaacccatcctgggcttagtgaaactaccaaccctatgggtcatatgtaaacatcagccagttccagagttatcagtaggctagatagaaggtgacctctcctcataaggacttggacaactcagattatctgaagacacaaacctgacaggagggagaagaaaaaacaaaacacttgaaccaagaaactcaaatgtaatcctacgatcaaagcaactggtcaacacttccatcagaagtgaagataggaagctcatcagatagaacatcagcccatgagatgtttgcaacaaatcttttgttgcaagcagtgtgtcgcttctgcacaatcagagactgtctcgatctctccactcaccgtggaagttgccttgtgcctaaactgaattgacaaatgcattgtaactacaaattttatttattgttatgaaactgtaaggtctacatataaagggaaaaagttaatgtggaaagctgatctacactcagctgatgccagcatacattaaagcggttcacgtgcagagaacaaagcagtgacaaccattggcccttagcattcccggcatacctattagtgtcttaaaaaggaagggaaaagtcttttgttgccctctcctatcctcttgccatatgaatagcgttttccatgaaataggaaaatattacttggtatagcatttctcttgctctcattttttgatttatttttattttctctttgtgggtgttatatttgatctctaaatctgaacagtttatggtcacagtccagcctcctccgtgcagccctgtgtgctttgcacatttaccttacagtggtaagcagagaccatctgtgaccatagcctagctagcattttaaaaggggaaattttgttctctaggttttcccccaaataaacattgctttatttctaataataaccaagacttttcaagcttctagatctcataggaaagcttgtaatagcaaaattgtaaattacaagggaagaatctactttttagaaatcgctttgttttccaagcagtaagtactacatacagtacttgtaaagtgttagctgtaagtaagcacaaaatacatttaaaatacaaagacgattttttcaggctgtgattatggtgaacataacaaaacccagtagtcaccaaggcaggtagtgtgataaatgaacacaccactctgaggctaattacctaatggaatacaagagcaatggtcacccgtatttccttatcctagcctttatttctctgtcatttggatggctggtcaatggggaagaattgagtgggtgatttaatcaactgcaaaccatctgcccctgtcccaaaatgatgagccagattagcattaaaccagtacttgtcagtccatcttaatactgttcattaaggcactctctgtctctaatccttaggagttgttttaaaagacataatcactttgaacttccatgaaacctgtcttccaccacaacaaccctgggagagaaaaacatgctaaaggaggtatcttggcttaataattccttatagccaatatcaacagtggcaatcagcacacagaggaaaggacccaaatcactatgtagcttaaagatttctgttaatttgaaagaacaaaaacaagacagaacttctggtactctaatcaggatgattcctaacaagtcagtcatttgtgaacttagtggactttttggttactttaatttgcatatattctccagttacatcggactctatctgtggccttgttcttcatttcagtgttaatcagctaaacagaagttgttgcttatgatgtgtgagtgaacatatgccactgcctggcctttttttcttcagagcttgttgtctttttcgctatattagactttgcagtatgcccagaagctttccttcataaaatagaaagaaaaaaacatttggcttatttttcactgtagctagtcttttatacaataatcttgtaagaaaatttcttgaattctaaatattactctttctagatttttgaaatcaaaaagttttcagtaaaaagtttcttactttattttattatattaggtagtaaaaaatgtagggttatttaccataacctgttcattaatatcagaaatttacaatagcattttaagaccatagtaggattctagcataccgtgtagtacctatggagtattgtaagagctaattgttggagatgaattgcttctcatcttgttctccagtttccattgttggtttattgcagatttgtatcctgtgtcaaattcaaggtattattgataaaccttttcaaccagcagcaagaagttcaaatttttttctgtcactgtaacagaaaacacaatatgtatataacatttatgtagcaataaatgtgccatcttttttttaacacagt

SEQ ID NO: 31909 - DNA, 4772 bp, Homo sapiens
  source 1..4772: mol_type = unassigned DNA
tccggaggcgagccgagcgcggtggtgaggccgcctcagcgaaaaaaatgtccgcctgaagagacccacaagttctattcggggggaccgacagcccgccccgggaggaaggggcggccaggcccgaaagccgcctccccctcccagacccgagagctcgtgcggggcaaagtgaaccgagccgctgggcggtgcaaggggaagcccaagcccgttctcccggccaaagtgaactttaatcggggtggttggatgcggagacggggcggcaggacctgctagaagtggccgaagatgaatccccagcaacaacgcatggccgctatagggaccgacaaggagctgagcgacctactggacttcagtgcgatgttttccccacctgttaatagtgggaaaactagaccaactacactgggaagcagtcaattcagtggatcaggtacaatacacgagatgaagcagttaaatagcaaagcaagacagaagggtcagagaattaaaggttttacagacagccctcattacagtgatcacttgaatgacagtcgattaggagcccatgaaggcttgtccccaacacctttcatgaactcaaatctgatgggaaaaacatcagagagaggctcattttccctgtacagcagagatactggattaccaggctgtcaatctagtctcctgagacaagatctggggcttgggagcccagcacagctatcttcttcaggaaaacctgggacagcatactattcattctctgctacaagttccaggaggagaccactccatgactctgcagcgcttgatcccttgcaagcaaaaaaagtcagaaaggtgcctcctggtttgccttcttctgtatatgcaccatccccaaattcagatgatttcaaccgtgaatctcctagttatccatctcctaagccaccaaccagtatgttcgctagcactttctttatgcaagatgggacccacaattcttctgacctttggagttcatcaaatgggatgagccagcctggttttggtggaattctggggacctccacttcccacatgtctcaatccagtagttatggcaaccttcattcacatgaccgcttgagttatcctccacactcagtttcaccaacagacataaacacgagtcttccaccaatgtccagctttcatcgcggcagtaccagcagttcaccttacgttgctgcctcacacactcctcccatcaatggatcagacagcattctaggaaccagagggaatgctgctggaagctcacagacaggtgatgcacttggaaaggctttggcatctatttattctcctgaccataccagcagtagttttccgtcaaatccatcaacaccagttggatcaccttcacctctcacaggtaccagtcagtggccaagacctggagggcaagcaccttcatccccaagctatgaaaactcactccactccctgaaaaatcgagttgagcagcaacttcacgagcatttgcaagatgcaatgtccttcttaaaggatgtctgtgagcagtctcgaatggaggatcgtttagacagactggatgatgcaatccatgtgctgcggaaccatgctgtgggaccttccaccagtttgcctgctggtcacagtgatatacatagtttattgggaccatcccataatgcaccaattggaagcctcaattcaaactatggaggatcaagccttgttgcaagcagtcgatcagcttcaatggttggaactcatcgggaagactctgtcagtctcaatggcaatcattcagtcctgtctagtacagtcactacttcaagcacagacctgaaccataaaacacaagaaaattatagaggtggcttgcaaagtcagtctggaactgttgttacaacagaaatcaagactgaaaacaaagaaaaggatgaaaaccttcatgaacctccttcatcagatgacatgaagtcagatgatgaatcctcccaaaaagatatcaaggtttcatctagaggcagaacaagcagtactaatgaagatgaggatttgaaccctgaacagaagatagaaagggagaaggagaggcggatggctaacaatgccagagaacgcttacgcgtgcgggatattaatgaagcattcaaagagcttggccgaatgtgtcagcttcacttgaagagtgaaaaaccccaaacaaaactccttattcttcatcaagccgtggcagtcatccttagtctagaacagcaagtcagagagaggaaccttaaccccaaagcagcctgccttaagagaagggaagaagaaaaagtttctgccgtatcggcagagccgccaaccacactgccaggaacccatcctgggcttagtgaaactaccaaccctatgggtcatatgtaaacatcagccagttccagagttatcagtaggctagatagaaggtgacctctcctcataaggacttggacaactcagattatctgaagacacaaacctgacaggagggagaagaaaaaacaaaacacttgaaccaagaaactcaaatgtaatcctacgatcaaagcaactggtcaacacttccatcagaagtgaagataggaagctcatcagatagaacatcagcccatgagatgtttgcaacaaatcttttgttgcaagcagtgtgtcgcttctgcacaatcagagactgtctcgatctctccactcaccgtggaagttgccttgtgcctaaactgaattgacaaatgcattgtaactacaaattttatttattgttatgaaactgtaaggtctacatataaagggaaaaagttaatgtggaaagctgatctacactcagctgatgccagcatacattaaagcggttcacgtgcagagaacaaagcagtgacaaccattggcccttagcattcccggcatacctattagtgtcttaaaaaggaagggaaaagtcttttgttgccctctcctatcctcttgccatatgaatagcgttttccatgaaataggaaaatattacttggtatagcatttctcttgctctcattttttgatttatttttattttctctttgtgggtgttatatttgatctctaaatctgaacagtttatggtcacagtccagcctcctccgtgcagccctgtgtgctttgcacatttaccttacagtggtaagcagagaccatctgtgaccatagcctagctagcattttaaaaggggaaattttgttctctaggttttcccccaaataaacattgctttatttctaataataaccaagacttttcaagcttctagatctcataggaaagcttgtaatagcaaaattgtaaattacaagggaagaatctactttttagaaatcgctttgttttccaagcagtaagtactacatacagtacttgtaaagtgttagctgtaagtaagcacaaaatacatttaaaatacaaagacgattttttcaggctgtgattatggtgaacataacaaaacccagtagtcaccaaggcaggtagtgtgataaatgaacacaccactctgaggctaattacctaatggaatacaagagcaatggtcacccgtatttccttatcctagcctttatttctctgtcatttggatggctggtcaatggggaagaattgagtgggtgatttaatcaactgcaaaccatctgcccctgtcccaaaatgatgagccagattagcattaaaccagtacttgtcagtccatcttaatactgttcattaaggcactctctgtctctaatccttaggagttgttttaaaagacataatcactttgaacttccatgaaacctgtcttccaccacaacaaccctgggagagaaaaacatgctaaaggaggtatcttggcttaataattccttatagccaatatcaacagtggcaatcagcacacagaggaaaggacccaaatcactatgtagcttaaagatttctgttaatttgaaagaacaaaaacaagacagaacttctggtactctaatcaggatgattcctaacaagtcagtcatttgtgaacttagtggactttttggttactttaatttgcatatattctccagttacatcggactctatctgtggccttgttcttcatttcagtgttaatcagctaaacagaagttgttgcttatgatgtgtgagtgaacatatgccactgcctggcctttttttcttcagagcttgttgtctttttcgctatattagactttgcagtatgcccagaagctttccttcataaaatagaaagaaaaaaacatttggcttatttttcactgtagctagtcttttatacaataatcttgtaagaaaatttcttgaattctaaatattactctttctagatttttgaaatcaaaaagttttcagtaaaaagtttcttactttattttattatattaggtagtaaaaaatgtagggttatttaccataacctgttcattaatatcagaaatttacaatagcattttaagaccatagtaggattctagcataccgtgtagtacctatggagtattgtaagagctaattgttggagatgaattgcttctcatcttgttctccagtttccattgttggtttattgcagatttgtatcctgtgtcaaattcaaggtattattgataaaccttttcaaccagcagcaagaagttcaaatttttttctgtcactgtaacagaaaacacaatatgtatataacatttatgtagcaataaatgtgccatcttttttttaacacagt

SEQ ID NO: 31910 - DNA, 1598 bp, Homo sapiens
  source 1..1598: mol_type = unassigned DNA
agacttactccctttgcctgtgtggatatatgtcttggagagaggctgtgtgcattagctacaaatagtaacattttcaaaatcaacatgtattgtgcttatcctgtccctggaatgggcagcaattctttgatgtattactacaatgggaaaacggtatatgcaccatccccaaattcagatgatttcaaccgtgaatctcctagttatccatctcctaagccaccaaccagtatgttcgctagcactttctttatgcaagagttatcctccacactcagtttcaccaacagacataaacacgagtcttccaccaatgtccagctttcatcgcggcagtaccagcagttcaccttacgttgctgcctcacacactcctcccatcaatggatcagacagcattctaggaaccagagggaatgctgctggaagctcacagacaggtgatgcacttggaaaggctttggcatctatttattctcctgaccataccagcagtagttttccgtcaaatccatcaacaccagttggatcaccttcacctctcacaggtaccagtcagtggccaagacctggagggcaagcaccttcatccccaagctatgaaaactcactccactccctgcagtctcgaatggaggatcgtttagacagactggatgatgcaatccatgtgctgcggaaccatgctgtgggaccttccaccagtttgcctgctggtcacagtgatatacatagtttattgggaccatcccataatgcaccaattggaagcctcaattcaaactatggaggatcaagccttgttgcaagcagtcgatcagcttcaatggttggaactcatcgggaagactctgtcagtctcaatggcaatcattcagtcctgtctagtacagtcactacttcaagcacagacctgaaccataaaacacaagaaaattatagaggtggcttgcaaagtcagtctggaactgttgttacaacagaaatcaagactgaaaacaaagaaaaggatgaaaaccttcatgaacctccttcatcagatgacatgaagtcagatgatgaatcctcccaaaaagatatcaaggtttcatctagaggcagaacaagcagtactaatgaagatgaggatttgaaccctgaacagaagatagaaagggagaaggagaggcggatggctaacaatgccagagaacgcttacgcgtgcgggatattaatgaagcattcaaagagcttggccgaatgtgtcagcttcacttgaagagtgaaaaaccccaaacaaaactccttattcttcatcaagccgtggcagtcatccttagtctagaacagcaagtcagagagaggaaccttaaccccaaagcagcctgccttaagagaagggaagaagaaaaagtttctgccgtatcggcagagccgccaaccacactgccaggaacccatcctgggcttagtgaaactaccaaccctatgggtcatatgtaaacatcagccagttccagagttatcagtaggctagatagaaggtgacctctcctcataaggacttggacaactcagattatctgaagacacaaacctgacaggagggagaaga

SEQ ID NO: 31911 - DNA, 2474 bp, Homo sapiens
  source 1..2474: mol_type = unassigned DNA
acgcgcggtgtctgcgccgactgcagccctcctggacgggagcctctgggcccagcttagggtggcgtccagcgtgacctactcgggaatggcagccttcagtgtcctgcggcctcgggttccgggaagctcggggacctgggcagcggatccagatgcttccacagctgtgtctccgtcgctccgcttcgggggccgagaaccagcaagaccaacgcgaggaggcgccacgaagtggccgaagatgaatccccagcaacaacgcatggccgctatagggaccgacaaggagctgagcgacctactggacttcagtgcgatgttttccccacctgttaatagtgggaaaactagaccaactacactgggaagcagtcaattcagtggatcaggtattgatgaaagaggaggtacaacatcttggggaacaagtggtcaaccaagtccttcctatgattcatctagaggttttacagacagccctcattacagtgatcacttgaatgacagtcgattaggagcccatgaaggcttgtccccaacacctttcatgaactcaaatctgatgggaaaaacatcagagagaggctcattttccctgtacagcagagatactggattaccaggctgtcaatctagtctcctgagacaagatctggggcttgggagcccagcacagctatcttcttcaggaaaacctgggacagcatactattcattctctgctacaagttccaggaggagaccactccatgactctgcagcgcttgatcccttgcaagcaaaaaaagtcagaaaggtgcctcctggtttgccttcttctgtatatgcaccatccccaaattcagatgatttcaaccgtgaatctcctagttatccatctcctaagccaccaaccagtatgttcgctagcactttctttatgcaagatgggacccacaattcttctgacctttggagttcatcaaatgggatgagccagcctggttttggtggaattctggggacctccacttcccacatgtctcaatccagtagttatggcaaccttcattcacatgaccgcttgagttatcctccacactcagtttcaccaacagacataaacacgagtcttccaccaatgtccagctttcatcgcggcagtaccagcagttcaccttacgttgctgcctcacacactcctcccatcaatggatcagacagcattctaggaaccagagggaatgctgctggaagctcacagacaggtgatgcacttggaaaggctttggcatctatttattctcctgaccataccagcagtagttttccgtcaaatccatcaacaccagttggatcaccttcacctctcacaggtaccagtcagtggccaagacctggagggcaagcaccttcatccccaagctatgaaaactcactccactccctgcagtctcgaatggaggatcgtttagacagactggatgatgcaatccatgtgctgcggaaccatgctgtgggaccttccaccagtttgcctgctggtcacagtgatatacatagtttattgggaccatcccataatgcaccaattggaagcctcaattcaaactatggaggatcaagccttgttgcaagcagtcgatcagcttcaatggttggaactcatcgggaagactctgtcagtctcaatggcaatcattcagtcctgtctagtacagtcactacttcaagcacagacctgaaccataaaacacaagaaaattatagaggtggcttgcaaagtcagtctggaactgttgttacaacagaaatcaagactgaaaacaaagaaaaggatgaaaaccttcatgaacctccttcatcagatgacatgaagtcagatgatgaatcctcccaaaaagatatcaaggtttcatctagaggcagaacaagcagtactaatgaagatgaggatttgaaccctgaacagaagatagaaagggagaaggagaggcggatggctaacaatgccagagaacgcttacgcgtgcgggatattaatgaagcattcaaagagcttggccgaatgtgtcagcttcacttgaagagtgaaaaaccccaaacaaaactccttattcttcatcaagcagtgacaaccattggcccttagcattcccggcatacctattagtgtcttaaaaaggaagggaaaagtcttttgttgccctctcctatcctcttgccatatgaatagcgttttccatgaaataggaaaatattacttggtatagcatttctcttgctctcattttttgatttatttttattttctctttgtgggtgttatatttgatctctaaatctgaacagtttatggtcacagtccagcctcctccgtgcagccctgtgtgctttgcacatttaccttacagtggtaagcagagaccatctgtgaccatagcctagctagcattttaaaaggggaaattttgttctctaggttttccccc

SEQ ID NO: 31912 - DNA, 1545 bp, Homo sapiens
  source 1..1545: mol_type = unassigned DNA
attttgagaccagacaactggactcatgtcttccaactcaaggtaccagtcagtggccaagacctggagggcaagcaccttcatccccaagctatgaaaactcactccactccctgaaaaatcgagttgagcagcaacttcacgagcatttgcaagatgcaatgtccttcttaaaggatgtctgtgagcagtctcgaatggaggatcgtttagacagactggatgatgcaatccatgtgctgcggaaccatgctgtgggaccttccaccagtttgcctgctggtcacagtgatatacatagtttattgggaccatcccataatgcaccaattggaagcctcaattcaaactatggaggatcaagccttgttgcaagcagtcgatcagcttcaatggttggaactcatcgggaagactctgtcagtctcaatggcaatcattcagtcctgtctagtacagtcactacttcaagcacagacctgaaccataaaacacaagaaaattatagaggtggcttgcaaagtcagtctggaactgttgttacaacagaaatcaagactgaaaacaaagaaaaggatgaaaaccttcatgaacctccttcatcagatgacatgaagtcagatgatgaatcctcccaaaaagatatcaaggtttcatctagaggcagaacaagtactaatgaagatgaggatttgaaccctgaacagaagatagaaagggagaaggagaggcggatggctaacaatgccagagaacgcttacgcgtgcgggatattaatgaagcattcaaagagcttggccgaatgtgtcagcttcacttgaagagtgaaaaaccccaaacaaaactccttattcttcatcaagccgtggcagtcatccttagtctagaacagcaagtcagagagaggaaccttaaccccaaagcagcctgccttaagagaagggaagaagaaaaagtttctgccgtatcggcagagccgccaaccacactgccaggaacccatcctgggcttagtgaaactaccaaccctatgggtcatatgtaaacatcagccagttccagagttatcagtaggctagatagaaggtgacctctcctcataaggacttggacaactcagattatctgaagacacaaacctgacaggagggagaagaaaaaacaaaacacttgaaccaagaaactcaaatgtaatcctacgatcaaagcaactggtcaacacttccatcagaagtgaagataggaagctcatcagatagaacatcagcccatgagatgtttgcaacaaatcttttgttgcaagcagtgtgtcgcttctgcacaatcagagactgtctcgatctctccactcaccgtggaagttgccttgtgcctaaactgaattgacaaatgcattgtaactacaaattttatttattgttatgaaactgtaaggtctacatataaagggaaaaagttaatgtggaaagctgatctacactcagctgatgccagcatacattaaagcggttcacgtgcagagaacaaagcagtgacaaccattg

SEQ ID NO: 31913 - DNA, 1809 bp, Homo sapiens
  source 1..1809: mol_type = unassigned DNA
actgaagacttactccctttgcctgtgtggatatatgtcttggagagaggctgtgtgcattagctacaaatagtaacattttcaaaatcaacatgtattgtgcttatcctgtccctggaatgggcagcaattctttgatgtattactacaatgggaaaacggtatatgcaccatccccaaattcagatgatttcaaccgtgaatctcctagttatccatctcctaagccaccaaccagtatgttcgctagcactttctttatgcaagatgggacccacaattcttctgacctttggagttcatcaaatgggatgagccagcctggttttggtggaattctggggacctccacttcccacatgtctcaatccagtagttatggcaaccttcattcacatgaccgcttgagttatcctccacactcagtttcaccaacagacataaacacgagtcttccaccaatgtccagctttcatcgcggcagtaccagcagttcaccttacgttgctgcctcacacactcctcccatcaatggatcagacagcattctaggaaccagagggaatgctgctggaagctcacagacaggtgatgcacttggaaaggctttggcatctatttattctcctgaccataccagcagtagttttccgtcaaatccatcaacaccagttggatcaccttcacctctcacaggtaccagtcagtggccaagacctggagggcaagcaccttcatccccaagctatgaaaactcactccactccctgaaaaatcgagttgagcagcaacttcacgagcatttgcaagatgcaatgtccttcttaaaggatgtctgtgagcagtctcgaatggaggatcgtttagacagactggatgatgcaatccatgtgctgcggaaccatgctgtgggaccttccaccagtttgcctgctggtcacagtgatatacatagtttattgggaccatcccataatgcaccaattggaagcctcaattcaaactatggaggatcaagccttgttgcaagcagtcgatcagcttcaatggttggaactcatcgggaagactctgtcagtctcaatggcaatcattcagtcctgtctagtacagtcactacttcaagcacagacctgaaccataaaacacaagaaaattatagaggtggcttgcaaagtcagtctggaactgttgttacaacagaaatcaagactgaaaacaaagaaaaggatgaaaaccttcatgaacctccttcatcagatgacatgaagtcagatgatgaatcctcccaaaaagatatcaaggtttcatctagaggcagaacaagcagtactaatgaagatgaggatttgaaccctgaacagaagatagaaagggagaaggagaggcggatggctaacaatgccagagaacgcttacgcgtgcgggatattaatgaagcattcaaagagcttggccgaatgtgtcagcttcacttgaagagtgaaaaaccccaaacaaaactccttattcttcatcaagccgtggcagtcatccttagtctagaacagcaagtcagagagaggaaccttaaccccaaagcagcctgccttaagagaagggaagaagaaaaagtttctgccgtatcggcagagccgccaaccacactgccaggaacccatcctgggcttagtgaaactaccaaccctatgggtcatatgtaaacatcagccagttccagagttatcagtaggctagatagaaggtgacctctcctcataaggacttggacaactcagattatctgaagacacaaacctgacaggaggg

SEQ ID NO: 31914 - DNA, 4076 bp, Homo sapiens
  source 1..4076: mol_type = unassigned DNA
ggggaagcccaagcccgttctcccggccaaagtgaactttaatcggggtggttggatgcggagacggggcggcagaagtggccgaagatgaatccccagcaacaacgcatggccgctatagggaccgacaaggagctgagcgacctactggacttcagtgcgatgttttccccacctgttaatagtgggaaaactagaccaactacactgggaagcagtcaattcagtggatcaggtattgatgaaagaggaggtacaacatcttggggaacaagtggtcaaccaagtccttcctatgattcatctagaggttttacagacagccctcattacagtgatcacttgaatgacagtcgattaggagcccatgaaggcttgtccccaacacctttcatgaactcaaatctgatgggaaaaacatcagagagaggctcattttccctgtacagcagagatactggattaccaggctgtcaatctagtctcctgagacaagatctggggcttgggagcccagcacagctatcttcttcaggaaaacctgggacagcatactattcattctctgctacaagttccaggaggagaccactccatgactctgcagcgcttgatcccttgcaagcaaaaaaagtcagaaaggtgcctcctggtttgccttcttctgtatatgcaccatccccaaattcagatgatttcaaccgtgaatctcctagttatccatctcctaagccaccaaccagtatgttcgctagcactttctttatgcaagatgggacccacaattcttctgacctttggagttcatcaaatgggatgagccagcctggttttggtggaattctggggacctccacttcccacatgtctcaatccagtagttatggcaaccttcattcacatgaccgcttgagttatcctccacactcagtttcaccaacagacataaacacgagtcttccaccaatgtccagctttcatcgcggcagtaccagcagttcaccttacgttgctgcctcacacactcctcccatcaatggatcagacagcattctaggaaccagagggaatgctgctggaagctcacagacaggtgatgcacttggaaaggctttggcatctatttattctcctgaccataccagcagtagttttccgtcaaatccatcaacaccagttggatcaccttcacctctcacaggtaccagtcagtggccaagacctggagggcaagcaccttcatccccaagctatgaaaactcactccactccctgcagtctcgaatggaggatcgtttagacagactggatgatgcaatccatgtgctgcggaaccatgctgtgggaccttccaccagtttgcctgctggtcacagtgatatacatagtttattgggaccatcccataatgcaccaattggaagcctcaattcaaactatggaggatcaagccttgttgcaagcagtcgatcagcttcaatggttggaactcatcgggaagactctgtcagtctcaatggcaatcattcagtcctgtctagtacagtcactacttcaagcacagacctgaaccataaaacacaagaaaattatagaggtggcttgcaaagtcagtctggaactgttgttacaacagaaatcaagactgaaaacaaagaaaaggatgaaaaccttcatgaacctccttcatcagatgacatgaagtcagatgatgaatcctcccaaaaagatatcaaggtttcatctagaggcagaacaagcagtactaatgaagatgaggatttgaaccctgaacagaagatagaaagggagaaggagaggcggatggctaacaatgccagagaacgcttacgcgtgcgggatattaatgaagcattcaaagagcttggccgaatgtgtcagcttcacttgaagagtgaaaaaccccaaacaaaactccttattcttcatcaagccgtggcagtcatccttagtctagaacagcaagtcagagagaggaaccttaaccccaaagcagcctgccttaagagaagggaagaagaaaaagtttctgccgtatcggcagagccgccaaccacactgccaggaacccatcctgggcttagtgaaactaccaaccctatgggtcatatgtaaacatcagccagttccagagttatcagtaggctagatagaaggtgacctctcctcataaggacttggacaactcagattatctgaagacacaaacctgacaggagggagaagaaaaaacaaaacacttgaaccaagaaactcaaatgtaatcctacgatcaaagcaactggtcaacacttccatcagaagtgaagataggaagctcatcagatagaacatcagcccatgagatgtttgcaacaaatcttttgttgcaagcagtgtgtcgcttctgcacaatcagagactgtctcgatctctccactcaccgtggaagttgccttgtgcctaaactgaattgacaaatgcattgtaactacaaattttatttattgttatgaaactgtaaggtctacatataaagggaaaaagttaatgtggaaagctgatctacactcagctgatgccagcatacattaaagcggttcacgtgcagagaacaaagcagtgacaaccattggcccttagcattcccggcatacctattagtgtcttaaaaaggaagggaaaagtcttttgttgccctctcctatcctcttgccatatgaatagcgttttccatgaaataggaaaatattacttggtatagcatttctcttgctctcattttttgatttatttttattttctctttgtgggtgttatatttgatctctaaatctgaacagtttatggtcacagtccagcctcctccgtgcagccctgtgtgctttgcacatttaccttacagtggtaagcagagaccatctgtgaccatagcctagctagcattttaaaaggggaaattttgttctctaggttttcccccaaataaacattgctttatttctaataataaccaagacttttcaagcttctagatctcataggaaagcttgtaatagcaaaattgtaaattacaagggaagaatctactttttagaaatcgctttgttttccaagcagtaagtactacatacagtacttgtaaagtgttagctgtaagtaagcacaaaatacatttaaaatacaaagacgattttttcaggctgtgattatggtgaacataacaaaacccagtagtcaccaaggcaggtagtgtgataaatgaacacaccactctgaggctaattacctaatggaatacaagagcaatggtcacccgtatttccttatcctagcctttatttctctgtcatttggatggctggtcaatggggaagaattgagtgggtgatttaatcaactgcaaaccatctgcccctgtcccaaaatgatgagccagattagcattaaaccagtacttgtcagtccatcttaatactgttcattaaggcactctctgtctctaatccttaggagttgttttaaaagacataatcactttgaacttccatgaaacctgtcttccaccacaacaaccctgggagagaaaaacatgctaaaggaggtatcttggcttaataattccttatagccaatatcaacagtggcaatcagcacacagaggaaaggacccaaatcactatgtagcttaaagatttctgttaatttgaaagaacaaaaacaagacagaacttctggtactctaatcaggatgattcctaacaagtcagtcatttgtgaacttagtggactttttggttactttaatttgcatatattctccagttacatcggactctatctgtggccttgttcttcatttcagtgttaatcagctaaacagaagttgttgcttatgatgtgtgagtgaacatatgccactgcctggcctttttttcttcagagcttgttgtctttttcgctatattagactttgcagtatgcccagaagctttccttcataaaatagaaagaaaaaaacatttggcttatttttcactgtagctagtcttttatacaataatcttgtaagaaaa

SEQ ID NO: 31915 - DNA, 1544 bp, Homo sapiens
  source 1..1544: mol_type = unassigned DNA
attttgagaccagacaactggactcatgtcttccaactcaagtaccagtcagtggccaagacctggagggcaagcaccttcatccccaagctatgaaaactcactccactccctgaaaaatcgagttgagcagcaacttcacgagcatttgcaagatgcaatgtccttcttaaaggatgtctgtgagcagtctcgaatggaggatcgtttagacagactggatgatgcaatccatgtgctgcggaaccatgctgtgggaccttccaccagtttgcctgctggtcacagtgatatacatagtttattgggaccatcccataatgcaccaattggaagcctcaattcaaactatggaggatcaagccttgttgcaagcagtcgatcagcttcaatggttggaactcatcgggaagactctgtcagtctcaatggcaatcattcagtcctgtctagtacagtcactacttcaagcacagacctgaaccataaaacacaagaaaattatagaggtggcttgcaaagtcagtctggaactgttgttacaacagaaatcaagactgaaaacaaagaaaaggatgaaaaccttcatgaacctccttcatcagatgacatgaagtcagatgatgaatcctcccaaaaagatatcaaggtttcatctagaggcagaacaagtactaatgaagatgaggatttgaaccctgaacagaagatagaaagggagaaggagaggcggatggctaacaatgccagagaacgcttacgcgtgcgggatattaatgaagcattcaaagagcttggccgaatgtgtcagcttcacttgaagagtgaaaaaccccaaacaaaactccttattcttcatcaagccgtggcagtcatccttagtctagaacagcaagtcagagagaggaaccttaaccccaaagcagcctgccttaagagaagggaagaagaaaaagtttctgccgtatcggcagagccgccaaccacactgccaggaacccatcctgggcttagtgaaactaccaaccctatgggtcatatgtaaacatcagccagttccagagttatcagtaggctagatagaaggtgacctctcctcataaggacttggacaactcagattatctgaagacacaaacctgacaggagggagaagaaaaaacaaaacacttgaaccaagaaactcaaatgtaatcctacgatcaaagcaactggtcaacacttccatcagaagtgaagataggaagctcatcagatagaacatcagcccatgagatgtttgcaacaaatcttttgttgcaagcagtgtgtcgcttctgcacaatcagagactgtctcgatctctccactcaccgtggaagttgccttgtgcctaaactgaattgacaaatgcattgtaactacaaattttatttattgttatgaaactgtaaggtctacatataaagggaaaaagttaatgtggaaagctgatctacactcagctgatgccagcatacattaaagcggttcacgtgcagagaacaaagcagtgacaaccattg

SEQ ID NO: 31916 - DNA, 1598 bp, Homo sapiens; identical to SEQ ID NO: 31910
  source 1..1598: mol_type = unassigned DNA

SEQ ID NO: 31917 - DNA, 3956 bp, Homo sapiens
  source 1..3956: mol_type = unassigned DNA
gtcttggagagaggctgtgtgcattagctacaaatagtaacattttcaaaatcaacatgtattgtgcttatcctgtccctggaatgggcagcaattctttgatgtattactacaatgggaaaacggtatatgcaccatccccaaattcagatgatttcaaccgtgaatctcctagttatccatctcctaagccaccaaccagtatgttcgctagcactttctttatgcaagatgggacccacaattcttctgacctttggagttcatcaaatgggatgagccagcctggttttggtggaattctggggacctccacttcccacatgtctcaatccagtagttatggcaaccttcattcacatgaccgcttgagttatcctccacactcagtttcaccaacagacataaacacgagtcttccaccaatgtccagctttcatcgcggcagtaccagcagttcaccttacgttgctgcctcacacactcctcccatcaatggatcagacagcattctaggaaccagagggaatgctgctggaagctcacagacaggtgatgcacttggaaaggctttggcatctatttattctcctgaccataccagcagtagttttccgtcaaatccatcaacaccagttggatcaccttcacctctcacaggtaccagtcagtggccaagacctggagggcaagcaccttcatccccaagctatgaaaactcactccactccctgcagtctcgaatggaggatcgtttagacagactggatgatgcaatccatgtgctgcggaaccatgctgtgggaccttccaccagtttgcctgctggtcacagtgatatacatagtttattgggaccatcccataatgcaccaattggaagcctcaattcaaactatggaggatcaagccttgttgcaagcagtcgatcagcttcaatggttggaactcatcgggaagactctgtcagtctcaatggcaatcattcagtcctgtctagtacagtcactacttcaagcacagacctgaaccataaaacacaagaaaattatagaggtggcttgcaaagtcagtctggaactgttgttacaacagaaatcaagactgaaaacaaagaaaaggatgaaaaccttcatgaacctccttcatcagatgacatgaagtcagatgatgaatcctcccaaaaagatatcaaggtttcatctagaggcagaacaagcagtactaatgaagatgaggatttgaaccctgaacagaagatagaaagggagaaggagaggcggatggctaacaatgccagagaacgcttacgcgtgcgggatattaatgaagcattcaaagagcttggccgaatgtgtcagcttcacttgaagagtgaaaaaccccaaacaaaactccttattcttcatcaagccgtggcagtcatccttagtctagaacagcaagtcagagagaggaaccttaaccccaaagcagcctgccttaagagaagggaagaagaaaaagtttctgccgtatcggcagagccgccaaccacactgccaggaacccatcctgggcttagtgaaactaccaaccctatgggtcatatgtaaacatcagccagttccagagttatcagtaggctagatagaaggtgacctctcctcataaggacttggacaactcagattatctgaagacacaaacctgacaggagggagaagaaaaaacaaaacacttgaaccaagaaactcaaatgtaatcctacgatcaaagcaactggtcaacacttccatcagaagtgaagataggaagctcatcagatagaacatcagcccatgagatgtttgcaacaaatcttttgttgcaagcagtgtgtcgcttctgcacaatcagagactgtctcgatctctccactcaccgtggaagttgccttgtgcctaaactgaattgacaaatgcattgtaactacaaattttatttattgttatgaaactgtaaggtctacatataaagggaaaaagttaatgtggaaagctgatctacactcagctgatgccagcatacattaaagcggttcacgtgcagagaacaaagcagtgacaaccattggcccttagcattcccggcatacctattagtgtcttaaaaaggaagggaaaagtcttttgttgccctctcctatcctcttgccatatgaatagcgttttccatgaaataggaaaatattacttggtatagcatttctcttgctctcattttttgatttatttttattttctctttgtgggtgttatatttgatctctaaatctgaacagtttatggtcacagtccagcctcctccgtgcagccctgtgtgctttgcacatttaccttacagtggtaagcagagaccatctgtgaccatagcctagctagcattttaaaaggggaaattttgttctctaggttttcccccaaataaacattgctttatttctaataataaccaagacttttcaagcttctagatctcataggaaagcttgtaatagcaaaattgtaaattacaagggaagaatctactttttagaaatcgctttgttttccaagcagtaagtactacatacagtacttgtaaagtgttagctgtaagtaagcacaaaatacatttaaaatacaaagacgattttttcaggctgtgattatggtgaacataacaaaacccagtagtcaccaaggcaggtagtgtgataaatgaacacaccactctgaggctaattacctaatggaatacaagagcaatggtcacccgtatttccttatcctagcctttatttctctgtcatttggatggctggtcaatggggaagaattgagtgggtgatttaatcaactgcaaaccatctgcccctgtcccaaaatgatgagccagattagcattaaaccagtacttgtcagtccatcttaatactgttcattaaggcactctctgtctctaatccttaggagttgttttaaaagacataatcactttgaacttccatgaaacctgtcttccaccacaacaaccctgggagagaaaaacatgctaaaggaggtatcttggcttaataattccttatagccaatatcaacagtggcaatcagcacacagaggaaaggacccaaatcactatgtagcttaaagatttctgttaatttgaaagaacaaaaacaagacagaacttctggtactctaatcaggatgattcctaacaagtcagtcatttgtgaacttagtggactttttggttactttaatttgcatatattctccagttacatcggactctatctgtggccttgttcttcatttcagtgttaatcagctaaacagaagttgttgcttatgatgtgtgagtgaacatatgccactgcctggcctttttttcttcagagcttgttgtctttttcgctatattagactttgcagtatgcccagaagctttccttcataaaatagaaagaaaaaaacatttggcttatttttcactgtagctagtcttttatacaataatcttgtaagaaaatttcttgaattctaaatattactctttctagatttttgaaatcaaaaagttttcagtaaaaagtttcttactttattttattatattaggtagtaaaaaatgtagggttatttaccataacctgttcattaatatcagaaatttacaatagcattttaagaccatagtaggattctagcataccgtgtagtacctatggagtattgtaagagctaattgttggagatgaattgcttctcatcttgttctccagtttccattgttggtttattgcagatttgtatcctgtgtcaaattcaaggtattattgataaaccttttcaaccagcagcaagaagttcaaatttttttctgtcactgtaacagaaaacacaatatgtatataacatttatgtagcaataaatgtgccatctttttttt

SEQ ID NO: 31918 - DNA, 1555 bp, Homo sapiens
  source 1..1555: mol_type = unassigned DNA
ggccgggcggagccctccgcccccggccggggcggccttgccattggcccctccctcgcctataaggcgggggccggcggggccgtgggagcgcgcgggagcgcacggcggggcgcggccgacgctgggacgcggcgcacggagggacgcggccggcgcccatggcgttcgcgctgctgcggcccgtcggcgcgcacgtgctgtacccggacgtgcggctgctgagcgaggacgaggagaaccgcagcgagagcgacgcgtcggaccagtcgttcggctgctgcgagggcccggaggcggcgcggcgcggcccgggccccgggggcgggcggcgggcgggcggcggcggcggcgcgggccccgtggtggtggtgcgacagcggcaggcggccaacgcgcgggagcgggaccgcactcagagcgtgaacacggccttcacggcgctgcgcacgctcatccccaccgagccggtggaccgcaagctgtccaagatcgagaccgtgcgcctggcgtccagctacatcgcgcacctggccaacgtgctgctgctgggcgactcggccgacgacgggcagccgtgcttccgtgccgcgggcagtgccaagggcgccgtccccgccgccgccgacggcggccgccagccgcgctccatctgcaccttctgcctcagcaaccagcgcaaggggggtggccgtcgtgacctggggggcagctgcttgaaggtgaggggggtggccccccttcgagggccacggagatgagcctggaccctggagaaggaggccaggagccagccactggctggacagggaagaagaccccaggagccaagcccaccccttctttgtgtagggaccgggggaccatggcctgttccgggacactctgggcagggccctcgggacatctccacccgatcctggagagctgtgaggatccattcagcctgcccagctctggctggtcagagacaaggcagaacttttggaaaaacaaagactgttggtgacagggtgtgtgtgtatctgtgcgtgagtgtgagtgtgtgtgagagagaattggtgagtttaaaataaaagctatttttaaataaaagacgtcgttctgagctgaggagagtcccgtggacatcggaggtcagaggtgggccctcccctggacctagagagaggcacagatgttctgggggctgccctgagccctggaagggtgggggtggggcgggggaaggcaggcagagccccctctccgggcgccataaccaaactttcctcagtctgctgtttatcagatgttcttaacaactgttaggtgtctgatatggttggtaaagaaatcttaattttacttatttttgaataaggcctgtgttcatttcattcacatggttcaaaactcagaaggtaccagagggtatgtgttgaaaagtctccgtgcccctgtcctccagccaccagctctcctctctgcaagcagcctagggcaccagtttcctgtgatgtcccattcactatgaatgatcaggcaaatacacaaatgacagcacatcgtacac

SEQ ID NO: 31919 - DNA, 3039 bp, Homo sapiens
  source 1..3039: mol_type = unassigned DNA
aggaggggtaggcgctgcccgcgcgcagaggccgcgcccctcctggccccggcttcttggctgtcaaacagatgcagcaacgtcggctcctgccgaggagcccaaggggtcccgggatccgccgcacaggctggcactgcttgaagaggaggctactcggagactgcgccgcgcggattggaggctccccaaatattttgcgatctgaggatccagctcaagtgaggtgccataggacgtgttcctgagtttgcattgcacggagaccttcctggaatttttcatttgcaagtcggcttaaccaattttgcattgagtcctaggctgcttgcactctgaatttgggctattcaggtagtgtgctcaaagttgaaaccgcatacagcacaactcaagtttgcatcagactgggaagcgaacttaagccagcggtgcgtggcccaggagtgggaaaggaaatggatgcctgaagtggaagaggtggtgcagagggggcaccgcccatgctgccctgcttccaactgctgcgcatagggggcggcaggggcggtgatctctacaccttccacccccccgccggggctggctgcacctatcgcttgggccacagggccgacctgtgtgatgtggccctgcggccccagcaggagcctggcctcatctctgggatccacgccgaactgcatgccgagccccggggtgatgactggagggtcagcctggaagaccacagcagccaaggtactttggtcaataatgtccgactcccaagaggtcacaggctggaattgagtgatggagacctcctgacctttggccctgaagggcccccaggaaccagcccctcggagttctacttcatgttccaacaagtacgagtcaagcctcaggactttgctgccattaccatcccacggtctaggggagaagcccgggttggggctggtttccggcctatgctgccctcccagggggctccacagcggcctctcagcaccttctcccctgcccccaaggccacactgatcctaaactccataggcagcctcagcaagctccggccccagcccctcaccttctcccctagttggggtggaccaaagagcctgcctgttcccgccccacctggggaaatggggaccacgccttctgctccaccacaacgcaatcggaggaaatctgttcaccgagtgttggcggaactggatgatgagagtgagcctcctgagaacccgccaccggtccttatggagcccaggaagaaactccgtgtagacaaagccccactgactcccactggaaatcgacgtggccgtcctcggaagtacccagtgagcgctcccatggctccccctgcagttgggggcggggagccctgtgcagctccttgttgctgcctgccccaggaagagacagtggcctgggttcagtgtgatggctgtgacgtctggttccatgtggcctgtgttggctgcagcatccaggctgccagggaggccgacttccgatgcccagggtgccgggctggcattcagacctaaggtccactgccaaggcaccatcggacacacctgcccatgagtagacacagcagcgagcaaataggtctgataaataccccccttcccttccctccccaggagggaatgactacagggaagaaggatggattgatgtggactcattcagggcctggagcagaccctggtggccaagacagaagagatggtttcctgccaaagatattgccacctccaggaaattgccagtgagctggaagttcccactattacaagccataaggccatgttgccatggacaccagaatatctgtagtcagagcacctatcagttgcaaaagccatgcctgcaaccgatggaaaatgtaagagggagttcttaaggttcttggtggcatcacccaaggcattctgggaaaacctagggcctggccccaaaacttccctactctgtggctagtcctgctgccaacaaaatcgtagcgacctggcttttcacagctttgcttttatttccaagtcaaggacaagccgcttcattcactcctgggcatttactcttcttgtgggtctgtgatattccttgctttccagggagaatgtgcttggcaaggtctggagaactaattcagaatcttaggggaaggggagagatggaaatacaaacctgcttactggaaaggtgcaaatatatgggttgagctggaggtaggaatacaggtaattaaggtttctagtttaagggaaaacagatctattgccatttaaataaggtaactgggatttggttaagttcacaaagatagcagaagatttatttacaggcttcacctgtactgtcagggcaagagaaagcctggtaaaccagctacagcagtttaccagtgtgatggctgtgacacagctccactccacgggtggacacagcagagggcaactgggctggcctggttcagtgtgaatcaaaccgcttaacccacacatggtacatgtgattttcttttgtgagccttacaccaagccaaactattgtcaaagcatcatttctatagaaataaagccttatcttgacctgttctattaaaacctgccacacccgccctttcctacctagatttaatgagcccaagtttttaaaatggaagaaatgactctggggcaaagacccctaatgaactagtggcagagccaggaataaaacttgagtaactaatgagtcacttatgggcagagtatgcaaaaaccttaagtggaaaccaaatagaccctggtatcaagaaagcacaaagtattaatagaagtttctggttggggtgatctaggttcaacagaaataagatgatttctaagtataaagccatttaagaattccagagtagggtgggaaagcaaaaagccagctctgaacaggtaacagctacatggtgactgagtctatgggcaaaagttcttgcatcacaggcttttgggaactagcctatcacagggccctgtacaaataaacttggctgcaatccca

SEQ ID NO: 31920 - DNA, 3290 bp, Homo sapiens
  source 1..3290: mol_type = unassigned DNA
tccgaaggaggggtaggcgctgcccgcgcgcagaggccgcgcccctcctggccccggcttcttggctgtcaaacagatgcagcaacgtcggctcctgccgaggagcccaaggggtcccgggatccgccgcacaggctggcactgcttgaagaggaggctactcggagactgcgccgcgcggtggattcattgccctcggaggttcaaccagttatgagtgagggattggccagaagatcggggcgcaggcaagcaggagtgctctattaggataagcaagtttgacaggaagaagctactcttctccgaattacacagaggtgatgtgttcgtattgcacgtagacgtgtgtataacaggacctccttccccgcgccccgccaccccgacacacacaggagctgcctaaagtatccttgccttgcagattggaggctccccaaatattttgcgatctgaggatccagctcaagtgaggtgccataggacgtgttcctgagtttgcattgcacggagaccttcctggaatttttcatttgcaagtcggcttaaccaattttgcattgagtcctaggctgcttgcactctgaatttgggctattcaggtagtgtgctcaaagttgaaaccgcatacagcacaactcaagtttgcatcagactgggaagcgaacttaagccagcggtgcgtggcccaggagtgggaaaggaaatggatgcctgaagtggaagaggtggtgcagagggggcaccgcccatgctgccctgcttccaactgctgcgcatagggggcggcaggggcggtgatctctacaccttccacccccccgccggggctggctgcacctatcgcttgggccacagggccgacctgtgtgatgtggccctgcggccccagcaggagcctggcctcatctctgggatccacgccgaactgcatgccgagccccggggtgatgactggagggtcagcctggaagaccacagcagccaaggtactttggtcaataatgtccgactcccaagaggtcacaggctggaattgagtgatggagacctcctgacctttggccctgaagggcccccaggaaccagcccctcggagttctacttcatgttccaacaagtacgagtcaagcctcaggactttgctgccattaccatcccacggtctaggggagaagcccgggttggggctggtttccggcctatgctgccctcccagggggctccacagcggcctctcagcaccttctcccctgcccccaaggccacactgatcctaaactccataggcagcctcagcaagctccggccccagcccctcaccttctcccctagttggggtggaccaaagagcctgcctgttcccgccccacctggggaaatggggaccacgccttctgctccaccacaacgcaatcggaggaaatctgttcaccgagtgttggcggaactggatgatgagagtgagcctcctgagaacccgccaccggtccttatggagcccaggaagaaactccgtgtagacaaagccccactgactcccactggaaatcgacgtggccgtcctcggaagtacccagtgagcgctcccatggctccccctgcagttgggggcggggagccctgtgcagctccttgttgctgcctgccccaggaagagacagtggcctgggttcagtgtgatggctgtgacgtctggttccatgtggcctgtgttggctgcagcatccaggctgccagggaggccgacttccgatgcccagggtgccgggctggcattcagacctaaggtccactgccaaggcaccatcggacacacctgcccatgagtagacacagcagcgagcaaataggtctgataaataccccccttcccttccctccccaggagggaatgactacagggaagaaggatggattgatgtggactcattcagggcctggagcagaccctggtggccaagacagaagagatggtttcctgccaaagatattgccacctccaggaaattgccagtgagctggaagttcccactattacaagccataaggccatgttgccatggacaccagaatatctgtagtcagagcacctatcagttgcaaaagccatgcctgcaaccgatggaaaatgtaagagggagttcttaaggttcttggtggcatcacccaaggcattctgggaaaacctagggcctggccccaaaacttccctactctgtggctagtcctgctgccaacaaaatcgtagcgacctggcttttcacagctttgcttttatttccaagtcaaggacaagccgcttcattcactcctgggcatttactcttcttgtgggtctgtgatattccttgctttccagggagaatgtgcttggcaaggtctggagaactaattcagaatcttaggggaaggggagagatggaaatacaaacctgcttactggaaaggtgcaaatatatgggttgagctggaggtaggaatacaggtaattaaggtttctagtttaagggaaaacagatctattgccatttaaataaggtaactgggatttggttaagttcacaaagatagcagaagatttatttacaggcttcacctgtactgtcagggcaagagaaagcctggtaaaccagctacagcagtttaccagtgtgatggctgtgacacagctccactccacgggtggacacagcagagggcaactgggctggcctggttcagtgtgaatcaaaccgcttaacccacacatggtacatgtgattttcttttgtgagccttacaccaagccaaactattgtcaaagcatcatttctatagaaataaagccttatcttgacctgttctattaaaacctgccacacccgccctttcctacctagatttaatgagcccaagtttttaaaatggaagaaatgactctggggcaaagacccctaatgaactagtggcagagccaggaataaaacttgagtaactaatgagtcacttatgggcagagtatgcaaaaaccttaagtggaaaccaaatagaccctggtatcaagaaagcacaaagtattaatagaagtttctggttggggtgatctaggttcaacagaaataagatgatttctaagtataaagccatttaagaattccagagtagggtgggaaagcaaaaagccagctctgaacaggtaacagctacatggtgactgagtctatgggcaaaagttcttgcatcacaggcttttgggaactagcctatcacagggccctgtacaaataaacttggctgcaatccca

SEQ ID NO: 31921 - DNA, 3040 bp, Homo sapiens
  source 1..3040: mol_type = unassigned DNA
aggaggggtaggcgctgcccgcgcgcagaggccgcgcccctcctggccccggcttcttggctgtcaaacagatgcagcaacgtcggctcctgccgaggagcccaaggggtcccgggatccgccgcacaggctggcactgcttgaagaggaggctactcggagactgcgccgcgcggattggaggctccccaaatattttgcgatctgaggatccagctcaagtgaggtgccataggacgtgttcctgagtttgcattgcacggagaccttcctggaatttttcatttgcaagtcggcttaaccaattttgcattgagtcctaggctgcttgcactctgaatttgggctattcaggtagtgtgctcaaagttgaaaccgcatacagcacaactcaagtttgcatcagactgggaagcgaacttaagccagcggtgcgtggcccaggagtgggaaaggaaatggatgcctgaagtggaagaggtggtgcagagggggcaccgcccatgctgccctgcttccaactgctgcgcatagggggcggcaggggcggtgatctctacaccttccacccccccgccggggctggctgcacctatcgcttgggccacagggccgacctgtgtgatgtggccctgcggccccagcaggagcctggcctcatctctgggatccacgccgaactgcatgccgagccccggggtgatgactggagggtcagcctggaagaccacagcagccaaggtactttggtcaataatgtccgactcccaagaggtcacaggctggaattgagtgatggagacctcctgacctttggccctgaagggcccccaggaaccagcccctcggagttctacttcatgttccaacaagtacgagtcaagcctcaggactttgctgccattaccatcccacggtctaggggagaagcccgggttggggctggtttccggcctatgctgccctcccagggggctccacagcggcctctcagcaccttctcccctgcccccaaggccacactgatcctaaactccataggcagcctcagcaagctccggccccagcccctcaccttctcccctagttggggtggaccaaagagcctgcctgttcccgccccacctggggaagtggggaccacgccttctgctccaccccaacgcaatcggaggaaatctgttcaccgagtgttggcggaactggatgatgagagtgagcctcctgagaacccgccaccggtccttatggagcccaggaagaaactccgtgtagacaaagccccactgactcccactggaaatcgacgtggccgtcctcggaagtacccagtgagcgctcccatggctccccctgcagttgggggcggggagccctgtgcagctccttgttgctgcctgccccaggaagagacagtggcctgggttcagtgtgatggctgtgacgtctggttccatgtggcctgtgttggctgcagcatccaggctgccagggaggccgacttccgatgcccagggtgccgggctggcattcagacctaaggtccaccgccaaggcaccatcggacacacctgcccatgagtagacacagcagcgagcaaataggtctgataaataccccccttcccttccctccccaggagggaatgactacagggaagaaggatggattgatgtggactcattcagggcctggagcagaccctggtggccaagacagaagagatggtttcctgccaaagatattgccacctccaggaaattgccagtgagctggaagttcccactattacaagccataaggccatgttgccatggacaccagaatatctgtagtcagagcacctatcagttgcaaaagccatgcttgcaaccgatggaaaatgtaagagggagttcttaaggttcttggtggcatcacccaaggcattctgggaaaacctagggcctggccccaaaacttccctactctgtggctagtcctgctgccaacaaaatcgtagcgacctggcttttcacagctttgcttttatttccaagtcaaggacaagccgcttcattcactcctgggcatttactcttcttgtgggtctgtgatattccttgctttccagggagaatgtgcttggcaaggtctggagaactaattcagaatcttaggggaaggggagagatggaaatacaaacctgcttactggaaaggtgcaaatatatgggttgagctggaggtaggaatacaggtaattaaggtttctagtttaagggaaaacagatctattgccatttaaataaggtaactgggatttggttaagttcacaaagatagcagaagatttatttacaggcttcacctgtactgtcagggcaagagaaagcctggtaaaccagctacagcagtttaccagtgtgatggctgtgacacagctccactccacgggtggacacagcagagggcaactgggctggcctggttcagtgtgaatcaaaccgcttaacccacacatggtacatgtgattttcttttgtgagccttacaccaagccaaactattgtcaaagcatcatttctatagaaataaagccttatcttgacctgttctattaaaacctgccacatccgccctttcctacctagatttaatgagcccaagtttttttacatggaagaaatgactctggggcaaagacccctaatgaactagtggcagagccaggaataaaacttgagtaactaatgagtcacttatgggcagagtatgcaaaaaccttaagtggaaaccaaatagaccctggtatcaagaaagcacaaagtattaatagaagtttctggttggggtgatctaggttcaacagaaataagatgatttctaagtataaagccatttaagaattccagagtagggtgggaaagcaaaaagccagctctgaacaggtaacagctacatggtgactgagtctatgggcaaaagttcttgcatcacaggcttttgggaactagcctatcacagggccctgtacaaataaacttggctgcaatccca

SEQ ID NO: 31922 - DNA, 3291 bp, Homo sapiens
  source 1..3291: mol_type = unassigned DNA
tccgaaggaggggtaggcgctgcccgcgcgcagaggccgcgcccctcctggccccggcttcttggctgtcaaacagatgcagcaacgtcggctcctgccgaggagcccaaggggtcccgggatccgccgcacaggctggcactgcttgaagaggaggctactcggagactgcgccgcgcggtggattcattgccctcggaggttcaaccagttatgagtgagggattggccagaagatcggggcgcaggcaagcaggagtgctctattaggataagcaagtttgacaggaagaagctactcttctccgaattacacagaggtgatgtgttcgtattgcacgtagacgtgtgtataacaggacctccttccccgcgccccgccaccccgacacacacaggagctgcctaaagtatccttgccttgcagattggaggctccccaaatattttgcgatctgaggatccagctcaagtgaggtgccataggacgtgttcctgagtttgcattgcacggagaccttcctggaatttttcatttgcaagtcggcttaaccaattttgcattgagtcctaggctgcttgcactctgaatttgggctattcaggtagtgtgctcaaagttgaaaccgcatacagcacaactcaagtttgcatcagactgggaagcgaacttaagccagcggtgcgtggcccaggagtgggaaaggaaatggatgcctgaagtggaagaggtggtgcagagggggcaccgcccatgctgccctgcttccaactgctgcgcatagggggcggcaggggcggtgatctctacaccttccacccccccgccggggctggctgcacctatcgcttgggccacagggccgacctgtgtgatgtggccctgcggccccagcaggagcctggcctcatctctgggatccacgccgaactgcatgccgagccccggggtgatgactggagggtcagcctggaagaccacagcagccaaggtactttggtcaataatgtccgactcccaagaggtcacaggctggaattgagtgatggagacctcctgacctttggccctgaagggcccccaggaaccagcccctcggagttctacttcatgttccaacaagtacgagtcaagcctcaggactttgctgccattaccatcccacggtctaggggagaagcccgggttggggctggtttccggcctatgctgccctcccagggggctccacagcggcctctcagcaccttctcccctgcccccaaggccacactgatcctaaactccataggcagcctcagcaagctccggccccagcccctcaccttctcccctagttggggtggaccaaagagcctgcctgttcccgccccacctggggaagtggggaccacgccttctgctccaccccaacgcaatcggaggaaatctgttcaccgagtgttggcggaactggatgatgagagtgagcctcctgagaacccgccaccggtccttatggagcccaggaagaaactccgtgtagacaaagccccactgactcccactggaaatcgacgtggccgtcctcggaagtacccagtgagcgctcccatggctccccctgcagttgggggcggggagccctgtgcagctccttgttgctgcctgccccaggaagagacagtggcctgggttcagtgtgatggctgtgacgtctggttccatgtggcctgtgttggctgcagcatccaggctgccagggaggccgacttccgatgcccagggtgccgggctggcattcagacctaaggtccaccgccaaggcaccatcggacacacctgcccatgagtagacacagcagcgagcaaataggtctgataaataccccccttcccttccctccccaggagggaatgactacagggaagaaggatggattgatgtggactcattcagggcctggagcagaccctggtggccaagacagaagagatggtttcctgccaaagatattgccacctccaggaaattgccagtgagctggaagttcccactattacaagccataaggccatgttgccatggacaccagaatatctgtagtcagagcacctatcagttgcaaaagccatgcttgcaaccgatggaaaatgtaagagggagttcttaaggttcttggtggcatcacccaaggcattctgggaaaacctagggcctggccccaaaacttccctactctgtggctagtcctgctgccaacaaaatcgtagcgacctggcttttcacagctttgcttttatttccaagtcaaggacaagccgcttcattcactcctgggcatttactcttcttgtgggtctgtgatattccttgctttccagggagaatgtgcttggcaaggtctggagaactaattcagaatcttaggggaaggggagagatggaaatacaaacctgcttactggaaaggtgcaaatatatgggttgagctggaggtaggaatacaggtaattaaggtttctagtttaagggaaaacagatctattgccatttaaataaggtaactgggatttggttaagttcacaaagatagcagaagatttatttacaggcttcacctgtactgtcagggcaagagaaagcctggtaaaccagctacagcagtttaccagtgtgatggctgtgacacagctccactccacgggtggacacagcagagggcaactgggctggcctggttcagtgtgaatcaaaccgcttaacccacacatggtacatgtgattttcttttgtgagccttacaccaagccaaactattgtcaaagcatcatttctatagaaataaagccttatcttgacctgttctattaaaacctgccacatccgccctttcctacctagatttaatgagcccaagtttttttacatggaagaaatgactctggggcaaagacccctaatgaactagtggcagagccaggaataaaacttgagtaactaatgagtcacttatgggcagagtatgcaaaaaccttaagtggaaaccaaatagaccctggtatcaagaaagcacaaagtattaatagaagtttctggttggggtgatctaggttcaacagaaataagatgatttctaagtataaagccatttaagaattccagagtagggtgggaaagcaaaaagccagctctgaacaggtaacagctacatggtgactgagtctatgggcaaaagttcttgcatcacaggcttttgggaactagcctatcacagggccctgtacaaataaacttggctgcaatccca

SEQ ID NO: 31923 - DNA, 3040 bp, Homo sapiens; identical to SEQ ID NO: 31921
  source 1..3040: mol_type = unassigned DNA

SEQ ID NO: 31924 - DNA, 2993 bp, Homo sapiens
  source 1..2993: mol_type = unassigned DNA
cccggcttcttggctgtcaaacagatgcagcaacgtcggctcctgccgaggagcccaaggggtcccgggatccgccgcacaggctggcactgcttgaagaggaggctactcggagactgcgccgcgcggattggaggctccccaaatattttgtgatctgaggatccagctcaagtgaggtgccataggacgtgttcctgagtttgcattgcacggagaccttcctggaatttttcatttgcaagtcggcttaaccaattttgcattgagtcctaggctgcttgcactctgaatttgggctattcaggtagtgtgctcaaagttgaaaccgcatacagcacaactcaagtttgcatcagactgggaagcgaacttaagccagcggtgcgtggcccaggagtgggaaaggaaatggatgcctgaagtggaagaggtggtgcagagggggcaccgcccatgctgccctgcttccaactgctgcgcatagggggcggcaggggcggtgatctctacaccttccacccccccgccggggctggctgcacctatcgcttgggccacagggccgacctgtgtgatgtggccctgcggccccagcaggagcctggcctcatctctgggatccacgccgaactgcatgccgagccccggggtgatgactggagggtcagcctggaagaccacagcagccaaggtactttggtcaataatgtccgactcccaagaggtcacaggctggaattgagtgatggagacctcctgacctttggccctgaagggcccccaggaaccagcccctcggagttctacttcatgttccaacaagtacgagtcaagcctcaggactttgctgccattaccatcccacggtctaggggagaagcccgggttggggctggtttccggcctatgctgccctcccagggggctccacagcggcctctcagcaccttctcccctgcccccaaggccacactgatcctaaactccataggcagcctcagcaagctccggccccagcccctcaccttctcccctagttggggtggaccaaagagcctgcctgttcccgccccacctggggaagtggggaccacgccttctgctccaccccaacgcaatcggaggaaatctgttcaccgagtgttggcggaactggatgatgagagtgagcctcctgagaacccgccaccggtccttatggagcccaggaagaaactccgtgtagacaaagccccactgactcccactggaaatcgacgtggccgtcctcggaagtacccagtgagcgctcccatggctccccctgcagttgggggcggggagccctgtgcagctccttgttgctgcctgccccaggaagagacagtggcctgggttcagtgtgatggctgtgacgtctggttccatgtggcctgtgttggctgcagcatccaggctgccagggaggccgacttccgatgcccagggtgccgggctggcattcagacctaaggtccaccgccaaggcaccatcggacacacctgcccatgagtagacacagcagcgagcaaataggtctgataaataccccccttcccttccctccccaagagggaatgactacagggaagaaggatggattgatgtggactcattcagggcctggagcagaccctggtggccaagacagaagagatggtttcctgccaaagatattgccacctccaggaaattgccagtgagctggaagttcccactattacaagccataaggccatgttgccatggacaccagaatatctgtagtcagagcacctatcagttgcaaaagccatgcctgcaaccgatggaaaatgtaagagggagttcttaaggttcttggtggcatcacccaaggcattctgggaaaacctagggcctggccccaaaacttccctactctgtggctagtcctgctgccaacaaaatcgtagcgacctggcttttcacagctttgcttttatttccaagtcaaggacaagccgcttcattcactcctgggcatttactcttcttgtgggtctgtgatattccttgctttccagggagaatgtgcttggcaaggtctggagaactaattcagaatcttaggggaaggggagagatggaaatacaaacctgcttactggaaaggtgcaaatatatgggttgagctggaggtaggaatacaggtaattaaggtttctagtttaagggaaaacagatctattgccatttaaataaggtaactgggatttggttaagttcacaaagatagcagaagatttatttacaggcttcacctgtactgtcagggcaagagaaagcctggtaaaccagctacagcagtttaccagtgtgatggctgtgacacagctccactccacgggtggacacagcagagggcaactgggctggcctggttcagtgtgaatcaaaccgcttaacccacacatggtacatgtgattttcttttgtgagccttacaccaagccaaactattgtcaaagcatcatttctatagaaataaagccttatcttgacctgttctattaaaacctgccacatccgccctttcctacctagatttaatgagcccaagtttttttacatggaagaaatgactctggggcaaagacccctaatgaactagtggcagagccaggaataaaacttgagtaactaatgagtcacttatgggcagagtatgcaaaaaccttaagtggaaaccaaatagaccctggtatcaagaaagcacaaagtattaatagaagtttctggttggggtgatctaggttcaacagaaataagatgatttctaagtataaagccatttaagaattccagagtagggtgggaaagcaaaaagccagctctgaacaggtaacagctacatggtgactgagtctatgggcaaaagttcttgcatcacaggcttttgggaactagcctatcacagggccctgtacaaataaacttggctgcaatccca

SEQ ID NO: 31925 - DNA, 3291 bp, Homo sapiens
  source 1..3291: mol_type = unassigned DNA
tccgaaggaggggtaggcgctgcccgcgcgcagaggccgcgcccctcctggccccggcttcttggctgtcaaacagatgcagcaacgtcggctcctgccgaggagcccaaggggtcccgggatccgccgcacaggctggcactgcttgaagaggaggctactcggagactgcgccgcgcggtggattcattgccctcggaggttcaaccagttatgagtgagggattggccagaagatcggggcgcaggcaagcaggagtgctctattaggataagcaagtttgacaggaagaagctgctcttctccgaattacacagaggtgatgtgttcgtattgcacgtagacgtgtgtataacaggacctccttccccgcgccccgccaccccgacacacacaggagctgcctaaagtatccttgccttgcagattggaggctccccaaatattttgtgatctgaggatccagctcaagtgaggtgccataggacgtgttcctgagtttgcattgcacggagaccttcctggaatttttcatttgcaagtcggcttaaccaattttgcattgagtcctaggctgcttgcactctgaatttgggctattcaggtagtgtgctcaaagttgaaaccgcatacagcacaactcaagtttgcatcagactgggaagcgaacttaagccagcggtgcgtggcccaggagtgggaaaggaaatggatgcctgaagtggaagaggtggtgcagagggggcaccgcccatgctgccctgcttccaactgctgcgcatagggggcggcaggggcggtgatctctacaccttccacccccccgccggggctggctgcacctatcgcttgggccacagggccgacctgtgtgatgtggccctgcggccccagcaggagcctggcctcatctctgggatccacgccgaactgcatgccgagccccggggtgatgactggagggtcagcctggaagaccacagcagccaaggtactttggtcaataatgtccgactcccaagaggtcacaggctggaattgagtgatggagacctcctgacctttggccctgaagggcccccaggaaccagcccctcggagttctacttcatgttccaacaagtacgagtcaagcctcaggactttgctgccattaccatcccacggtctaggggagaagcccgggttggggctggtttccggcctatgctgccctcccagggggctccacagcggcctctcagcaccttctcccctgcccccaaggccacactgatcctaaactccataggcagcctcagcaagctccggccccagcccctcaccttctcccctagttggggtggaccaaagagcctgcctgttcccgccccacctggggaagtggggaccacgccttctgctccaccccaacgcaatcggaggaaatctgttcaccgagtgttggcggaactggatgatgagagtgagcctcctgagaacccgccaccggtccttatggagcccaggaagaaactccgtgtagacaaagccccactgactcccactggaaatcgacgtggccgtcctcggaagtacccagtgagcgctcccatggctccccctgcagttgggggcggggagccctgtgcagctccttgttgctgcctgccccaggaagagacagtggcctgggttcagtgtgatggctgtgacgtctggttccatgtggcctgtgttggctgcagcatccaggctgccagggaggccgacttccgatgcccagggtgccgggctggcattcagacctaaggtccaccgccaaggcaccatcggacacacctgcccatgagtagacacagcagcgagcaaataggtctgataaataccccccttcccttccctccccaagagggaatgactacagggaagaaggatggattgatgtggactcattcagggcctggagcagaccctggtggccaagacagaagagatggtttcctgccaaagatattgccacctccaggaaattgccagtgagctggaagttcccactattacaagccataaggccatgttgccatggacaccagaatatctgtagtcagagcacctatcagttgcaaaagccatgcctgcaaccgatggaaaatgtaagagggagttcttaaggttcttggtggcatcacccaaggcattctgggaaaacctagggcctggccccaaaacttccctactctgtggctagtcctgctgccaacaaaatcgtagcgacctggcttttcacagctttgcttttatttccaagtcaaggacaagccgcttcattcactcctgggcatttactcttcttgtgggtctgtgatattccttgctttccagggagaatgtgcttggcaaggtctggagaactaattcagaatcttaggggaaggggagagatggaaatacaaacctgcttactggaaaggtgcaaatatatgggttgagctggaggtaggaatacaggtaattaaggtttctagtttaagggaaaacagatctattgccatttaaataaggtaactgggatttggttaagttcacaaagatagcagaagatttatttacaggcttcacctgtactgtcagggcaagagaaagcctggtaaaccagctacagcagtttaccagtgtgatggctgtgacacagctccactccacgggtggacacagcagagggcaactgggctggcctggttcagtgtgaatcaaaccgcttaacccacacatggtacatgtgattttcttttgtgagccttacaccaagccaaactattgtcaaagcatcatttctatagaaataaagccttatcttgacctgttctattaaaacctgccacatccgccctttcctacctagatttaatgagcccaagtttttttacatggaagaaatgactctggggcaaagacccctaatgaactagtggcagagccaggaataaaacttgagtaactaatgagtcacttatgggcagagtatgcaaaaaccttaagtggaaaccaaatagaccctggtatcaagaaagcacaaagtattaatagaagtttctggttggggtgatctaggttcaacagaaataagatgatttctaagtataaagccatttaagaattccagagtagggtgggaaagcaaaaagccagctctgaacaggtaacagctacatggtgactgagtctatgggcaaaagttcttgcatcacaggcttttgggaactagcctatcacagggccctgtacaaataaacttggctgcaatccca

SEQ ID NO: 31926 - DNA, 3291 bp, Homo sapiens
  source 1..3291: mol_type = unassigned DNA
tccgaaggaggggtaggcgctgcccgcgcgcagaggccgcgcccctcctggccccggcttcttggctgtcaaacagatgcagcaacgtcggctcctgccgaggagcccaaggggtcccgggatccgccgcacaggctggcactgcttgaagaggaggctactcggagactgcgccgcgcggtggattcattgccctcggaggttcaaccagttatgagtgagggattggccagaagatcggggcgcaggcaagcaggagtgctctattaggataagcaagtttgacaggaagaagctgctcttctccgaattacacagaggtgatgtgttcgtattgcacgtagacgtgtgtataacaggacctccttccccgcgccccgccaccccgacacacacaggagctgcctaaagtatccttgccttgcagattggaggctccccaaatattttgtgatctgaggatccagctcaagtgaggtgccataggacgtgttcctgagtttgcattgcacggagaccttcctggaatttttcatttgcaagtcggcttaaccaattttgcattgagtcctaggctgcttgcactctgaatttgggctattcaggtagtgtgctcaaagttgaaaccgcatacagcacaactcaagtttgcatcagactgggaagcgaacttaagccagcggtgcgtggcccaggagtgggaaaggaaatggatgcctgaagtggaagaggtggtgcagagggggcaccgcccatgctgccctgcttccaactgctgcgcatagggggcggcaggggcggtgatctctacaccttccacccccccgccggggctggctgcacctatcgcttgggccacagggccgacctgtgtgatgtggccctgcggccccagcaggagcctggcctcatctctgggatccacgccgaactgcatgccgagccccggggtgatgactggagggtcagcctggaagaccacagcagccaaggtactttggtcaataatgtccgactcccaagaggtcacaggctggaattgagtgatggagacctcctgacctttggccctgaagggtccccaggaaccagcccctcggagttctacttcatgttccaacaagtacgagtcaagcctcaggactttgctgccattaccatcccacggtctaggggagaagcccgggttggggctggtttccggcctatgctgccctcccagggggctccacagcggcctctcagcaccttctcccctgcccccaaggccacactgatcctaaactccataggcagcctcagcaagctccggccccagcccctcaccttctcccctagttggggtggaccaaagagcctgcctgttcccgccccacctggggaagtggggaccacgccttctgctccaccccaacgcaatcggaggaaatctgttcaccgagtgttggcggaactggatgatgagagtgagcctcctgagaacccgccaccggtccttatggagcccaggaagaaactccgtgtagacaaagccccactgactcccactggaaatcgacgtggccgtcctcggaagtacccagtgagcgctcccatggctccccctgcagttgggggcggggagccctgtgcagctccttgttgctgcctgccccaggaagagacagtggcctgggttcagtgtgatggctgtgacgtctggttccatgtggcctgtgttggctgcagcatccaggctgccagggaggccgacttccgatgcccagggtgccgggctggcattcagacctaaggtccaccgccaaggcaccatcggacacacctgcccatgagtagacacagcagcgagcaaataggtctgataaataccccccttcccttccctccccaagagggaatgactacagggaagaaggatggattgatgtggactcattcagggcctggagcagaccctggtggccaagacagaagagatggtttcctgccaaagatattgccacctccaggaaattgccagtgagctggaagttcccactattacaagccataaggccatgttgccatggacaccagaatatctgtagtcagagcacctatcagttgcaaaagccatgcctgcaaccgatggaaaatgtaagagggagttcttaaggttcttggtggcatcacccaaggcattctgggaaaacctagggcctggccccaaaacttccctactctgtggctagtcctgctgccaacaaaatcgtagcgacctggcttttcacagctttgcttttatttccaagtcaaggacaagccgcttcattcactcctgggcatttactcttcttgtgggtctgtgatattccttgctttccagggagaatgtgcttggcaaggtctggagaactaattcagaatcttaggggaaggggagagatggaaatacaaacctgcttactggaaaggtgcaaatatatgggttgagctggaggtaggaatacaggtaattaaggtttctagtttaagggaaaacagatctattgccatttaaataaggtaactgggatttggttaagttcacaaagatagcagaagatttatttacaggcttcacctgtactgtcagggcaagagaaagcctggtaaaccagctacagcagtttaccagtgtgatggctgtgacacagctccactccacgggtggacacagcagagggcaactgggctggcctggttcagtgtgaatcaaaccgcttaacccacacatggtacatgtgattttcttttgtgagccttacaccaagccaaactattgtcaaagcatcatttctatagaaataaagccttatcttgacctgttctattaaaacctgccacatccgccctttcctacctagatttaatgagcccaagtttttttacatggaagaaatgactctggggcaaagacccctaatgaactagtggcagagccaggaataaaacttgagtaactaatgagtcacttatgggcagagtatgcaaaaaccttaagtggaaaccaaatagaccctggtatcaagaaagcacaaagtattaatagaagtttctggttggggtgatctaggttcaacagaaataagatgatttctaagtataaagccatttaagaattccagagtagggtgggaaagcaaaaagccagctctgaacaggtaacagctacatggtgactgagtctatgggcaaaagttcttgcatcacaggcttttgggaactagcctatcacagggccctgtacaaataaacttggctgcaatccca

SEQ ID NO: 31927 - DNA, 3281 bp, Homo sapiens
  source 1..3281: mol_type = unassigned DNA
gggtaggcgctgcccgcgcgcagaggccgcgcccctcctggccccggcttcttggctgtcaaacagatgcagcaacgtcggctcctgccgaggagcccaaggggtcccgggatccgccgcacaggctggcactgcttgaagaggaggctactcggagactgcgccgcgcggtggattcattgccctcggaggttcaaccagttatgagtgagggattggccagaagatcggggcgcaggcaagcaggagtgctctattaggataagcaagtttgacaggaagaagctgctcttctccgaattacacagaggtgatgtgttcgtattgcacgtagacgtgtgtataacaggacctccttccccgcgccccgccaccccgacacacacaggagctgcctaaagtatccttgccttgcagattggaggctccccaaatattttgtgatctgaggatccagctcaagtgaggtgccataggacgtgttcctgagtttgcattgcacggagaccttcctggaatttttcatttgcaagtcggcttaaccaattttgcattgagtcctaggctgcttgcactctgaatttgggctattcaggtagtgtgctcaaagttgaaaccgcatacagcacaactcaagtttgcatcagactgggaagcgaacttaagccagcggtgcgtggcccaggagtgggaaaggaaatggatgcctgaagtggaagaggtggtgcagagggggcaccgcccatgctgccctgcttccaactgctgcgcatagggggcggcaggggcggtgatctctacaccttccacccccccgccggggctggctgcacctatcgcttgggccacagggccgacctgtgtgatgtggccctgcggccccagcaggagcctggcctcatctctgggatccacgccgaactgcatgccgagccccggggtgatgactggagggtcagcctggaagaccacagcagccaaggtactttggtcaataatgtccgactcccaagaggtcacaggctggaattgagtgatggagacctcctgacctttggccctgaagggcccccaggaaccagcccctcggagttctacttcatgttccaacaagtacgagtcaagcctcaggactttgctgccattaccatcccacggtctaggggagaagcccgggttggggctggtttccggcctatgctgccctcccagggggctccacagcggcctctcagcaccttctcccctgcccccaaggccacactgatcctaaactccataggcagcctcagcaagctccggccccagcccctcaccttctcccctagttggggtggaccaaagagcctgcctgttcccgccccacctggggaagtggggaccacgccttctgctccaccccaacgcaatcggaggaaatctgttcaccgagtgttggcggaactggatgatgagagtgagcctcctgagaacccgccaccggtccttatggagcccaggaagaaactccgtgtagacaaagccccactgactcccactggaaatcgacgtggccgtcctcggaagtacccagtgagcgctcccatggctccccctgcagttgggggcggggagccctgtgcagctccttgttgctgcctgccccaggaagagacagtggcctgggttcagtgtgatggctgtgacgtctggttccatgtggcctgtgttggctgcagcatccaggctgccagggaggccgacttccgatgcccagggtgccgggctggcattcagacctaaggtccaccgccaaggcaccatcggacacacctgcccatgagtagacacagcagcgagcaaataggtctgataaataccccccttcccttccctccccaagagggaatgactacagggaagaaggatggattgatgtggactcattcagggcctggagcagaccctggtggccaagacagaagagatggtttcctgccaaagatattgccacctccaggaaattgccagtgagctggaagttcccactattacaagccataaggccatgttgccatggacaccagaatatctgtagtcagagcacctatcagttgcaaaagccatgcctgcaaccgatggaaaatgtaagagggagttcttaaggttcttggtggcatcacccaaggcattctgggaaaacctagggcctggccccaaaacttccctactctgtggctagtcctgctgccaacaaaatcgtagcgacctggcttttcacagctttgcttttatttccaagtcaaggacaagccgcttcattcactcctgggcatttactcttcttgtgggtctgtgatattccttgctttccagggagaatgtgcttggcaaggtctggagaactaattcagaatcttaggggaaggggagagatggaaatacaaacctgcttactggaaaggtgcaaatatatgggttgagctggaggtaggaatacaggtaattaaggtttctagtttaagggaaaacagatctattgccatttaaataaggtaactgggatttggttaagttcacaaagatagcagaagatttatttacaggcttcacctgtactgtcagggcaagagaaagcctggtaaaccagctacagcagtttaccagtgtgatggctgtgacacagctccactccacgggtggacacagcagagggcaactgggctggcctggttcagtgtgaatcaaaccgcttaacccacacatggtacatgtgattttcttttgtgagccttacaccaagccaaactattgtcaaagcatcatttctatagaaataaagccttatcttgacctgttctattaaaacctgccacatccgccctttcctacctagatttaatgagcccaagtttttttacatggaagaaatgactctggggcaaagacccctaatgaactagtggcagagccaggaataaaacttgagtaactaatgagtcacttatgggcagagtatgcaaaaaccttaagtggaaaccaaatagaccctggtatcaagaaagcacaaagtattaatagaagtttctggttggggtgatctaggttcaacagaaataagatgatttctaagtataaagccatttaagaattccagagtagggtgggaaagcaaaaagccagctctgaacaggtaacagctacatggtgactgagtctatgggcaaaagttcttgcatcacaggcttttgggaactagcctatcacagggccctgtacaaataaacttggctgcaatccca

SEQ ID NO: 31928 - DNA, 3281 bp, Homo sapiens; identical to SEQ ID NO: 31927
  source 1..3281: mol_type = unassigned DNA

SEQ ID NO: 31929 - DNA, 3291 bp, Homo sapiens; identical to SEQ ID NO: 31922
  source 1..3291: mol_type = unassigned DNA

SEQ ID NO: 31930 - DNA, 3040 bp, Homo sapiens
  source 1..3040: mol_type = unassigned DNA
aggaggggtaggcgctgcccgcgcgcagaggccgcgcccctcctggccccggcttcttggctgtcaaacagatgcagcaacgtcggctcctgccgaggagcccaaggggtcccgggatccgccgcacaggctggcactgcttgaagaggaggctactcggagactgcgccgcgcggattggaggctccccaaatattttgtgatctgaggatccagctcaagtgaggtgccataggacgtgttcctgagtttgcattgcacggagaccttcctggaatttttcatttgcaagtcggcttaaccaattttgcattgagtcctaggctgcttgcactctgaatttgggctattcaggtagtgtgctcaaagttgaaaccgcatacagcacaactcaagtttgcatcagactgggaagcgaacttaagccagcggtgcgtggcccaggagtgggaaaggaaatggatgcctgaagtggaagaggtggtgcagagggggcaccgcccatgctgccctgcttccaactgctgcgcatagggggcggcaggggcggtgatctctacaccttccacccccccgccggggctggctgcacctatcgcttgggccacagggccgacctgtgtgatgtggccctgcggccccagcaggagcctggcctcatctctgggatccacgccgaactgcatgccgagccccggggtgatgactggagggtcagcctggaagaccacagcagccaaggtactttggtcaataatgtccgactcccaagaggtcacaggctggaattgagtgatggagacctcctgacctttggccctgaagggcccccaggaaccagcccctcggagttctacttcatgttccaacaagtacgagtcaagcctcaggactttgctgccattaccatcccacggtctaggggagaagcccgggttggggctggtttccggcctatgctgccctcccagggggctccacagcggcctctcagcaccttctcccctgcccccaaggccacactgatcctaaactccataggcagcctcagcaagctccggccccagcccctcaccttctcccctagttggggtggaccaaagagcctgcctgttcccgccccacctggggaagtggggaccacgccttctgctccaccccaacgcaatcggaggaaatctgttcaccgagtgttggcggaactggatgatgagagtgagcctcctgagaacccgccaccggtccttatggagcccaggaagaaactccgtgtagacaaagccccactgactcccactggaaatcgacgtggccgtcctcggaagtacccagtgagcgctcccatggctccccctgcagttgggggcggggagccctgtgcagctccttgttgctgcctgccccaggaagagacagtggcctgggttcagtgtgatggctgtgacgtctggttccatgtggcctgtgttggctgcagcatccaggctgccagggaggccgacttccgatgcccagggtgccgggctggcattcagacctaaggtccaccgccaaggcaccatcggacacacctgcccatgagtagacacagcagcgagcaaataggtctgataaataccccccttcccttccctccccaagagggaatgactacagggaagaaggatggattgatgtggactcattcagggcctggagcagaccctggtggccaagacagaagagatggtttcctgccaaagatattgccacctccaggaaattgccagtgagctggaagttcccactattacaagccataaggccatgttgccatggacaccagaatatctgtagtcagagcacctatcagttgcaaaagccatgcctgcaaccgatggaaaatgtaagagggagttcttaaggttcttggtggcatcacccaaggcattctgggaaaacctagggcctggccccaaaacttccctactctgtggctagtcctgctgccaacaaaatcgtagcgacctggcttttcacagctttgcttttatttccaagtcaaggacaagccgcttcattcactcctgggcatttactcttcttgtgggtctgtgatattccttgctttccagggagaatgtgcttggcaaggtctggagaactaattcagaatcttaggggaaggggagagatggaaatacaaacctgcttactggaaaggtgcaaatatatgggttgagctggaggtaggaatacaggtaattaaggtttctagtttaagggaaaacagatctattgccatttaaataaggtaactgggatttggttaagttcacaaagatagcagaagatttatttacaggcttcacctgtactgtcagggcaagagaaagcctggtaaaccagctacagcagtttaccagtgtgatggctgtgacacagctccactccacgggtggacacagcagagggcaactgggctggcctggttcagtgtgaatcaaaccgcttaacccacacatggtacatgtgattttcttttgtgagccttacaccaagccaaactattgtcaaagcatcatttctatagaaataaagccttatcttgacctgttctattaaaacctgccacatccgccctttcctacctagatttaatgagcccaagtttttttacatggaagaaatgactctggggcaaagacccctaatgaactagtggcagagccaggaataaaacttgagtaactaatgagtcacttatgggcagagtatgcaaaaaccttaagtggaaaccaaatagaccctggtatcaagaaagcacaaagtattaatagaagtttctggttggggtgatctaggttcaacagaaataagatgatttctaagtataaagccatttaagaattccagagtagggtgggaaagcaaaaagccagctctgaacaggtaacagctacatggtgactgagtctatgggcaaaagttcttgcatcacaggcttttgggaactagcctatcacagggccctgtacaaataaacttggctgcaatccca

SEQ ID NO: 31931 - DNA, 2993 bp, Homo sapiens; identical to SEQ ID NO: 31924
  source 1..2993: mol_type = unassigned DNA

SEQ ID NO: 31932 - DNA, 3040 bp, Homo sapiens
  source 1..3040: mol_type = unassigned DNA
aggaggggtaggcgctgcccgcgcgcagaggccgcgcccctcctggccccggcttcttggctgtcaaacagatgcagcaacgtcggctcctgccgaggagcccaaggggtcccgggatccgccgcacaggctggcactgcttgaagaggaggctactcggagactgcgccgcgcggattggaggctccccaaatattttgtgatctgaggatccagctcaagtgaggtgccataggacgtgttcctgagtttgcattgcacggagaccttcctggaatttttcatttgcaagtcggcttaaccaattttgcattgagtcctaggctgcttgcactctgaatttgggctattcaggtagtgtgctcaaagttgaaaccgcatacagcacaactcaagtttgcatcagactgggaagcgaacttaagccagcggtgcgtggcccaggagtgggaaaggaaatggatgcctgaagtggaagaggtggtgcagagggggcaccgcccatgctgccctgcttccaactgctgcgcatagggggcggcaggggcggtgatctctacaccttccacccccccgccggggctggctgcacctatcgcttgggccacagggccgacctgtgtgatgtggccctgcggccccagcaggagcctggcctcatctctgggatccacgccgaactgcatgccgagccccggggtgatgactggagggtcagcctggaagaccacagcagccaaggtactttggtcaataatgtccgactcccaagaggtcacaggctggaattgagtgatggagacctcctgacctttggccctgaagggtccccaggaaccagcccctcggagttctacttcatgttccaacaagtacgagtcaagcctcaggactttgctgccattaccatcccacggtctaggggagaagcccgggttggggctggtttccggcctatgctgccctcccagggggctccacagcggcctctcagcaccttctcccctgcccccaaggccacactgatcctaaactccataggcagcctcagcaagctccggccccagcccctcaccttctcccctagttggggtggaccaaagagcctgcctgttcccgccccacctggggaagtggggaccacgccttctgctccaccccaacgcaatcggaggaaatctgttcaccgagtgttggcggaactggatgatgagagtgagcctcctgagaacccgccaccggtccttatggagcccaggaagaaactccgtgtagacaaagccccactgactcccactggaaatcgacgtggccgtcctcggaagtacccagtgagcgctcccatggctccccctgcagttgggggcggggagccctgtgcagctccttgttgctgcctgccccaggaagagacagtggcctgggttcagtgtgatggctgtgacgtctggttccatgtggcctgtgttggctgcagcatccaggctgccagggaggccgacttccgatgcccagggtgccgggctggcattcagacctaaggtccaccgccaaggcaccatcggacacacctgcccatgagtagacacagcagcgagcaaataggtctgataaataccccccttcccttccctccccaagagggaatgactacagggaagaaggatggattgatgtggactcattcagggcctggagcagaccctggtggccaagacagaagagatggtttcctgccaaagatattgccacctccaggaaattgccagtgagctggaagttcccactattacaagccataaggccatgttgccatggacaccagaatatctgtagtcagagcacctatcagttgcaaaagccatgcctgcaaccgatggaaaatgtaagagggagttcttaaggttcttggtggcatcacccaaggcattctgggaaaacctagggcctggccccaaaacttccctactctgtggctagtcctgctgccaacaaaatcgtagcgacctggcttttcacagctttgcttttatttccaagtcaaggacaagccgcttcattcactcctgggcatttactcttcttgtgggtctgtgatattccttgctttccagggagaatgtgcttggcaaggtctggagaactaattcagaatcttaggggaaggggagagatggaaatacaaacctgcttactggaaaggtgcaaatatatgggttgagctggaggtaggaatacaggtaattaaggtttctagtttaagggaaaacagatctattgccatttaaataaggtaactgggatttggttaagttcacaaagatagcagaagatttatttacaggcttcacctgtactgtcagggcaagagaaagcctggtaaaccagctacagcagtttaccagtgtgatggctgtgacacagctccactccacgggtggacacagcagagggcaactgggctggcctggttcagtgtgaatcaaaccgcttaacccacacatggtacatgtgattttcttttgtgagccttacaccaagccaaactattgtcaaagcatcatttctatagaaataaagccttatcttgacctgttctattaaaacctgccacatccgccctttcctacctagatttaatgagcccaagtttttttacatggaagaaatgactctggggcaaagacccctaatgaactagtggcagagccaggaataaaacttgagtaactaatgagtcacttatgggcagagtatgcaaaaaccttaagtggaaaccaaatagaccctggtatcaagaaagcacaaagtattaatagaagtttctggttggggtgatctaggttcaacagaaataagatgatttctaagtataaagccatttaagaattccagagtagggtgggaaagcaaaaagccagctctgaacaggtaacagctacatggtgactgagtctatgggcaaaagttcttgcatcacaggcttttgggaactagcctatcacagggccctgtacaaataaacttggctgcaatccca

SEQ ID NO: 31933 - DNA, 805 bp, Homo sapiens
  source 1..805: mol_type = unassigned DNA
actttggtcaataatgtccgactcccaagaggtcacaggctggaattgagtgatggagacctcctgacctttggccctgaagggcccccaggaaccagcccctcggagttctacttcatgttccaacaagtacgagtcaagcctcaggactttgctgccattaccatcccacggtctaggggagaagcccgggttggggctggtttccggcctatgctgccctcccagggggctccacagcggcctctcagcaccttctcccctgcccccaaggccacactgatcctaaactccataggcagcctcagcaagctccggccccagcccctcaccttctcccctagttggggtggaccaaagagcctgcctgttcccgccccacctggggaaatggggaccacgccttctgctccaccacaacgcaatcggaggaaatctgttcaccgagtgttggcggaactggatgatgagagtgagcctcctgagaacccgccaccggtccttatggagcccaggaagaaactccgtgtagacaaagccccactgactcccactggaaactggcacatccaagggatgcagagcatcgtgaaaggacagaaagagagaccctggcctcgagaacacctgtcaggttatgaagaggcatcctaattgatttttaaattcaagagatttatcgagcaccttctataagccagcggctatacaaagtggacaaagagccctgacatccagcatgacagaagtgctatttggcacttgttcttcaagttgcccacttggatctcttccaagtgcactt

SEQ ID NO: 31934 - DNA, 1418 bp, Homo sapiens
  source 1..1418: mol_type = unassigned DNA
gagttggcgccagcttcctcggatgtagatattgctggctggatgaccagccacagccagctagcttgagtccaaggcctcctcaggcactgtgtttctgctctgtgggctgcagccccagtggggtggcatgtcacagaggaaggccagagggccaccagccatgccaggggtggggcatagccagactcaggccaaagcacggttgctgccaggcgctgacaggaagaggagccgcctcagcaggacaaggcaggacccgtgggaagaaagaagctggagcaaccagagatggagcagagctacccctggccctcgagggaccagggctgggggcctggctcttggcaggagcgaggccagtcctgagaatgccgcgcgggagcggagccgggtcaggacgctgcgccaggccttcttggccttgcaggctgctctgcctgccgtgccgcccgacaccaagctctccaagttggacgtgctggtgctcgccgccagctacatagcccacctcacccgcacactcggccacgagttgcctggccctgcctggccgcccttcctgcgtggactccgctacttgcaccctctcaagaagtggccgatgcgatctcgtctctatgctggaggcctggggtactccgatcttgactccaccacagccagcacccccagccaaagaacaagagatgcagaggtggggtcccaagtccctggagaggcagatgctctcctttccaccacaccactctcaccagctcttggtgacaaataattatcacactcgcccttttctcctagactgtgactcatgcttatgggcctggattttctaccagcccccagattctcagccatcagacttgactcagactcagctcccaagttccagcatgcagaccaagagaagcagtagcacttctgtgatggacagtacctagaggggcacaggttggagagcctcctccttggtccccaggaggggacttccccatggctcttctgtgacagctactgggaagtgggagagaaagaggtataattgggctcaaagttgaggtagggaaccaccctagctttcttcccctaaggtttctacaaaccctctgcagatagcaaaaaggcaggtgcagagggaggggcctgggatggcaccagccccaggtgctgatgggaaagccaggtggccggataggctcctggtagctccaagtgtaaacagatctgggctgggtcacacagccagaggggaaactgaagaaggaaatgtgctttctaactgcatcatgagatgcttacctgatgttagagagatagtgaggaattcaggattcctccctctgtagtatgggcctttccagaagctgcccctcaccactacattttctctccctctcggctcctgcactcttccactc

SEQ ID NO: 31935 - DNA, 2283 bp, Homo sapiens
  source 1..2283: mol_type = unassigned DNA
agctcccccgcccccgaccccgcgcgaagagtgcgcaggcgcgccgacagccgagttttctgcgcttccttctccctctctccagacgtcgtggtcgttcggtcctatgtcgcgccgggccctccggaggctgaggggggaacagcgcggccaggagcccctcgggcccggcgccttgcatttcgatctccgtgatgacgatgacgcggaagaagaagggcccaagcgggagcttggtgtccggcgtcccgggggcgcagggaaggagggcgtccgagtcaacaaccgcttcgagctgataaacattgacgatcttgaggatgaccctgtggtgaacggggagaggtctggctgtgcgctcacagacgctgtggcaccagggaacaaaggaaggggtcagcgtggaaacacagagagcaagacggatggagatgacaccgagacagtgccctcagagcagtctcatgcaagtggcaaactccggaagaagaaaaaaaaacagaaaaacaagaaaagcagcacgggagaagcatcggaaaacggactagaagatatcgatcgcatcctagagaggattgaggacagcactgggttgaaccgtcccggcccagctcccctgagctccaggaagcacgttctctacgtggagcacagacacttgaatccagacacagaactgaaaaggtattttggtgcccgggcaatcctgggggagcaaaggccacggcagagacaacgtgtgtaccccaagtgcacatggctgaccacccctaaaagcacctggccccgctacagcaaaccaggtctgtccatgcggctgctggaatcaaaaaaaggcctctccttctttgcgtttgagcacagtgaggagtaccagcaggctcagcacaagttcctggtggccgtggagtctatggagccgaacaacatcgtggttctgctccagacgagcccttaccacgttgactcactcctgcagctcagcgatgcctgccgctttcaagaggatcaggagatggctcgagacctcgtagagagagcgctgtacagcatggaatgtgcgttccaccccctgttcagtctcaccagtggggcctgccggctggattaccgcagacccgagaacaggagcttctacctggccctctacaagcagatgagcttcctggagaagcgaggctgcccgcgcacggcgctggagtactgcaagctcatcctgagtctcgagccggatgaggaccccctctgcatgctgctgctcatcgaccacctggccttgcgggcccggaactacgagtacctgatccgcctcttccaggagtgggaggctcatcggaacctgtcccagctccctaattttgccttctctgttccactggcgtatttcctgctgagccagcagacagacctccctgagtgtgagcagagctctgccaggcagaaggcctctctcctgatacagcaggcgctcaccatgttccctggagtcctcctgcccctgctcgagtcttgcagtgtgcggcccgacgccagcgtttccagtcaccgcttctttggacccaatgctgaaataagccagccccctgccctgagccagctggtgaacctgtaccttgggaggtcacactttctctggaaagagcccgccaccatgagctggctggaggagaacgtccacgaggttctgcaagcagtggacgccggggacccagccgtggaagcctgtgagaaccggcggaaggtgctctaccagcgtgcacccaggaatatccaccgccatgtgatcctctctgagatcaaggaagccgtcgctgccctgcccccggacgtgaccacgcagtctgtgatggggtttgatcctctgcctccttcggacacaatctactcctacgtcaggccagagaggctaagtcctatcagccatggaaacaccattgctctcttcttccggtcactgttgccaaactataccatggagggggagaggcccgaggaaggagtggctgggggtctgaaccgcaaccagggcctgaacaggctgatgctggctgtgcgcgacatgatggccaacttccacctcaacgacctggaggcgccgcacgaggacgacgctgagggggagggggagtgggactgagcgtccgcagaggtgaccgaaaagccgtatgatgatgttcccgatttctctgttggtcggagtcggccagttgcctgaagtagggaagctgagtgtgtcgctccctggtccactgtttctcctataaatgtaaatgggtcacgctc

SEQ ID NO: 31936 - DNA, 1869 bp, Homo sapiens
  source 1..1869: mol_type = unassigned DNA
taggaaaacggactagaagatatcgatcgcatcctagagaggattgaggacagcactgggttgaaccgtcccggcccagctcccctgagctccaggaagcacgttctctacgtggagcacagacacttgaatccagacacagaactgaaaaggtattttggtgcccgggcaatcctgggggagcaaaggccacggcagagacaacgtgtgtaccccaagtgcacatggctgaccacccctaaaagcacctggccccgctacagcaaaccaggtctgtccatgcggctgctggaatcaaaaaaaggcctctccttctttgcgtttgagcacagtgaggagtaccagcaggctcagcacaagttcctggtggccgtggagtctatggagccgaacaacatcgtggttctgctccagacgagcccttaccacgttgactcactcctgcagctcagcgatgcctgccgctttcaagaggatcaggagatggctcgagacctcgtagagagagcgctgtacagcatggaatgtgcgttccaccccctgttcagtctcaccagtggggcctgccggctggattaccgcagacccgagaacaggagcttctacctggccctctacaagcagatgagcttcctggagaagcgaggctgcccgcgcacggcgctggagtactgcaagctcatcctgagtctcgagccggatgaggaccccctctgcatgctgctgctcatcgaccacctggccttgcgggcccggaactacgagtacctgatccgcctcttccaggagtgggaggctcatcggaacctgtcccagctccctaattttgccttctctgttccactggcgtatttcctgctgagccagcagacagacctccctgagtgtgagcagagctctgccaggcagaaggcctctctcctgatacagcaggcgctcaccatgttccctggagtcctcctgcccctgctcgagtcttgcagtgtgcggcccgacgccagcgtttccagtcaccgcttctttggacccaatgctgaaataagccagccccctgccctgagccagctggtgaacctgtaccttgggaggtcacactttctctggaaagagcccgccaccatgagctggctggaggagaacgtccacgaggttctgcaagcagtggacgccggggacccagccgtggaagcctgtgagaaccggcggaaggtgctctaccagcgtgcacccaggaatatccaccgccatgtgatcctctctgagatcaaggaagccgtcgctgccctgcccccggacgtgaccacgcagtctgtgatggggtttgatcctctgcctccttcggacacaatctactcctacgtcaggccagagaggaagggagaggaggagaggaacagtgttatttgggggtcacagctctgcgtttgcaggccacgttctttcccatctccaccgaatgtacaagcgcttgcgtgtcggcctctgtggcaggctaagtcctatcagccatggaaacaccattgctctcttcttccggtcactgttgccaaactataccatggagggggagaggcccgaggaaggagtggctgggggtctgaaccgcaaccagggcctgaacaggctgatgctggctgtgcgcgacatgatggccaacttccacctcaacgacctggaggcgccgcacgaggacgacgctgagggggagggggagtgggactgagcgtccgcagaggtgaccgaaaagccgtatgatgatgttcccgatttctctgttggtcggagtcggccagttgcctgaagtagggaagctgagtgtgtcgctccctggtccactgtttctcctataaatgtaaatgggtcacgctc

SEQ ID NO: 31937 - DNA, 1727 bp, Homo sapiens
  source 1..1727: mol_type = unassigned DNA
ctccagacgtcgtggtcgttcggtcctatgtcgcgccgggccctccggaggctgaggggggaacagcgcggccaggagcccctcgggcccggcgccttgcatttcgatctccgtgatgacgatgacgcggaagaagaagggcccaagcgggagcttggtgtccggcgtcccgggggcgcagggaaggagggcgtccgagtcaacaaccgcttcgagctgataaacattgacgatcttgaggatgaccctgtggtgaacggggagaggtctggctgtgcgctcacagacgctgtggcaccagggaacaaaggaaggggtcagcgtggaaacacagagagcaagacggatggagatgacaccgagacagtgccctcagagcagtctcatgcaagtggcaaactccggaagaagaaaaaaaaacagaaaaacaagaaaagcagcacgggagaagcatcggaaaacggactagaagatatcgatcgcatcctagagaggattgaggacagcactgggttgaaccgtcccggcccagctcccctgagctccaggaagcacgttctctacgtggagcacagacacttgaatccagacacagaactgaaaaggtattttggtgcccgggcaatcctgggggagcaaagagacagggtcttgctgggttgtccagtctggttttgaactcgtggcctcaagtgatcctcccatctcagtctcccaaatagctgggactaccggcacatgccaccgctaatttattttattttattttttatagaaacaaggtcttactttgttgcccagggtgatgtcaaactcctggcttcaagcgattctcctccctctacctcctaaagtgctaggattacaggcatgagccaccacgcccagccagacacatcctgttttattggaccatggagagtattgctggtctataacatgccctgggtttgcacgtctgagttcttttttttttttttcgagacagaattttgctcttgttgcccaggctggagtgcaatggctcaatcttggctcaccacaacctccgcctcccgggttcaagtgattctcctgcctcagcttcccaagtagctgggattacaggcgagtgccaccatgctcggcaaatttttgtatttttggtagagacggggtttcaccatgttggccaggctggtctcgatctcctgacctcaagtgatccgccagtctcggcctcccaaagtgctgggattacagccctgagccactgcgcccggcctcccaaagtgctgggattacaggcgtgagccaccacacccagcctaagtgttgtttctgcaccatggtatacccaggtcatttcctcaccccaatggtagcatgtgtccagatgttggctacagtccccggtgtctgcaggcatttctgtgaaactgcccaagaatgagtatatatcctgcatgctgccagtgccttcagtagagttacgtggctcacactgagtgtctgcccaggtccttcaccttcttactcgtagtcgacggtagtggtttggaaacctgccgtcgtgtgtgggcagaagtgttggggttttgattgtgggtagatcaaggatgttttcatatgctgttgttcacgccttccctggatttctaacaggttttgctttatattttactttacatttttggtgttgatgggtttcttcgggaatattaattaaaaatagactttaaaatgtc

SEQ ID NO: 31938 - DNA, 620 bp, Homo sapiens
  source 1..620: mol_type = unassigned DNA
ctgaccgtcaatgcttccatgtccaggttccctccccatatggtcccaccacatcatacgctacacacgacgggcattccgcatccggccatagtcacaccaacagtcaaacaggaatcgtcccagagtgatgtcggctcactccatagttcaaagcatcaggactccaaaaaggaagaagaaaagaagaagccccacataaagaaacctcttaatgcattcatgttgtatatgaaggaaatgagagcaaaggtcgtagctgagtgcacgttgaaagaaagcgcggccatcaaccagatccttgggcggaggtggcatgcactgtccagagaagagcaagcgaaatactacgagctggcccggaaggagcgacagcttcatatgcaactgtaccccggctggtccgcgcgggataactatggaaagaagaagaagaggaaaagggacaagcagccgggagagaccaatgacctgagcgctcctaagaaatgccgagcgcgctttggccttgatcaacagaataactggtgcggcccttgcaggagaaaaaaaaagtgcgttcgctacatacaaggtgaaggcagctgcctcagcccaccctcttcagatggaagcttact

SEQ ID NO: 31939 - DNA, 667 bp, Homo sapiens
  source 1..667: mol_type = unassigned DNA
acgaatcaaaacagctcctccgattccgaggcggaaagacggcctccgcctcgctccgaaagtttccgagacaaatcccgggaaagtttggaagaagcggccaagaggcaagatggagggctctttaaggggccaccgtatcccggctaccccttcatcatgatccccgacctgacgagcccctacctccccaacggatcgctctcgcccaccgcccgaaccctccattttcagtccggcagcacacattactctgcgtacaaaacgattgaacaccagattgcagttcagtatctccagatgaaatggccactgcttgatgtccaggcagggagcctccagagtagacaagccctcaaggatgcccggtccccatcaccggcacacattgtcagccccctcccttgctgcactcagggacatgactgtcagcacttctaccccccctcagacttcactgtcagcactcaagtcttcagggacatgaaaaggagccactccttacaaaaagttggggagccctggtgtattgagtctaacaaagtgccagtggtgcagcaccctcaccatgtccaccccctcacgcctcttatcacgtacagcaatgaacacttcacgccgggaaacccacctccacacttaccagccgacgtagaccccaaaacag

SEQ ID NO: 31940 - DNA, 1174 bp, Homo sapiens
  source 1..1174: mol_type = unassigned DNA
ttttttttttttaccccccttttttatttattatttttttgcacattgatcggatccttgggaacgagagaaaaaagaaacccaaactcacgcgtgcagaagatctccccccccttcccctcccctcctccctcttttcccctccccaggagaaaaagacccccaagcagaaaaaagttcaccttggactcgtctttttcttgcaatattttttgggggggcaaaactttttgggggtgattttttttggcttttcttcctccttcatttttcttccaaaattgctgctggtgggtgaaaaaaaaatgccgcagctgaacggcggtggaggggatgacctaggcgccaacgacgaactgatttccttcaaagacgagggcgaacaggaggagaagagctccgaaaactcctcggcagagagggatttagctgatgtcaaatcgtctctagtcaatgaatcagaaacgaatcaaaacagctcctccgattccgaggcggaaagacggcctccgcctcgctccgaaagtttccgagacaaatcccgggaaagtttggaagaagcggccaagaggcaagatggagggctctttaaggggccaccgtatcccggctaccccttcatcatgatccccgacctgacgagcccctacctccccaacggatcgctctcgcccaccgcccgaaccctccattttcagtccggcagcacacattactctgcgtacaaaacgattgaacaccagattgcagttcagtatctccagatgaaatggccactgcttgatgtccaggcagggagcctccagagtagacaagccctcaaggatgcccggtccccatcaccggcacacattgtctctaacaaagtgccagtggtgcagcaccctcaccatgtccaccccctcacgcctcttatcacgtacagcaatgaacacttcacgccgggaaacccacctccacacttaccagccgacgtagaccccaaaacaggaatcccacggcctccgcaccctccagatatatccccgtattacccactatcgcctggcaccgtaggacaaatcccccatccgctaggatggcaaggtcaaccagtgtacccaatcacgacaggaggattcagacacccctaccccacagctctgaccgtcaatgcttccatgtccaggtgagt

SEQ ID NO: 31941 - DNA, 1547 bp, Homo sapiens
  source 1..1547: mol_type = unassigned DNA
gggggggcaaaactttttgggggtgattttttttggcttttcttcctccttcatttttcttccaaaattgctgctggtgggtgaaaaaaaaatgccgcagctgaacggcggtggaggggatgacctaggcgccaacgacgaactgatttccttcaaagacgagggcgaacaggaggagaagagctccgaaaactcctcggcagagagggatttagctgatgtcaaatcgtctctagtcaatgaatcagaaacgaatcaaaacagctcctccgattccgaggcggaaagacggcctccgcctcgctccgaaagtttccgagacaaatcccgggaaagtttggaagaagcggccaagaggcaagatggagggctctttaaggggccaccgtatcccggctaccccttcatcatgatccccgacctgacgagcccctacctccccaacggatcgctctcgcccaccgcccgaacctatctccagatgaaatggccactgcttgatgtccaggcagggagcctccagagtagacaagccctcaaggatgcccggtccccatcaccggcacacattgtctctaacaaagtgccagtggtgcagcaccctcaccatgtccaccccctcacgcctcttatcacgtacagcaatgaacacttcacgccgggaaacccacctccacacttaccagccgacgtagaccccaaaacaggaatcccacggcctccgcaccctccagatatatccccgtattacccactatcgcctggcaccgtaggacaaatcccccatccgctaggatggttagtaccacagcaaggtcaaccagtgtacccaatcacgacaggaggattcagacacccctaccccacagctctgaccgtcaatgcttccatgtccaggttccctccccatatggtcccaccacatcatacgctacacacgacgggcattccgcatccggccatagtcacaccaacagtcaaacaggaatcgtcccagagtgatgtcggctcactccatagttcaaagcatcaggactccaaaaaggaagaagaaaagaagaagccccacataaagaaacctcttaatgcattcatgttgtatatgaaggaaatgagagcaaaggtcgtagctgagtgcacgttgaaagaaagcgcggccatcaaccagatccttgggcggaggtggcatgcactgtccagagaagagcaagcgaaatactacgagctggcccggaaggagcgacagcttcatatgcaactgtaccccggctggtccgcgcgggataactatggaaagaagaagaagaggaaaagggacaagcagccgggagagaccaatgaacacagcgaatgtttcctaaatccttgcctttcacttcctccgattacagacctgagcgctcctaagaaatgccgagcgcgctttggccttgatcaacagaataactggtgcggcccttgcagtctttgaatttggaatattacaatggagaaaaaaaaagtgcgttcgctacatacaaggtgaaggcagctgcctcagcccaccc

SEQ ID NO: 31942 - DNA, 4021 bp, Homo sapiens
  source 1..4021: mol_type = unassigned DNA
aataatctccgctcccagactactccgttcctccggatttcgatccccctttttctatctgtcaatcagcgccgcctttgaactgaaaagctctcagtctaacttcaactcactcaaatccgagcggcacgagcacctcctgtatcttcggcttccccccccctttgctctttatatctgacttcttgttgttgttggtgttttttttttttttaccccccttttttatttattatttttttgcacattgatcggatccttgggaacgagagaaaaaagaaacccaaactcacgcgtgcagaagatctccccccccttcccctcccctcctccctcttttcccctccccaggagaaaaagacccccaagcagaaaaaagttcaccttggactcgtctttttcttgcaatattttttgggggggcaaaactttttgggggtgattttttttggcttttcttcctccttcatttttcttccaaaattgctgctggtgggtgaaaaaaaaatgccgcagctgaacggcggtggaggggatgacctaggcgccaacgacgaactgatttccttcaaagacgagggcgaacaggaggagaagagctccgaaaactcctcggcagagagggatttagctgatgtcaaatcgtctctagtcaatgaatcagaaacgaatcaaaacagctcctccgattccgaggcggaaagacggcctccgcctcgctccgaaagtttccgagacaaatcccgggaaagtttggaagaagcggccaagaggcaagatggagggctctttaaggggccaccgtatcccggctaccccttcatcatgatccccgacctgacgagcccctacctccccaacggatcgctctcgcccaccgcccgaacctatctccagatgaaatggccactgcttgatgtccaggcagggagcctccagagtagacaagccctcaaggatgcccggtccccatcaccggcacacattgtcagccccctcccttgctgcactcagggacatgactgtcagcacttctaccccccctcagacttcactgtcagcactcaagtcttcagggacatgaaaaggagccactccttacaaaaagttggggagccctggtgtattgagtctaacaaagtgccagtggtgcagcaccctcaccatgtccaccccctcacgcctcttatcacgtacagcaatgaacacttcacgccgggaaacccacctccacacttaccagccgacgtagaccccaaaacaggaatcccacggcctccgcaccctccagatatatccccgtattacccactatcgcctggcaccgtaggacaaatcccccatccgctaggatggttagtaccacagcaaggtcaaccagtgtacccaatcacgacaggaggattcagacacccctaccccacagctctgaccgtcaatgcttccatgtccaggttccctccccatatggtcccaccacatcatacgctacacacgacgggcattccgcatccggccatagtcacaccaacagtcaaacaggaatcgtcccagagtgatgtcggctcactccatagttcaaagcatcaggactccaaaaaggaagaagaaaagaagaagccccacataaagaaacctcttaatgcattcatgttgtatatgaaggaaatgagagcaaaggtcgtagctgagtgcacgttgaaagaaagcgcggccatcaaccagatccttgggcggaggtggcatgcactgtccagagaagagcaagcgaaatactacgagctggcccggaaggagcgacagcttcatatgcaactgtaccccggctggtccgcgcgggataactatggaaagaagaagaagaggaaaagggacaagcagccgggagagaccaatggagaaaaaaaaagtgcgttcgctacatacaaggtgaaggcagctgcctcagcccaccctcttcagatggaagcttactagattcgcctcccccctccccgaacctgctaggctcccctccccgagacgccaagtcacagactgagcagacccagcctctgtcgctgtccctgaagcccgaccccctggcccacctgtccatgatgcctccgccacccgccctcctgctcgctgaggccacccacaaggcctccgccctctgtcccaacggggccctggacctgcccccagccgctttgcagcctgccgccccctcctcatcaattgcacagccgtcgacttcttccttacattcccacagctccctggccgggacccagccccagccgctgtcgctcgtcaccaagtctttagaatagctttagcgtcgtgaaccccgctgctttgtttatggttttgtttcacttttcttaatttgccccccacccccaccttgaaaggttttgttttgtactctcttaattttgtgccatgtggctacattagttgatgtttatcgagttcattggtcaatatttgacccattcttatttcaatttctccttttaaatatgtagatgagagaagaacctcatgattctaccaaaatttttatcaacagctgtttaaagtctttgtagcgtttaaaaaatatatatatatacataactgttatgtagttcggatagcttagttttaaaagactgattaaaaaacaaaaagaaaaaaaaagcaattttgaagcagccctccagaaggagttggttctgtattatttgtattaaatacgagcttgcgaaccaatcattttacatctggtttttaaaccgtaagggcaccatgaatgcagtgccgttactttttttttttttttctgtgtgaaacaactcttattgtgatgttacttgttattgtttaaatgtacagaaacaaagggtaaaaatgtgttaatataccttgttccatggtgttgttcttttggggggaggggacgctactcaacacttaatagaatcacaacgctgttgggccagtagtatttattgctttagagattgcttgtcgtacctgtatgtcgtccctttttaaatatgttttcctttttcttgaaactgtataaagtttttttcccccttagcataagcatcttatatataacaactcatttgtacaaggtttttaagtttatatataaaatgtgtatatatatttttgtttcccctttttgacttttttttttctgtatgaaacccagatgtcaccaaatggacattaatagttgcattaaggatcagtagcattaacaaaagttgctttaaaagccattatgtaaaacaagacttgaaaatgagtgagggaattttagcgacactgtctgagcagcagtgggaaccatcttcgtttcccctttgaactcccagtgggatgccctaccctgcgcccttaggacccggactgaccgtgtacaaaactttacgtgccaaaattctcagtgaatttagctttctccctctttttgatgctgtaatttttgttcatcatgttttgctgtgatgttacataggtagatttgtatgtagttttaatgtcacctataacaaaatgtgtttggtagcagattgtccagaaagcattttaaatgaagaggtataaacccttaagggccaaaattctgtatattagattactcttaaacgaaaaaccagctgccgcttttatgtacacatattacatacgagtaggcagcagactttaaaaataaaaaaaacctaggcatgttgatgttgcaaaatgctgtataaagctgaaacctgttcattcagtgccattgtagttgacatgaagcgattgtaaaactgtctccgatttttctctggtttattaaaatgctaactataacattttttgtgaatactttgaatgtttcctaacagttgtgatgttactgttccgttttatgctcttattccaagttcatttttaatggtttggaagccatttttgtaatgaataaatgttcatgctgtacagtatctgtagcatgccgttctggattaataaaagcaacttagtatgtgcagataaa

SEQ ID NO: 31943 - DNA, 4073 bp, Homo sapiens
  source 1..4073: mol_type = unassigned DNA
aataatctccgctcccagactactccgttcctccggatttcgatccccctttttctatctgtcaatcagcgccgcctttgaactgaaaagctctcagtctaacttcaactcactcaaatccgagcggcacgagcacctcctgtatcttcggcttccccccccctttgctctttatatctgacttcttgttgttgttggtgttttttttttttttaccccccttttttatttattatttttttgcacattgatcggatccttgggaacgagagaaaaaagaaacccaaactcacgcgtgcagaagatctccccccccttcccctcccctcctccctcttttcccctccccaggagaaaaagacccccaagcagaaaaaagttcaccttggactcgtctttttcttgcaatattttttgggggggcaaaactttttgggggtgattttttttggcttttcttcctccttcatttttcttccaaaattgctgctggtgggtgaaaaaaaaatgccgcagctgaacggcggtggaggggatgacctaggcgccaacgacgaactgatttccttcaaagacgagggcgaacaggaggagaagagctccgaaaactcctcggcagagagggatttagctgatgtcaaatcgtctctagtcaatgaatcagaaacgaatcaaaacagctcctccgattccgaggcggaaagacggcctccgcctcgctccgaaagtttccgagacaaatcccgggaaagtttggaagaagcggccaagaggcaagatggagggctctttaaggggccaccgtatcccggctaccccttcatcatgatccccgacctgacgagcccctacctccccaacggatcgctctcgcccaccgcccgaaccctccattttcagtccggcagcacacattactctgcgtacaaaacgattgaacaccagattgcagttcagtatctccagatgaaatggccactgcttgatgtccaggcagggagcctccagagtagacaagccctcaaggatgcccggtccccatcaccggcacacattgtctctaacaaagtgccagtggtgcagcaccctcaccatgtccaccccctcacgcctcttatcacgtacagcaatgaacacttcacgccgggaaacccacctccacacttaccagccgacgtagaccccaaaacaggaatcccacggcctccgcaccctccagatatatccccgtattacccactatcgcctggcaccgtaggacaaatcccccatccgctaggatggttagtaccacagcaaggtcaaccagtgtacccaatcacgacaggaggattcagacacccctaccccacagctctgaccgtcaatgcttccatgtccaggttccctccccatatggtcccaccacatcatacgctacacacgacgggcattccgcatccggccatagtcacaccaacagtcaaacaggaatcgtcccagagtgatgtcggctcactccatagttcaaagcatcaggactccaaaaaggaagaagaaaagaagaagccccacataaagaaacctcttaatgcattcatgttgtatatgaaggaaatgagagcaaaggtcgtagctgagtgcacgttgaaagaaagcgcggccatcaaccagatccttgggcggaggtggcatgcactgtccagagaagagcaagcgaaatactacgagctggcccggaaggagcgacagcttcatatgcaactgtaccccggctggtccgcgcgggataactatggaaagaagaagaagaggaaaagggacaagcagccgggagagaccaatgaacacagcgaatgtttcctaaatccttgcctttcacttcctccgattacagacctgagcgctcctaagaaatgccgagcgcgctttggccttgatcaacagaataactggtgcggcccttgcaggagaaaaaaaaagtgcgttcgctacatacaaggtgaaggcagctgcctcagcccaccctcttcagatggaagcttactagattcgcctcccccctccccgaacctgctaggctcccctccccgagacgccaagtcacagactgagcagacccagcctctgtcgctgtccctgaagcccgaccccctggcccacctgtccatgatgcctccgccacccgccctcctgctcgctgaggccacccacaaggcctccgccctctgtcccaacggggccctggacctgcccccagccgctttgcagcctgccgccccctcctcatcaattgcacagccgtcgacttcttccttacattcccacagctccctggccgggacccagccccagccgctgtcgctcgtcaccaagtctttagaatagctttagcgtcgtgaaccccgctgctttgtttatggttttgtttcacttttcttaatttgccccccacccccaccttgaaaggttttgttttgtactctcttaattttgtgccatgtggctacattagttgatgtttatcgagttcattggtcaatatttgacccattcttatttcaatttctccttttaaatatgtagatgagagaagaacctcatgattctaccaaaatttttatcaacagctgtttaaagtctttgtagcgtttaaaaaatatatatatatacataactgttatgtagttcggatagcttagttttaaaagactgattaaaaaacaaaaagaaaaaaaaagcaattttgaagcagccctccagaaggagttggttctgtattatttgtattaaatacgagcttgcgaaccaatcattttacatctggtttttaaaccgtaagggcaccatgaatgcagtgccgttactttttttttttttttctgtgtgaaacaactcttattgtgatgttacttgttattgtttaaatgtacagaaacaaagggtaaaaatgtgttaatataccttgttccatggtgttgttcttttggggggaggggacgctactcaacacttaatagaatcacaacgctgttgggccagtagtatttattgctttagagattgcttgtcgtacctgtatgtcgtccctttttaaatatgttttcctttttcttgaaactgtataaagtttttttcccccttagcataagcatcttatatataacaactcatttgtacaaggtttttaagtttatatataaaatgtgtatatatatttttgtttcccctttttgacttttttttttctgtatgaaacccagatgtcaccaaatggacattaatagttgcattaaggatcagtagcattaacaaaagttgctttaaaagccattatgtaaaacaagacttgaaaatgagtgagggaattttagcgacactgtctgagcagcagtgggaaccatcttcgtttcccctttgaactcccagtgggatgccctaccctgcgcccttaggacccggactgaccgtgtacaaaactttacgtgccaaaattctcagtgaatttagctttctccctctttttgatgctgtaatttttgttcatcatgttttgctgtgatgttacataggtagatttgtatgtagttttaatgtcacctataacaaaatgtgtttggtagcagattgtccagaaagcattttaaatgaagaggtataaacccttaagggccaaaattctgtatattagattactcttaaacgaaaaaccagctgccgcttttatgtacacatattacatacgagtaggcagcagactttaaaaataaaaaaaacctaggcatgttgatgttgcaaaatgctgtataaagctgaaacctgttcattcagtgccattgtagttgacatgaagcgattgtaaaactgtctccgatttttctctggtttattaaaatgctaactataacattttttgtgaatactttgaatgtttcctaacagttgtgatgttactgttccgttttatgctcttattccaagttcatttttaatggtttggaagccatttttgtaatgaataaatgttcatgctgtacagtatctgtagcatgccgttctggattaataaaagcaacttagtatgtgcagataaa

SEQ ID NO: 31944 - DNA, 1274 bp, Homo sapiens
  source 1..1274: mol_type = unassigned DNA
caggaatcgtcccagagtgatgtcggctcactccatagttcaaagcatcaggactccaaaaaggaagaagaaaagaagaagccccacataaagaaacctcttaatgcattcatgttgtatatgaaggaaatgagagcaaaggtcgtagctgagtgcacgttgaaagaaagcgcggccatcaaccagatccttgggcggaggtggcatgcactgtccagagaagagcaagcgaaatactacgagctggcccggaaggagcgacagcttcatatgcaactgtaccccggctggtccgcgcgggataactatggaaagaagaagaagaggaaaagggacaagcagccgggagagaccaatgacctgagcgctcctaagaaatgccgagcgcgctttggccttgatcaacagaataactggtgcggcccttgcagatgcaaatactccaaagaagtgtcgggcactgttcgggcttgaccgacagactttatggtgcaaaccgtgcaggagaaaaaaaaagtgcgttcgctacatacaaggtgaaggcagctgcctcagcccaccctcttcagatggaagcttactagattcgcctcccccctccccgaacctgctaggctcccctccccgagacgccaagtcacagactgagcagacccagcctctgtcgctgtccctgaagcccgaccccctggcccacctgtccatgatgcctccgccacccgccctcctgctcgctgaggccacccacaaggcctccgccctctgtcccaacggggccctggacctgcccccagccgctttgcagcctgccgccccctcctcatcaattgcacagccgtcgacttcttccttacattcccacagctccctggccgggacccagccccagccgctgtcgctcgtcaccaagtctttagaatagctttagcgtcgtgaaccccgctgctttgtttatggttttgtttcacttttcttaatttgccccccacccccaccttgaaaggttttgttttgtactctcttaattttgtgccatgtggctacattagttgatgtttatcgagttcattggtcaatatttgacccattcttatttcaatttctccttttaaatatgtagatgagagaagaacctcatgattctaccaaaatttttatcaacagctgtttaaagtctttgtagcgtttaaaaaatatatatatatacataactgttatgtagttcggatagcttagttttaaaagactgattaaaaaacaaaaagaaaaaaaaa

SEQ ID NO: 31945 - DNA, 738 bp, Homo sapiens
  source 1..738: mol_type = unassigned DNA
caggaatcccacggcctccgcaccctccagatatatccccgtattacccactatcgcctggcaccgtaggacaaatcccccatccgctaggatggttagtaccacagcaaggtcaaccagtgtacccaatcacgacaggaggattcagacacccctaccccacagctctgaccgtcaatgcttccatgtccaggttccctccccatatggtcccaccacatcatacgctacacacgacgggcattccgcatccggccatagtcacaccaacagtcaaacaggaatcgtcccagagtgatgtcggctcactccatagttcaaagcatcaggactccaaaaaggaagaagaaaagaagaagccccacataaagaaacctcttaatgcattcatgttgtatatgaaggaaatgagagcaaaggtcgtagctgagtgcacgttgaaagaaagcgcggccatcaaccagatccttgggcggaggtggcatgcactgtccagagaagagcaagcgaaatactacgagctggcccggaaggagcgacagcttcatatgcaactgtaccccggctggtccgcgcgggataactatggaaagaagaagaagaggaaaagggacaagcagccgggagagaccaatggagaaaaaaaaagtgcgttcgctacatacaaggtgaaggcagctgcctcagcccaccctcttcagatggaagcttactagattcgcctcccccctccccgaa

SEQ ID NO: 31946 - DNA, 1041 bp, Homo sapiens
  source 1..1041: mol_type = unassigned DNA
gcaaaactttttgggggtgattttttttggcttttcttcctccttcatttttcttccaaaattgctgctggtgggtgaaaaaaaaatgccgcagctgaacggcggtggaggggatgacctaggcgccaacgacgaactgatttccttcaaagacgagggcgaacaggaggagaagagctccgaaaactcctcggcagagagggatttagctgatgtcaaatcgtctctagtcaatgaatcagaaacgaatcaaaacagctcctccgattccgaggcggaaagacggcctccgcctcgctccgaaagtttccgagacaaatcccgggaaagtttggaagaagcggccaagaggcaagatggagggctctttaaggggccaccgtatcccggctaccccttcatcatgatccccgacctgacgagcccctacctccccaacggatcgctctcgcccaccgcccgaacctatctccagatgaaatggccactgcttgatgtccaggcagggagcctccagagtagacaagccctcaaggatgcccggtccccatcaccggcacacattgtccagagccccctcccttgctgcactcagggacatgactgtcagcacttctaccccccctcagacttcactgtcagcactcaagtcttcagggacatgaaaaggagccactccttacaaaaagttggggagccctggtgtattgagtctaacaaagtgccagtggtgcagcaccctcaccatgtccaccccctcacgcctcttatcacgtacagcaatgaacacttcacgccgggaaacccacctccacacttaccagccgacgtagaccccaaaacaggaatcccacggcctccgcaccctccagatatatccccgtattacccactatcgcctggcaccgtaggacaaatcccccatccgctaggatggttagtaccacagcaaggtcaaccagtgtacccaatcacgacaggaggattcagacacccctaccccacagctctgaccgtcaatgcttccatgtccaggtgagt

SEQ ID NO: 31947 - DNA, 3802 bp, Homo sapiens
  source 1..3802: mol_type = unassigned DNA
ttttttttttttaccccccttttttatttattatttttttgcacattgatcggatccttgggaacgagagaaaaaagaaacccaaactcacgcgtgcagaagatctccccccccttcccctcccctcctccctcttttcccctccccaggagaaaaagacccccaagcagaaaaaagttcaccttggactcgtctttttcttgcaatattttttgggggggcaaaactttttgggggtgattttttttggcttttcttcctccttcatttttcttccaaaattgctgctggtgggtgaaaaaaaaatgccgcagctgaacggcggtggaggggatgacctaggcgccaacgacgaactgatttccttcaaagacgagggcgaacaggaggagaagagctccgaaaactcctcggcagagagggatttagctgatgtcaaatcgtctctagtcaatgaatcagaaacgaatcaaaacagctcctccgattccgaggcggaaagacggcctccgcctcgctccgaaagtttccgagacaaatcccgggaaagtttggaagaagcggccaagaggcaagatggagggctctttaaggggccaccgtatcccggctaccccttcatcatgatccccgacctgacgagcccctacctccccaacggatcgctctcgcccaccgcccgaacctatctccagatgaaatggccactgcttgatgtccaggcagggagcctccagagtagacaagccctcaaggatgcccggtccccatcaccggcacacattgtctctaacaaagtgccagtggtgcagcaccctcaccatgtccaccccctcacgcctcttatcacgtacagcaatgaacacttcacgccgggaaacccacctccacacttaccagccgacgtagaccccaaaacaggaatcccacggcctccgcaccctccagatatatccccgtattacccactatcgcctggcaccgtaggacaaatcccccatccgctaggatggttagtaccacagcaaggtcaaccagtgtacccaatcacgacaggaggattcagacacccctaccccacagctctgaccgtcaatgcttccatgtccaggttccctccccatatggtcccaccacatcatacgctacacacgacgggcattccgcatccggccatagtcacaccaacagtcaaacaggaatcgtcccagagtgatgtcggctcactccatagttcaaagcatcaggactccaaaaaggaagaagaaaagaagaagccccacataaagaaacctcttaatgcattcatgttgtatatgaaggaaatgagagcaaaggtcgtagctgagtgcacgttgaaagaaagcgcggccatcaaccagatccttgggcggaggtggcatgcactgtccagagaagagcaagcgaaatactacgagctggcccggaaggagcgacagcttcatatgcaactgtaccccggctggtccgcgcgggataactatggaaagaagaagaagaggaaaagggacaagcagccgggagagaccaatgaacacagcgaatgtttcctaaatccttgcctttcacttcctccgattacagacctgagcgctcctaagaaatgccgagcgcgctttggccttgatcaacagaataactggtgcggcccttgcaggagaaaaaaaaagtgcgttcgctacatacaaggtgaaggcagctgcctcagcccaccctcttcagatggaagcttactagattcgcctcccccctccccgaacctgctaggctcccctccccgagacgccaagtcacagactgagcagacccagcctctgtcgctgtccctgaagcccgaccccctggcccacctgtccatgatgcctccgccacccgccctcctgctcgctgaggccacccacaaggcctccgccctctgtcccaacggggccctggacctgcccccagccgctttgcagcctgccgccccctcctcatcaattgcacagccgtcgacttcttccttacattcccacagctccctggccgggacccagccccagccgctgtcgctcgtcaccaagtctttagaatagctttagcgtcgtgaaccccgctgctttgtttatggttttgtttcacttttcttaatttgccccccacccccaccttgaaaggttttgttttgtactctcttaattttgtgccatgtggctacattagttgatgtttatcgagttcattggtcaatatttgacccattcttatttcaatttctccttttaaatatgtagatgagagaagaacctcatgattctaccaaaatttttatcaacagctgtttaaagtctttgtagcgtttaaaaaatatatatatatacataactgttatgtagttcggatagcttagttttaaaagactgattaaaaaacaaaaagaaaaaaaaagcaattttgaagcagccctccagaaggagttggttctgtattatttgtattaaatacgagcttgcgaaccaatcattttacatctggtttttaaaccgtaagggcaccatgaatgcagtgccgttactttttttttttttttctgtgtgaaacaactcttattgtgatgttacttgttattgtttaaatgtacagaaacaaagggtaaaaatgtgttaatataccttgttccatggtgttgttcttttggggggaggggacgctactcaacacttaatagaatcacaacgctgttgggccagtagtatttattgctttagagattgcttgtcgtacctgtatgtcgtccctttttaaatatgttttcctttttcttgaaactgtataaagtttttttcccccttagcataagcatcttatatataacaactcatttgtacaaggtttttaagtttatatataaaatgtgtatatatatttttgtttcccctttttgacttttttttttctgtatgaaacccagatgtcaccaaatggacattaatagttgcattaaggatcagtagcattaacaaaagttgctttaaaagccattatgtaaaacaagacttgaaaatgagtgagggaattttagcgacactgtctgagcagcagtgggaaccatcttcgtttcccctttgaactcccagtgggatgccctaccctgcgcccttaggacccggactgaccgtgtacaaaactttacgtgccaaaattctcagtgaatttagctttctccctctttttgatgctgtaatttttgttcatcatgttttgctgtgatgttacataggtagatttgtatgtagttttaatgtcacctataacaaaatgtgtttggtagcagattgtccagaaagcattttaaatgaagaggtataaacccttaagggccaaaattctgtatattagattactcttaaacgaaaaaccagctgccgcttttatgtacacatattacatacgagtaggcagcagactttaaaaataaaaaaaacctaggcatgttgatgttgcaaaatgctgtataaagctgaaacctgttcattcagtgccattgtagttgacatgaagcgattgtaaaactgtctccgatttttctctggtttattaaaatgctaactataacattttttgtgaatactttgaatgtttcctaacagttgtgatgttactgttccgttttatgctcttattccaagttcatttttaatggtttggaagccatttttgtaatgaataaatgttcatgctgtacagtatctgtagcatgccgttctggattaataaaagcaacttagtatgtgcagataaa

SEQ ID NO: 31948 - DNA, 1992 bp, Homo sapiens
  source 1..1992: mol_type = unassigned DNA
aataatctccgctcccagactactccgttcctccggatttcgatccccctttttctatctgtcaatcagcgccgcctttgaactgaaaagctctcagtctaacttcaactcactcaaatccgagcggcacgagcacctcctgtatcttcggcttccccccccctttgctctttatatctgacttcttgttgttgttggtgttttttttttttttaccccccttttttatttattatttttttgcacattgatcggatccttgggaacgagagaaaaaagaaacccaaactcacgcgtgcagaagatctccccccccttcccctcccctcctccctcttttcccctccccaggagaaaaagacccccaagcagaaaaaagttcaccttggactcgtctttttcttgcaatattttttgggggggcaaaactttttgggggtgattttttttggcttttcttcctccttcatttttcttccaaaattgctgctggtgggtgaaaaaaaaatgccgcagctgaacggcggtggaggggatgacctaggcgccaacgacgaactgatttccttcaaagacgagggcgaacaggaggagaagagctccgaaaactcctcggcagagagggatttagctgatgtcaaatcgtctctagtcaatgaatcagaaacgaatcaaaacagctcctccgattccgaggcggaaagacggcctccgcctcgctccgaaagtttccgagacaaatcccgggaaagtttggaagaagcggccaagaggcaagatggagggctctttaaggggccaccgtatcccggctaccccttcatcatgatccccgacctgacgagcccctacctccccaacggatcgctctcgcccaccgcccgaaccctccattttcagtccggcagcacacattactctgcgtacaaaacgattgaacaccagattgcagttcagtatctccagatgaaatggccactgcttgatgtccaggcagggagcctccagagtagacaagccctcaaggatgcccggtccccatcaccggcacacattgtctctaacaaagtgccagtggtgcagcaccctcaccatgtccaccccctcacgcctcttatcacgtacagcaatgaacacttcacgccgggaaacccacctccacacttaccagccgacgtagaccccaaaacaggaatcccacggcctccgcaccctccagatatatccccgtattacccactatcgcctggcaccgtaggacaaatcccccatccgctaggatggttagtaccacagcaaggtcaaccagtgtacccaatcacgacaggaggattcagacacccctaccccacagctctgaccgtcaatgcttccatgtccaggttccctccccatatggtcccaccacatcatacgctacacacgacgggcattccgcatccggccatagtcacaccaacagtcaaacaggaatcgtcccagagtgatgtcggctcactccatagttcaaagcatcaggactccaaaaaggaagaagaaaagaagaagccccacataaagaaacctcttaatgcattcatgttgtatatgaaggaaatgagagcaaaggtcgtagctgagtgcacgttgaaagaaagcgcggccatcaaccagatccttgggcggaggtggcatgcactgtccagagaagagcaagcgaaatactacgagctggcccggaaggagcgacagcttcatatgcaactgtaccccggctggtccgcgcgggataactatggaaagaagaagaagaggaaaagggacaagcagccgggagagaccaatgaacacagcgaatgtttcctaaatccttgcctttcacttcctccgattacagacctgagcgctcctaagaaatgccgagcgcgctttggccttgatcaacagaataactggtgcggcccttgcagatgcaaatactccaaagaagtgtcgggcactgttcgggcttga

SEQ ID NO: 31949 - DNA, 4022 bp, Homo sapiens
  source 1..4022: mol_type = unassigned DNA
aataatctccgctcccagactactccgttcctccggatttcgatccccctttttctatctgtcaatcagcgccgcctttgaactgaaaagctctcagtctaacttcaactcactcaaatccgagcggcacgagcacctcctgtatcttcggcttccccccccctttgctctttatatctgacttcttgttgttgttggtgttttttttttttttaccccccttttttatttattatttttttgcacattgatcggatccttgggaacgagagaaaaaagaaacccaaactcacgcgtgcagaagatctccccccccttcccctcccctcctccctcttttcccctccccaggagaaaaagacccccaagcagaaaaaagttcaccttggactcgtctttttcttgcaatattttttgggggggcaaaactttttgggggtgattttttttggcttttcttcctccttcatttttcttccaaaattgctgctggtgggtgaaaaaaaaatgccgcagctgaacggcggtggaggggatgacctaggcgccaacgacgaactgatttccttcaaagacgagggcgaacaggaggagaagagctccgaaaactcctcggcagagagggatttagctgatgtcaaatcgtctctagtcaatgaatcagaaacgaatcaaaacagctcctccgattccgaggcggaaagacggcctccgcctcgctccgaaagtttccgagacaaatcccgggaaagtttggaagaagcggccaagaggcaagatggagggctctttaaggggccaccgtatcccggctaccccttcatcatgatccccgacctgacgagcccctacctccccaacggatcgctctcgcccaccgcccgaaccctccattttcagtccggcagcacacattactctgcgtacaaaacgattgaacaccagattgcagttcagtatctccagatgaaatggccactgcttgatgtccaggcagggagcctccagagtagacaagccctcaaggatgcccggtccccatcaccggcacacattgtctctaacaaagtgccagtggtgcagcaccctcaccatgtccaccccctcacgcctcttatcacgtacagcaatgaacacttcacgccgggaaacccacctccacacttaccagccgacgtagaccccaaaacaggaatcccacggcctccgcaccctccagatatatccccgtattacccactatcgcctggcaccgtaggacaaatcccccatccgctaggatggttagtaccacagcaaggtcaaccagtgtacccaatcacgacaggaggattcagacacccctaccccacagctctgaccgtcaatgcttccatgtccaggttccctccccatatggtcccaccacatcatacgctacacacgacgggcattccgcatccggccatagtcacaccaacagtcaaacaggaatcgtcccagagtgatgtcggctcactccatagttcaaagcatcaggactccaaaaaggaagaagaaaagaagaagccccacataaagaaacctcttaatgcattcatgttgtatatgaaggaaatgagagcaaaggtcgtagctgagtgcacgttgaaagaaagcgcggccatcaaccagatccttgggcggaggtggcatgcactgtccagagaagagcaagcgaaatactacgagctggcccggaaggagcgacagcttcatatgcaactgtaccccggctggtccgcgcgggataactatggaaagaagaagaagaggaaaagggacaagcagccgggagagaccaatgacctgagcgctcctaagaaatgccgagcgcgctttggccttgatcaacagaataactggtgcggcccttgcaggagaaaaaaaaagtgcgttcgctacatacaaggtgaaggcagctgcctcagcccaccctcttcagatggaagcttactagattcgcctcccccctccccgaacctgctaggctcccctccccgagacgccaagtcacagactgagcagacccagcctctgtcgctgtccctgaagcccgaccccctggcccacctgtccatgatgcctccgccacccgccctcctgctcgctgaggccacccacaaggcctccgccctctgtcccaacggggccctggacctgcccccagccgctttgcagcctgccgccccctcctcatcaattgcacagccgtcgacttcttccttacattcccacagctccctggccgggacccagccccagccgctgtcgctcgtcaccaagtctttagaatagctttagcgtcgtgaaccccgctgctttgtttatggttttgtttcacttttcttaatttgccccccacccccaccttgaaaggttttgttttgtactctcttaattttgtgccatgtggctacattagttgatgtttatcgagttcattggtcaatatttgacccattcttatttcaatttctccttttaaatatgtagatgagagaagaacctcatgattctaccaaaatttttatcaacagctgtttaaagtctttgtagcgtttaaaaaatatatatatatacataactgttatgtagttcggatagcttagttttaaaagactgattaaaaaacaaaaagaaaaaaaaagcaattttgaagcagccctccagaaggagttggttctgtattatttgtattaaatacgagcttgcgaaccaatcattttacatctggtttttaaaccgtaagggcaccatgaatgcagtgccgttactttttttttttttttctgtgtgaaacaactcttattgtgatgttacttgttattgtttaaatgtacagaaacaaagggtaaaaatgtgttaatataccttgttccatggtgttgttcttttggggggaggggacgctactcaacacttaatagaatcacaacgctgttgggccagtagtatttattgctttagagattgcttgtcgtacctgtatgtcgtccctttttaaatatgttttcctttttcttgaaactgtataaagtttttttcccccttagcataagcatcttatatataacaactcatttgtacaaggtttttaagtttatatataaaatgtgtatatatatttttgtttcccctttttgacttttttttttctgtatgaaacccagatgtcaccaaatggacattaatagttgcattaaggatcagtagcattaacaaaagttgctttaaaagccattatgtaaaacaagacttgaaaatgagtgagggaattttagcgacactgtctgagcagcagtgggaaccatcttcgtttcccctttgaactcccagtgggatgccctaccctgcgcccttaggacccggactgaccgtgtacaaaactttacgtgccaaaattctcagtgaatttagctttctccctctttttgatgctgtaatttttgttcatcatgttttgctgtgatgttacataggtagatttgtatgtagttttaatgtcacctataacaaaatgtgtttggtagcagattgtccagaaagcattttaaatgaagaggtataaacccttaagggccaaaattctgtatattagattactcttaaacgaaaaaccagctgccgcttttatgtacacatattacatacgagtaggcagcagactttaaaaataaaaaaaacctaggcatgttgatgttgcaaaatgctgtataaagctgaaacctgttcattcagtgccattgtagttgacatgaagcgattgtaaaactgtctccgatttttctctggtttattaaaatgctaactataacattttttgtgaatactttgaatgtttcctaacagttgtgatgttactgttccgttttatgctcttattccaagttcatttttaatggtttggaagccatttttgtaatgaataaatgttcatgctgtacagtatctgtagcatgccgttctggattaataaaagcaacttagtatgtgcagataaa

SEQ ID NO: 31950 - DNA, 4000 bp, Homo sapiens
  source 1..4000: mol_type = unassigned DNA
aataatctccgctcccagactactccgttcctccggatttcgatccccctttttctatctgtcaatcagcgccgcctttgaactgaaaagctctcagtctaacttcaactcactcaaatccgagcggcacgagcacctcctgtatcttcggcttccccccccctttgctctttatatctgacttcttgttgttgttggtgttttttttttttttaccccccttttttatttattatttttttgcacattgatcggatccttgggaacgagagaaaaaagaaacccaaactcacgcgtgcagaagatctccccccccttcccctcccctcctccctcttttcccctccccaggagaaaaagacccccaagcagaaaaaagttcaccttggactcgtctttttcttgcaatattttttgggggggcaaaactttttgggggtgattttttttggcttttcttcctccttcatttttcttccaaaattgctgctggtgggtgaaaaaaaaatgccgcagctgaacggcggtggaggggatgacctaggcgccaacgacgaactgatttccttcaaagacgagggcgaacaggaggagaagagctccgaaaactcctcggcagagagggatttagctgatgtcaaatcgtctctagtcaatgaatcagaaacgaatcaaaacagctcctccgattccgaggcggaaagacggcctccgcctcgctccgaaagtttccgagacaaatcccgggaaagtttggaagaagcggccaagaggcaagatggagggctctttaaggggccaccgtatcccggctaccccttcatcatgatccccgacctgacgagcccctacctccccaacggatcgctctcgcccaccgcccgaaccctccattttcagtccggcagcacacattactctgcgtacaaaacgattgaacaccagattgcagttcagtatctccagatgaaatggccactgcttgatgtccaggcagggagcctccagagtagacaagccctcaaggatgcccggtccccatcaccggcacacattgtctctaacaaagtgccagtggtgcagcaccctcaccatgtccaccccctcacgcctcttatcacgtacagcaatgaacacttcacgccgggaaacccacctccacacttaccagccgacgtagaccccaaaacaggaatcccacggcctccgcaccctccagatatatccccgtattacccactatcgcctggcaccgtaggacaaatcccccatccgctaggatggttagtaccacagcaaggtcaaccagtgtacccaatcacgacaggaggattcagacacccctaccccacagctctgaccgtcaatgcttccatgtccaggttccctccccatatggtcccaccacatcatacgctacacacgacgggcattccgcatccggccatagtcacaccaacagtcaaacaggaatcgtcccagagtgatgtcggctcactccatagttcaaagcatcaggactccaaaaaggaagaagaaaagaagaagccccacataaagaaacctcttaatgcattcatgttgtatatgaaggaaatgagagcaaaggtcgtagctgagtgcacgttgaaagaaagcgcggccatcaaccagatccttgggcggaggtggcatgcactgtccagagaagagcaagcgaaatactacgagctggcccggaaggagcgacagcttcatatgcaactgtaccccggctggtccgcgcgggataactatggaaagaagaagaagaggaaaagggacaagcagccgggagagaccaatgaacacagcgaatgtttcctaaatccttgcctttcacttcctccgattacaggagaaaaaaaaagtgcgttcgctacatacaaggtgaaggcagctgcctcagcccaccctcttcagatggaagcttactagattcgcctcccccctccccgaacctgctaggctcccctccccgagacgccaagtcacagactgagcagacccagcctctgtcgctgtccctgaagcccgaccccctggcccacctgtccatgatgcctccgccacccgccctcctgctcgctgaggccacccacaaggcctccgccctctgtcccaacggggccctggacctgcccccagccgctttgcagcctgccgccccctcctcatcaattgcacagccgtcgacttcttccttacattcccacagctccctggccgggacccagccccagccgctgtcgctcgtcaccaagtctttagaatagctttagcgtcgtgaaccccgctgctttgtttatggttttgtttcacttttcttaatttgccccccacccccaccttgaaaggttttgttttgtactctcttaattttgtgccatgtggctacattagttgatgtttatcgagttcattggtcaatatttgacccattcttatttcaatttctccttttaaatatgtagatgagagaagaacctcatgattctaccaaaatttttatcaacagctgtttaaagtctttgtagcgtttaaaaaatatatatatatacataactgttatgtagttcggatagcttagttttaaaagactgattaaaaaacaaaaagaaaaaaaaagcaattttgaagcagccctccagaaggagttggttctgtattatttgtattaaatacgagcttgcgaaccaatcattttacatctggtttttaaaccgtaagggcaccatgaatgcagtgccgttactttttttttttttttctgtgtgaaacaactcttattgtgatgttacttgttattgtttaaatgtacagaaacaaagggtaaaaatgtgttaatataccttgttccatggtgttgttcttttggggggaggggacgctactcaacacttaatagaatcacaacgctgttgggccagtagtatttattgctttagagattgcttgtcgtacctgtatgtcgtccctttttaaatatgttttcctttttcttgaaactgtataaagtttttttcccccttagcataagcatcttatatataacaactcatttgtacaaggtttttaagtttatatataaaatgtgtatatatatttttgtttcccctttttgacttttttttttctgtatgaaacccagatgtcaccaaatggacattaatagttgcattaaggatcagtagcattaacaaaagttgctttaaaagccattatgtaaaacaagacttgaaaatgagtgagggaattttagcgacactgtctgagcagcagtgggaaccatcttcgtttcccctttgaactcccagtgggatgccctaccctgcgcccttaggacccggactgaccgtgtacaaaactttacgtgccaaaattctcagtgaatttagctttctccctctttttgatgctgtaatttttgttcatcatgttttgctgtgatgttacataggtagatttgtatgtagttttaatgtcacctataacaaaatgtgtttggtagcagattgtccagaaagcattttaaatgaagaggtataaacccttaagggccaaaattctgtatattagattactcttaaacgaaaaaccagctgccgcttttatgtacacatattacatacgagtaggcagcagactttaaaaataaaaaaaacctaggcatgttgatgttgcaaaatgctgtataaagctgaaacctgttcattcagtgccattgtagttgacatgaagcgattgtaaaactgtctccgatttttctctggtttattaaaatgctaactataacattttttgtgaatactttgaatgtttcctaacagttgtgatgttactgttccgttttatgctcttattccaagttcatttttaatggtttggaagccatttttgtaatgaataaatgttcatgctgtacagtatctgtagcatgccgttctggattaataaaagcaacttagtatgtgcagataaa

SEQ ID NO: 31951 - DNA, 1920 bp, Homo sapiens
  source 1..1920: mol_type = unassigned DNA
atgccgcagctgaacggcggtggaggggatgacctaggcgccaacgacgaactgatttccttcaaagacgagggcgaacaggaggagaagagctccgaaaactcctcggcagagagggatttagctgatgtcaaatcgtctctagtcaatgaatcagaaacgaatcaaaacagctcctccgattccgaggcggaaagacggcctccgcctcgctccgaaagtttccgagacaaatcccgggaaagtttggaagaagcggccaagaggcaagatggagggctctttaaggggccaccgtatcccggctaccccttcatcatgatccccgacctgacgagcccctacctccccaacggatcgctctcgcccaccgcccgaacctatctccagatgaaatggccactgcttgatgtccaggcagggagcctccagagtagacaagccctcaaggatgcccggtccccatcaccggcacacattgtcgcagtgctgtagctatcgatagaagtcttgtccagggaaacaatccaccattagctgggagcaaggccttagacagaaaggagcaacattcaactaaggaagaccccggccacgtctaacaaagtgccagtggtgcagcaccctcaccatgtccaccccctcacgcctcttatcacgtacagcaatgaacacttcacgccgggaaacccacctccacacttaccagccgacgtagaccccaaaacaggaatcccacggcctccgcaccctccagatatatccccgtattacccactatcgcctggcaccgtaggacaaatcccccatccgctaggatggttagtaccacagcaaggtcaaccagtgtacccaatcacgacaggaggattcagacacccctaccccacagctctgaccgtcaatgcttccatgtccagctttctgtcttctaggttccctccccatatggtcccaccacatcatacgctacacacgacgggcattccgcatccggccatagtcacaccaacagtcaaacaggaatcgtcccagagtgatgtcggctcactccatagttcaaagcatcaggactccaaaaaggaagaagaaaagaagaagccccacataaagaaacctcttaatgcattcatgttgtatatgaaggaaatgagagcaaaggtcgtagctgagtgcacgttgaaagaaagcgcggccatcaaccagatccttgggcggaggtggcatgcactgtccagagaagagcaagcgaaatactacgagctggcccggaaggagcgacagcttcatatgcaactgtaccccggctggtccgcgcgggataactatggaaagaagaagaagaggaaaagggacaagcagccgggagagaccaatgaacacagcgaatgtttcctaaatccttgcctttcacttcctccgattacagacctgagcgctcctaagaaatgccgagcgcgctttggccttgatcaacagaataactggtgcggcccttgcaggagaaaaaaaaagtgcgttcgctacatacaaggtgaaggcagctgcctcagcccaccctcttcagatggaagcttactagattcgcctcccccctccccgaacctgctaggctcccctccccgagacgccaagtcacagactgagcagacccagcctctgtcgctgtccctgaagcccgaccccctggcccacctgtccatgatgcctccgccacccgccctcctgctcgctgaggccacccacaaggcctccgccctctgtcccaacggggccctggacctgcccccagccgctttgcagcctgccgccccctcctcatcaattgcacagccgtcgacttcttccttacattcccacagctccctggccgggacccagccccagccgctgtcgctcgtcaccaagtctttagaatag

SEQ ID NO: 31952 - DNA, 4022 bp, Homo sapiens
  source 1..4022: mol_type = unassigned DNA
aataatctccgctcccagactactccgttcctccggatttcgatccccctttttctatctgtcaatcagcgccgcctttgaactgaaaagctctcagtctaacttcaactcactcaaatccgagcggcacgagcacctcctgtatcttcggcttccccccccctttgctctttatatctgacttcttgttgttgttggtgttttttttttttttaccccccttttttatttattatttttttgcacattgatcggatccttgggaacgagagaaaaaagaaacccaaactcacgcgtgcagaagatctccccccccttcccctcccctcctccctcttttcccctccccaggagaaaaagacccccaagcagaaaaaagttcaccttggactcgtctttttcttgcaatattttttgggggggcaaaactttttgggggtgattttttttggcttttcttcctccttcatttttcttccaaaattgctgctggtgggtgaaaaaaaaatgccgcagctgaacggcggtggaggggatgacctaggcgccaacgacgaactgatttccttcaaagacgagggcgaacaggaggagaagagctccgaaaactcctcggcagagagggatttagctgatgtcaaatcgtctctagtcaatgaatcagaaacgaatcaaaacagctcctccgattccgaggcggaaagacggcctccgcctcgctccgaaagtttccgagacaaatcccgggaaagtttggaagaagcggccaagaggcaagatggagggctctttaaggggccaccgtatcccggctaccccttcatcatgatccccgacctgacgagcccctacctccccaacggatcgctctcgcccaccgcccgaaccctccattttcagtccggcagcacacattactctgcgtacaaaacgattgaacaccagattgcagttcagtatctccagatgaaatggccactgcttgatgtccaggcagggagcctccagagtagacaagccctcaaggatgcccggtccccatcaccggcacacattgtctctaacaaagtgccagtggtgcagcaccctcaccatgtccaccccctcacgcctcttatcacgtacagcaatgaacacttcacgccgggaaacccacctccacacttaccagccgacgtagaccccaaaacaggaatcccacggcctccgcaccctccagatatatccccgtattacccactatcgcctggcaccgtaggacaaatcccccatccgctaggatggttagtaccacagcaaggtcaaccagtgtacccaatcacgacaggaggattcagacacccctaccccacagctctgaccgtcaatgcttccatgtccaggttccctccccatatggtcccaccacatcatacgctacacacgacgggcattccgcatccggccatagtcacaccaacagtcaaacaggaatcgtcccagagtgatgtcggctcactccatagttcaaagcatcaggactccaaaaaggaagaagaaaagaagaagccccacataaagaaacctcttaatgcattcatgttgtatatgaaggaaatgagagcaaaggtcgtagctgagtgcacgttgaaagaaagcgcggccatcaaccagatccttgggcggaggtggcatgcactgtccagagaagagcaagcgaaatactacgagctggcccggaaggagcgacagcttcatatgcaactgtaccccggctggtccgcgcgggataactatggaaagaagaagaagaggaaaagggacaagcagccgggagagaccaatgatgcaaatactccaaagaagtgtcgggcactgttcgggcttgaccgacagactttatggtgcaaaccgtgcaggagaaaaaaaaagtgcgttcgctacatacaaggtgaaggcagctgcctcagcccaccctcttcagatggaagcttactagattcgcctcccccctccccgaacctgctaggctcccctccccgagacgccaagtcacagactgagcagacccagcctctgtcgctgtccctgaagcccgaccccctggcccacctgtccatgatgcctccgccacccgccctcctgctcgctgaggccacccacaaggcctccgccctctgtcccaacggggccctggacctgcccccagccgctttgcagcctgccgccccctcctcatcaattgcacagccgtcgacttcttccttacattcccacagctccctggccgggacccagccccagccgctgtcgctcgtcaccaagtctttagaatagctttagcgtcgtgaaccccgctgctttgtttatggttttgtttcacttttcttaatttgccccccacccccaccttgaaaggttttgttttgtactctcttaattttgtgccatgtggctacattagttgatgtttatcgagttcattggtcaatatttgacccattcttatttcaatttctccttttaaatatgtagatgagagaagaacctcatgattctaccaaaatttttatcaacagctgtttaaagtctttgtagcgtttaaaaaatatatatatatacataactgttatgtagttcggatagcttagttttaaaagactgattaaaaaacaaaaagaaaaaaaaagcaattttgaagcagccctccagaaggagttggttctgtattatttgtattaaatacgagcttgcgaaccaatcattttacatctggtttttaaaccgtaagggcaccatgaatgcagtgccgttactttttttttttttttctgtgtgaaacaactcttattgtgatgttacttgttattgtttaaatgtacagaaacaaagggtaaaaatgtgttaatataccttgttccatggtgttgttcttttggggggaggggacgctactcaacacttaatagaatcacaacgctgttgggccagtagtatttattgctttagagattgcttgtcgtacctgtatgtcgtccctttttaaatatgttttcctttttcttgaaactgtataaagtttttttcccccttagcataagcatcttatatataacaactcatttgtacaaggtttttaagtttatatataaaatgtgtatatatatttttgtttcccctttttgacttttttttttctgtatgaaacccagatgtcaccaaatggacattaatagttgcattaaggatcagtagcattaacaaaagttgctttaaaagccattatgtaaaacaagacttgaaaatgagtgagggaattttagcgacactgtctgagcagcagtgggaaccatcttcgtttcccctttgaactcccagtgggatgccctaccctgcgcccttaggacccggactgaccgtgtacaaaactttacgtgccaaaattctcagtgaatttagctttctccctctttttgatgctgtaatttttgttcatcatgttttgctgtgatgttacataggtagatttgtatgtagttttaatgtcacctataacaaaatgtgtttggtagcagattgtccagaaagcattttaaatgaagaggtataaacccttaagggccaaaattctgtatattagattactcttaaacgaaaaaccagctgccgcttttatgtacacatattacatacgagtaggcagcagactttaaaaataaaaaaaacctaggcatgttgatgttgcaaaatgctgtataaagctgaaacctgttcattcagtgccattgtagttgacatgaagcgattgtaaaactgtctccgatttttctctggtttattaaaatgctaactataacattttttgtgaatactttgaatgtttcctaacagttgtgatgttactgttccgttttatgctcttattccaagttcatttttaatggtttggaagccatttttgtaatgaataaatgttcatgctgtacagtatctgtagcatgccgttctggattaataaaagcaacttagtatgtgcagataaa

SEQ ID NO: 31953 - DNA, 4073 bp, Homo sapiens
  source 1..4073: mol_type = unassigned DNA
aataatctccgctcccagactactccgttcctccggatttcgatccccctttttctatctgtcaatcagcgccgcctttgaactgaaaagctctcagtctaacttcaactcactcaaatccgagcggcacgagcacctcctgtatcttcggcttccccccccctttgctctttatatctgacttcttgttgttgttggtgttttttttttttttaccccccttttttatttattatttttttgcacattgatcggatccttgggaacgagagaaaaaagaaacccaaactcacgcgtgcagaagatctccccccccttcccctcccctcctccctcttttcccctccccaggagaaaaagacccccaagcagaaaaaagttcaccttggactcgtctttttcttgcaatattttttgggggggcaaaactttttgggggtgattttttttggcttttcttcctccttcatttttcttccaaaattgctgctggtgggtgaaaaaaaaatgccgcagctgaacggcggtggaggggatgacctaggcgccaacgacgaactgatttccttcaaagacgagggcgaacaggaggagaagagctccgaaaactcctcggcagagagggatttagctgatgtcaaatcgtctctagtcaatgaatcagaaacgaatcaaaacagctcctccgattccgaggcggaaagacggcctccgcctcgctccgaaagtttccgagacaaatcccgggaaagtttggaagaagcggccaagaggcaagatggagggctctttaaggggccaccgtatcccggctaccccttcatcatgatccccgacctgacgagcccctacctccccaacggatcgctctcgcccaccgcccgaaccctccattttcagtccggcagcacacattactctgcgtacaaaacgattgaacaccagattgcagttcagtatctccagatgaaatggccactgcttgatgtccaggcagggagcctccagagtagacaagccctcaaggatgcccggtccccatcaccggcacacattgtctctaacaaagtgccagtggtgcagcaccctcaccatgtccaccccctcacgcctcttatcacgtacagcaatgaacacttcacgccgggaaacccacctccacacttaccagccgacgtagaccccaaaacaggaatcccacggcctccgcaccctccagatatatccccgtattacccactatcgcctggcaccgtaggacaaatcccccatccgctaggatggttagtaccacagcaaggtcaaccagtgtacccaatcacgacaggaggattcagacacccctaccccacagctctgaccgtcaatgcttccatgtccaggttccctccccatatggtcccaccacatcatacgctacacacgacgggcattccgcatccggccatagtcacaccaacagtcaaacaggaatcgtcccagagtgatgtcggctcactccatagttcaaagcatcaggactccaaaaaggaagaagaaaagaagaagccccacataaagaaacctcttaatgcattcatgttgtatatgaaggaaatgagagcaaaggtcgtagctgagtgcacgttgaaagaaagcgcggccatcaaccagatccttgggcggaggtggcatgcactgtccagagaagagcaagcgaaatactacgagctggcccggaaggagcgacagcttcatatgcaactgtaccccggctggtccgcgcgggataactatggaaagaagaagaagaggaaaagggacaagcagccgggagagaccaatgaacacagcgaatgtttcctaaatccttgcctttcacttcctccgattacagatgcaaatactccaaagaagtgtcgggcactgttcgggcttgaccgacagactttatggtgcaaaccgtgcaggagaaaaaaaaagtgcgttcgctacatacaaggtgaaggcagctgcctcagcccaccctcttcagatggaagcttactagattcgcctcccccctccccgaacctgctaggctcccctccccgagacgccaagtcacagactgagcagacccagcctctgtcgctgtccctgaagcccgaccccctggcccacctgtccatgatgcctccgccacccgccctcctgctcgctgaggccacccacaaggcctccgccctctgtcccaacggggccctggacctgcccccagccgctttgcagcctgccgccccctcctcatcaattgcacagccgtcgacttcttccttacattcccacagctccctggccgggacccagccccagccgctgtcgctcgtcaccaagtctttagaatagctttagcgtcgtgaaccccgctgctttgtttatggttttgtttcacttttcttaatttgccccccacccccaccttgaaaggttttgttttgtactctcttaattttgtgccatgtggctacattagttgatgtttatcgagttcattggtcaatatttgacccattcttatttcaatttctccttttaaatatgtagatgagagaagaacctcatgattctaccaaaatttttatcaacagctgtttaaagtctttgtagcgtttaaaaaatatatatatatacataactgttatgtagttcggatagcttagttttaaaagactgattaaaaaacaaaaagaaaaaaaaagcaattttgaagcagccctccagaaggagttggttctgtattatttgtattaaatacgagcttgcgaaccaatcattttacatctggtttttaaaccgtaagggcaccatgaatgcagtgccgttactttttttttttttttctgtgtgaaacaactcttattgtgatgttacttgttattgtttaaatgtacagaaacaaagggtaaaaatgtgttaatataccttgttccatggtgttgttcttttggggggaggggacgctactcaacacttaatagaatcacaacgctgttgggccagtagtatttattgctttagagattgcttgtcgtacctgtatgtcgtccctttttaaatatgttttcctttttcttgaaactgtataaagtttttttcccccttagcataagcatcttatatataacaactcatttgtacaaggtttttaagtttatatataaaatgtgtatatatatttttgtttcccctttttgacttttttttttctgtatgaaacccagatgtcaccaaatggacattaatagttgcattaaggatcagtagcattaacaaaagttgctttaaaagccattatgtaaaacaagacttgaaaatgagtgagggaattttagcgacactgtctgagcagcagtgggaaccatcttcgtttcccctttgaactcccagtgggatgccctaccctgcgcccttaggacccggactgaccgtgtacaaaactttacgtgccaaaattctcagtgaatttagctttctccctctttttgatgctgtaatttttgttcatcatgttttgctgtgatgttacataggtagatttgtatgtagttttaatgtcacctataacaaaatgtgtttggtagcagattgtccagaaagcattttaaatgaagaggtataaacccttaagggccaaaattctgtatattagattactcttaaacgaaaaaccagctgccgcttttatgtacacatattacatacgagtaggcagcagactttaaaaataaaaaaaacctaggcatgttgatgttgcaaaatgctgtataaagctgaaacctgttcattcagtgccattgtagttgacatgaagcgattgtaaaactgtctccgatttttctctggtttattaaaatgctaactataacattttttgtgaatactttgaatgtttcctaacagttgtgatgttactgttccgttttatgctcttattccaagttcatttttaatggtttggaagccatttttgtaatgaataaatgttcatgctgtacagtatctgtagcatgccgttctggattaataaaagcaacttagtatgtgcagataaa

SEQ ID NO: 31954 - DNA, 973 bp, Homo sapiens
  source 1..973: mol_type = unassigned DNA
tgataacacacgccggagggtcgcacgcgggttccagttgtgattgctggagttgtgtattgccaggaggctctccgagattggggtcgggtcactgcctcatccaccggagcgatggcgtttctccgaagcatgtggggcgtgctgagtgccctgggaaggtctggagcagagctgtgcaccggctgtggaagtcgactgcgctcccccttcagttttgtgtatttaccgaggtggttttcatctgtcttggcaagttgtccaaagaaacctgtaagttcttaccttcgattttctaaagaacaactacccatatttaaagctcagaacccagatgcaaaaactacagaactaattagaagaattgcccagcgttggagggaacttcctgattcaaagaaaaaaatatatcaagatgcttatagggcggagtggcaggtatataaagaagagataagcagatttaaagaacagctaactccaagtcagattatgtctttggaaaaagaaatcatggacaaacatttaaaaaggaaagctatgacaaaaaaaaaagaaaagctgaagactgtaaaggaaaactggaaaaatctgtctgactctgaaaaggaattatatattcagcatgctaaagaggacgaaactcgttatcataatgaaatgaagtcttgggaagaacaaatgattgaagttggacgaaaggatcttctacgtcgcacaataaagaaacaacgaaaatatggtgctgaggagtgttaaaagtagaagattgagatgtgttcacaatggataggcacaggaaaccagttaggtctcaatacctgaagctatcgtaaaattaagaaaggataaagttggtaaaccttttatatttagtatctttttattcagctcatggacttctgccagcataatacttgctttggaaaacccagataaaggttcatgcaaactttattttgtgtttaggaac

SEQ ID NO: 31955 - DNA, 663 bp, Homo sapiens
  source 1..663: mol_type = unassigned DNA
agagctgtgcaccggctgtggaagtcgactgcgctcccccttcagttttgtgtatttaccgaggtggttttcatctgtcttggcaagttgtccaaagaaacctgtaagttcttaccttcgattttctaaagaacaactacccatatttaaagctcagaacccagatgcaaaaactacagaactaattagaagaattgcccagcgttggagggaacttcctgattcaaagaaaaaaatatatcaagatgcttatagggcggagtggcaggtatataaagaagagataagcagatttaaagaacagctaactccaagtcagattatgtctttggaaaaagaaatcatggacaaacatttaaaaaggaaagctatgacaaaaaaaaaagagttaacactgcttggaaaaccaaaaagacctcgttcagcttataacgtttatgtagctgaaagattccaagaagctaagggtgattcaccgcaggaaaagctgaagactgtaaaggaaaactggaaaaatctgtctgactctgaaaaggaagtgagtattacggttgttagtctcaagtgtctacttaggatatctgtgagagaatgtattagggcaaggcttgattcatgtgaagacaaccttgtattactaataatacaagtattctaaaatta

SEQ ID NO: 31956 - DNA, 5414 bp, Homo sapiens
  source 1..5414: mol_type = unassigned DNA
ctgagacgctccgctgggcgcgcagcagccgccgatcggacctcggggtcctggatgcaggactgtctgttacgtacagcccttgtgaccgtcacgggcggacaccggccaacgccgggttggggtgaggccgccgccgcggtccctccatcaccctcctggcccggcagaggaacccactgctccgggcggccggggacagaggtggctcaacagcgccgcctcgaagccagagccctccgcaggctagaggattgcggtttcccttcatctccgcggctcttattcctcccccgcaaggccgcccaccggggtacgctctcccgcgcctgcgccaattccgccccgccccgcccccatctaccgaccggatgttagcagatttcccatagtgcctcgctagtggcgggcatgataacacacgccggagggtcgcacgcgggttccagttgtgattgctggagttgtgtattgccaggaggctctccgagattggggtcgggtcactgcctcatccaccggagcgatggcgtttctccgaagcatgtggggcgtgctgagtgccctgggaaggtctggagcagagctgtgcaccggctgtggaagtcgactgcgctcccccttcagttttgtgtatttaccgaggtggttttcatctgtcttggcaagttgtccaaagaaacctgtaagttcttaccttcgattttctaaagaacaactacccatatttaaagctcagaacccagatgcaaaaactacagaactaattagaagaattgcccagcgttggagggaacttcctgattcaaagaaaaaaatatatcaagatgcttatagggcggagtggcaggtatataaagaagagataagcagatttaaagaacagctaactccaagtcagattatgtctttggaaaaagaaatcatggacaaacatttaaaaaggaaagctatgacaaaaaaaaaagagttaacactgcttggaaaaccaaaaagacctcgttcagcttataacgtttatgtagctgaaagattccaagaagctaagggtgattcaccgcaggaaaagctgaagactgtaaaggaaaactggaaaaatctgtctgactctgaaaaggaattatatattcagcatgctaaagaggacgaaactcgttatcataatgaaatgaagtcttgggaagaacaaatgattgaagttggacgaaaggatcttctacgtcgcacaataaagaaacaacgaaaatatggtgctgaggagtgttaaaagtagaagattgagatgtgttcacaatggataggcacaggaaaccagttaggtctcaatacctgaagctatcgtaaaattaagaaaggataaagttggtaaaccttttatatttagtatctttttattcagctcatggacttctgccagcataatacttgctttggaaaacccagataaaggttcatgcaaactttattttgtgtttaggaactactgaggatcagagtaatccaagcaaatgtgaatcattttacctttgacaaaggtaaatcagactatgaagttttttttatacaggatgatgactatggaaagagtactcttgtttccttatattatggaggcaggagtttcgttttcaaaattgttacaaattgtagaagccacggtgttctgtgatataagtgtgtgtttttcataaagcaggcagaactcatctaggtaaattacagttcctaggtataattcacattgtattcagagttgatggttgtacatataagtgattgctggttttagttgcaactttgtataaaagggactgagaaatttataaacttttttcttactgtcttttttctaaagtaaaaacaaagaaattatgtgccagatttatgcatattattttatgttgcatagaataaaatttttaatctttaattttacatttcctaaatatattttaagacgaaacatttgttctatagcttttccctttttttaagtaaggaattttatttttttctgaattattttctctcgtgagtatattgatccagaaagaaaacttgtattatgtgtgttttaaaatgagaaatctaaaaaacgaaaagtctccaaagtctctggaatttgaaacactttgcataacgtataaaagcctgtttaagagacagccaactatggcctgtggatcaaatccagcctgctgcctgctttttatggcctgtgagctaggaattgtgtttataattttaaatgtttttttttaaagacttttatgatacttgaaaattaacatgaatatttagtgttcataaataaagtttgttgaaacacaaccaagatcattcttttacttgtctatggctgcttttctgtggcagagtagctgccacagaaactatagcccacaaagcctgatatttactgtctgtctgtttatggaaaaaatttatcaacccatggtctatagtatagtgtgatatgactactgttccaatgtattgaagtgttgggatagttttttcaaatgttttcagatgttcttgttttagaatcattgtcacctttaagaggaaaaaggtcatcactagataatctaaacaaattgttgcttctcagtgttagcaaggaaaataatctagtttcaaattacattgcagtataatgaaaaagatccatatactgtggaatgatattcttttaaaattatttgctatggcttggtaaaaatgtactttttccagtagcacatatcacaagaacctcactgtagttgaaagccatctttctttagtatttgtttatccttttaggagagtcaagcaaaggttttcaccacctgtttgagcagaataattctcatcagttcacagatataggataactcaatttatatgcactttatgcgttatgcaaaatatttagaaattgtagattctagatctccagaaagactttgaagactttgatgtcacaaaaagatgacttgttatatgctgagcttgacaaaggtaggaatgggagagaaaaatagtagcttatgaggaaatatgaggctttaaatatataaagttggatattttaaaataacttttccctgtgggagcttctcactctgggtgcagacaggacagtgttggccattggtgaaatagataggatgggtttgaggccagagcagtctgggagtagggggaaagagaaggaggtgtgctagtgtctatcacaggctttctcaattaggtttgcaggagaaaaagccctaagtccctgtgtcatctagaatggtactaattatgtacagtccctaggagaatggagaaaatcataactcaaatcatcgactcaattctgttctcttcagatgagctcagagagcacataggagtgtttgtaatgaggggtatgtaatgattgagatagaggaatgagttacataaacatctcgggacaaatgcagcatagaaaacatctttgtagttaccctgcggggaaatttcctctgagttcttttaacattaactacccgtattattttatacttaacattcatatcataccttcccaaatatattgggaagttcagtgttaagtacgtttctcaagtacttaacaacttaatatagggaggaaaggtgtaaacagtgaaaaaagagcaaaactattttatggtaattttatggtagtatcagcttgtatttggttctctgtttctaaaataatgtaatttttaatattttaaataataggataacctggtttccaagcctttttttcccccgacatccagaatacacactggatccaagcctttcttaaacatcagtacatgtggaagactggcatgccatataccaaatgccattcagctgtaacagtatacacagattttctcttataaagaataagaacatcataaccaatgaccactcatataaagtcttatttgtgtgtgtgtgtgtgtgtgtgtgcacgtgtgtgtgttagagtctcattatattgctcaggctggagggcatggtgtgatcttggctcactgcagccttgacctcctgggctcaagtgatccttccgagtcgttgggactacagtaggtgaacaccaccatgcctggctaatttttgtattttttttttaatcaagatgggatcttgctatgttgcccaggctggtctcaaactcctggcatcaagcgttcctccttccttggcctccttaagtgctgggattataggtgtgagccaccatgcttgaccataaagccttactatttcttttggagacacagtcttgctctgtccaagctggaatgcagtgatgtgatcatggctcactgcagccttgaactcccaggcttaagagatcctcccatctcagcctcctgagtagctgggattataggtgcagaccatcaagccttgctattattttttagacttttcttaatttcatccaacaaagtagttgctgtaggagctgagtgttagaaggaaagatgctgaagaaatgaaatcaagcagggtgtatactgtcatgaataggcatacagtagtttttatacttttgttctttggagtaccaatgttaggttttacaaaagtaatttgatgaggggaaggagggttgtgtatttattttactttctgatgtttgcttaaataatactgtgtacgtattcagcttgctgtaattctgtaattacgctattgcgtttggctaactcctttttggaaatgtctttttttttgtacaaggcatgtgttagtttttactaattgctctgaatgtgtatatttagatttctgaattgaaaaaaaatagcgtacaataagtagatttaaagtaattagaacactttattgatttttctgatgttttctgtatctaaaatttatcaccaccaggttgtgctaaaacagcaggaagtttttatattgtgagtgacagtacccattatttctcttaattttactaacatttactataagaatattctctcgctcttttctccactcacagccattctccctccttctcttcataacatcaagctgtcacagacaaatctgaaaatgttacaagcacagactatgttgtatgttttgaaattttagaacagtaatgttctttttaaaattgaacttctgcagagtaagaaaatgaatacatttattactttaaatttgtaaaattttccaaagtaaaaccatacaaagctagtgtcagtctctctcattgttcacaaataaaggacttttgttaattgattaaatcacttactatattcgatatgaaatatataaaacatacaaccattatctaatacatttcagaatgtttcactggttacaggagccagtaaataaagttgactctaaacaggaattttaaataaactaaacattttttcatcaccaag

SEQ ID NO: 31957 - DNA, 2035 bp, Homo sapiens
  source 1..2035: mol_type = unassigned DNA
tggcggagtgaattcctgggccagcgcgcatgcgtcggcaggtagcaacccagctctttatgaccaggtgagatgttggtgagcaggtaaaaaaggaggatttgcctaagcgattccagggagctggcccgaccgagccctccagcccatgcccggcggggaccagtcgccaggagcgcagagccgcgatgtccatacttgccaaaatgggggactggcaggaccgtcacgacggcaccagcaacgggacggcacggttgccccagctgggcactgtaggtcaatctccctacacgagcgccccgccgctgtcccacacccccaatgccgacttccagcccccatacttccccccaccctaccagcctatctacccccagtcgcaagatccttactcccacgtcaacgacccctacagcctgaaccccctgcacgcccagccgcagccgcagcacccaggctggcccggccagaggcagagccaggagtctgggctcctgcacacgcaccgggggctgcctcaccagctgtcgggcctggatcctcgcagggactacaggcggcacgaggacctcctgcacggcccacacgcgctcagctcaggactcggagacctctcgatccactccttacctcacgccatcgaggaggtcccgcatgtagaagacccgggtattaacatcccagatcaaactgtaattaagaaaggccccgtgtccctgtccaagtccaacagcaatgccgtctccgccatccctattaacaaggacaacctcttcggcggcgtggtgaaccccaacgaagtcttctgttcagttccgggtcgcctctcgctcctcagctccacctcgaagtacaaggtcacggtggcggaagtgcagcggcggctctcaccacccgagtgtctcaacgcgtcgctgctgggcggagtgctccggagggcgaagtctaaaaatggaggaagatctttaagagaaaaactggacaaaataggattaaatctgcctgcagggagacgtaaagctgccaacgttaccctgctcacatcactagtagagggagaagctgtccacctagccagggactttgggtacgtgtgcgaaaccgaatttcctgccaaagcagtagctgaatttctcaaccgacaacattccgatcccaatgagcaagtgacaagaaaaaacatgctcctggctacaaaacagatatgcaaagagttcaccgacctgctggctcaggaccgatctcccctggggaactcacggcccaaccccatcctggagcccggcatccagagctgcttgacccacttcaacctcatctcccacggcttcggcagccccgcggtgtgtgccgcggtcacggccctgcagaactatctcaccgaggccctcaaggccatggacaaaatgtacctcagcaacaaccccaacagccacacggacaacaacgccaaaagcagtgacaaagaggagaagcacagaaagtgaggctctcctcccgccccgcccctcccacgcctcaccagccccccgcgcgcccaccctccggcgggtgacagctccgggatcagcaacccttcctgctgctgctactgctgctgctgctgccgccgccgccgccgccgctgcccttgggtccccccgagtctccgggactgccctctcgactgtcagtggggcagcctctccgactctgcacccgcctcgacctccccacccgctcccacacccctgtgccctcatgtggagcctaagagaacagaacaggccgtgaagccagcagagaaaagttctgccaagtttgtgaacccttttttttttaaacaaaacaacaaatcaacaacagcaacaacaacaacaaaaattaaaaacttttttctaaaaaaaaagtgaaaataaaaaaaattatatgcgcttcatgggactgagtcaccaccttcccttacatacttcagttcagattgtagccatacttaaaaaaaaaaaaaaagccaaaagatgatgacaacatttttatcagtattgtgaataaa

SEQ ID NO: 31958 - DNA, 3300 bp, Homo sapiens
  source 1..3300: mol_type = unassigned DNA
acgggagctctttcccttctctcctcctcctcgcccttctcctcgccctcctcctcctcctcgccctcctcttcctcctcctcctccttgccctcctcctctccctcctccttctcctcctccacctcctctccctcctcctcctcctcctgcgctcaccgccggcagccagcactttgcgctcacccagagagtagctccacttgggtgcgagaccgagaggggcatatccgttcacgccgatccatgaaaatgctttggaaattgacggataatatcaagtacgaggactgcgaggaccgtcacgacggcaccagcaacgggacggcacggttgccccagctgggcactgtaggtcaatctccctacacgagcgccccgccgctgtcccacacccccaatgccgacttccagcccccatacttccccccaccctaccagcctatctacccccagtcgcaagatccttactcccacgtcaacgacccctacagcctgaaccccctgcacgcccagccgcagccgcagcacccaggctggcccggccagaggcagagccaggagtctgggctcctgcacacgcaccgggggctgcctcaccagctgtcgggcctggatcctcgcagggactacaggcggcacgaggacctcctgcacggcccacacgcgctcagctcaggactcggagacctctcgatccactccttacctcacgccatcgaggaggtcccgcatgtagaagacccgggtattaacatcccagatcaaactgtaattaagaaaggccccgtgtccctgtccaagtccaacagcaatgccgtctccgccatccctattaacaaggacaacctcttcggcggcgtggtgaaccccaacgaagtcttctgttcagttccgggtcgcctctcgctcctcagctccacctcgaagtacaaggtcacggtggcggaagtgcagcggcggctctcaccacccgagtgtctcaacgcgtcgctgctgggcggagtgctccggagggcgaagtctaaaaatggaggaagatctttaagagaaaaactggacaaaataggattaaatctgcctgcagggagacgtaaagctgccaacgttaccctgctcacatcactagtagagggagaagctgtccacctagccagggactttgggtacgtgtgcgaaaccgaatttcctgccaaagcagtagctgaatttctcaaccgacaacattccgatcccaatgagcaagtgacaagaaaaaacatgctcctggctacaaaacagatatgcaaagagttcaccgacctgctggctcaggaccgatctcccctggggaactcacggcccaaccccatcctggagcccggcatccagagctgcttgacccacttcaacctcatctcccacggcttcggcagccccgcggtgtgtgccgcggtcacggccctgcagaactatctcaccgaggccctcaaggccatggacaaaatgtacctcagcaacaaccccaacagccacacggacaacaacgccaaaagcagtgacaaagaggagaagcacagaaagtgaggctctcctcccgccccgcccctcccacgcctcaccagccccccgcgcgcccaccctccggcgggtgacagctccgggatcagcaacccttcctgctgctgctactgctgctgctgctgccgccgccgccgccgccgctgcccttgggtccccccgagtctccgggactgccctctcgactgtcagtggggcagcctctccgactctgcacccgcctcgacctccccacccgctcccacacccctgtgccctcatgtggagcctaagagaacagaacaggccgtgaagccagcagagaaaagttctgccaagtttgtgaacccttttttttttaaacaaaacaacaaatcaacaacagcaacaacaacaacaaaaattaaaaacttttttctaaaaaaaaagtgaaaataaaaaaaattatatgcgcttcatgggactgagtcaccaccttcccttacatacttcagttcagattgtagccatacttaaaaaaaaaaaaaaagccaaaagatgatgacaacatttttatcagtattgtgaataaacttgaacacaaatacacgaagttccatgtcatgtcttcagttgtagaagtttttcctctttaaggtaaagcgaccaacttgaactttctctggcaacacgattcgcagttatataagggaatcagtgttcacgtctctgtatatatttatttatgtgtaatttaatgggaattgtaaatatggtgagtctgttttaagcctttttttttttatttatctgatcttgtttacctcttgtttagtgggttttgaatcttccctattagttcttcatgtggttcatggtactgatttagaaatccagtgtttgggggatttttttctctgggattcatgaatttagccctgttgtagcatgttaaaggtgacaaacagctggacaaatttttaaaaagtaaaataaaattttatctataattagtattattacatttagcttttcattgaaccgaaagaaaaaaagtgatattggaccctggaaagattttgaaacttgagtggtttgataacccttctatgtattgtagggagaaaaaaaaaagtttattttattccactgtcctcccttaaaagcatcatttgagcaataaatgaatattgtctttaaaccaagggttagggaattttcctctctctctctctctcctctctctttctgttcaaagaacttcaaacatttgggaccacctggtattctgtattttcactggccatattggaagcagttctagttgcattgtattgagttgtgctggcagtagtttccatgcctgtcaatgtatcatagtcctttgttgcccagataaataaatatttgatacgctttatgtcgatttttttttattcagtggctgtctttacccaggcgtatttttgttcttggcagtattttttattcagtatggttacagtaattgagtttaactctcccttggcaattgctccttgcaataagcagctgaacccattgtttccctcaagtataataaaaacttactttcaacttggagttcagagcagggtatcatttagatattccactgtgtctgtattcagacaaatgacacaataaaacccaatgtattcttttggataaaagattgtttgtactgctaaaggaatgacatactgtcttttccttactagaaacattaattttattattaaaaataaagttttattttattta

SEQ ID NO: 31959 - DNA, 2576 bp, Homo sapiens
  source 1..2576: mol_type = unassigned DNA
cacgcacgcagacacattctccctctctgcgctctctccttcggtctccctctctgcctctttctctttcacttttgcatgccctgcaaccttttaaaatgttgccccttccctgtgattcgccagacgccgcgccgcggccccccgcgcgctcgcccgctccctctctcgctcgctttttgtctctcgcgctccctctccccactccgatttgctacactgagactcccgtcaatggactgcattgagagccggctccggcgcgagttgcctctccgcttcacgctcgatttccaggcattcttcccttattaagtattcgtgtaatattaatagtcatgaatatctgctattaggaggctccaggaacgctgcccagcgcggttattagaagctcaagcgaagccgccgctaagaaaagagggggagacacggattaaggaacacgcacgcacccacacactcacacatactttttcctttttccttttttggggtttttcatttttaaagaactttgaatcataaccagtcgcggcaggatagagaccgtgggttcgaccagctgaaggcgccgcgcgaatcggtggttcaagttcggatggatccgagccgggctcccgcgctccggggagcgtcggcgccgtgactggagtcctgggtggcgcggggctctcggcgccttttgtgtggggcgcgctcgggcggcggggcagccgggcgctccaggcttgcttgtttttttccaccctgactcgttaccccagactcttcgcagatgttagttcacagtttttcagccatggaccgtcacgacggcaccagcaacgggacggcacggttgccccagctgggcactgtaggtcaatctccctacacgagcgccccgccgctgtcccacacccccaatgccgacttccagcccccatacttccccccaccctaccagcctatctacccccagtcgcaagatccttactcccacgtcaacgacccctacagcctgaaccccctgcacgcccagccgcagccgcagcacccaggctggcccggccagaggcagagccaggagtctgggctcctgcacacgcaccgggggctgcctcaccagctgtcgggcctggatcctcgcagggactacaggcggcacgaggacctcctgcacggcccacacgcgctcagctcaggactcggagacctctcgatccactccttacctcacgccatcgaggaggtcccgcatgtagaagacccgggtattaacatcccagatcaaactgtaattaagaaaggccccgtgtccctgtccaagtccaacagcaatgccgtctccgccatccctattaacaaggacaacctcttcggcggcgtggtgaaccccaacgaagtcttctgttcagttccgggtcgcctctcgctcctcagctccacctcgaagtacaaggtcacggtggcggaagtgcagcggcggctctcaccacccgagtgtctcaacgcgtcgctgctgggcggagtgctccggagggcgaagtctaaaaatggaggaagatctttaagagaaaaactggacaaaataggattaaatctgcctgcagggagacgtaaagctgccaacgttaccctgctcacatcactagtagagggagaagctgtccacctagccagggactttgggtacgtgtgcgaaaccgaatttcctgccaaagcagtagctgaatttctcaaccgacaacattccgatcccaatgagcaagtgacaagaaaaaacatgctcctggctacaaaacagatatgcaaagagttcaccgacctgctggctcaggaccgatctcccctggggaactcacggcccaaccccatcctggagcccggcatccagagctgcttgacccacttcaacctcatctcccacggcttcggcagccccgcggtgtgtgccgcggtcacggccctgcagaactatctcaccgaggccctcaaggccatggacaaaatgtacctcagcaacaaccccaacagccacacggacaacaacgccaaaagcagtgacaaagaggagaagcacagaaagtgaggctctcctcccgccccgcccctcccacgcctcaccagccccccgcgcgcccaccctccggcgggtgacagctccgggatcagcaacccttcctgctgctgctactgctgctgctgctgccgccgccgccgccgccgctgcccttgggtccccccgagtctccgggactgccctctcgactgtcagtggggcagcctctccgactctgcacccgcctcgacctccccacccgctcccacacccctgtgccctcatgtggagcctaagagaacagaacaggccgtgaagccagcagagaaaagttctgccaagtttgtgaacccttttttttttaaacaaaacaacaaatcaacaacagcaacaacaacaacaaaaattaaaaacttttttctaaaaaaaaagtgaaaataaaaaaaattatatgcgcttcatgggactgagtcaccaccttcccttacatacttcagttcagattgtagccatacttaaaaaaaaaaaaaaa

SEQ ID NO: 31960 - DNA, 3317 bp, Homo sapiens
  source 1..3317: mol_type = unassigned DNA
tccgagcgcacacgggagctctttcccttctctcctcctcctcgcccttctcctcgccctcctcctcctcctcgccctcctcttcctcctcctcctccttgccctcctcctctccctcctccttctcctcctccacctcctctccctcctcctcctcctcctgcgctcaccgccggcagccagcactttgcgctcacccagagagtagctccacttgggtgcgagaccgagaggggcatatccgttcacgccgatccatgaaaatgctttggaaattgacggataatatcaagtacgaggactgcgaggaccgtcacgacggcaccagcaacgggacggcacggttgccccagctgggcactgtaggtcaatctccctacacgagcgccccgccgctgtcccacacccccaatgccgacttccagcccccatacttccccccaccctaccagcctatctacccccagtcgcaagatccttactcccacgtcaacgacccctacagcctgaaccccctgcacgcccagccgcagccgcagcacccaggctggcccggccagaggcagagccaggagtctgggctcctgcacacgcaccgggggctgcctcaccagctgtcgggcctggatcctcgcagggactacaggcggcacgaggacctcctgcacggcccacacgcgctcagctcaggactcggagacctctcgatccactccttacctcacgccatcgaggaggtcccgcatgtagaagacccgggtattaacatcccagatcaaactgtaattaagaaaggccccgtgtccctgtccaagtccaacagcaatgccgtctccgccatccctattaacaaggacaacctcttcggcggcgtggtgaaccccaacgaagtcttctgttcagttccgggtcgcctctcgctcctcagctccacctcgaagtacaaggtcacggtggcggaagtgcagcggcggctctcaccacccgagtgtctcaacgcgtcgctgctgggcggagtgctccggagggcgaagtctaaaaatggaggaagatctttaagagaaaaactggacaaaataggattaaatctgcctgcagggagacgtaaagctgccaacgttaccctgctcacatcactagtagagggagaagctgtccacctagccagggactttgggtacgtgtgcgaaaccgaatttcctgccaaagcagtagctgaatttctcaaccgacaacattccgatcccaatgagcaagtgacaagaaaaaacatgctcctggctacaaaacagatatgcaaagagttcaccgacctgctggctcaggaccgatctcccctggggaactcacggcccaaccccatcctggagcccggcatccagagctgcttgacccacttcaacctcatctcccacggcttcggcagccccgcggtgtgtgccgcggtcacggccctgcagaactatctcaccgaggccctcaaggccatggacaaaatgtacctcagcaacaaccccaacagccacacggacaacaacgccaaaagcagtgacaaagaggagaagcacagaaagtgaggctctcctcccgccccgcccctcccacgcctcaccagccccccgcgcgcccaccctccggcgggtgacagctccgggatcagcaacccttcctgctgctgctactgctgctgctgctgccgccgccgccgccgccgctgcccttgggtccccccgagtctccgggactgccctctcgactgtcagtggggcagcctctccgactctgcacccgcctcgacctccccacccgctcccacacccctgtgccctcatgtggagcctaagagaacagaacaggccgtgaagccagcagagaaaagttctgccaagtttgtgaacccttttttttttaaacaaaacaacaaatcaacaacagcaacaacaacaacaaaaattaaaaacttttttctaaaaaaaaagtgaaaataaaaaaaattatatgcgcttcatgggactgagtcaccaccttcccttacatacttcagttcagattgtagccatacttaaaaaaaaaaaaaaagccaaaagatgatgacaacatttttatcagtattgtgaataaacttgaacacaaatacacgaagttccatgtcatgtcttcagttgtagaagtttttcctctttaaggtaaagcgaccaacttgaactttctctggcaacacgattcgcagttatataagggaatcagtgttcacgtctctgtatatatttatttatgtgtaatttaatgggaattgtaaatatggtgagtctgttttaagcctttttttttttatttatctgatcttgtttacctcttgtttagtgggttttgaatcttccctattagttcttcatgtggttcatggtactgatttagaaatccagtgtttgggggatttttttctctgggattcatgaatttagccctgttgtagcatgttaaaggtgacaaacagctggacaaatttttaaaaagtaaaataaaattttatctataattagtattattacatttagcttttcattgaaccgaaagaaaaaaagtgatattggaccctggaaagattttgaaacttgagtggtttgataacccttctatgtattgtagggagaaaaaaaaaagtttattttattccactgtcctcccttaaaagcatcatttgagcaataaatgaatattgtctttaaaccaagggttagggaattttcctctctctctctctctcctctctctttctgttcaaagaacttcaaacatttgggaccacctggtattctgtattttcactggccatattggaagcagttctagttgcattgtattgagttgtgctggcagtagtttccatgcctgtcaatgtatcatagtcctttgttgcccagataaataaatatttgatacgctttatgtcgatttttttttattcagtggctgtctttacccaggcgtatttttgttcttggcagtattttttattcagtatggttacagtaattgagtttaactctcccttggcaattgctccttgcaataagcagctgaacccattgtttccctcaagtataataaaaacttactttcaacttggagttcagagcagggtatcatttagatattccactgtgtctgtattcagacaaatgacacaataaaacccaatgtattcttttggataaaagattgtttgtactgctaaaggaatgacatactgtcttttccttactagaaacattaattttattattaaaaataaagttttattttatttatgttga

SEQ ID NO: 31961 - DNA, 987 bp, Homo sapiens
  source 1..987: mol_type = unassigned DNA
atgctttggaaattgacggataatatcaagtacgaggactgcgaggaccgtcacgacggcaccagcaacgggacggcacggttgccccagctgggcactgtaggtcaatctccctacacgagcgccccgccgctgtcccacacccccaatgccgacttccagcccccatacttccccccaccctaccagcctatctacccccagtcgcaagatccttactcccacgtcaacgacccctacagcctgaaccccctgcacgcccagccgcagccgcagcacccaggctggcccggccagaggcagagccaggagtctgggctcctgcacacgcaccgggggctgcctcaccagctgtcgggcctggatcctcgcagggactacaggcggcacgaggacctcctgcacggcccacacgcgctcagctcaggactcggagacctctcgatccactccttacctcacgccatcgaggaggtcccgcatgtagaagacccgggtattaacatcccagatcaaactgtaattaagaaaggccccgtgtccctgtccaagtccaacagcaatgccgtctccgccatccctattaacaaggacaacctcttcggcggcgtggtgaaccccaacgaagtcttctgttcagttccgggtcgcctctcgctcctcagctccacctcgaagtacaaggtcacggtggcggaagtgcagcggcggctctcaccacccgagtgtctcaacgcgtcgctgctgggcggagtgctccggagggcgaagtctaaaaatggaggaagatctttaagagaaaaactggacaaaataggattaaatctgcctgcagggagacgtaaagctgccaacgttaccctgctcacatcactagtagaggacagatatgcaaagagttcaccgacctgctggctcaggaccgatctcccctggggaactcacggcccaaccccatcctggagcccggcatccagagctgcttga

SEQ ID NO: 31962 - DNA, 2071 bp, Homo sapiens
  source 1..2071: mol_type = unassigned DNA
gcagattaacacagctaaaagtcggttcccggtgatttattttgatgcacgcacgagacggtatctagacttgcaggcacacacacgtctgtttttaggctcaacttcagaagcgggtgtgcagttccataggagttctgtattcgtgtccacgttgcacccaggaaaccttagcctgaacaccaatttgaactgtcagttggccctagcttcacacaaacaggagaaaaattgtttaacccctggagctgtcaagtaacctcttcaggccagcactttgcgctcacccagagagtagctccacttgggtgcgagaccgagaggggcatatccgttcacgccgatccatgaaaatgctttggaaattgacggataatatcaagtacgaggactgcgaggaccgtcacgacggcaccagcaacgggacggcacggttgccccagctgggcactgtaggtcaatctccctacacgagcgccccgccgctgtcccacacccccaatgccgacttccagcccccatacttccccccaccctaccagcctatctacccccagtcgcaagatccttactcccacgtcaacgacccctacagcctgaaccccctgcacgcccagccgcagccgcagcacccaggctggcccggccagaggcagagccaggagtctgggctcctgcacacgcaccgggggctgcctcaccagctgtcgggcctggatcctcgcagggactacaggcggcacgaggacctcctgcacggcccacacgcgctcagctcaggactcggagacctctcgatccactccttacctcacgccatcgaggaggtcccgcatgtagaagacccgggtattaacatcccagatcaaactgtaattaagaaaggccccgtgtccctgtccaagtccaacagcaatgccgtctccgccatccctattaacaaggacaacctcttcggcggcgtggtgaaccccaacgaagtcttctgttcagttccgggtcgcctctcgctcctcagctccacctcgaagtacaaggtcacggtggcggaagtgcagcggcggctctcaccacccgagtgtctcaacgcgtcgctgctgggcggagtgctccggagggcgaagtctaaaaatggaggaagatctttaagagaaaaactggacaaaataggattaaatctgcctgcagggagacgtaaagctgccaacgttaccctgctcacatcactagtagagggagaagctgtccacctagccagggactttgggtacgtgtgcgaaaccgaatttcctgccaaagcagtagctgaatttctcaaccgacaacattccgatcccaatgagcaagtgacaagaaaaaacatgctcctggctacaaaacagatatgcaaagagttcaccgacctgctggctcaggaccgatctcccctggggaactcacggcccaaccccatcctggagcccggcatccagagctgcttgacccacttcaacctcatctcccacggcttcggcagccccgcggtgtgtgccgcggtcacggccctgcagaactatctcaccgaggccctcaaggccatggacaaaatgtacctcagcaacaaccccaacagccacacggacaacaacgccaaaagcagtgacaaagaggagaagcacagaaagtgaggctctcctcccgccccgcccctcccacgcctcaccagccccccgcgcgcccaccctccggcgggtgacagctccgggatcagcaacccttcctgctgctgctactgctgctgctgctgccgccgccgccgccgccgctgcccttgggtccccccgagtctccgggactgccctctcgactgtcagtggggcagcctctccgactctgcacccgcctcgacctccccacccgctcccacacccctgtgccctcatgtggagcctaagagaacagaacaggccgtgaagccagcagagaaaagttctgccaagtttgtgaacccttttttttttaaacaaaacaacaaatcaacaacagcaacaacaacaacaaaaattaaaaacttttttctaaaaaaaaagtg

SEQ ID NO: 31963 - DNA, 5797 bp, Homo sapiens
  source 1..5797: mol_type = unassigned DNA
ttctctttgctgaggcttacttgtccagcctattgtttgagacaacagatataagttgcgatgggagaggagcgtcggatttggtgtgtatcccccatttccaattatagatggatcattacagacagcggagtcctgagaagccagacatctgctcctcacatgaatgcactcacctcctagagaccaggctgccatcatgctctggaagcttgtggagaatgtcaagtacgaagatatctatgagatgttagtccacacctattcatccatggaccggcacgatggtgtcccgagccacagctcgcggctctcccagctgggctcggtgtcccaaggaccctactcgagcgccccgccgctgtcccacaccccgtcgtcggacttccagccgccctacttcccacccccctaccagccgctcccctaccaccagagccaggacccctactcccacgtcaacgacccctactccctgaacccactgcaccagccccagcaacatccctgggggcaacggcagcggcaagaagtgggttcggaagccggctctctcctgccccagcctcgggccgccttgccccagctctcgggccttgacccccggagggactaccactcggtccgccggccggacgtgctgctgcattcggcgcaccacggcctggacgcgggcatgggtgacagcctctcgctgcacggcctcggccatcccggaatggaagacgtccagtcagttgaagatgccaataacagcggcatgaatctattggaccagtctgtcattaaaaaagttccagttcctcccaaatcggtgacttctctaatgatgaataaagacggcttcctgggaggcatgtctgtcaacaccggcgaggtgttttgctccgtcccaggccgtttgtctctgctcagttcaacttcgaagtacaaagtaactgtgggagaagttcagagacggctgtcgccccctgaatgcctcaatgcatctctcctcggcggagtcctcagaagagccaaatcgaaaaatggggggagatctttgcgagaaaggctagaaaaaatcggtttgaatttacccgcgggcaggcgcaaagcagcaaatgtcacgttactcacctccctggtggaaggagaagctgttcacttagctagggattttgggtacatttgcgaaacggagtttcccgccaaagccgtctctgagtatttgaaccggcagcacacagacccgagtgacctgcactcccgaaagaatatgctgttggccaccaagcaactttgtaaagaatttacggatctactggcgcaggaccggacaccgatagggaacagccgacccagccccatcctggagccggggatccagagctgcctcacgcacttcagcctcatcacgcacggcttcggcgccccggccatttgcgccgcgctcacggccctgcagaactatctcaccgaggcgctcaaaggcatggacaagatgttcttgaacaacaccaccactaacaggcacacgtctggggaaggcccaggtagtaaaactggcgacaaggaggagaaacacaggaaatgaaaaatttttaaaaaaagaaggaaaaatgttttaaatacaaaaggaaaaacagacaaaaatttaattttagctttaaaatattggattggctttggaagaattatattaggtagaatacacatacaatcaaaattttaaaaaaaaaagctaaataacttaaaaaaaaactgaggcgtacaacggagcaacaatatcggttctcagtgtctatttcaagatacatttggagacaaccgtccggattttccacttcggttctttcgagtttagtaatactgataataaaagaaaaccatgatttccccttccctttggaaaataaacataagactaaacatgagaaaaacgctaacttattggaagaaaatcggagaaacgttggtgtcaatgctttgagagctggttgactgagacgcacgaactttttaattttaaatatatttttaggaaactctcgcagtccccgccctccatctcacctcacccgtctcccaaccacccttttccatgttaccctcccttcctcacattgttacgggaatcttctgggatgaaaatgagtgtggttggcccttttgcgttgtttcagtcctctcggtacctccccgcccagccctgcgatcttaactcaccgggcccggctccccggccgcttgcataattagggagggcgagggcggggcgggaggcctgtggagaccaggcggaggctgcaatttttggtgccggccggcagagcaggttctggcggctgaggaaaatccggaccaataagttgattcaaacatcatcagttcctttcagaaatgttactagctcccagccttgccagcatctgcatagagagaatctcacatttattatatttgtgtcatctactaattttatgaactatagtaaaaaaaaaaaaacacacacacacacaatatgaatacgttgattagtatgtaattccttcggaggggtatgtaccatttcattctcttctgttttccaaagctttgcccgcatggtttatgagcttcttcaaagaggacttgggcttcctacacaatctataaggtacagagaaaaaaaaatccgatccctttttaatcaaagcctgtgtgtcagaattctgcaggtgcacttctttaaagaagctcaaagggaataatttagaaagtggccaatatgatggaagcagctttgaatctacatgctaacattcctcaacactccaattccggtggaggtggcaggggagggggtctgcaaaatgaattttaagggaaaagagtaaggattcttagagccctatattctaatagtattgccctgcatttaaaattgatttgatttccctgggttctttggtgattgctgtttaagcaaggaaagaagcagctttacgagtggacgtggggaggagggcggcacaagcacccacatttctgtaacaattgctttcttacaagatgctttatgaatgaggcatttttccctcccagacgtgcacttgttttggcatataatggcaaaataatgcaaagtgaagggagatgtatttcagctttgatttttaccgtctggatacatcgggactattcccagtggataaagtttcatgcatttaatatttctcacttctggcagcccagctcctttcttgggctccatcttagcattatcatgaaataagatctggaatccattgtctgcacctccgcaaaagcagtgagaaattatcccgggataagggtgaatgagagaggtctctaaatatagtgttgatacactcacctatttaacaaagtagacgagatctttgcaataccccttaaagataacgacatagatgttgttctgcaggatttatagttaggacccactcaattctccaggactcccggttttgcccccctcccgctttgccttggtgggggtggggattgggggagtggggattgcgttggggttttaggaatctgctgagagctttgcccatttttattaaaagaggaaagggaagttaggaagctcgtctcaggtcaccaaaagggcccaagcaactgttagggccacactgcagcccatctccaacccctagcttcgtttagcacttctgatcttcatggcccagccctagaactgttgagaggaatgcaatggccaagagctagacgttacggagagtgtagtcactctcttttcccagctcagaggcctgcgccttcgtccgagagctcggccgatcgcattagatgtgttctgattgcacaaggccaggagagaccacactgaaaacgatcgtctcctttccttgcagggcaacgcgccccacgcgtgtgacgtgcgagagacgcgatggacgcgccttgctcttactgtgcaggtcctgagagcgtgtgggccacaggcgcccagtcgtgttgaggacatagaatcagccgctggaggggctgccgactgcgcgggcccttcccgctctcggtctcaccctaagggctaaggcgaccgagaaagccccattctccagtaggtaatggggcggcgcccggtgggctgcaggtggggagggctcccagcgccgccagcggccacccggggcgccggctcctggagggagagtggcctagaaatatccaaggaatccgaagcttcccctcctccacctctgccagtacggaaacaccccaccgtcacaatcctaaagcggggagatgggatgggaattgtcttacttggcaaggcagggtaccttcattgccagacgccctcatttgtgtgttcctccttgctccagcgagatagaaccttttgcgcccccaaccccgtttcgtggagtgagcccactaccccttctccctccctcacttctcctttcatgtaggacccccgcccccttgctttccttagccaggcccgctacatttatctgataattgagttattaaaagatttggtttccttgggcctataaatcaataaacagtaggattaacgcaatagtttgccttttaagtcaagggagacgtttaaggcaagcccctttgagctttgttttcaaaccaaacaggtgagttgcagctctccccccggcccctgcactcttcagacatttggtccctgcccactcctaaacgctcagtcccaaaacaaaatagcgaaagacaggaggagtcaggatgtggcagtgctgccttcacactttccacttcgcaagttcttttaaaggttccaaagatctccagaccattctctgccaaaccctgccgcctcctgcacgtattgcaggtctctggggagcaagaaatgtcctgtttgggtgaggattccgtcacctaaaaagatctttaacttctcccccaaagtgggaaggtaactttctcccccttttccccaccaccttcactcctacacccccaattaccttgcattttctttccttccttctggcctccacacccatagctttcctccatccccacttaaagaaccgaagaggcttttaaagacctggctgctttgttttccttggccaaggaagccactttctctcaagcaattatttcatatcctacgaaaactttggtcgaatggaaaactcgaaacctcgagcttatctacacactgttcctctgctacaatgctttcctagttaagagtgtttatagagaatttgtcatcacatctgatatcctgtacttgtaatacattatgtggaaaggaaataaccttaaaccgtctgatgttgcctcaagagcccaaacggcgtttccccacctttgacgatgtatgtgaaattactggcttaaaaaaaaaagtatcaatttttttttaacggaatgaacactatccttctttaaatgccaaaatcgactccacctttgagttggtctctaattctctaacattgtttttgccacacaatcaagaaatatcaatctattgactcttcacgagaagagctctggagggtattcatgttaagtttgtatatatttatttatgcttaatttaatgggaatgtgtaaatatggcgagcaagtagtttgggattatttatctgtgaatctatacctctgtgaatgggtggttaaaaaacctcttgaccctagatagaatcctatctgaatttttctgttctttataaacaagctgttatggtaatgggtagaaattggtttattgtccagtgttaatctgatttacataaataaaaagattgttgtgttttca

SEQ ID NO: 31964 - DNA, 797 bp, Homo sapiens
  source 1..797: mol_type = unassigned DNA
tttttctctttgctgaggcttacttgtccagcctattgtttgagacaacagatataagttgcgatgggagaggagcgtcggatttggtgtgtatcccccatttccaattatagatggatcattacagacagcggagtcctgagaagccagacatctgctcctcacatgaatgcactcacctcctagagaccaggctgccatcatgctctggaagcttgtggagaatgtcaagtacgaagatatctatgagatgttagtccacacctattcatccatggaccggcacgatggtgtcccgagccacagctcgcggctctcccagctgggctcggtgtcccaaggaccctactcgagcgccccgccgctgtcccacaccccgtcgtcggacttccagccgccctacttcccacccccctaccagccgctcccctaccaccagagccaggacccctactcccacgtcaacgacccctactccctgaacccactgcaccagccccagcaacatccctgggggcaacggcagcggcaagaagtgggttcggaagccggctctctcctgccccagcctcgggccgccttgccccagctctcgggccttgacccccggagggactaccactcggtccgccggccggacgtgctgctgcattcggcgcaccacggcctggacgcgggcatgggtgacagcctctcgctgcacggcctcggccatcccggaatggaagacgtccagtcagttgaagatgccaataacagcggcatgaatctattggaccagtctgtcattaaaaaag

SEQ ID NO: 31965 - DNA, 1898 bp, Homo sapiens
  source 1..1898: mol_type = unassigned DNA
tttttctctttgctgaggcttacttgtccagcctattgtttgagacaacagatataagttgcgatgggagaggagcgtcggatttggtgtgtatcccccatttccaattatagatggatcattacagacagcggagtcctgagaagccagacatctgctcctcacatgaatgcactcacctcctagagaccaggctgccatcatgctctggaagcttgtggagaatgtcaagtacgaagatatctatgaggaccggcacgatggtgtcccgagccacagctcgcggctctcccagctgggctcggtgtcccaaggaccctactcgagcgccccgccgctgtcccacaccccgtcgtcggacttccagccgccctacttcccacccccctaccagccgctcccctaccaccagagccaggacccctactcccacgtcaacgacccctactccctgaacccactgcaccagccccagcaacatccctgggggcaacggcagcggcaagaagtgggttcggaagccggctctctcctgccccagcctcgggccgccttgccccagctctcgggccttgacccccggagggactaccactcggtccgccggccggacgtgctgctgcattcggcgcaccacggcctggacgcgggcatgggtgacagcctctcgctgcacggcctcggccatcccggaatggaagacgtccagtcagttgaagatgccaataacagcggcatgaatctattggaccagtctgtcattaaaaaagttccagttcctcccaaatcggtgacttctctaatgatgaataaagacggcttcctgggaggcatgtctgtcaacaccggcgaggtgttttgctccgtcccaggccgtttgtctctgctcagttcaacttcgaagtacaaagtaactgtgggagaagttcagagacggctgtcgccccctgaatgcctcaatgcatctctcctcggcggagtcctcagaagagccaaatcgaaaaatggggggagatctttgcgagaaaggctagaaaaaatcggtttgaatttacccgcgggcaggcgcaaagcagcaaatgtcacgttactcacctccctggtggaaggagaagctgttcacttagctagggattttgggtacatttgcgaaacggagtttcccgccaaagccgtctctgagtatttgaaccggcagcacacagacccgagtgacctgcactcccgaaagaatatgctgttggccaccaagcaactttgtaaagaatttacggatctactggcgcaggaccggacaccgatagggaacagccgacccagccccatcctggagccggggatccagagctgcctcacgcacttcagcctcatcacgcacggcttcggcgccccggccatttgcgccgcgctcacggccctgcagaactatctcaccgaggcgctcaaaggcatggacaagatgttcttgaacaacaccaccactaacaggcacacgtctggggaaggcccaggtagtaaaactggcgacaaggaggagaaacacaggaaatgaaaaatttttaaaaaaagaaggaaaaatgttttaaatacaaaaggaaaaacagacaaaaatttaattttagctttaaaatattggattggctttggaagaattatattaggtagaatacacatacaatcaaaattttaaaaaaaaaagctaaataacttaaaaaaaaactgaggcgtacaacggagcaacaatatcggttctcagtgtctatttcaagatacatttggagacaaccgtccggattttccacttcggttctttcgagtttagtaatactgataataaaagaaaaccatgatttccccttccctttggaaaataaacataagactaaacatgagaaaaa

SEQ ID NO: 31966 - DNA, 1711 bp, Homo sapiens
  source 1..1711: mol_type = unassigned DNA
agggagctgcttttgtgcagagggaaaattttgttcctacaggtttttaagtgggtacgaggcaaggagctatctgatccgggcaaaaccattacaatttagatatctacctatagaacattttttttttcctttaaaaattggaaaatacaagaagtttggatttttttttcccgattctttttttggagggggaaattgcatcgtaagctttcggagaaacccaacatgtcaactacctttccgggactagtccacgatgccgagatacgtcacgacggatcaaacagctaccgtttgatgcagcttggctgtctggagtcagtagccaattccactgtcgcctattcctcctcctctcctttaacttactccaccaccggcaccgagtttgcgtccccctacttctccactaaccaccagtacaccccgctccaccaccagtccttccattacgagtttcagcacagccacccggccgtcacccccgacgcctactctctgaactctctccaccactcgcaacagtactaccagcagatccaccacggggagcccaccgactttattaacctgcacaatgcgcgggcgctcaagtcgtcctgcctggacgagcagaggcgggagctgggctgcctcgatgcctaccgccgccatgacctgtccctcatgagccatggctctcagtatggaatgcacccagatcaaagactcctgccagggcccagcctggggctggccgccgcgggagcagacgacttgcagggctctgtggaggcccagtgtgggcttgttctcaatggccaaggtggagtgataagaagaggtggcacctgtgtggtcaaccccacagacttattttgctctgtccctggccgtttgtcccttcttagttctacttccaaatacaaggtgaccattgctgaggtaaagaggcgcctctccccacctgagtgcctcaatgcttcactcttgggaggcattttgagaagagcaaaatcaaagaatgggggccgctgcctgagagagaaattggataggcttggcttaaacttaccagcaggaagacggaaagcagctaatgtcaccctccttacttccttggttgaaggggaggctttgcacttggctcgggattttggctacacttgtgaaacagagtttccagccaaagcagtaggagaacatcttgccagacaacatatggaacagaaagaacagacagcaagaaaaaagatgatcctggcgaccaaacaaatctgtaaagaattccaagacctcttgagccaagatagatcaccactgggatcctccagacccactccaattctagaccttgacatccagagacatttaacacatttcagtttgatcactcatggctttgggactccggcaatatgtgcagctctaagcactttccaaacagttctcagtgaaatgctgaactacttggaaaaacacactactcacaagaacggcggagcggcggattctggccaaggacatgccaactcggagaaagctcccctgcggaaaacttcagaggctgccgtgaaagagggcaaaacagaaaagacagactagctacatcaaacagaatctatttccagagagtcttgctgctgatattttttctaatatatatatcattgagggtgactaatcttcagtggaccaaatctctacccttccccaaccctccataaaa

SEQ ID NO: 31967 - DNA, 2189 bp, Homo sapiens
  source 1..2189: mol_type = unassigned DNA
gtgcccgtccgtcctgcctccatggacccgcccgggaacggccaccgctgaggaccccacgcccactaggatcccggctgggtcgcacccagctaccgcaccgtgacctccgcgggctgtgccggctcccggcgcctctgcccgcagcgctcgccgtcgggctagggctccgccgccgccacgcctcgcgcccggcactcaccgccccatgctggtgcacacctactccgccatggagcgccccgacgggctgggagcagctgccggcggggcccgcctgtcgtctctgccccaggcggcctacgggccggcgcccccgctctgccacacgccggccgccacagctgccgccgaattccagccgccctacttcccgccgccctacccgcagccaccgctgccctacggtcaggcgcccgacgccgccgcagcctttccccacctggcaggggacccatatggcggcctggcgcccctggcgcagccgcagcctcctcaggccgcctgggccgcgccccgcgcagccgcccgcgcccacgaggagcctcccggcctgctggcaccgcccgcccgcgccctgggccttgacccgcgccgtgactatgccactgccgtgccccggctcctgcacggcctggccgacggcgcgcacggcctggcagacgcacctctcggccttccggggctggcggcggcccccggtctggaggacctgcaggcaatggacgagccgggaatgagcctcctagaccagtccgtgatcaagaaagtgcccatcccctccaaagccagcagcctctcagccctctccttggccaaagacagcctggtgggcggcatcacaaatcctggtgaggtcttctgctccgtgcccggccggctttcactgctcagctcaacgtccaagtacaaggtgacggtgggggaggtgcagcggcgactctcgcctcccgagtgcctcaacgcctccctcctggggggtgtcctccgcagggccaagtccaaaaatgggggccggtgtttgcgggaacggttagagaagattgggctcaacctgccagctggccgtcgcaaggccgccaatgtgacgctgctgacttcgctagtggaaggagaggccgtgcacctggcccgagacttcggttacgtctgtgagacggagttcccagccaaggcagctgccgagtacctgtgccgacagcacgctgacccgggggagctgcacagccgcaagagcatgctgctggctgccaagcagatctgcaaggagtttgcagacttgatggctcaggaccgctcaccgctgggcaacagccgcccagcactcatcctggagcccggagtacagagctgcttgacacactttagcctcatcacccatggcttcggtgggcctgccatctgtgctgccctcactgccttccagaactatttgctggagtcactcaaggggctggacaagatgtttctaagcagtgtgggcagtgggcatggtgaaaccaaggcttcggagaaggatgccaagcatcggaaataactgcttctcccaccccatccctaaggggctcccaggccctgaaatagggacttagctcttgggggtgggcctggaaggactgaaaggtgggattagagtcaggccagaaagagaacattcatccagagatcccagagttggggatctggcttggagtaagggagggtggcctctctgtggtggtgtgttggtaagttaagggcccaggtatttgtctcatgtgtgcaattttctgacctttgatggttgagaagggtttggacagaaaattgacatgaaaagatctggctcatggggcagagccctttccattagcgtggctgggtggccgtgggtgcttctagaggccaaagcctttgtgtttttcactggtggcaggaggaaaattgataaatcagaggtgctactgaggagttggtgcccctcattccagaatctcctacccccagaaaaggggtgctggaaggaggccccagtggactctttgtacccttcctactctcagagagaagtgggcaggaggggtcctcaaggaacaaagaagataaagcacaaatcgcagaacttgaatccaggctgctgctcatcatagtcctgttgctgtctgtcctatttatttatgtatgttgtaattaaatttgaaattttaaaa

SEQ ID NO: 31968 - DNA, 2866 bp, Homo sapiens
  source 1..2866: mol_type = unassigned DNA
cgccaggacacactgttcgggcgcggctttccccgtccgcggagcggtcttgacactcgcggcggcagcatctacgctcgcagagccgccgatgcgtgtccagtgacccggacagcaaggcccgcgcgcggcgggggcggcggcagacgcctggtcaccgtgaccccgattttggatttaccgcttgggggctggggggatcctggatttaactggcgactgttttgggggacgccggacgccatgttgtggaaaataaccgataatgtcaagtacgaagaggactgcgaggatcgccacgacgggagcagcaatgggaatccgcgggtcccccacctctcctccgccgggcagcacctctacagccccgcgccacccctctcccacactggagtcgccgaatatcagccgccaccctactttccccctccctaccagcagctggcctactcccagtcggccgacccctactcgcatctgggggaagcgtacgccgccgccatcaaccccctgcaccagccggcgcccacaggcagccagcagcaggcctggcccggccgccagagccaggagggagcggggctgccctcgcaccacgggcgcccggccggcctactgccccacctctccgggctggaggcgggcgcggtgagcgcccgcagggatgcctaccgccgctccgacctgctgctgccccacgcacacgccctggatgccgcgggcctggccgagaacctggggctccacgacatgcctcaccagatggacgaggtgcagaatgtcgacgaccagcacctgttgctgcacgatcagacagtcattcgcaaaggtcccatttccatgaccaagaaccctctgaacctcccctgtcagaaggagctggtgggggccgtaatgaaccccactgaggtcttctgctcagtccctggaagattgtcgctcctcagctctacgtctaaatacaaagtgacagtggctgaagtacagaggcgactgtccccacctgaatgcttaaatgcctcgttactgggaggtgttctcagaagagccaaatcgaaaaatggaggccggtccttgcgggagaagttggacaagattgggttgaatcttccggccgggaggcggaaagccgctcatgtgactctcctgacatccttagtagaaggtgaagctgttcatttggctagggactttgcctatgtctgtgaagccgaatttcctagtaaaccagtggcagaatatttaaccagacctcatcttggaggacgaaatgagatggcagctaggaagaacatgctattggcggcccagcaactgtgtaaagaattcacagaacttctcagccaagaccggacaccccatgggaccagcaggctcgccccagtcttggagacgaacatacagaactgcttgtctcatttcagcctgattacccacgggtttggcagccaggccatctgtgccgcggtgtctgccctgcagaactacatcaaagaagccctgattgtcatagacaaatcctacatgaaccctggagaccagagtccagctgattctaacaaaaccctggagaaaatggagaaacacaggaaataaaattggaacgaagaaaggttaggagagtagggaaggaacaggactgcaaaaatccttctccaccgcacagactgggaacccctcctggcctgggggaagagtttgttacctaccttactatttaaagagccttcactggttctgcatcacccgcccctggacttcttagttgtttctctagcgctgagctatctcctaactttggacctattatcagaaggtgacaagtactggctctttattcattaagctttttttttttgaaccccattctttccttctctgaaagtggtgctataagttttagaatcttttaaatacattccctgggccaacagacccacacacttagccattgaaatgtcaaattgatgtgccctagatcaacagatcaacaataccttttttttcagtgttaaggtaatggttggtttttgtgtccgctaaatatttaccttgaaaaaaagaaaagtgtgtatctagcttcttcagagatcaagtcctctggtaggaggcaaaggttctatctgcttagcaactagttaataagtggtatctgacacactctaaaccccgtgttcaaacgggggccttctggttttaggaaacttgtagaaacgaagcctgctgattgatttttttctcctttttttttttttttttttttaactttgaaagttaactcttcaaatgggagactctttgaaatgacatgttcctttaaggtactgaagctttatttgcatatttatttcagatgtttcgagtaaacttgaaaagggtaggcacgaagcaatttgttgctgcttgtcacccccaagtccccgtggaggttctgtattttaagaaacagtgcgttgagtgtacagattttatttatgcgtaatttaatggggtctgtaaatactggtgcacttcttacgacttttttgagacatgggatccaattttaatattaacttttaatggtgatggggtaatctataacacatcataaggttttattcatatatatacagggtattaagaattaagaggatgctgggctctgttcttggcttggaagattctatttaattgaaactctctgttcagaaagcaataactttgtctcgttcctgttgggctgaaccctaaggtgagtgtgcagtacagtgtgtgtgggtgaaatggagatttggaattgaactctctgcctgtaaatgttccccaaataattgttgtgtgtatgatacgtgtataataaaagtattcttgttagaatctgaaa

SEQ ID NO: 31969 - DNA, 482 bp, Homo sapiens
  source 1..482: mol_type = unassigned DNA
cgagctcaggggcgccgggagcgcggagctcgggctacggactcgcgggagttcactgcgcctccgggccctggagggctgcccctgcccgcaggcccgggcgcttccgccaggaggcgacagcgccatgttcctccaggatcgccacgacgggagcagcaatgggaatccgcgggtcccccacctctcctccgccgggcagcacctctacagccccgcgccacccctctcccacactggagtcgccgaatatcagccgccaccctactttccccctccctaccagcagctggcctactcccagtcggccgacccctactcgcatctgggggaagcgtacgccgccgccatcaaccccctgcaccagccggcgcccacaggcagccagcagcaggcctggcccggccgccagagccaggagggagcggggctgccctcgcaccacgggcgcccggccggcctactgccccacctctccgggc

SEQ ID NO: 31970 - DNA, 1674 bp, Homo sapiens
  source 1..1674: mol_type = unassigned DNA
ttttctggcccaagacccagggttcggacttggcgcctccaagcgcctcgggcttgggagcagcgcctagaccttcgccgccgggctttgagaactcgttcccccaggatcgccacgacgggagcagcaatgggaatccgcgggtcccccacctctcctccgccgggcagcacctctacagccccgcgccacccctctcccacactggagtcgccgaatatcagccgccaccctactttccccctccctaccagcagctggcctactcccagtcggccgacccctactcgcatctgggggaagcgtacgccgccgccatcaaccccctgcaccagccggcgcccacaggcagccagcagcaggcctggcccggccgccagagccaggagggagcggggctgccctcgcaccacgggcgcccggccggcctactgccccacctctccgggctggaggcgggcgcggtgagcgcccgcagggatgcctaccgccgctccgacctgctgctgccccacgcacacgccctggatgccgcgggcctggccgagaacctggggctccacgacatgcctcaccagatggacgaggtgcagaatgtcgacgaccagcacctgttgctgcacgatcagacagtcattcgcaaaggtcccatttccatgaccaagaaccctctgaacctcccctgtcagaaggagctggtgggggccgtaatgaaccccactgaggtcttctgctcagtccctggaagattgtcgctcctcagctctacgtctaaatacaaagtgacagtggctgaagtacagaggcgactgtccccacctgaatgcttaaatgcctcgttactgggaggtgttctcagaagagccaaatcgaaaaatggaggccggtccttgcgggagaagttggacaagattgggttgaatcttccggccgggaggcggaaagccgctcatgtgactctcctgacatccttagtagaaggtgaagctgttcatttggctagggactttgcctatgtctgtgaagccgaatttcctagtaaaccagtggcagaatatttaaccagacctcatcttggaggacgaaatgagatggcagctaggaagaacatgctattggcggcccagcaactgtgtaaagaattcacagaacttctcagccaagaccggacaccccatgggaccagcaggctcgccccagtcttggagacgaacatacagaactgcttgtctcatttcagcctgattacccacgggtttggcagccaggccatctgtgccgcggtgtctgccctgcagaactacatcaaagaagccctgattgtcatagacaaatcctacatgaaccctggagaccagagtccagctgattctaacaaaaccctggagaaaatggagaaacacaggaaataaaattggaacgaagaaaggttaggagagtagggaaggaacaggactgcaaaaatccttctccaccgcacagactgggaacccctcctggcctgggggaagagtttgttacctaccttactatttaaagagccttcactggttctgcatcacccgcccctggacttcttagttgtttctctagcgctgagctatctcctaactttggacctattatcagaaggtgacaagtactggctctttattcattaagcttttttttttt

SEQ ID NO: 31971 - DNA, 1424 bp, Homo sapiens
  source 1..1424: mol_type = unassigned DNA
ggagcggcggtgaaggtcctgggtgaggtagggttggatggtgcttgccgcgtatcatggctgcctccggaaaactcagcacttgccgtctccctccgttgcccacgattcgagaaatcattaagttgttaagactgcaagcagcgaagcagctatcacagaatttcctcctggacttgaggctgacagataagattgtaaggaaagctggcaatctgacaaatgcttatgtttacgaagtgggccctgggccagggggaatcacaagatctattcttaatgccgacgtcgctgaacttctggtggttgaaaaggacactcgatttattcctggattacagatgctttctgatgcagcacctgggaaactgagaattgttcatggagatgtcttgacatttaaggtagaaaaggctttttcagaaagtcttaaaagaccctgggaagatgatcctccaaatgtacatattattggaaatctgccttttagtgtttcaactccactgattatcaagtggcttgaaaatatttcctgtagagatggaccttttgtttatggcagaactcagatgactttgacttttcaaaaggaagtggcagagagacttgcagccaatacaggaagcaaacagcgtagtcgcctctctgttatggctcagtacctctgcaatgttcgacacatctttacgattccaggacaagcttttgtccccaaaccagaggtggacgtgggcgtggtgcacttcactcccttgatacagcccaagatagagcagccattcaagctggtggaaaaagtggttcagaatgtatttcagttccgaaggaaatactgccatcgagggctcagaatgttattccctgaagcgcagcgcttggaaagcacgggcaggctgttagagttggcagacatagaccctactcttcggccccgccagctctccatctcacactttaagagcctctgtgatgtatacagaaaaatgtgtgatgaagacccacaactctttgcatataatttcagagaagaactcaagcgaagaaaaagcaaaaatgaagaaaaagaagaggatgacgcagagaattacagactctagctgctgcctgggggcgagcagcctaccagatgtcgatttgcactacgtggagcttcttatataggtactcttttgtctttacagaatgacgatacaaatgccaatgaccagatgtgacttattttccttttactatacagcttggcagagaaaataaatatcatcaaataagatacagtacaagctttcttttaatatatactgtatagatagttatgacatgtttagtataaacagcatctattacaatctatcttacaaaaatgaagtatctgcacattttgcccctaaaccacattaaaataacttaaatatgctttaaataaa

SEQ ID NO: 31972 - DNA, 3415 bp, Homo sapiens
  source 1..3415: mol_type = unassigned DNA
gggaggagggggaagaagacgagggggaggagggcggtcgtccggggttaggttgagggggggcgtcggtccgttctgggcgggggatgactcacagcccatcccatctcccagacgccgcccgcccgcgcagtgctagctccatggcttagcggaggaggcggcagtggcgagctggggggaggggggactcttattttgttagggggaccgggccgaggcccgaccggcctggcagggctcgcccggggccgggcgtcatgtctcatgcggccgaaccagctcgggatggcgtagaggccagcgcggagggccctcgagccgtgttcgtgctgttggaggagcgcaggccggccgactcggctcagctgctcagcctgaactctttgcttccggaatccgggattgttgctgacatagaattagaaaacgtccttgatcctgacagcttctacgagctcaaaagccaacccttaccccttcgctcaagcctcccaatatcactgcaggccacaccagccaccccagctacactctctgcatcgtcttctgcagggggctccaggacccctgccatgtcgtcatcttcttcatcgagggtcttgctgcggcagcagctaatgcgggcccaggcgcaggagcaggagaggcgtgagcgtcgggaacaggccgccgcggctcccttccccagtcctgcacctgcctctcctgccatctctgtggttggcgtctctgctgggggccacacattgagccgtccaccccctgctcaggtgcccagggaggtgctcaaggtgcagacccatctggagaacccaacgcgctaccacctgcagcaggcgcgccggcagcaggtgaaacagtacctgtccaccacactcgggcccaagctggcttcccaggccctcaccccaccgccggggcccgcaagtgcccagccactgcctgcccctgaggctgcccacactaccggccccacaggcagtgcgcccaacagccccatggcgctgctcaccatcgggtccagctcagagaaggagattgatgatgtcattgatgagatcatcagcctggagtccagttacaatgatgaaatgctcagctatctgcccggaggcaccacaggactgcagctccccagcacgctgcctgtgtcagggaatctgcttgatgtgtacagtagtcaaggcgtggccacaccagccatcactgtcagcaactcctgcccagctgagctgcccaacatcaaacgggagatctctgagaccgaggcaaaggcccttttgaaggaacggcagaagaaagacaatcacaacctaattgagcgtcgcaggcgattcaacattaacgacaggatcaaggaactgggcactctcatccctaagtccagtgacccggagatgcgctggaacaagggcaccatcctgaaggcctctgtggattatatccgcaagctgcagaaggagcagcagcgctccaaagacctggagagccggcagcgatccctggagcaggccaaccgcagcctgcagctccgaattcaggaactagaactgcaggcccagatccatggcctgccagtacctcccactccagggctgctttccttggccacgacttcggcttctgacagcctcaagccagagcagctggacattgaggaggagggcaggccaggcgcagcaacgttccatgtaggggggggacctgcccagaatgctccccatcagcagccccctgcaccgccctcagatgcccttctggacctgcactttcccagcgaccacctgggggacctgggagaccccttccacctggggctggaggacattctgatggaggaggaggagggggtggtgggaggactgtcggggggtgccctgtccccactgcgggctgcctccgatcccctgctctcttcagtgtcccctgctgtctccaaggccagcagccgccgcagcagcttcagcatggaagaggagtcctgatcaggcctcacccctcccctgggactttcccacccaggaaaggaggaccagtcaggatgaggccccgccttttcccccaccctcccatgagactgccctgcccaggtatcctgggggaagaggagatgtgatcaggccccacccctgtaatcaggcaaggaggaggagtcagatgaggccctgcaccttccccaaaggaaccgcccagtgcaggtatttcagaaggagaaggctggagaaggacatgagatcagggcctgccccctggggatcacagcctcacccctgcccctgtgggactcatccttgcccaggtgagggaaggagacaggatgaggtctcgaccctgtcccctagggactgtcctagccaggtctcctgggaaagggagatgtcaggatgttgctccatcctttgtcttggaaccaccagtctagtccgtcctggcacagaagaggagtcaagtaatggaggtcccagccctgggggtttaagctctgccccttccccatgaaccctgccctgctctgcccaggcaaggaacagaagtgaggatgagacccagccccttcccctgggaactctcctggccttctaggaatggaggagccaggccccaccccttccctataggaacagcccagcacaggtatttcaggtgtgaaagaatcagtaggaccaggccaccgctagtgcttgtggagatcacagccccacccttgtccctcagcaacatcccatctaagcattccacactgcagggaggagtggtacttaagctcccctgccttaacctgggaccaacctgacctaacctaggagggctctgagccaaccttgctcttggggaaggggacagattatgaaatttcatggatgaattttccagacctatatctggagtgagaggcccccacccttgggcagagtcctgccttcttccttgaggggcagtttgggaaggtgatgggtattagtgggggactgagttcaggttaccagaaccagtacctcagtattctttttcaacatgtagggcaagaggatgaaggaaggggctatcctgggacctccccagcccaggaaaaactggaagccttcccccagcaaggcagaagcttggaggagggttgtaaaagcatattgtaccccctcatttgtttatctgatttttttattgctccgcatactgagaatctaggccaccccaacctctgttccccacccagttcttcatttggaggaatcaccccatttcagagttatcaagagacactcccccctccattcccacccctcatacctacacccaaggttgtcagctttggattgctggggccaggccccatggagggtatactgaggggtctataggtttgtgattaaaataataaaagctaggcgtgtttgatgcgcttttaactttg

SEQ ID NO: 31973 - DNA, 3546 bp, Homo sapiens
  source 1..3546: mol_type = unassigned DNA
gagagagcgagacctgggagggagggggcctccagcagaaaggggcgggggaaaaggtgcaaaagcagcgtgggagcgccgggctggcttcctgcggctgctgctggtctgactgggaagcagcaagccaccactacgaactctcaagaggagtgggagtgcgggagtccagagctgcctctgggaagtctgcagtagttgagcaaaggggtcctcacgttcctgagagctgggcaggggggattttggaacctggggcagccaagaacgagcagccaagggtacgggagattagttgtgcacagagcagtgctggtcgggcttgggggtggctggtgggcactgcgtgggaaaccttggtttgtagttttcttggtttgcgttactcctgttgggtagaattaccctccgcgcctttgtacaagacacggtgtctcctggggcaaggaaggagccaggatggcctgggctctgaagctgcctctggccgacgaagtgattgaatccgggttggtgcaggactttgatgctagcctgtccgggatcggccaggaactgggtgctggtgcctatagcatgagtgatgtccttgcattgcccatttttaagcaagaagagtcgagtttgcctcctgataatgagaataaaatcctgccttttcaatatgtgctttgtgctgctacctctccagcagtgaaactccatgatgaaaccctaacgtatctcaatcaaggacagtcttatgaaattcgaatgctagacaataggaaacttggagaacttccagaaattaatggcaaattggtgaagagtatattccgtgtggtgttccatgacagaaggcttcagtacactgagcatcagcagctagagggctggaggtggaaccgacctggagacagaattcttgacatagatatcccgatgtctgtgggtataatcgatcctagggctaatccaactcaactaaatacagtggagttcctgtgggaccctgcaaagaggacatctgtgtttattcaggtgcactgtattagcacagagttcactatgaggaaacatggtggagaaaagggggtgccattccgagtacaaatagataccttcaaggagaatgaaaacggggaatatactgagcacttacactcggccagctgccagatcaaagttttcaagcccaaaggtgcagacagaaagcaaaaaacggatagggaaaaaatggagaaacgaacacctcatgaaaaggagaaatatcagccttcctatgagacaaccatactcacagagtgttctccatggcccgagatcacgtatgtcaataactccccatcacctggcttcaacagttcccatagcagtttttctcttggggaaggaaatggttcaccaaaccaccagccagagccaccccctccagtcacagataacctcttaccaacaaccacacctcaggaagctcagcagtggttgcatcgaaatcgtttttctacattcacaaggcttttcacaaacttctcaggggcagatttattgaaattaactagagatgatgtgatccaaatctgtggccctgcagatggaatcagactttttaatgcattaaaaggccggatggtgcgtccaaggttaaccatttatgtttgtcaggaatcactgcagttgagggagcagcaacaacagcagcagcaacagcagcagaagcatgaggatggagactcaaatggtactttcttcgtttaccatgctatctatctagaagaactaacagctgttgaattgacagaaaaaattgctcagcttttcagcatttccccttgccagatcagccagatttacaagcaggggccaacaggaattcatgtgctcatcagtgatgagatgatacagaactttcaggaagaagcatgttttattctggacacaatgaaagcagaaaccaatgatagctatcatatcatactgaagtaggagtgcggcgtttcgtgcccagtggctgctccttccttcacctctgaaaacggccctcttgaagggggatatgaatggagatttgaaggtctgcaagaacctgactcgtctgactgtgtgtggaggagtccaggccatggaggcagaatcctggccctctgtgttggcccaagctcttgtggtacacacagattactgcccaatatgcagttctgcagctgttttagttaaatttctggaccttgttgttgttaaatatcagtagaaactctacataatttagagtgtatgtagggcataatgatgatgggaattgtgtgatgtttaacaggaagatcttaaattttgtgatatggagccctgtaatttttttcttatataaaaatgggtatctatattcataagactaggtcttcaatctctttgtactggtctcaaatgtactggtatctctgctttttgccacagtttgtccctgaaaactttatcagtgaggagaaatacagaattttccttttggttcccctgtaataccacaactaatagtattttcagctaacatttattgaccaggcagtgtgataaattttttgaatgaccatcttgtttaaccccctaatcacactatctgaagtaggtgctatagtgacccccaaccgaagatgaggaaatggagacacacagtggctaagtagcttgctaggtgccaggagctggcaggcagtgatgctgaaatccaaaccaggcaatctggccctccttattcaccctctcataccaccagtgctacccattataacctgtgttcacttcgcttattactgtggcccttctggtgactacaacataacactgagtatgaactgaggaattaaccactgaaagagacaaagcacacctaaataatgatgaacaaatcaagacctacaagaaatgaacacatagatgctttttaagtgtcattagttatcggaatcaaagaatttgaggtggtgacaactggggattatctgtaactccccaaatttactgttcttgaatgacattctcaaactatttattaatgagttagtctcatccctgctttctgtttcctctctctgcatcttctcttggcataggaagttattttactcatgctatgttttttaatagaagctttacaaaaaaagatgcattcccttcctgttcacactcttaccatgtttttgttcttccttaagaatgattgtgtgtgtgtgtgtgtgtgtgtgtaagtgtgtaagtgtaacatcatgggttttctttcttcacttgtaaagttttatctagaaatacttttacaggttatgttgaggtacacaaagataatgttctaagattgtgtattggatttggatttgtgtgtgtgtgtgtgtgtgtgtgtgtttaaagcatttgataaggtttaaatgttttttatacagagatttttgttcattaaactcaatctgcatcatggtctaatttctcttggtttgaaacaaattgaaaactttgaaaccaaaaaattaagtcaatgacttgtttaaaactgacctgagcaacttgttatattac

SEQ ID NO: 31974 - DNA, 3562 bp, Homo sapiens
  source 1..3562: mol_type = unassigned DNA
gacgtcatgttcgccgggcaggcgaggaaagaggacgccatgattggttggcgctggggcggcggacggtggaagggcctggcgagtctaggttttacgcctgtgctggactttctccttccatgtttccaggccgtggggggctacagagggcgagaagtcggctcagcggaaacctggatttggttctaagccgtggggttgagaaggggtgaccggaagtgatcgtgggactgaccggaagcgaggcctggaggggaaagagagagcgagacctgggagggagggggcctccagcagaaaggggcgggggaaaaggtgcaaaagcagcgtgggagcgccgggctggcttcctgcggctgctgctggtctgactgggaagcagcaagccaccactacgaactctcaagaggagtgggagtgcgggagtccagagctgcctctgggaagtctgcagtagttgagcaaaggggtcctcacgttcctgagagctgggcaggggggattttggaacctggggcagccaagaacgagcagccaagggtacgggagattagttgtgcacagagcagtgctggtcgggcttgggggtggctggtgggcactgcgtgggaaaccttggtttgtagttttcttggtttgcgttactcctgttgggtagaattaccctccgcgcctttgtacaagacacggtgtctcctggggcaaggaaggagccaggatggcctgggctctgaagctgcctctggccgacgaagtgattgaatccgggttggtgcaggactttgatgctagcctgtccgggatcggccaggaactgggtgctggtgcctatagcatgagtgatgtccttgcattgcccatttttaagcaagaagagtcgagtttgcctcctgataatgagaataaaatcctgccttttcaatatgtgctttgtgctgctacctctccagcagtgaaactccatgatgaaaccctaacgtatctcaatcaaggacagtcttatgaaattcgaatgctagacaataggaaacttggagaacttccagaaattaatggcaaattggtgaagagtatattccgtgtggtgttccatgacagaaggcttcagtacactgagcatcagcagctagagggctggaggtggaaccgacctggagacagaattcttgacatagatatcccgatgtctgtgggtataatcgatcctagggctaatccaactcaactaaatacagtggagttcctgtgggaccctgcaaagaggacatctgtgtttattcagcccaaaggtgcagacagaaagcaaaaaacggatagggaaaaaatggagaaacgaacacctcatgaaaaggagaaatatcagccttcctatgagacaaccatactcacagagtgttctccatggcccgagatcacgtatgtcaataactccccatcacctggcttcaacagttcccatagcagtttttctcttggggaaggaaatggttcaccaaaccaccagccagagccaccccctccagtcacagataacctcttaccaacaaccacacctcaggaagctcagcagtggttgcatcgaaatcgtttttctacattcacaaggcttttcacaaacttctcaggggcagatttattgaaattaactagagatgatgtgatccaaatctgtggccctgcagatggaatcagactttttaatgcattaaaaggccggatggtgcgtccaaggttaaccatttatgtttgtcaggaatcactgcagttgagggagcagcaacaacagcagcagcaacagcagcagaagcatgaggatggagactcaaatggtactttcttcgtttaccatgctatctatctagaagaactaacagctgttgaattgacagaaaaaattgctcagcttttcagcatttccccttgccagatcagccagatttacaagcaggggccaacaggaattcatgtgctcatcagtgatgagatgatacagaactttcaggaagaagcatgttttattctggacacaatgaaagcagaaaccaatgatagctatcatatcatactgaagtaggagtgcggcgtttcgtgcccagtggctgctccttccttcacctctgaaaacggccctcttgaagggggatatgaatggagatttgaaggtctgcaagaacctgactcgtctgactgtgtgtggaggagtccaggccatggaggcagaatcctggccctctgtgttggcccaagctcttgtggtacacacagattactgcccaatatgcagttctgcagctgttttagttaaatttctggaccttgttgttgttaaatatcagtagaaactctacataatttagagtgtatgtagggcataatgatgatgggaattgtgtgatgtttaacaggaagatcttaaattttgtgatatggagccctgtaatttttttcttatataaaaatgggtatctatattcataagactaggtcttcaatctctttgtactggtctcaaatgtactggtatctctgctttttgccacagtttgtccctgaaaactttatcagtgaggagaaatacagaattttccttttggttcccctgtaataccacaactaatagtattttcagctaacatttattgaccaggcagtgtgataaattttttgaatgaccatcttgtttaaccccctaatcacactatctgaagtaggtgctatagtgacccccaaccgaagatgaggaaatggagacacacagtggctaagtagcttgctaggtgccaggagctggcaggcagtgatgctgaaatccaaaccaggcaatctggccctccttattcaccctctcataccaccagtgctacccattataacctgtgttcacttcgcttattactgtggcccttctggtgactacaacataacactgagtatgaactgaggaattaaccactgaaagagacaaagcacacctaaataatgatgaacaaatcaagacctacaagaaatgaacacatagatgctttttaagtgtcattagttatcggaatcaaagaatttgaggtggtgacaactggggattatctgtaactccccaaatttactgttcttgaatgacattctcaaactatttattaatgagttagtctcatccctgctttctgtttcctctctctgcatcttctcttggcataggaagttattttactcatgctatgttttttaatagaagctttacaaaaaaagatgcattcccttcctgttcacactcttaccatgtttttgttcttccttaagaatgattgtgtgtgtgtgtgtgtgtgtgtgtaagtgtgtaagtgtaacatcatgggttttctttcttcacttgtaaagttttatctagaaatacttttacaggttatgttgaggtacacaaagataatgttctaagattgtgtattggatttggatttgtgtgtgtgtgtgtgtgtgtgtgtgtttaaagcatttgataaggtttaaatgttttttatacagagatttttgttcattaaactcaatctgcatcatggtctaa

SEQ ID NO: 31975 - DNA, 1862 bp, Homo sapiens
  source 1..1862: mol_type = unassigned DNA
gactgaccggaagcgaggcctggaggggaaagagagagcgagacctgggagggagggggcctccagcagaaaggggcgggggaaaaggtgcaaaagcagcgtgggagcgccgggctggcttcctgcggctgctgctggtctgactgggaagcagcaagccaccactacgaactctcaagaggagtgggagtgcgggagtccagagctgcctctgggaagtctgcagtagttgagcaaaggggtcctcacgttcctgagagctgggcaggggggattttggaacctggggcagccaagaacgagcagccaagggtacgggagattagttgtgcacagagcagtgctggtcgggcttgggggtggctggtgggcactgcgtgggaaaccttggtttgtagttttcttggtttgcgttactcctgttgggtagaattaccctccgcgcctttgtacaagacacggtgtctcctggggcaaggaaggagccaggatggcctgggctctgaagctgcctctggccgacgaagtgattgaatccgggttggtgcaggactttgatgctagcctgtccgggatcggccaggaactgggtgctggtgcctatagcatgagtgatgtccttgcattgcccatttttaagcaagaagagtcgagtttgcctcctgataatgagaataaaatcctgccttttcaatatgtgctttgtgctgctacctctccagcagtgaaactccatgatgaaaccctaacgtatctcaatcaaggacagtcttatgaaattcgaatgctagacaataggaaacttggagaacttccagaaattaatggcaaattggtgaagagtatattccgtgtggtgttccatgacagaaggcttcagtacactgagcatcagcagctagagggctggaggtggaaccgacctggagacagaattcttgacatagatatcccgatgtctgtgggtataatcgatcctagggctaatccaactcaactaaatacagtggagttcctgtgggaccctgcaaagaggacatctgtgtttattcagcccaaaggtgcagacagaaagcaaaaaacggatagggaaaaaatggagaaacgaacacctcatgaaaaggagaaatatcagccttcctatgagacaaccatactcacagagtgttctccatggcccgagatcacgtatgtcaataactccccatcacctggcttcaacagttcccatagcagtttttctcttggggaaggaaatggttcaccaaaccaccagccagagccaccccctccagtcacagataacctcttaccaacaaccacacctcaggaagctcagcagtggttgcatcgaaatcgtttttctacattcacaaggcttttcacaaacttctcaggggcagatttattgaaattaactagagatgatgtgatccaaatctgtggccctgcagatggaatcagactttttaatgcattaaaaggccggatggtgcgtccaaggttaaccatttatgtttgtcaggaatcactgcagttgagggagcagcaacaacagcagcagcaacagcagcagaagcatgaggatggagactcaaatggtactttcttcgtttaccatgctatctatctagaagaactaacagctgttgaattgacagaaaaaattgctcagcttttcagcatttccccttgccagatcagccagatttacaagcaggggccaacaggaattcatgtgctcatcagtgatgagatgatacagaactttcaggaagaagcatgttttattctggacacaatgaaagaaaccaatgatagctatcatatcatactgaagtaggagtgcggcgtttcgtgcc

SEQ ID NO: 31976 - DNA, 9292 bp, Homo sapiens
  source 1..9292: mol_type = unassigned DNA
accgcgggttcggagcgcgaagccgccgctgggtcctcggcgcgccccgcgtctgcgcttgctgccgcgccccggtcggcgcgctgggagttccagccatgctcttctggcacacgcagcccgagcactacaaccagcacaactccggcagctacctgcgtgatgtgctcgctctgcccatcttcaagcaggaggaaccccagctgtcccccgagaacgaggcccgcctgccacccctgcaatatgtgttgtgtgctgccacgtccccagccgtgaagctgcatgaagagacgctgacctacctcaaccaaggtcagtcttatgaaatccgactactggagaatcggaagctgggagactttcaagatctgaacacaaaatatgtcaagagcatcatccgtgtggtcttccatgaccgccggctgcagtatacggagcaccagcagctggagggctggcggtggagtcggccaggggaccggatcctggacatcgatattccactgtctgttggtatcttggaccccagggccagcccgacccagctgaatgcagtcgagtttttgtgggaccctgcgaagagagcttctgcattcattcaggtacactgcatcagcacagaattcacccccaggaagcacgggggcgagaagggagtgccctttcgagtccagattgacacgtttaagcagaacgagaatggggagtacacggagcacctgcactcagccagctgccagatcaaggtgttcaagccgaagggagccgatcggaaacagaagactgaccgggagaagatggagaaaagaactgcccaagagaaggagaaataccagccgtcctatgaaaccaccatcctcacagagtgctctccatggcccgacgtggcctaccaggtgaacagcgccccgtccccaagctacaatggttctccaaacagctttggcctcggcgaaggcaacgcctctccgacccacccggtggaggccctgcccgtgggcagtgaccacctgctcccatcagcttcgatccaggatgcccagcagtggcttcaccgcaacaggttctcgcagttctgccggctctttgccagcttctcaggtgctgacttgctgaagatgtcccgagatgatttggtccagatctgtggtcccgcagatgggatccggctcttcaacgccatcaaaggccggaatgtgaggccaaagatgaccatttatgtctgtcaggagctggagcagaatcgagtgcccctgcagcagaagcgggacggcagtggagacagcaacctgtctgtgtaccacgccatcttcctggaagagctgaccaccttggagctgattgagaagatcgccaacctgtacagcatctccccccagcacatccaccgagtctaccggcagggccccacgggcatccatgtggtggtgagcaacgagatggtgcagaacttccaagatgaatcctgttttgtcctcagcacaattaaagctgagagcaatgatggctaccacatcatcctgaaatgtggactctgagcagcagtggacctcatacctgtctccagctcccagccctgtggatccccgtggatgtagacattgccccactgtaagctgtggcctcaccaggcaagctgaggccaggagggaccctgcccagtctgtgaaagctacagagcaccaaccagcagaagcctgtggacaccaagtacggtgtacagaaagccagtggctcctttctcccttcctcttggcctccagattttgaatggttccttgttcttttctattggtccaaccctgacgttctaaaagggcaaacagtggagacgtctgctctgaaatccctcatcccttagttggaagctgattgggtatcttggtgctgcctgtattggtcccttctgaccactctcctgcctccagagaaagctctgcttcaccctggaagctggtacctttacctcctcctctgggagttggctgcatggccagcactgccgacttgatgggagcagtttgccctcattctcctgtttcaggtttgcttcccttctcagtgaccctggtgagcatccgcctttcctgttcttggatgaattgatgggagtggggctattctgtgccttctacctctttcttctctacgttgtttctaaggatctgctgctgcggaacccaaagatgtgctcctgtctctgcactggcgcattggcatggtagatgccacaatgtatgtgcacggcctttctcagagacattagttctgaggccctttgtggggaggttagggggatggtaatagaaaaagactattttatttcctggcaatcacgggtaaggaggattaggaatgagtattccattcctaggtgtcatcagatgaccttgaccaccacaataccaggccctcttggatggacttatagaaagttagagaagaccttgttgaaccgctgctaaacttgccacaggagcgatgtgttttctctgagtgcccctcacttacatgtttatctttgtttgtagaggctatgtttaggatattttgcctgcatcagaatgggtgcatcatctttcttaatggcctaactatcgggaaatttgagtgtcagtaactgtggtagactcagaaattcgtctttgtcttgcctctggttcctgggatccagtgatctctactggcccagggcttcagctcttggttaatttaggttcatggggaaccctctgaccacctgaatgggatgtcatagcttctaaatggagcttctgtggaatgaagtgctagactgaaggactaccagaataaaacagggtctacaatggggagaacttgttttatagatgaggaaaccaaggctcagaggggcaaagtcacctgcatggtagcacatagtgatagggtagcgatataaatttatcatataaaccaggacatctcggaataaaaggggctctgttagtcattatgttgggtaatagccgtggcattcctacagaacagagtgaggacaggctcctgattcctcttccttctttagaggagaagcggggagtgggttaactaacagctttattgagatgtcattcacatgccattcagtttacccattgctagtgtccaattgtattcacagaaccaccatcaattcacagaattacagtcaacgttggtacattttcatcacccccagtaaaaccccgtacccttggtctgtcactcctgctttcctaactcctgcagtccaaggcagccatgaatctactttctatgtaagattaacctactctggacatttcatatatctggaatcatgtgatatctcttttgtgactggcttcttccactgaatgttttctagggccgtccaagttgaggatgtatcagtacttcattcttttgtattgctgaataatacttcattgtatagatagaccacatttgtttattgattcatcagttgatggacatttgtgtgtttttactttttggctactctgaatgatgctgctatgaacatatttctacaagattttgtgtggacatatgttttcatttcttttagcaatatacataggagtggaattgctaggtcttacagtaactccgtgttttaactttttgagaaactgccagactgttttctatagcagctgtaccattttacattcccaccagcaatgtatccaggtttcaatttgtctacatcctcatcaacacttgctattatctgtctttttgcttttagcatcctaatgagtatgaaatgctatcttgtggttttgatttgcattcccctgatggcaactgatgctgagtgtcttttcctgtgcttacgggccatgcgtatttctttggagaaaggtctatccaggtcctttgcctatttttaattgagttgtctttttttttttaagttttctgttttcctaaccactagactaccagggatgagccttctttttattattgagttgggtgagctatttgtatattctagacgccagtcttttatcaggtatatgactggtaaaaatgttctccccttctgtggattgttttcagtttcttgttggtgtcctttgagacacaaaactttttaactttgatgatttccaagatacgtattttttttctattgtcacttgtgcttttggtgccatatctagaaaaccattgcctaatccaaggtcaagaagattaatgcctgtgttttcttctaagaactatacttttagttctcacaatggtctttgatccatttcgagtatatttttatatatgatgtgatgtaggggtccagcttcattcttttgcttgtggatctccacttgtcccactgctgattattgagaaaaatatcctttctccacggaattgtcttggcatccttgctaaaggcctctgcttcttactggatcttctttcctgggacatggtgtcgttgggaagcttaccttttttttttttttacttagtctgtgtttggttccaccagttttatgctgcctttctactctgttcttgctgtctccctctttacctgagtcaacggtactgagtcctatctctctctgatgttccccagtcttccttggtgcatgttctagctccacacactagtccttggaggaaggttgagaccaatgatttcctgttatgagtcatgaggaaactgaatcacctagaagtggaataatgtgctcagggtcaccatagcccattagtggaaggaccaggactagacctttagtcttctgaggtccagccccttaggctgtctgtcatcactgtacccaagtgatgtcactaccaaggccaaatgatggtgggctaaattttaattctcaaaagtgtaggaggctaatattgtcttctaagttccaaaagaagatgtaataaaagtctgttaccttaagtgtgctattagtagagtcttccatttttctggcatgcccctggcatctgctcttcttaccttctcgtggttgtagttaaagcttatagcttatgaaagaatagaaaataataaataccaaaaaaaagtacacatggtaatttggtaccaaaatatctcagctgcctaatttagcagctcatcccttccacaggggtcagatgagctaaagctccaggttttatttttcatttgattgacatacagaaaagccatagcccttcccacagctgtccagggtctttcctgtgagtccggaggtgctggcctattgagcaggacagctcttcccagggcattcccaccaacctgtggcttctgaactgtagcttctttttacagtgaaccccagagggaaataagacagacacatgtgctcaggccaccatcttgaactggaagcccaaagctgagttccttactcttaggtcgtcacggtttttgcggggtatctgcaaggttgagataaaccctttcctgtttaccaggttgtcctttctggatgaagggacagaggctgttgaatggaggaataataggtttgctggaggaggggcatggtatgcctgtggaaaggacaggatggggtggggaggtcgaggctttgacttggggtcctaaacaaaggtcaggtgttgccctagtgacctcttgcccagacagcccagagccccttacacagagctattaacctagggaaggctttaccagcagtggactggagccagccagggtcacaagtttccaagtccagcattgcttcaggggctggcctgagtaactgaagatctgaaaatcattaacaagtcgatgaaataaacggaaaagcctcttaggctgttgtcagtggagcagagggagaaagtccctaggcgctcagagggggtgagaaagcagtggatgattgggcgggggtgggggattagatgttgacactgcctggggtgtaggaagaggaacagagaacccagagtcagggtcctagatcccagaccctcgctcagtatgagtctctttgcctctctgggtctctatctcctcctcttacaaatacaggcttggtgatctctgaagatggcaccaacctgccatgaaatgaatctgaggggttttcccatttttccctccatcaaaatcgtacaaaaagctggacgtggtggcccatgcctctaatcctagcattttgggaggccgaggtgggagaatcacttgacgccaagagttcgagaccagcctgggcatcgtagtgagactccatctctgtctttttgaaaataaaaaatctttgaaaattgcacaacaggcaggagacctttacgtgtgcccatcctggttgtacacagtgccaccagtgctcctgcagtgcaaggcggcatgcttcttgacatgggtcagattgtgtccatcgtgtctttgggaatcagccctagctcctaactgggctgactacttcctccgcaaacttatgggggctcccagatattccttgccagccaggggccagacacagtgcaggcacagtctgtgtcattggtgcacatgtgcgtgtttacatgtgtacctgggttccttcccttgcccatgaatttgccatgagcacagccagaagcagcctcagcttggcaaggtgtggagatgactgctgttcccttcgcatttggggaaaacaggctccctcggtagctcgatgatcctcttttgatcttgtgtgacctcctggagagtggatgaagctggtggccttagcttttctagacagtgtaagtggcactgggcaaggcccccagagcagggcaaggtctctagagcgggtctcccacatgactggcttcacacaggcacttccgctcgggttgcatgctctgtgtcatcttaccggtccagggttgcaggtaggaaatgtttgtaccctcttctgattgccacctccttcccatcgccccttagggacagggcttgagggccagtgaggcgctggtcaggcaccccaggcctccttgggacctgcccaggggcaccctgagagctcctgaaacccccacttagcttccagacctttctgcaaaagctcctcctggctttcctccctcccccaatctatgggtcacagctaacagatctgagggcaactgctgtgctagtggccagggctgcacctgccatccccggctctgccactttagggccttctagaggcagtgtccttaggaagtagctctgaggcatgggttttctgctcctgtgcagggcagctgatgggataaggtggggaaggacggtcagtgcttgggccccagctggccagcctggcgatggggaaaccaaaccatgtcccccagcgaagggccagagtgggaacctgtcctcatgcccttcgtcctgaggagccctgaggtgggcagcaggggccaggggaagttttcaggccttcatcaaagagaacaacatcctcagctccgcacccctcatcctgtatcagcacttaccggtgtgtgactgcccttgtcagctagcatacggtgggcccacctggcccactggctgtttatgccactgatttatgatagggaatattatctttgaacccaatgaagtgttttctcccccatcacaaaaaaaaaaattcttatttttagtagacatgtatttaccaaaaatatgtactcaattattgtattttggattttatcaatttaaaaattgtggaaatttgtttgctcttacgccaacataatattgattttgcctcttggctctgaaagcccaaaatatttaccgtctagcccgttacagaaaaagtctgctgactactgagccagacctccattacctccatccctgttggattatttaaagaaagcctcagacagtaagggcttttttaaaagaataaaatgacttggtttgcgcttggaagcaggggaagcattcagatgagcggtttctgcattaaccctgcctatcacgcatctcgtgtcctgtgtggctggcgagccccccttggaaggttctggtgcttcagctggctcctgcagagtccaccccgcctcgtggtgggaatgcagagccctttgctttccttcttgccgcctgcttcctgttcctggggacccgctgggcctttggtctgcatcccctggccaggtccctcagggttgatgcgtggagaaggactttgagcagtggtgggcagcagtggcctcctggccagctcacactcttgtcctgggaggggcagcctgatctcacctccacctagtaccttggggactgaggaccttttggcttctctggagcctgcaagcctcttcccatgtgtccagctgctcttcctgctacaaaggggactgctcacagtggcctcagcttggtggttttgaggggccgccccccggccctccataagggtatcctgggcctgagaattctgcatctgccattggaggatggacagcctcaaatggaaggagtcccacgggagatgggtccgaggtccggctgtggccatccagccccctgtggcttgtccagcctctgtgcacccctggtgtcttcactccaggggcagacagcagccactgcagttcctttcttcgtgagtaacagtagtgatagcagctggggctaacaggctaggctttgtgttctgcgcatttggtcagcttctcactcgatcctccctaaagcaatggggaggcccccactagcccagttttcaggaagtcaactgggaggttagatgggggccagggtcccacagctactgatggcccgagccaggttgagcttcctggtgtccagtccggatcccacttgcagatctcatgctctcagataggtgggacaagttcttttgtcacagtgctggctctgtcctgaggcctcattgctggctgggtgtgctctgctgggaaaagctttgcggggcttgcttggttaaccacagaagagaaggggactgtttggggtgcctctctgcagcctccccgtgctgggtggaagcacggttactgtgttctctaatgttcatgtatttaaaatgatttctttctaaagatgtaacctccacacctttctccagattgggtgactcttttctaaaggtggtgggagtatctgtcggggtggtgtggcccttggatgggtcaggtgggtgtgagaggtcctggggaggtgggcgttgagctcaaagttgtcctactgccatgtttttgtacctgaaataaagcatattttgcacttgttactgtaccatagtgcggacgagaagtctgtatgtgggatctgtgcttgggttagaatgcaaataaaactcacatttgtaagaaa

SEQ ID NO: 31977 - DNA, 913 bp, Homo sapiens
  source 1..913: mol_type = unassigned DNA
ctggagcagaatcgagtgcccctgcagcagaagcgggacggcagtggagacagcaacctgtctgatggtgcagaacttccaagatgaatcctgttttgtcctcagcacaattaaagctgagagcaatgatggctaccacatcatcctgaaatgtggactctgagcagcagtggacctcatacctgtctccagctcccagccctgtggatccccgtggatgtagacattgccccactgtaagctgtggcctcaccaggcaagctgaggccaggagggaccctgcccagtctgtgaaagctacagagcaccaaccagcagaagcctgtggacaccaagtacggtgtacagaaagccagtggctcctttctcccttcctcttggcctccagattttgaatggttccttgttcttttctattggtccaaccctgacgttctaaaagggcaaacagtggagacgtctgctctgaaatccctcatcccttagttggaagctgattgggtatcttggtgctgcctgtattggtcccttctgaccactctcctgcctccagagaaagctctgcttcaccctggaagctggtacctttacctcctcctctgggagttggctgcatggccagcactgccgacttgatgggagcagtttgccctcattctcctgtttcaggtttgcttcccttctcagtgaccctggtgagcatccgcctttcctgttcttggatgaattgatgggagtggggctattctgtgccttctacctctttcttctctacgttgtttctaaggatctgctgctgcggaacccaaagatgtgctcctgtctctgcactggcgcattggcatggtagatgccacaatgtatgtgcacggcctttctcagagacattagttctgaggccctttgtggggag

SEQ ID NO: 31978 - DNA, 1680 bp, Homo sapiens
  source 1..1680: mol_type = unassigned DNA
cacggcagccctacactcggcctggaagaattgtttttcttctctggaaaggtgaacatttatagcatttatttcccaaatctgttaacatggcaaaatatgtcagtctcactgaagctaacgaagaactcaaggtcttaatggacgagaaccagaccagccgccccgtggccgttcacacctccaccgtgaacccgctcgggaagcagctcttgccgaaaacctttggacagtccagtgtcaacattgaccagcaagtggtaattggtatgcctcagagaccagcagcatcaaacatccctgtggtaggaagcccaaacccacccagcactcactttgcctctcagaaccagcattcctactcctcacctccttgggccgggcagcacaacaggaaaggagagaagaatggcatgggcctgtgccgtctttccatgaaggtctgggagacggtgcagaggaaagggaccacttcctgccaggaagtggtgggcgagctggtcgccaagttcagagctgccagcaaccacgcctcaccaaacgagtcagcttatgacgtgaaaaacataaaacggcgcacctacgatgccttaaacgtgctgatggccatgaatatcatctccagggagaaaaagaagatcaagtggattggtctgaccaccaactcggctcagaactgtcagaacttacgggtggaaagacagaagagacttgaaagaataaagcagaaacagtctgaacttcaacaacttattctacagcaaattgctttcaagaacctggtgctgagaaaccagtatgtggaggagcaggtcagccagcggccgctgcccaactcagtcatccacgtgcccttcatcatcatcagcagtagcaagaagaccgtcatcaactgcagcatctccgacgacaaatcagaatatctgtttaagtttaacagctcctttgaaatccacgatgacacagaagtgctgatgtggatgggcatgacttttgggctagagtccgggagctgctctgccgaagaccttaaaatggccagaaatttggtcccaaaggctctggagccgtacgtgacagaaatggctcagggaacttttggaggtgtgttcacgacggcaggttccaggtctaatggcacgtggctttctgccagtgacctgaccaacattgcgattgggatgctggccacaagctccggtggatctcagtacagtggctccagggtggagaccccagcagtcgaggaggaagaggaggaggacaacaacgatgacgacctcagtgagaatgacgaggatgactgacgtcctctcgccttaagattcagcttcaggaaaacatttagggaaaagaaactttttttttttttttaatgtgaggttttctgtttcttttttgcctactcccaagaagatattggtaagctatagaatttagatatgcacctctgataagcaaggattgtttcccgtatgattaagacgtgctgttgatgtgtgttttgataccagtgtgctgacacagaatctttatttactttttaggattttgtgttttcattttctatttttctttaaatgcagagttcattgttgccccttaacagtttttcctgagtttactgaagaaattgtacttcatccacatccatgaaaataaaatgctctccttttgtgc

SEQ ID NO: 31979 - DNA, 2690 bp, Homo sapiens
  source 1..2690: mol_type = unassigned DNA
ttccgggttgggagaaaggtggcggcgctttcggagggaataaaatggaaggagaatcaagcagatttgaaatccacactccagtttctgacaagaaaaagaaaaagtgttctatacataaggaaagacctcagaaacattcccacgaaattttcagagactcctccctggtgaatgaacagtctcaaataactaggaggaaaaagaggaaaaaagatttccagcatctcatttcttctcctttgaaaaaatccagaatctgtgatgagactgcaaatgccacttccacactcaaaaagagaaaaaagagaagatatagtgctttggaggtggacgaggaagcaggtgttacagttgtccttgtggataaagaaaatattaacaacacaccaaagcattttagaaaggatgttgatgttgtttgtgttgatatgagcatagaacagaagttaccaagaaagcctaaaacagacaaatttcaggtacttgctaagtcacatgcacataaatcagaagccctgcacagtaaagttagggagaaaaagaataaaaagcatcagaggaaagctgcatcctgggagagccagcgggcaagggacaccctgcctcagtcagaatcccaccaggaggagtcctggctttctgtgggtccagggggtgaaattacagaactaccagcatctgctcataaaaacaagtctaagaaaaaaaagaaaaagtccagtaaccgggaatatgagacactggccatgcctgaaggatcgcaagcaggcagagaggccgggactgatatgcaggaatcccagcctactgtgggcttggatgatgaaactccacaactactaggacctactcacaaaaaaaagtctaagaaaaaaaagaagaaaaagtccaatcaccaggaatttgaggcattggccatgcctgaaggatcacaagtgggcagtgaggttggggctgatatgcaggaatcccggcctgctgtgggcctgcatggtgaaactgcaggaataccagcacctgcttataaaaacaagtctaagaaaaaaaagaaaaagtccaatcaccaggaatttgaggcagtggccatgcctgagagcctcgagagtgcataccctgaaggatcacaggtgggcagtgaggttgggactgtggaaggcagtacagctcttaaagggttcaaggaatccaacagtacaaagaagaagtctaagaaaaggaagcttacgtctgtcaaaagggcacgagtgtctggtgatgatttttcagtgcccagtaagaactctgagagcacactctttgattcagtagaaggtgatggcgccatgatggaagaaggtgtgaaatctaggccccgacaaaagaaaacccaggcctgtttggcaagcaagcacgtgcaagaggcgccaaggttagaacctgcaaatgaagaacacaatgtggaaacagctgaagattccgaaataagatacttatctgcagattcaggagatgccgatgattcagatgcggatttgggttctgccgtgaaacagcttcaggagttcattcctaacatcaaggacagggccaccagcacaatcaagcggatgtaccgggacgacttggaacggtttaaggaatttaaagcacaaggtgtcgctattaaatttggcaagttttctgtaaaggaaaataagcagttagagaaaaatgtggaagactttctagccctgacaggcattgagagtgcagacaagctgctgtacacggacagatatcctgaggaaaaatctgtgatcaccaacttaaaaaggagatactcgtttagattacacattggtaggaacattgcccggccctggaaacttatatactatcgagcaaagaagatgttcgatgtcaacaattacaaaggcaggtatagcgaaggagatactgagaagttaaagatgtaccattctctccttgggaatgactggaagacgattggtgagatggtggcccgaagtagcctctccgtggccctcaagttctcacagatcagcagtcaaagaaatcgtggtgcttggagtaagtctgaaacccggaaactaatcaaggctgtcgaagaagtgattctgaagaagatgtctccccaggagttaaaagaggtggattccaaactccaagaaaatcctgaaagttgcctatcaattgttcgggaaaaactctacaagggcatatcttgggtagaagtagaagctaaagtgcaaaccagaaattggatgcagtgtaaaagtaagtggacagaaattctaaccaagaggatgactaatggtcggcgtatctactatggcatgaatgccctgcgggccaaggtcagccttattgaaaggttgtatgaaataaatgtggaagatactaatgaaatagactgggaagatcttgctagtgccataggtgatgttcctccatcttacgttcaaactaaattttctaggctgaaagctgtctatgttccattttggcagaaaaagacttttccagagatcatcgactacctttatgagacgactctacctttgctgaaggaaaagttagaaaaaatgatggagaaaaaaggcactaaaatccagactcctgcagcacccaagcaagttttcccatttcgagacatcttttattatgaagacgatagtgaaggaggacatagaaaaagaaagcgaagg

SEQ ID NO: 31980 - DNA, 3052 bp, Homo sapiens
  source 1..3052: mol_type = unassigned DNA
gggttgggagaaaggtggcggcgctttcggagggaataaaatggaaggagaatcaagcagatttgaaatccacactccagtttctgacaagaaaaagaaaaagtgttctatacataaggaaagacctcagaaacattcccacgaaattttcagagactcctccctggtgaatgaacagtctcaaataactaggaggaaaaagaggaaaaaagatttccagcatctcatttcttctcctttgaaaaaatccagaatctgtgatgagactgcaaatgccacttccacactcaaaaagagaaaaaagagaagatatagtgctttggaggtggacgaggaagcaggtgttacagttgtccttgtggataaagaaaatattaacaacacaccaaagcattttagaaaggatgttgatgttgtttgtgttgatatgagcatagaacagaagttaccaagaaagcctaaaacagacaaatttcaggtacttgctaagtcacatgcacataaatcagaagccctgcacagtaaagttagggagaaaaagaataaaaagcatcagaggaaagctgcatcctgggagagccagcgggcaagggacaccctgcctcagtcagaatcccaccaggaggagtcctggctttctgtgggtccagggggtgaaattacagaactaccagcatctgctcataaaaacaagtctaagaaaaaaaagaaaaagtccagtaaccgggaatatgagacactggccatgcctgaaggatcgcaagcaggcagagaggccgggactgatatgcaggaatcccagcctactgtgggcttggatgatgaaactccacaactactaggacctactcacaaaaaaaagtctaagaaaaaaaagaagaaaaagtccaatcaccaggaatttgaggcattggccatgcctgaaggatcacaagtgggcagtgaggttggggctgatatgcaggaatcccggcctgctgtgggcctgcatggtgaaactgcaggaataccagcacctgcttataaaaacaagtctaagaaaaaaaagaaaaagtccaatcaccaggaatttgaggcagtggccatgcctgagagcctcgagagtgcataccctgaaggatcacaggtgggcagtgaggttgggactgtggaaggcagtacagctcttaaagggttcaaggaatccaacagtacaaagaagaagtctaagaaaaggaagcttacgtctgtcaaaagggcacgagtgtctggtgatgatttttcagtgcccagtaagaactctgagagcacactctttgattcagtagaaggtgatggcgccatgatggaagaaggtgtgaaatctaggccccgacaaaagaaaacccaggcctgtttggcaagcaagcacgtgcaagaggcgccaaggttagaacctgcaaatgaagaacacaatgtggaaacagctgaagattccgaaataagatacttatctgcagattcaggagatgccgatgattcagatgcggatttgggttctgccgtgaaacagcttcaggagttcattcctaacatcaaggacagggccaccagcacaatcaagcggatgtaccgggacgacttggaacggtttaaggaatttaaagcacaaggtgtcgctattaaatttggcaagttttctgtaaaggaaaataagcagttagagaaaaatgtggaagactttctagccctgacaggcattgagagtgcagacaagctgctgtacacggacagatatcctgaggaaaaatctgtgatcaccaacttaaaaaggagatactcgtttagattacacattggtaggaacattgcccggccctggaaacttatatactatcgagcaaagaagatgttcgatgtcaacaattacaaaggcaggtatagcgaaggagatactgagaagttaaagatgtaccattctctccttgggaatgactggaagacgattggtgagatggtggcccgaagtagcctctccgtggccctcaagttctcacagatcagcagtcaaagaaatcgtggtgcttggagtaagtctgaaacccggaaactaatcaaggctgtcgaagaagtgattctgaagaagatgtctccccaggagttaaaagaggtggattccaaactccaagaaaatcctgaaagttgcctatcaattgttcgggaaaaactctacaagggcatatcttgggtagaagtagaagctaaagtgcaaaccagaaattggatgcagtgtaaaagtaagtggacagaaattctaaccaagaggatgactaatggtcggcgtatctactatggcatgaatgccctgcgggccaaggtcagccttattgaaaggttgtatgaaataaatgtggaagatactaatgaaatagactgggaagatcttgctagtgccataggtgatgttcctccatcttacgttcaaactaaattttctaggctgaaagctgtctatgttccattttggcagaaaaagacttttccagagatcatcgactacctttatgagacgactctacctttgctgaaggaaaagttagaaaaaatgatggagaaaaaaggcactaaaatccagactcctgcagcacccaagcaagttttcccatttcgagacatcttttattatgaagacgatagtgaaggagaggacatagaaaaagaaagcgaaggccaggcgccatgcatggctcacgcctgtaattccagtactttgggaggccaaggccggtggatcatctgaggtcaggagttcgagaccggcctgaccaacatggtgaagacctgtcactattaaaaatgcaaaaattagccgggtgtggtagtgcacacctgtaatttcaactacttgggaggctgaggcaggagaattgcttgaacccaggaggtggaggttgcagtgagccaagatcgcaccaccgcatgagagagagagattactatttcttgtccctttttctcagtttgattatatttatatacatatgtcagtaaatctgttttcagtattgatgtttaataaagaatgtacaatggc

SEQ ID NO: 31981 - DNA, 4879 bp, Homo sapiens
  source 1..4879: mol_type = unassigned DNA
agaattgggggcggggctttgtggaacttgggggacccagcgaaatggaagaagttaggtgtccagagcacgggactttctgctttcttaagaccggcgtccgcgatggcccgaataaaggaaagagcttctacgtgtgccgggcagacacgtgcagcttcgtgcgggccaccgacattcctgtttcccattgcttattgcatgaggactttgtggtagagcttcagggtttgcttctgccacaggacaagaaagaatacagattgttcttccgatgcattagaagtaaggcagaggggaaacgctggtgtggaagtattccatggcaggatcctgattccaaagaacattctgtatccaataagtctcagcatgcatctgagacatttcatcattcttccaactggctgagaaatccattcaaggtacttgacaagaatcaagaaccagctctctggaaacagctcatcaaaggtgaaggtgaggaaaagaaggctgataagaagcaaagagaaaagggagatcagcttttcgatcaaaagaaagaacagaagcctgaaatgatggagaaagacctctcatctggcctggtaccaaagaaaaaacaatctgtagttcaagagaagaagcaagaagagggagcagagattcagtgtgaggcagagactggaggcacacacaaaagagacttttctgaaattaaatctcaacagtgccaaggtaatgagcttacaagaccatctgcatcttctcaggagaaatcaagtggtaagagtcaagatgtccaaagagaatcagaacctctgagagaaaaggttacccagcttttgcctcaaaatgttcacagtcacaactcaataagcaagccccagaaagggggacccctcaacaaggagtacacgaactgggaggctaaagaaacaaaggcaaaggatggccctagcatacaggccacccagaaaagcctgcctcaggggcatttccaagagcggccggagacccacagtgtgcctgctcctggaggaccagcggctcaggctgcaccagcagcaccagggctttccctgggtgagggccgtgaagctgccacaagcagtgacgacgaggaggaagatgatgttgtttttgtttcctctaagcctgggagccccctactctttgactcgactctggacttagagacgaaggaaaacctccaattccctgatcgaagtgtgcaaagaaaggtgtctcctgcctcaggtgtttccaagaaggtagaaccctcagacccagtagcccggcgtgtctaccttacaacacaactgaaacaaaagaagagcacactggcatcagtgaacatccaggctcttccagacaagggtcagaagttgatcaaacaaatccaggagctggaggaagtactcagtggtcttaccctttccccagagcaaggaactaatgagaagagtaacagtcaagtaccacagcagagtcacttcaccaaaactaccactggccctccccacctggtgcctccccaaccccttcctcgtcgtggtacccaacctgtgggttctctagaactaaagtctgcctgccaggtgactgctggaggatccagtcagtgctatcgaggccatacaaaccaagatcacgttcatgcagtgtggaaaatcacaagtgaagccatcggtcaactgcatcgctcacttgagtcatgtcctggtgagacggttgtggcagaagatcccgccgggctgaaggtccctttgctactacaccagaagcaggcattggcttggttactatggcgagaaagtcagaagccacaaggaggaattctggcagatgatatgggcttaggaaaaaccctgacaatgattgcgctcatcctgacccagaagaatcaagagaaaaaggaagaaaaggagaaaagcacagctttgacgtggctctccaaagatgactcttgtgactttacttcccatggaacactaatcatctgtcctgcctccctgatccatcattggaaaaatgaggtggagaaacgggtgaacagcaacaaactaagagtctatctctaccatgggccaaaccgggattcacgtgccagagtcctctctacatatgacatcgtgatcactacctatagcctcgtggccaaggagattcccacaaacaagcaagaggcagagatcccaggtgcaaacctcaatgtggagggcacctcaacacctttgcttcgaatagcctgggctcgaatcatattggatgaagctcacaatgttaagaatccccgagtgcagacttccatagctgtgtgtaagctacaagcctgtgcccgttgggctgtcactggaacccccattcaaaacaacttattggatatgtattcgctgctgaagtttctccgttgctctccatttgatgagttcaatctgtggaggagtcaggttgacaatggctcaaagaaaggaggagaacggttaagtattttaaccaagagccttttgctgaggagaacaaaagaccagctggactctactggcagacctttggtgatactgccccagcgtaaatttcagttgcaccatttaaagctttctgaagatgaagagactgtttacaatgtgttttttgcaagatcaaggtcagctctgcaatcctatctaaaaagacatgaaagtagaggcaaccaatctggaagaagccctaataatccattcagtagagtggcactggagtttgggtctgaggagcctagacactcggaggcagcagactcaccgagatccagcaccgtccacatactgtcccagttgctgagactccgccagtgttgctgtcatctttctttactgaagtcggccctggatccaatggaactgaagggtgaaggtcttgtcctttccctggaagaacagctcagtgctttgaccttgtcagaactccgtgactcagagccatcttccactgtttcccttaacggcaccttcttcaagatggagctttttgaaggcatgcgagagagcaccaagatttcatctctgttggcagaattggaggcaattcaaagaaattcagcatcccaaaagagtgtcattgtctctcagtggaccaacatgctgaaagttgtagcattgcacctgaagaagcatggactgacttatgccaccatcgatggctctgtcaatcccaagcagagaatggacttggtagaggcatttaaccactccagaggccctcaggtaatgctaatctctctcttggccggaggtgttggtctaaacctgactggaggaaatcacctctttcttttggacatgcactggaatccatcacttgaagatcaagcttgtgaccgaatttaccgagtagggcagcagaaagatgttgtcatacacagatttgtttgtgagggaacagtagaagaaaagatcttacagctccaagaaaaaaagaaagatttggccaaacaagttctatcagggtctggagaatctgtcaccaagctcaccttggctgacctcagagtcctttttggcatctaacctcctgtggataagggctcagaatagcaccattgctggtttgtattaggatctgggaataacaacctaaccatgagccttgaactctgttctttgcatttcaatttcaccgtcaagcctttcaccttcctcaaaatgaggcataatcttatccccagaattgaggaggggttgtgttaaccaattagttaaccaattatgttaataatttatttaatgagtggtatggaaaccaattgatttttttagataaaagaatatgttttagagttggatgattttggaaaacaactctggcagaattgtatataagcttcagtaaagttcaaaaagcgggccaggtgtggtggctcatgcctgtaatcccgacactttgggaggccaaggcaggaggatggcttgaagccagtagttcaagaccagcctgggcaacatagtaagaccccatctctatgaagaataaaaaaatgagctaggcgtggtagtgcacacctgtagtcctagctacttgggaggctgaggcaggaggatcccttgagtccaggaggttgaggctgcagtgagctgtgattgtgccactgttttccagcctgggcaatacagtgagaccctgtctcaaaaaaaggaaaaaaaagctcaaaaagttctgtgttgcctttctcttcttagctgatgatgggagaaccagttactaccttctctaacacaggctccatcctatctcttcatctcttcttgccagtgatgttgcacctgtaaccatctttttatgggtggagcagagagtcaatccctgcagccaccctgcagccagccatctctgcagttctctcagtgcaggcagttcttcctctcaggctgaagatcaaggagatgctttgtacatgaacagatgctgagtatctgttatcattgtattgtttagtgtcagtgtatcatttagtatttgtatcactgtaccatttagtgttgtatatcactcagtcatttaatattggttatcaccatacagtttaatatttgtatcatttggttcattgtatcgtttagtatttctattataacatttctatttgtagtatttgtataatatttgtgtcatttttaatagtatttgtatttttacaaatttgcagtatttgtagcatttagtatcattgtttcatttagtatttggtacaatctaataaatactaatccagtccaatactaatccaatccaatactaataatactattggtacaatccaatactaataatactattggtacaatccaatactaataatactaacagtagtattgatacaatctaataaataatgtgtttgacagtgtagcagaaa

SEQ ID NO: 31982 - DNA, 639 bp, Homo sapiens
  source 1..639: mol_type = unassigned DNA
aacatgctgaaagttgtagcattgcacctgaagaagcatggactgacttatgccaccatcgatggctctgtcaatcccaagcagagaatggacttggtagaggcatttaaccactccagaggccctcaggtaatgctaatctctctcttggccggaggtgttggtctaaacctgactggaggaaatcacctctttcttttggacatgcactggaatccatcacttgaagatcaagcttgtgaccgaatttaccgagtagggcagcagaaagatgttgtcatacacagatttgtttgtgagggaacagtagaagaaaagatcttacagctccaagaaaaaaagaaagatttggccaaacaagttctatcagggtctggagaatctgtcaccaagctcaccttggctgacctcagagtcctttttggcatctaacctcctgtggataagggctcagaatagcaccattgctgctgatgatgggagaaccagttactaccttctctaacacaggctccatcctatctcttcatctcttcttgccagtgatgttgcacctgtaaccatctttttatgggtggagcagagagtcaatccctgcagccaccctgcagccagccatctctgcagttctctcagtgc

SEQ ID NO: 31983 - DNA, 3039 bp, Homo sapiens
  source 1..3039: mol_type = unassigned DNA
aggggggacgcggcccggctggctggctctggcggcggctgggctggggccgcggtggcggcagccgcggcggcgggcggcggttgctcgtgcgcggcggcggcggcgggtcccgcgggcggcggggcgctgacggccgggggcgcggcggctgcggcgggccgggcggcgggcggcgagcgggggaagatggcggagctggggaagaagtactgcgtgtactgcctggccgaggtgagcccgctgcgcttccgctgcaccgagtgccaggacatcgagctgtgccccgagtgcttctcggccggcgccgagatcggccaccaccgccgctaccacggctaccagctggtggacggcgggcgcttcacgctctgggggcccgaggccgagggcggctggaccagtcgcgaggagcagctgctgctggacgccatcgagcagttcggcttcggaaactgggaagatatggctgcccacgttggtgcttcccggactccccaagaggtgatggagcattacgtgagcatgtacatccacgggaacctggggaaggcctgcatccccgacaccatccccaaccgcgtgacagaccacacctgtcccagcggaggccccctctcacccagcctcaccaccccgctgcccccgctggacatctctgtggctgagcagcagcagctgggctacatgccgctgcgggatgattacgagatcgagtatgaccaggatgccgagacgctcatcagcgggctctctgtcaactatgatgacgacgacgtggagatcgagctgaagcgcgcccacgtggacatgtacgtgcggaagctgaaagagagacagcggcggaagaacatcgcccgtgactacaatctggtgccagccttcctggggaaggacaagaaggagaaggaaaaggcgctgaagcgcaagatcaccaaggaggagaaggagctgcgcctgaagctgaggccgctgtaccagttcatgtcatgcaaggagtttgatgacctttttgaaaacatgcacaaagaaaaaatgctccgggccaagatccgagaactgcagcggtaccggcgaaacgggatcaccaagatggaagagtcggcagagtacgaggcagcgcggcataaacgggagaagaggaaggagaacaaaaacctagccggctccaaacggggaaaggaggacggcaaagacagcgagttcgccgccattgagaaccttccaggcttcgagctcctgtcagatcgcgagaaggtgctctgcagctctttaaacttgagtccagcccgctacgtgactgtgaagactattataattaaagaccacctccagaagcggcaaggaatcccctccaaaagccgccttcctagctacctggacaaagtcctaaagaaaaggattttgaatttcctcacagaaagcggctggatctccagggacgcgtcttgaagctgagacgctttgaaagccagggtgatgctcagacagtgtgccagccaaaatgacttgggggaggggagccgcttccccactgttgctcttttttaaacaaattgagttcctttttttaagatagaaattcttttcatggtcctctgaaagaagcaatagtaacaatcttatattggatcatgggggaagcaaatgtgtgtattttaagtgagttcctgcgagtcatacactgcgatgatgctccgcctttacccgttcagttgggagcttattgtgagattggatcatttccttttgagtgttcttctctttggtacaaaagctattgtgggtgacaggagcagtgttttcctgctggacccgcaagccaccagctatttcctggtgacacaagctcttctcaggcggggctgcctgcaggctcccgttttctgagcccacgctgcccacagctgaccccagcgcagccccgggcacgcggcactttacatgggggcagcttgggcccagactcctccgctgtgtagcagatgaggaaaatcaggccagaggacaacaggctggcgttttgttgggaactgaagaggaatctgttgaacacagcgaccagatgaccttccatttcaccggcggcagcagtttcagcgtgcagttcccaaaccccaaagctgaccctgcgccccatttgaatacggccagagcctgctggttcactttgggtagagccgtgcctcttgggcaggctcccatagtgaccacgtccccacgaatgggaaagcacgttagtgggagggacgtaggacacgtgtggaccgccaggccctctcagtccattttccggggctgctcggtgctgctgttaagacgtgagtgcatttcacttggaagaacccattgtacaaagttcaaggctaagagttctgaattctggcgtcagcttcctcaggattttcttcagttgcaagtacctttccactgaaaatatgagcatgcccgcctggctagtaggcatctgtaagagtgtcgccaggcccgcgccagctgaggcctcagactagccaggcaagagccgtctgaccagttggctggcggtggttctggtggagcacgagggagcccgggtggtgccctgagcctcgagctgctctctgtcactgtcttgaatcagactcagaaatggcttcttcccagccctgcctacaagtttttctctggggtcctctttcaaggatgtccacggtaccttcctcctgaaacttgaggaagtcttttgtcttccagctgctcagggttctctggtccaagaccctgctttaaagagagtctttggcgtgctcagactccagcgctccgttcttcaaggaggttgacttgcctctcgggccccgtaggtaccaagagactgtttacctcccagaatgtttgggcttgaagttacattaaagtgaagttatttgaaagaaagaaaacctcatcatttctaaggatgacttaattactgtgccttttcctttctttttacacatcctactgtcccttagggtaaaattttcagcattaaataaaacatttcaaatatattgt

SEQ ID NO: 31984 - DNA, 558 bp, Homo sapiens
  source 1..558: mol_type = unassigned DNA
atccgacagctgcccatggcctgcatcaccacctgcttcttgagtgcctggaagcgtcgccactccttctccaccctggtgagcttctcctggcactgccgcttcaactggcccagctcctggtggtaccactgcaggtcgtctgcctgctgcttcttcagctcctccagcatgcccagatggcgcaggaagatatggctgcccacgttggtgcttcccggactccccaagaggtgatggagcattacgtgagcatgtacatccacgggaacctggggaaggcctgcatccccgacaccatccccaaccgcgtgacagaccacacctgtcccagcggaggccccctctcacccagcctcaccaccccgctgcccccgctggacatctctgtggctgagcagcagcagctgggctacatgccgctgcgggatgattacgagatcgagtatgaccaggatgccgagacgctcatcagcgggctctctgtcaactatgatgacgacgacgtggagatcgagctgaagcgcgcccacgtggacatgtacgtgcggaagctga

SEQ ID NO: 31985 - DNA, 544 bp, Homo sapiens
  source 1..544: mol_type = unassigned DNA
taaccgtggaaggtgctaaaaatgaaggcctgctcccttgaagagccacaggcccatcttctgcagtcactgcctaggaaagggccacgccagcccccccggcgcatgaaggccaggatgggtgtgcggccaggacaagcgtcacagaggaagatatggctgcccacgttggtgcttcccggactccccaagaggtgatggagcattacgtgagcatgtacatccacgggaacctggggaaggcctgcatccccgacaccatccccaaccgcgtgacagaccacacctgtcccagcggaggccccctctcacccagcctcaccaccccgctgcccccgctggacatctctgtggctgagcagcagcagctgggctacatgccgctgcgggatgattacgagatcgagtatgaccaggatgccgagacgctcatcagcgggctctctgtcaactatgatgacgacgacgtggagatcgagctgaagcgcgcccacgtggacatgtacgtgcggaagctgaaagagagacagcggcggaagaacat

SEQ ID NO: 31986 - DNA, 1343 bp, Homo sapiens
  source 1..1343: mol_type = unassigned DNA
gcggcggctgcggcgggccgggcggcgggcggcgagcgggggaagatggcggagctggggaagaagtactgcgtgtactgcctggccgaggaagatatggctgcccacgttggtgcttcccggactccccaagaggtgatggagcattacgtgagcatgtacatccacgggaacctggggaaggcctgcatccccgacaccatccccaaccgcgtgacagaccacacctgtcccagcggaggccccctctcacccagcctcaccaccccgctgcccccgctggacatctctgtggctgagcagcagcagctgggctacatgccgctgcgggatgattacgagatcgagtatgaccaggatgccgagacgctcatcagcgggctctctgtcaactatgatgacgacgacgtggagatcgagctgaagcgcgcccacgtggacatgtacgtgcggaagctgaaagagagacagcggcggaagaacatcgcccgtgactacaatctggtgccagccttcctggggaaggacaagaaggagaaggaaaaggcgctgaagcgcaagatcaccaaggaggagaaggagctgcgcctgaagctgaggccgctgtaccagttcatgtcatgcaaggagtttgatgacctttttgaaaacatgcacaaagaaaaaatgctccgggccaagatccgagaactgcagcggtaccggcgaaacgggatcaccaagatggaagagtcggcagagtacgaggcagcgcggcataaacgggagaagaggaaggagaacaaaaacctagccggctccaaacggggaaaggaggacggcaaagacagcgagttcgccgccattgagaaccttccaggcttcgagctcctgtcagatcgcgagaaggtgctctgcagctctttaaacttgagtccagcccgctacgtgactgtgaagactattataattaaagaccacctccagaagcggcaaggaatcccctccaaaagccgccttcctagctacctggacaaagtcctaaagaaaaggattttgaatttcctcacagaaagcggctggatctccagggacgcgtcttgaagctgagacgctttgaaagccagggtgatgctcagacagtgtgccagccaaaatgacttgggggaggggagccgcttccccactgttgctcttttttaaacaaattgagttcctttttttaagatagaaattcttttcatggtcctctgaaagaagcaatagtaacaatcttatattggatcatgggggaagcaaatgtgtgtattttaagtgagttcctgcgagtcatacactgcgatgatgctccgcctttacccgtt

SEQ ID NO: 31987 - DNA, 3818 bp, Homo sapiens
  source 1..3818: mol_type = unassigned DNA
ttctcaaagaggcccacagttgagttttggcactgccttctgtagtcagagtcctggagattcctgggccccaggtggcggggggaagggtccagcacctcggctccaggcatgtgtgccagaggaagccccagctgtgggatcccatccgttcctggagcccagaacacttctctcccagacgccagctcatagtcatcagcctggatggggtggcggtccctctggtttcagctgggcctctggcagtgctgcaggcagcgctgcagtgctggttccacacccaggcgggcagaggcaggtgggggctgggtggctgagaggcggtggccagggaatgagtgcgcactttgggcagttactttctgaagtggctttagcggttgactttgaggaagaggcctctcggcagaaggaaaagattgagggagttatacagtttcctcccattaaaccttgtatttatgggttaccctcttgtaggaatgatgaatgctttcagccagtggcagactcccagccagctgcttaaccgtggaaggtgctaaaaatgaaggcctgctcccttgaagagccacaggcccatcttctgcagtcactgcctaggaaagggccacgccagcccccccggcgcatgaaggccaggatgggtgtgcggccaggacaagcgtcacagaggtgtcctggcccttgcttttccagcgggtggcaacatggtagaactgggtcccctcctgcagtgccgtggacttggcctggtctcacaccctggcacaagcccgttttctagtctgaatgaggcgagttcaggcattccttggcctgccctgctgtctcctgggacattcagacagcccctgagtgcagggtttatggcagtaccaggtgggctcctctggtcgcaggtggggaatgagaacaaagtccaaacctcagccaggggttctggcctcagctctgccaccagctcaccccaagaccttgtgccagcttgtgcctctctgggtcttcactttctcatgtacagaatcagcatgtgttgttgcttcaacattgtcatctctcccctgagcccagctcataagacagtgtgtgactgaatgcctttggggagggtgggtaacggtgctgtaggaagtactctaggtcagcctttgtaaaaacgtgaagagaatctgtgcggaacccaaatctggcaccctgatggtggaactaacttctgccctttgtcatcgtaggaagatatggctgcccacgttggtgcttcccggactccccaagaggtgatggagcattacgtgagcatgtacatccacgggaacctggggaaggcctgcatccccgacaccatccccaaccgcgtgacagaccacacctgtcccagcggaggccccctctcacccagcctcaccaccccgctgcccccgctggacatctctgtggctgagcagcagcagctgggctacatgccgctgcgggatgattacgagatcgagtatgaccaggatgccgagacgctcatcagcgggctctctgtcaactatgatgacgacgacgtggagatcgagctgaagcgcgcccacgtggacatgtacgtgcggaagctgaaagagagacagcggcggaagaacatcgcccgtgactacaatctggtgccagccttcctggggaaggacaagaaggagaaggaaaaggcgctgaagcgcaagatcaccaaggaggagaaggagctgcgcctgaagctgaggccgctgtaccagttcatgtcatgcaaggagtttgatgacctttttgaaaacatgcacaaagaaaaaatgctccgggccaagatccgagaactgcagcggtaccggcgaaacgggatcaccaagatggaagagtcggcagagtacgaggcagcgcggcataaacgggagaagaggaaggagaacaaaaacctagccggctccaaacggggaaaggaggacggcaaagacagcgagttcgccgccattgagaaccttccaggcttcgagctcctgtcagatcgcgagaaggtgctctgcagctctttaaacttgagtccagcccgctacgtgactgtgaagactattataattaaagaccacctccagaagcggcaaggaatcccctccaaaagccgccttcctagctacctggacaaagtcctaaagaaaaggattttgaatttcctcacagaaagcggctggatctccagggacgcgtcttgaagctgagacgctttgaaagccagggtgatgctcagacagtgtgccagccaaaatgacttgggggaggggagccgcttccccactgttgctcttttttaaacaaattgagttcctttttttaagatagaaattcttttcatggtcctctgaaagaagcaatagtaacaatcttatattggatcatgggggaagcaaatgtgtgtattttaagtgagttcctgcgagtcatacactgcgatgatgctccgcctttacccgttcagttgggagcttattgtgagattggatcatttccttttgagtgttcttctctttggtacaaaagctattgtgggtgacaggagcagtgttttcctgctggacccgcaagccaccagctatttcctggtgacacaagctcttctcaggcggggctgcctgcaggctcccgttttctgagcccacgctgcccacagctgaccccagcgcagccccgggcacgcggcactttacatgggggcagcttgggcccagactcctccgctgtgtagcagatgaggaaaatcaggccagaggacaacaggctggcgttttgttgggaactgaagaggaatctgttgaacacagcgaccagatgaccttccatttcaccggcggcagcagtttcagcgtgcagttcccaaaccccaaagctgaccctgcgccccatttgaatacggccagagcctgctggttcactttgggtagagccgtgcctcttgggcaggctcccatagtgaccacgtccccacgaatgggaaagcacgttagtgggagggacgtaggacacgtgtggaccgccaggccctctcagtccattttccggggctgctcggtgctgctgttaagacgtgagtgcatttcacttggaagaacccattgtacaaagttcaaggctaagagttctgaattctggcgtcagcttcctcaggattttcttcagttgcaagtacctttccactgaaaatatgagcatgcccgcctggctagtaggcatctgtaagagtgtcgccaggcccgcgccagctgaggcctcagactagccaggcaagagccgtctgaccagttggctggcggtggttctggtggagcacgagggagcccgggtggtgccctgagcctcgagctgctctctgtcactgtcttgaatcagactcagaaatggcttcttcccagccctgcctacaagtttttctctggggtcctctttcaaggatgtccacggtaccttcctcctgaaacttgaggaagtcttttgtcttccagctgctcagggttctctggtccaagaccctgctttaaagagagtctttggcgtgctcagactccagcgctccgttcttcaaggaggttgacttgcctctcgggccccgtaggtaccaagagactgtttacctcccagaatgtttgggcttgaagttacattaaagtgaagttatttgaaagaaagaaaacctcatcatttctaaggatgacttaattactgtgccttttcctttctttttacacatcctactgtcccttagggtaaaattttcagcattaaataaaacatttcaaatatattgt

SEQ ID NO: 31988 - DNA, 2355 bp, Homo sapiens
  source 1..2355: mol_type = unassigned DNA
cttccggttctgtacccccatcctttctctcgcccctcctacccgcagctcctggcgctcggcggggctaactgcagcgcggagatctcggccgccaagctccgcctcccgccccgggctgtgccccggggctcgcctgaggccgaccacccgcaccccacctctagcggctttgctcgaggcccaccttcttcccacccccggcaaactccagtaggctcgccctcgctgactccccgcccccgcgtcaactgcaaggggcccgcccatagccagttccggggcggttgctcacatcgaccggaactccccgccccctcccgcggcccctggggccgtaggaggccgcagcgaggaggtagagggggcgggggtcgcactagggtgtccctagagaacgaggactctgaaggcgggacatttgggcgacccccgggcggggccagccattaaacagtcccacttctgtgccagacactgaactgggctcttgacgggcatcatctcttaatcctcagaacatcccagggagctccacaggatccccatatcctgggccatgagtgagttgaaagactgccccttgcagttccacgacttcaagtctgtggatcacctgaaggtctgtccccgctacacggcagtgctggcacgctctgaggatgatggcatcggcatcgaggagctggacaccctgcagctggagctggagaccctgctgtcttctgccagccggcgcctgcgtgtgcttgaggccgaaacccagatcctcaccgactggcaggataagaaaggtgacagacgattcctgaagctgggtcgagaccatgaacttggagctccccccaaacatgggaagcccaagaagcagaaactggaagggaaggcaggacatgggccgggccctggcccaggacggcccaaatccaaaaaccttcagcccaagatccaggaatatgaattcactgatgaccctatcgacgtgccacggatccccaaaaatgatgcccccaacaggttctgggcttcagtggagccctactgtgctgacatcaccagcgaggaggtccgcacacttgaggagttactgaagcccccagaagatgaggctgagcattacaagatcccacccctggggaagcactactcccagcgctgggcccaggaggacctgctggaggagcagaaggatggggcccgggcagcggctgtggctgacaagaagaaaggcctcatggggccactgaccgaactggacactaaagatgtggatgccctgctgaagaagtctgaggcccagcatgaacagccggaagatggatgcccctttggtgccctgacgcagcgcctcctgcaggccctggtggaggaaaatattatttcccctatggaggattctcctattcctgacatgtctgggaaagaatcaggggctgacggggcaagcacctcccctcgcaatcagaacaagcccttcagtgtgccgcatactaagtccctggagagccgcatcaaggaggagctaattgcccagggccttttggagtctgaggaccgccccgcagaggactccgaggatgaggtccttgctgagcttcgcaaacggcaggctgagctgaaggcacttagtgcccacaaccgcaccaagaagcacgacctgctgaggctggcaaaggaggaggtgagccggcaggagctgaggcagcgggtgcgcatggctgacaacgaggtcatggacgcctttcgcaagatcatggctgcccggcagaagaagcggactcccaccaagaaagaaaaggaccaggcctggaagactctgaaggagcgtgagagcatcctgaagctgctggatgggtagccctcacccctgcctcaggctgattatctggcctaggggaggggaagggaggcccacttccttctttgggcacaggaaacattggcctgtggctgtccctcaaatggcggcagtctctagagggccgtggcccttcccctgaggtcttttggcctagctctgtacaaccaggacacaggaagccctgctgggctagcctgaggcctagtctctgcttggtccccgagatggggttggaggggacttcgtttctgggtcttcctcttcccctctttaccatcccccactccctaatcccctacccctgtctccccttcaaggacttctcccttgtggttttgtaaagtgcaaacttaagaataaagtgactgctgtggtttttcaaaaaaagcatccagtctttgaatgtctgttacagtggggaggaaggaaccagtgtgggtggtaaggtttgtggggggtatgcttggtggctctcagcccatggccactaaccc

SEQ ID NO: 31989 - DNA, 2554 bp, Homo sapiens
  source 1..2554: mol_type = unassigned DNA
gtacccccatcctttctctcgcccctcctacccgcagctcctggcgctcggcggggctaactgcagcgcggagatctcggccgccaagctccgcctcccgccccgggctgtgccccggggctcgcctgaggccgaccacccgcaccccacctctagcggctttgctcgaggcccaccttcttcccacccccggcaaactccagtaggctcgccctcgctgactccccgcccccgcgtcaactgcaaggggcccgcccatagccagttccggggcggttgctcacatcgaccggaactccccgccccctcccgcggcccctggggccgtaggaggccgcagcgaggaggtagagggggcgggggtcgcactagggtgtccctagagaacgaggactctgaaggcgggacatttgggcgacccccgggcggggccagccattaaacagtcccacttctgtgccagacactgaactgggctcttgacgggcatcatctcttaatcctcagaacatcccagggagctccacaggatccccatatcctgggccatgagtgagttgaaagactgccccttgcagttccacgacttcaagtctgtggatcacctgaaggtctgtccccgctacacggcagtgctggcacgctctgaggatgatggcatcggcatcgaggagctggacaccctgcagctggagctggagaccctgctgtcttctgccagccggcgcctgcgtgtgcttgaggccgaaacccagatcctcaccgactggcaggataagaaaggtgacagacgattcctgaagctgggtcgagaccatgaacttggagctccccccaaacatgggaagcccaagaagcagaaactggaagggaaggcaggacatgggccgggccctggcccaggacggcccaaatccaaaaaccttcagcccaagatccaggaatatgaattcactgatgaccctatcgacgtgccacggatccccaaaaatgatgcccccaacaggttctgggcttcagtggagccctactgtgctgacatcaccagcgaggaggtccgcacacttgaggagttactgaagcccccagaagatgaggctgagcattacaagatcccacccctggggaagcactactcccagcgctgggcccaggaggacctgctggaggagcagaaggatggggcccgggcagcggctgtggctgacaagaagaaaggcctcatggggccactgaccgaactggacactaaagatgtggatgccctgctgaagaagtctgaggcccagcatgaacagccggaagatggatgcccctttggtgccctgacgcagcgcctcctgcaggccctggtggaggaaaatattatttcccctatggaggattctcctattcctgacatgtctgggaaagaatcaggggctgacggggcaagcacctcccctcgcaatcagaacaagcccttcagtgtgccgcatactaagtccctggagagccgcatcaaggaggagctaattgcccagggccttttggagtctgaggaccgccccgcagaggactccgaggatgaggtccttgctgagcttcgcaaacggcaggctgagctgaaggcacttagtgcccacaaccgcaccaagaagcacgacctgctgaggtgagcgttagcaggatgcacagtcccgggggtggccttggaggctgtggccacggctagtcacctttcaggggttttacaacaggctttccaatcctggctggcctctaaatcacctggagagcctcgaaaaaaacagcagtggccagtccaccgggtatgtcccaaacaaattctgattccacagagtggggctcaggcatctgtgactgaccgattgatttgatttgtttttgttttgtttttttttgagagggagtctcgcactgtcacccaggctggagtgcagtggcatgatctcggctcactgcaagctccgcctcccaggttcatgccattctcctgcctcagcctcctgagtagctgatactacaggcacccaccaccacgcccagctaatttttttgtatttttagtagagacggggtttcaccgtgttagccaggatggtctcgatctcctgacctcgtgatccacccgcctcggcctcccaaagtgccgggattacaggcgtgagccactgcgcctggcctagtttggttttttaattatggtaaaggcataatataaaatgtatctccatgggaggctgaggcaggagaatcagttgaacctgggaggcggaggttgcagtgagctgagactgcaccattgcattccagcctgggcaacaagagtgaaactgcatctcaaaaaaaaaaagaaaaaaaatttacgcttcttaaccatttttaagtgtacagtttagtagtgttacccatattcacattgttgtgtgatttattttttgtcttttcatgcttcttttctttttatccccaaagttttgttattaaaaatttgatacacacagaaaatctgaaagaatcatacaataaacatcagtatattctccaccta

SEQ ID NO: 31990 - DNA, 873 bp, Homo sapiens
  source 1..873: mol_type = unassigned DNA
aattaggacaagccgaagcggacgagcccttcgtttcttccggttctgtacccccatcctttctctcgcccctcctacccgcagctcctggcgctcggcggggctaactgcagcgcggagatctcggccgccaagctccgcctcccgccccgggctgtgccccggggctcgcctgaggccgaccacccgcaccccacctctagcggctttgctcgaggcccaccttcttcccacccccggcaaactccagtaggctcgccctcgctgactccccgcccccgcgtcaactgcaaggggcccgcccatagccagttccggggcggttgctcacatcgaccggaactccccgccccctcccgcggcccctggggccgtaggaggccgcagcgaggaggtagagggggcgggggtcgcactagggtgtccctagagaacgaggactctgaaggcgggacatttgggcgacccccgggcggggccagccattaaacagtcccacttctgtgccagacactgaactgggctcttgacgggcatcatctcttaatcctcagaacatcccagggaggatccccatatcctgggccatgagtgagttgaaagactgccccttgcagttccacgacttcaagtctgtggatcacctgaaggtctgtccccgctacacggcagtgctggcacgctctgaggatgatggcatcggcatcgaggagctggacaccctgcagctggagctggagaccctgctgtcttctgccagccggcgcctgcgtgtgcttgaggccgaaacccagatcctcaccgactggcaggataagaaaggtgacagacgattcctgaagctgggtcgagaccatgaacttggagctcccc

SEQ ID NO: 31991 - DNA, 1617 bp, Homo sapiens
  source 1..1617: mol_type = unassigned DNA
accatctatgctccgagcggggtagagagcccttacgaacgcttgggccttccggaagttttccacctagggctgtctcggtatttttaaattcttgcactcgagtcactatttaagctcctccaggaatgggtgcagcttccctttgtgccttcggccttcttgtcacctttgccacagcctcccccagctccacaggatccccatatcctgggccatgagtgagttgaaagactgccccttgcagttccacgacttcaagtctgtggatcacctgaaggtctgtccccgctacacggcagtgctggcacgctctgaggatgatggcatcggcatcgaggagctggacaccctgcagctggagctggagaccctgctgtcttctgccagccggcgcctgcgtgtgcttgaggccgaaacccagatcctcaccgactggcaggataagaaaggtgacagacgattcctgaagctgggtcgagaccatgaacttggagctccccccaaacatgggaagcccaagaagcagaaactggaagggaaggcaggacatgggccgggccctggcccaggacggcccaaatccaaaaaccttcagcccaagatccaggaatatgaattcactgatgaccctatcgacgtgccacggatccccaaaaatgatgcccccaacaggttctgggcttcagtggagccctactgtgctgacatcaccagcgaggaggtccgcacacttgaggagttactgaagcccccagaagatgaggctgagcattacaagatcccacccctggggaagcactactcccagcgctgggcccaggaggacctgctggaggagcagaaggatggggcccgggcagcggctgtggctgacaagaagaaaggcctcatggggccactgaccgaactggacactaaagatgtggatgccctgctgaagaagtctgaggcccagcatgaacagccggaagatggatgcccctttggtgccctgacgcagcgcctcctgcaggccctggtggaggaaaatattatttcccctatggaggattctcctattcctgacatgtctgggaaagaatcaggggctgacggggcaagcacctcccctcgcaatcagaacaagcccttcagtgtgccgcatactaagtccctggagagccgcatcaaggaggagctaattgcccagggccttttggagtctgaggaccgccccgcagaggactccgaggatgaggtccttgctgagcttcgcaaacggcaggctgagctgaaggcacttagtgcccacaaccgcaccaagaagcacgacctgctgaggctggcaaaggaggaggtgagccggcaggagctgaggcagcgggtgcgcatggctgacaacgaggtcatggacgcctttcgcaagatcatggctgcccggcagaagaagcggactcccaccaagaaagaaaaggaccaggcctggaagactctgaaggagcgtgagagcatcctgaagctgctggatgggtagccctcacccctgcctcaggctgattatctggcctaggggaggggaagggaggcccacttccttctttgggcacaggaaacattggcctgtggctgtccctc

SEQ ID NO: 31992 - DNA, 1467 bp, Homo sapiens
  source 1..1467: mol_type = unassigned DNA
agtgcggttccttctaaaaaggagaggcgggagagtcagggtggagaaggcggctccaaccagattttgcgtccacaaagccaaaagcttctaggcctggcatgtacggcgggtttgtgcccgaggagcacagctggtctacacgggcccgccccgtagacaccctactcctcgactttccccttttcccagtccgagtttgacgtcggtctcctggataccaggcagccaatcgcctcgttgcgaagggaccagcgcagccaatcaggcgtcgttgctacctgaacaagatcactcaaggtgaaggataatctactaataccagcactttgaatgaaaatttgtttctctgccacaaactgaacatcttttttttttttttttttttttggtgggggagttgaaacctaattttgtggcgtagcagctatgcagcttgaaatccaagtagcactaaattttattatttcgtatttgtacaataagcttcccaggagacgtgtcaacatttttggtgaagaacttgaaagacttcttaagaagaaatatgaagggcactggtatcctgaaaagccatacaaaggatcggggtttagatgtatacacataggggagaaagtggacccagtgattgaacaagcatccaaagagagtggtttggacattgatgatgttcgtggcaatctgccacaggatcttagtgtttggatcgacccatttgaggtttcttaccaaattggtgaaaagggaccagtgaaggtgctttacgtggatgataataatgaaaatggatgtgagttggataaggagatcaaaaacagctttaacccagaggcccaggtttttatgcccataagtgacccagcctcatcagtgtccagctctccatcgcctccttttggtcactctgctgctgtaagccctaccttcatgccccggtccactcagcctttaacctttaccactgccacttttgctgccaccaagttcggctctaccaaaatgaagaatagtggccgtagcaacaaggttgcacgtacttctcccatcaacctcggcttgaatgtgaatgacctcttgaagcagaaagccatctcttcctcaatgcactctctgtatgggcttggcttgggtagccagcagcagccacagcaacagcagcagccagcccagccgccaccgccaccaccaccaccacagcagcaacaacagcagaaaacctctgctctttctcctaatgccaaggaatttatttttcctaatatgcagggtcaaggtagtagtaccaatggaatgttcccaggtgacagcccccttaacctcagtcctctccagtacagtaatgcctttgatgtgtttgcagcctatggaggcctcaatgagaaatcttttgtagatggcttgaattttagcttaaataacatgcagtattctaaccagcaattccagcctgttatggctaactaa

SEQ ID NO: 31993 - DNA, 2229 bp, Homo sapiens
  source 1..2229: mol_type = unassigned DNA
gaagctctggcccggcgtgtagcgggcgcactacggggacgctgggccgggcaccgggctgtgtggagaagtgagcgcgctcgtctgacccccgtgcccgccaccccgagccactaacggcgatctcccaaggcctgcccgaggcctctgtcctctgtcctcagccccgcagcggcaacgtcttgcactcggcgagctcgccgctcccgaccctcccgcgcccccgccctgccgcgctgctccccgcccagccgcgggtctgtggtccaagccgccccgaagcagcccgaacaagatcactcaaggtgaaggataatctactaataccagcactttgaatgaaaatttgtttctctgccacaaactgaacatcttttttttttttttttttttttggtgggggagttgaaacctaattttgtggcgtagcagctatgcagcttgaaatccaagtagcactaaattttattatttcgtatttgtacaataagcttcccaggagacgtgtcaacatttttggtgaagaacttgaaagacttcttaagaagaaatatgaagggcactggtatcctgaaaagccatacaaaggatcggggtttagatgtatacacataggggagaaagtggacccagtgattgaacaagcatccaaagagagtggtttggacattgatgatgttcgtggcaatctgccacaggatcttagtgtttggatcgacccatttgaggtttcttaccaaattggtgaaaagggaccagtgaaggtgctttacgtggatgataataatgaaaatggatgtgagttggataaggagatcaaaaacagctttaacccagaggcccaggtttttatgcccataagtgacccagcctcatcagtgtccagctctccatcgcctccttttggtcactctgctgctgtaagccctaccttcatgccccggtccactcagcctttaacctttaccactgccacttttgctgccaccaagttcggctctaccaaaatgaagaatagtggccgtagcaacaaggttgcacgtacttctcccatcaacctcggcttgaatgtgaatgacctcttgaagcagaaagccatctcttcctcaatgcactctctgtatgggcttggcttgggtagccagcagcagccacagcaacagcagcagccagcccagccgccaccgccaccaccaccaccacagcagcaacaacagcagaaaacctctgctctttctcctaatgccaaggaatttatttttcctaatatgcagggtcaaggtagtagtaccaatggaatgttcccaggtgacagcccccttaacctcagtcctctccagtacagtaatgcctttgatgtgtttgcagcctatggaggcctcaatgagaaatcttttgtagatggcttgaattttagcttaaataacatgcagtattctaaccagcaattccagcctgttatggctaactaaaaaaaagaaaatgtatcgtacaagttaaaatgcacgggcccaagggggattttttttttcacctccttgagaatttttttttttaagcttatagtaaggatacattcaagcttggttaaaaaaataataataaaacatgcatcatttttcatttgccaaccaagcacaaagttattttatactgactgtatattttaaagtatactctcagatatggcctcttacagtatttaagatatagcaaggacatggctgatttttttttataaaaattggcactaataagtgggtttattggtcttttctaattgtataatttaatttagtacaaagtttgtaaaatatcagaggatatatatatattgtttctacgacatggtattgcatttatatctttttactacagtgatctgtgacagcagcagcttcatgttgtattttttttactgaaattgtaaaatatccatcttaaagacatcaactattctaaaaattgtgtacaggatattcctttagtggtggaattaaaatgtacgaatacttgctttttcaaaaaaatgtattttctgttaaaagtttaaagatttttgctatatattatggaagaaaaatgtaatcgtaaatattaattttgtacctatattgtgcaatacttgaaaaaaacggtataaaagtattttgagtcagtgtcttacatgttaagagggactgaaatagtttatattaagtttgtattaaaattctttaaaattaaaaa

SEQ ID NO: 31994 - DNA, 4561 bp, Homo sapiens
  source 1..4561: mol_type = unassigned DNA
cagggaggggaagacggggagccggacgcacgaccggcgagcacagaagggcacaggagctgctccgcgagataccagcgagctgaggcgcggggctggctgggaagtagtcccggccgggccctggccccgcccctgcagggcggagggacgcatcacgcaggggtggggaagccggatccgtgcgcagggttgctaagggtgaaacttttcattgactttgctcacttcgggccggggcgcgggaaggtgcgggttgttggctgaggcaagccgtggctcgggcgacgcggggccaggagggcaggaccgtctgccggcgacagcccataccgtctgccgttgcgcgacacgaaccaccctccgatccgccatccccgcgtcgtcgccgctagtccgcccgcccgccctcgggccccccgctgccgagcccgacctcctaagagctgaaagaaattattgagagtcatagtccatagccccctgcttcgtcccccaaccctcaacgacgaaaaggacttcggtcccctggcccggcgacgcccgggaaggaaaggagagcgacctccgccccgcgctcaggccaccctggagggagaagccgccccgcggccggtagagcgccccgccgccgcggagacccgaagccgcctggagcccaaggctgtacacgtgccctgtgctgattctctgcctaggaaaggaccatgcagctagagatcaaagtggccctgaacttcatcatctcctacttgtacaacaagctgccccggcgccgggcagacctgtttggggaggagctagagcggcttttgaaaaagaaatatgaaggccactggtaccctgagaagccactgaaaggctctggcttccgctgtgttcacattggggagatggtggaccccgtggtggagctggccgccaagcggagtggcctggcggtggaagatgtgcgggccaatgtgcctgaggagctgagtgtctggattgatccctttgaggtgtcctaccagattggtgagaagggagctgtgaaagtgctgtacctggatgacagtgagggttgcggtgccccagagctggacaaggagatcaagagcagcttcaaccctgacgcccaggtgttcgtgcccattggcagccaggacagctccctgtccaactccccatcgccatcctttggccagtcacccagccctaccttcattccccgctccgctcagcccatcaccttcaccaccgcctccttcgctgccaccaaatttggctccactaagatgaagaaggggggcggggcagcaagtggtgggggtgtagccagcagtggggcgggtggccagcagccaccacagcagcctcgcatggcccgctcacccaccaacagcctgctgaagcacaagagcctctctctgtctatgcattcactgaacttcatcacggccaacccggcccctcagtcccagctctcacccaatgccaaggagttcgtgtacaacggtggtggctcacccagcctcttctttgatgcggccgatggccagggcagcggcaccccaggcccgtttggaggcagtggggctggcacctgcaacagcagcagctttgacatggcccaggtatttggaggtggtgccaacagcctcttcctggagaagacaccctttgtggaaggcctcagctacaacctgaacaccatgcagtatcccagccagcagttccagcccgtggtgctggccaactgaccatctacctgcccgtggggccaggagcacccaagaccacagaaaagagaaaggaaaggccaaaaaaaagaggaaaagaaaaatgtacaaaaagattttcgatcttctcactcttacttctagaaaaaagatccagcccaggcacggaatgggagggccctgcaaagcacccaagtgtgtttcactcaccccttaccgctcgcccaccggcctgtgatttatttggttggtttgggttttatatttctttttcttttttttttttcttacatgtagttttctatataacatctttaatgagtggcttcctgtgctaagaatggtccagatgtgaactgctgctccctgctcctcccttcctccttcacactcctagtttaggattgatgtgtccaagctcatagggaagaaagagctgcagctggagcctgaccctccctggaacagggagaggctggcccgtgtcactgcctctgtcacccagctatcctcgcactcaaagccatccaacctcagcaggccttctcgggccctgccacctgaataggtctgaccccagtccccactccctttcaggctgggccacagggagttgctggctggccacttgacaccctccccctggagctgatgtctgtgactacagggagattagcacttcgtctagtgaaactcctttcatctctgtcctatggccccaccccaccattccctctaggcccagaccatcatcatggccctggccattgatgtgtatgggctttctttccctcatgcagccccttcttccccaggctggatgttgtgggtagggaggggtgtgtgtgtgtgtatttggtttgctgtccttttttaaaggattccaagccatgtgaaacttcccttctggatgtgattctgggtcgcaagtccttatttatatgtgaggctggggaatgggctgggggtattggcagtccttttgcagggcagtgtgtgtggtggggtgacaccgctgtggcttagcccaagacactcccagaggaaaacactgcagaaggaactggtttgcagactgtggaaggatctgcagttttgtttttgaccaaaaaaataataataagttagctctgaagggcagagggaatacccaagcccctgatgcctatgagaagtccctggacttcaaccctcctgttgtttggccttagcccagagggagctgctcacctgagcacccttgggggtgggcagagaggcagggtgggattttagagttagtgtctgtgcgggggcagccctgagcctggagttgagactttggggtctcttagtttggaggtgttgagtgcatttgtgcccctgcctggttgagagcttcttggtacctcttgccaccccttctcactgccctgacccaaccccactggaccttgatgctgcgaggagtggtgtcctgacggactcagcactcccgcctgatgtattggatcataggagagcacttgctctcctgcctctgccaggagagggcttgttcctccaactctaggaggccaggcaagcatggacaggagccaagggagcagggtcattaactttttcttctttgcaaagtgggcacttggcatcagggtcccaatcaccagaaagcaccaaagcccctggcaccccacccactccatcctacccagggaccccaagtaggcaactgttatggcagtgggtccagcccaggccagcactgccagcctcctctccctgcagtaggcaccagctctacctcccccggcaggcaatgtcctggcttctcagcccagcaccatctgttcccctagacttctcaggggccagcccagtctgggccaccctttgtttccctcatcctcggctcccacacaggtgacagacccagcagatagcttctctctgggaaaggttggatgctgccttacatccccttctagccctcctcccatccacacacacaggcacccacccacaccaggtcggcttgtttctcacatgtagggagagaggggagaccaacccctttgtgtcttttgaaatacgaagaaaaatgtgtgttcaggagcatgactccagtgctgcgctcttgggcccagttcagtctgtcttgtctcaaatctaggcatttttgcttcaattttattttttttaagaatacaaaaacagaaatctgcactaatttacctggtttcgtaggaaaacttttttttattttttacattttttggtgtccgtttgtattgaataatttgctacatttgtaaaatgtaagaggtatataatatatgtatatttctaacgtaaaaaacataatttttttcttttcaagattttttcttaaaaagatgagagaaacatattttttcaggaaaaacaaactttaaaaaaaaaagaggagaaataaaaccttttctcccctttccccatcctctatctatccctctttcccaggaacaaatcaaaaggtggattatcttctgaagaatggaaactgttagtccagaatgatgtgtttttctcaatgcagtgagttatagattctctagttttctccctagggatgggaagggggcattgaggcaagcctggagaggagcccggggagcagggtcatgaacttttttctttagtgaaggaggaatacaatcaagggttttgtattcagaatgttgtgcaatattttggaatgggacattggtgtgtttagagattttagtttaaaaacaaaacaaaaagattgatcaaatctgtacagtttctattgttccagatttttttaagtttgtattaaaagcatgatacataatagc

SEQ ID NO: 31995 - DNA, 777 bp, Homo sapiens
  source 1..777: mol_type = unassigned DNA
ggcgcgggaaggtgcgggttgttggctgaggcaagccgtggctcgggcgacgcggggccaggagggcaggaccgtctgccggcgacagcccataccgtctgccgttgcgcgacacgaaccaccctccgatccgccatccccgcgtcgtcgccgctagtccgcccgcccgccctcgggccccccgctgccgagcccgacctcctaagagctgaaagaaattattgagagtcatagtccatagccccctgcttcgtcccccaaccctcaacgacgaaaaggacttcggtcccctggcccggcgacgcccgggaaggaaaggagagcgacctccgccccgcgctcaggccaccctggagggagaagccgccccgcggccggtagagcgccccgccgccgcggagacccgagtgaagccgcctggagcccaaggctgtacacgtgccctgtgctgattctctgcctaggaaaggaccatgcagctagagatcaaagtggccctgaacttcatcatctcctacttgtacaacaagctgccccggcgccgggcagacctgtttggggaggagctagagcggcttttgaaaaagaaatatgaaggccactggtaccctgagaagccactgaaaggctctggcttccgctgtgttcacattggggagatggtggaccccgtggtggagctggccgccaagcggagtggcctggcggtggaagatgtgcgggccaatgtgcctgaggagctgagtgtctggattgatccctttgaggtgtcctacc

SEQ ID NO: 31996 - DNA, 2312 bp, Homo sapiens
  source 1..2312: mol_type = unassigned DNA
ccagtgcccccaattcgcgctcgggagtgaggagccgccaacaccccagctccgctgctgccgccaccgcagtgctctctagtcgccattggttacctaaactttccagtacccgcgacctttccgggactccgcggcggcggggcagaggcggcccaggggcggcacgcggctgctccggtgcgccgggctcttttcggccgccgcacggccgggcctcacaggctgccctcctgagagaggctcagaacacggccaggtacgcgccgccgccacagttgcgctgctagcgacgaggtgttttcctctgctggcacgccagaatccctggttcagcctggaaggcgaggggcaggactccccagacagtggcctcagtgtggcattgatgtcctaggttgtaaggtgctaaggctggtccccacagacggcttgccatttctatgactggatgctgagaagcctgctggttcagaggtccacacatgaagttaccataaagagggtggttccaacttcatcaatacctcatcgccatgaggtgaggctaagatgagcataaccagtgacgaggtgaactttctggtttatcggtatctccaggagtcaggtttttctcactcggctttcacgtttgggatcgagagccacatcagccagtccaacatcaatgggacactagtgccaccgtctgccctcatctccattctccagaagggactgcagtatgtagaggctgagataagcatcaacaaggatggcacagtgttcgacagccgccctatagagtccctgtccctgatagttgctgtgattcctgatgtggtgcagatgcggcagcaggcatttggagagaagctcactcagcagcaagccagtgcagcagccacagaggcatcagcaatggcaaaggcggcaaccatgaccccagctgctatttcccagcaaaatcctccaaagaaccgagaggccacagtgaacggggaagagaatggagcacatgaaatcaataatcactcaaagccaatggaaatagatggggatgttgagattccacccaacaaagccacagtccttcggggccacgagtctgaggtgttcatttgtgcctggaaccctgtcagtgatttgctagcctctggatctggagactcaactgcaaggatatggaacctgaatgagaatagcaacgggggctccacccagctcgtgttgagacattgtatacgagaaggggggcacgacgtcccaagtaataaagatgtcacctcactggactggaacagtgatggaacactattggctatgggttcatatgatggtttcgcaagaatatggacagaaaatggtaacctggccagcaccttaggccaacataaaggccccatcttcgctctgaaatggaacaaaaaggggaattatgttttgagtgctggtgtagacaaaacaacaataatttgggatgctcacacaggagaagccaaacagcagtttccttttcattcagcccccgcccttgatgtggactggcagaacaacatgacctttgcctcctgtagcacagacatgtgtatccatgtgtgcaggctcggctgtgaccacccagtcaaaaccttccagggacacacaaacgaggtcaatgccatcaaatgggatccttctggaatgttgctggcgtcctgctcggatgacatgacattgaagatctggagtatgaagcaggatgcatgcgtccacgatcttcaggctcacagcaaagagatctacaccatcaagtggagccccaccgggcctgccaccagcaacccaaactccagcatcatgttggcaagtgcttcatttgattctacagtgcgactgtgggatgtggagcaaggtgtctgcacccacacactcatgaagcatcaagagcctgtctacagtgtagctttcagccccgatggaaagtacttggctagtggatcctttgacaagtatgttcatatctggaatactcagagtggaagtctcgtccacagctaccaaggcactggcggtatcttcgaggtgtgctggaacgcccgaggagataaagtgggcgccagcgcgtctgatggctctgtgtgtgttctggatctgtgaaagtaaacacaaaatatagaaaaaaagaaaagaattctaatgacctgccttgaatgcatggggttgcagctctgttcaaacacaattctatcagctccaaaatgtgtgaacttgacttgtgttagagtatattctgaaaccaacttgtcccaggccacaggagtgtatatgtttcataatctttatcaaga

SEQ ID NO: 31997 - DNA, 2376 bp, Homo sapiens
  source 1..2376: mol_type = unassigned DNA
ccagtgcccccaattcgcgctcgggagtgaggagccgccaacaccccagctccgctgctgccgccaccgcagtgctctctagtcgccattggttacctaaactttccagtacccgcgacctttccgggactccgcggcggcggggcagaggcggcccaggggcggcacgcggctgctccggtgcgccgggctcttttcggccgccgcacggccgggcctcacaggctgccctcctgagagaggctcagaacacggccaggtacgcgccgccgccacagttgcgctgctagcgacgaggtgttttcctctgctggcacgccagaatccctggttcagcctggaaggcgaggggcaggactccccagacagtggcctcagtgtggggaatgccagctgttctcttaacagaagggcagtttttgaagaaatgaagcaggacttgatgtggattgtcataaactgtttctccctaaagaggctggtccccacagacggcttgccatttctatgactggatgctgagaagcctgctggttcagaggtccacacatgaagttaccataaagagggtggttccaacttcatcaatacctcatcgccatgaggtgaggctaagatgagcataaccagtgacgaggtgaactttctggtttatcggtatctccaggagtcaggtttttctcactcggctttcacgtttgggatcgagagccacatcagccagtccaacatcaatgggacactagtgccaccgtctgccctcatctccattctccagaagggactgcagtatgtagaggctgagataagcatcaacaaggatggcacagtgttcgacagccgccctatagagtccctgtccctgatagttgctgtgattcctgatgtggtgcagatgcggcagcaggcatttggagagaagctcactcagcagcaagccagtgcagcagccacagaggcatcagcaatggcaaaggcggcaaccatgaccccagctgctatttcccagcaaaatcctccaaagaaccgagaggccacagtgaacggggaagagaatggagcacatgaaatcaataatcactcaaagccaatggaaatagatggggatgttgagattccacccaacaaagccacagtccttcggggccacgagtctgaggtgttcatttgtgcctggaaccctgtcagtgatttgctagcctctggatctggagactcaactgcaaggatatggaacctgaatgagaatagcaacgggggctccacccagctcgtgttgagacattgtatacgagaaggggggcacgacgtcccaagtaataaagatgtcacctcactggactggaacagtgatggaacactattggctatgggttcatatgatggtttcgcaagaatatggacagaaaatggtaacctggccagcaccttaggccaacataaaggccccatcttcgctctgaaatggaacaaaaaggggaattatgttttgagtgctggtgtagacaaaacaacaataatttgggatgctcacacaggagaagccaaacagcagtttccttttcattcagcccccgcccttgatgtggactggcagaacaacatgacctttgcctcctgtagcacagacatgtgtatccatgtgtgcaggctcggctgtgaccacccagtcaaaaccttccagggacacacaaacgaggtcaatgccatcaaatgggatccttctggaatgttgctggcgtcctgctcggatgacatgacattgaagatctggagtatgaagcaggatgcatgcgtccacgatcttcaggctcacagcaaagagatctacaccatcaagtggagccccaccgggcctgccaccagcaacccaaactccagcatcatgttggcaagtgcttcatttgattctacagtgcgactgtgggatgtggagcaaggtgtctgcacccacacactcatgaagcatcaagagcctgtctacagtgtagctttcagccccgatggaaagtacttggctagtggatcctttgacaagtatgttcatatctggaatactcagagtggaagtctcgtccacagctaccaaggcactggcggtatcttcgaggtgtgctggaacgcccgaggagataaagtgggcgccagcgcgtctgatggctctgtgtgtgttctggatctgtgaaagtaaacacaaaatatagaaaaaaagaaaagaattctaatgacctgccttgaatgcatggggttgcagctctgttcaaacacaattctatcagctccaaaatgtgtgaacttgacttgtgttagagtatattctgaaaccaacttgtcccaggccacaggagtgtatatgtttcataatctttatcaaga

SEQ ID NO: 31998 - DNA, 2407 bp, Homo sapiens
  source 1..2407: mol_type = unassigned DNA
ccagtgcccccaattcgcgctcgggagtgaggagccgccaacaccccagctccgctgctgccgccaccgcagtgctctctagtcgccattggttacctaaactttccagtacccgcgacctttccgggactccgcggcggcggggcagaggcggcccaggggcggcacgcggctgctccggtgcgccgggctcttttcggccgccgcacggccgggcctcacaggctgccctcctgagagaggctcagaacacggccaggtacgcgccgccgccacagttgcgctgctagcgacgaggtgttttcctctgctggcacgccagaatccctggttcagcctggaaggcgaggggcaggactccccagacagtggcctcagtgtggcattgatgtcctaggttgtaaggtgctaaggggaatgccagctgttctcttaacagaagggcagtttttgaagaaatgaagcaggacttgatgtggattgtcataaactgtttctccctaaagaggctggtccccacagacggcttgccatttctatgactggatgctgagaagcctgctggttcagaggtccacacatgaagttaccataaagagggtggttccaacttcatcaatacctcatcgccatgaggtgaggctaagatgagcataaccagtgacgaggtgaactttctggtttatcggtatctccaggagtcaggtttttctcactcggctttcacgtttgggatcgagagccacatcagccagtccaacatcaatgggacactagtgccaccgtctgccctcatctccattctccagaagggactgcagtatgtagaggctgagataagcatcaacaaggatggcacagtgttcgacagccgccctatagagtccctgtccctgatagttgctgtgattcctgatgtggtgcagatgcggcagcaggcatttggagagaagctcactcagcagcaagccagtgcagcagccacagaggcatcagcaatggcaaaggcggcaaccatgaccccagctgctatttcccagcaaaatcctccaaagaaccgagaggccacagtgaacggggaagagaatggagcacatgaaatcaataatcactcaaagccaatggaaatagatggggatgttgagattccacccaacaaagccacagtccttcggggccacgagtctgaggtgttcatttgtgcctggaaccctgtcagtgatttgctagcctctggatctggagactcaactgcaaggatatggaacctgaatgagaatagcaacgggggctccacccagctcgtgttgagacattgtatacgagaaggggggcacgacgtcccaagtaataaagatgtcacctcactggactggaacagtgatggaacactattggctatgggttcatatgatggtttcgcaagaatatggacagaaaatggtaacctggccagcaccttaggccaacataaaggccccatcttcgctctgaaatggaacaaaaaggggaattatgttttgagtgctggtgtagacaaaacaacaataatttgggatgctcacacaggagaagccaaacagcagtttccttttcattcagcccccgcccttgatgtggactggcagaacaacatgacctttgcctcctgtagcacagacatgtgtatccatgtgtgcaggctcggctgtgaccacccagtcaaaaccttccagggacacacaaacgaggtcaatgccatcaaatgggatccttctggaatgttgctggcgtcctgctcggatgacatgacattgaagatctggagtatgaagcaggatgcatgcgtccacgatcttcaggctcacagcaaagagatctacaccatcaagtggagccccaccgggcctgccaccagcaacccaaactccagcatcatgttggcaagtgcttcatttgattctacagtgcgactgtgggatgtggagcaaggtgtctgcacccacacactcatgaagcatcaagagcctgtctacagtgtagctttcagccccgatggaaagtacttggctagtggatcctttgacaagtatgttcatatctggaatactcagagtggaagtctcgtccacagctaccaaggcactggcggtatcttcgaggtgtgctggaacgcccgaggagataaagtgggcgccagcgcgtctgatggctctgtgtgtgttctggatctgtgaaagtaaacacaaaatatagaaaaaaagaaaagaattctaatgacctgccttgaatgcatggggttgcagctctgttcaaacacaattctatcagctccaaaatgtgtgaacttgacttgtgttagagtatattctgaaaccaacttgtcccaggccacaggagtgtatatgtttcataatctttatcaaga

SEQ ID NO: 31999 - DNA, 2675 bp, Homo sapiens
  source 1..2675: mol_type = unassigned DNA
aattcgcgctcgggagtgaggagccgccaacaccccagctccgctgctgccgccaccgcagtgctctctagtcgccattggttacctaaactttccagtacccgcgacctttccgggactccgcggcggcggggcagaggcggcccaggggcggcacgcggctgctccggtgcgccgggctcttttcggccgccgcacggccgggcctcacaggctgccctcctgagagaggctcagaacacggccaggtacgcgccgccgccacagttgcgctgctagcgacgaggtgttttcctctgctggcacgccagaatccctggttcagcctggaaggcgaggggcaggactccccagacagtggcctcagtgtggcattgatgtcctaggttgtaaggtgctaaggggaatgccagctgttctcttaacagaagggcagtttttgaagaaatgaagcaggacttgatgtggattgtcataaactgtttctccctaaagaggctggtccccacagacggcttgccatttctatgactggatgctgagaagcctgctggttcagaggtccacacatgaagttaccataaaggtttttctcactcggctttcacgtttgggatcgagagccacatcagccagtccaacatcaatgggacactagtgccaccgtctgccctcatctccattctccagaagggactgcagtatgtagaggctgagataagcatcaacaaggatggcacagtgttcgacagccgccctatagagtccctgtccctgatagttgctgtgattcctgatgtggtgcagatgcggcagcaggcatttggagagaagctcactcagcagcaagccagtgcagcagccacagaggcatcagcaatggcaaaggcggcaaccatgaccccagctgctatttcccagcaaaatcctccaaagaaccgagaggccacagtgaacggggaagagaatggagcacatgaaatcaatgcggtggctcttgcctataatcccagcacttgggaggcccaaggaagaagactgattgaatctaggagttcaagaccagactgggaaagagagaaagacctcggctttacagaaaatgtagaaatcagccagataatcactcaaagccaatggaaatagatggggatgttgagattccacccaacaaagccacagtccttcggggccacgagtctgaggtgttcatttgtgcctggaaccctgtcagtgatttgctagcctctggatctggagactcaactgcaaggatatggaacctgaatgagaatagcaacgggggctccacccagctcgtgttgagacattgtatacgagaaggggggcacgacgtcccaagtaataaagatgtcacctcactggactggaacagtgatggaacactattggctatgggttcatatgatggtttcgcaagaatatggacagaaaatggtaacctggccagcaccttaggccaacataaaggccccatcttcgctctgaaatggaacaaaaaggggaattatgttttgagtgctggtgtagacaaaacaacaataatttgggatgctcacacaggagaagccaaacagcagtttccttttcattcagcccccgcccttgatgtggactggcagaacaacatgacctttgcctcctgtagcacagacatgtgtatccatgtgtgcaggctcggctgtgaccacccagtcaaaaccttccagggacacacaaacgaggtcaatgccatcaaatgggatccttctggaatgttgctggcgtcctgctcggatgacatgacattgaagatctggagtatgaagcaggatgcatgcgtccacgatcttcaggctcacagcaaagagatctacaccatcaagtggagccccaccgggcctgccaccagcaacccaaactccagcatcatgttggcaagtgcttcatttgattctacagtgcgactgtgggatgtggagcaaggtgtctgcacccacacactcatgaagcatcaagagcctgtctacagtgtagctttcagccccgatggaaagtacttggctagtggatcctttgacaagtatgttcatatctggaatactcagagtggaagtctcgtccacagctaccaaggcactggcggtatcttcgaggtgtgctggaacgcccgaggagataaagtgggcgccagcgcgtctgatggctctgtgtgtgttctggatctgtgaaagtaaacacaaaatatagaaaaaaagaaaagaattctaatgacctgccttgaatgcatggggttgcagctctgttcaaacacaattctatcagctccaaaatgtgtgaacttgacttgtgttagagtatattctgaaaccaacttgtcccaggccacaggagtgtatatgtttcataatctttatcaagaagtttgttgtttttttttgagttggagttttgctcttgttgcccaggctagagtgcagtggtgtgatctcggctcagtgcatcttctgcctcttgggttcaagtgattctcctgcctcagcctcccaagtagctgggattacaggcatgcggacatgacgctcagctaattttgtatttttagtagagacagggttttaccatgttggttaggctggtctcgtactcctgacctcaggtgatccacccacctt

SEQ ID NO: 32000 - DNA, 5866 bp, Homo sapiens
  source 1..5866: mol_type = unassigned DNA
gggccggcggcgggggcggacccctggcggtcctcctggctggggtccgcgcgctcgcggcagctccccgtggaggtcactgtccgtgccagtccctcccgctgtcccgccctctcccgctgccgccgccgccgccgccgcgcccgcctcagcgcccccactccgcgcttgggagcgaggagccgccagcgcccccgccccgccgccgccgcagcgccctcaggccgccattcgccaccgaaactttccagcgcccgcgctctctccgggactcggcggcggcggggcgggggcggcccgggggcggcgcgcggctgctccggggcgccgggccctcttcggccgccgcacggccgggactcggaggctgccggctggagggaggttcggagcgcggccgggcgcgcggcgccgccacaagttgcgctgctcgcgacgagatttccgtgagggtggaagaaaatcataccatatcagatgcctcgcagagcaccaggcccaccgtgaaaggctggtccctgcagacggcttcccatttttatgaccggatgctgggaagcctgctggtccacaggtccatacatgaagtcaccataaggagccctggcctccttgcagaaacatcgaggtgacatgtagcatgaccgagctcgctggcgcctcttcatcgtgctgccaccgccctgcaggaagaggggccatgcagtcagtcttgcaccactttcaacgtttgcgagggagagagggtggttcccacttcatcaacacctcatcgccgcgaggtgaggctaagatgagcataaccagtgacgaggtgaactttctggtgtatcggtatctccaggagtcaggtttttcccactcggctttcacgtttgggattgagagccacatcagccagtccaacatcaatgggacgctagtgccaccggccgccctcatctccattctccagaagggcctgcagtatgtagaggccgagatcagtatcaacgaggatggcacagtgttcgacggccgccccatagagtccctgtcactgatagacgccgtgatgcccgacgtggtgcagacgcggcagcaggcattccgagagaagctcgctcagcagcaagccagtgcggcggcggcggcggctgcggccacggcagcagcgacagcagccaccacgacctcagccggcgtttcccaccaaaatccatcgaagaacagagaggccacggtgaatggggaagagaacagagcacattcagtcaataatcacgcgaagccaatggaaatagatggagaggttgagattccatccagcaaagccacagtccttcggggccatgagtctgaggtgttcatttgtgcctggaatcctgtcagtgatttgctagcctccggatctggagactcaactgcaaggatatggaacctgaatgagaatagcaacgggggctccacccagctcgtgttgaggcactgtatacgagaggggggccatgacgtcccgagtaacaaagacgtcacctcactggactggaataccaatggaacactcttggctacgggttcatatgacggttttgcaagaatatggacggaagatggtaacctggccagcaccttaggccaacataaaggccccatctttgccttgaaatggaaccgaaaggggaattacattttgagtgctggtgtagacaaaacaacaataatttgggatgcccacacaggagaagccaaacagcagtttccttttcattcagcccctgcccttgatgtggactggcagaacaacacgacctttgcctcctgtagcacagacatgtgtatccatgtgtgcaggctcggctgtgaccgcccagtcaaaaccttccagggacacacaaacgaggtcaacgccatcaaatgggatccgtctggaatgttgctggcatcctgctcggatgacatgacattgaagatctggagcatgaaacaggaggtgtgcatccatgatcttcaggctcacaataaagagatctacaccatcaagtggagccccactgggcccgccaccagcaacccaaactccaacatcatgttggcaagtgcttcgtttgattctacggtgcgactgtgggacatagaacgaggcgtctgcacccacacgctcacgaagcatcaggagcctgtctatagcgtagctttcagccctgatgggaagtacttggccagtggatccttcgacaagtgcgtccatatctggaatactcagagtggaaatcttgtccacagctaccgaggcactggcggcatcttcgaggtgtgctggaacgcccgaggagacaaagtgggtgccagcgcgtccgacggctctgtgtgtgttttggatctgcggaagtaaccacaaaatattatcgaaaaaagaaaagaattctaatgaccagccgtgaatgtgtagggttgcagctctattctccaaaactgtaggaacttgacttgcgttagagtgtactctgaaaccaactcgtctctggccgcaggagtctatatgttttcgtaatcttcatcaagaagtttttaaaaggcaagcaaaaacagaagcaaatcatatcaaacggggatagaatggtttccactgaggacattcagcctgggaaggaggaagtcaccagctcgaggcgtgtggattggtttccacccggaacaggctctgtgatggctgaatggaaagaaacgtaaaaagctgtgccaaaaaaaaagcaaaatgctgtgataaaccaaacagggaagggggaaaaaccctcctccttgggattttttttttttgttttccctaacaatttggacactacaattgctctcacaaaggaggttcaaagaccagtttgtaccgatgaaacgcgcaactttgtaatcccaacactttctattttctagaatcttctttgttcattgggtggtttttcagtcggctggaattctatcttctgggggccttccgtctgagatggaagctgtcttgggcttgttgtctcttccttctgttgctccctgcccctccccctgcctttccactctgtctggtgagctctgctttttcagtgcaccatcaagagatgcagccccgtggacatgaagacacaatctcccacggacagctttcccccttccgccctctcccaccctctcctccccttgcgctcgcgctcgcgctcgctttctcactggcgtgctctctttctctctctctctccctctgtacctttctcatagttgcttcagatcttaggtctcaagggcactttggcgcgtagtaagtgctttatgtaagaaggcagggcaggggggctttttacaggagaaaaaaaaatgacttataagagaaagagcctggagtatttttggaaaaaaaaataatatttttatgttaaaacaattttaaaatcttaaaatggccatcagacatagagagctttgtgtgattcatgttttaaaaagaaccgaagaagccacaggcagggcctgagggagcccctggctttcccctcagcctcaggaaaggtggtcaggaaaactctggctggacaagggtcagtcttcggggtcagcagcgagattgctctgcagccagtgagggaggtccccgccatgccggctggaagaagaacctcgcatcttttggtgtgtatgcaccttggcagccagcaggaaagcagcgaagagccgcgcgccctctggcctcaagggagcattggcagaaccataaggtactgcagaagccgtcgaaaccgactgctcggctggattaggcgtgttggctacatctttcccacaaccgtataacgaccgatggtcatttctccaagagcaggcttggcgagtccttgcagagctgacatagaggcgcccgcatgtcacttagtctaacgctgacagaaatgaatgcagaaggaagattttcagtcctgaacgtgaattatagaggtagaacgtcgctaataatttctgccatctttataatttctttgtctcacagaagactaggagaaagatcttttttaaataatctttttgctgtttttaaaaaattaaacaaggctttgtgttcctagaagagcttcatttcagtgaatctggtgacctccatctgcttgctgtcataacccgacacggacttatttttgtcattagcaagggggaaaaggccaaaggacaagggcctcttctcccattggttttcctgtgggcagaagggctgaggaagatggcccagcccgtgggggctgctgggtcaccagcagtgggtagggtgcaatctggtgtgtgttccagcagtgagacggtgttattgtgaaggtggcattcatctgcggagccaaaacccagccatcggggaagggtcagggcttctgtggaacttggaacgtgccaggaccacctgcaaaagccagggtgcgttgatcattctcagatcattgattggcctccacttgggtatgtgaattattcatgtcccagaagaccaaaaagtgctctggttctgagatgagtattttattcgtgttctgtttccgaaacacttagcaaagaaggtcacagtgatgtggagtcgccgcacccatctttgaagatagccagtgtccctggatgaggtgatgatttcccgtcccaaggactctgtgaagtttagagtacagtttgttggggtccaaaagacaccatctctaccccacccaaataaaaatgcactcatctctgtagaacatctgctgtcaaaggccagcctgtcgttagggcatggcttatgcttgacaaaccagtaacaactgtgggatggcgatggtgggatgtgtcgcaagcaattcactagacaatcttcacatgaatgtcggtagccagggtctctcccgagggatggctttagtcttgatgaatgtgaaccatgtcggaattgttaggtagaaacctgggctgggaggcctcggaccccaggctccatccctggcttccccagcctgcggccgcaagcaaaaccaagcgcgagatgcagctagcacccttcatatccatccccgttctcagcgggacaacaccatggacagccgttttcagagcctccagcatttgcacaccactactcaccctctctgctgctggcatgttggtagagtcatccctgtaatcaagaaatggcctgtggaatgttattgttcaacgttgtttacagctcttaaaacatggtgaggaatgcctaagtcttagtgaccaaacgtgaccttgaaagcagacatagcatgacagaccttcctagagtgtttggtcgggttcacagtgaccgagagtcaggtccagcacacacctgggaaagggatgctgccccaagggggaccaaaagggccggacgttacagggtgaaaccctctgacccctcgcgacaccgtaggacttgacttttgtttagtctttctaagaaatagatcatggagccaagtgaagtgcactttgtcaaatgtaagggtctgctttgttcttgttgcttttctgttttttaaccttttgttccgccatttaaaaaaagaaaaaaaaaaagcttatgtttcttgtcaaatgcagaaatgttccttccgccactcactgaagttttgcattctggcttgtgcagtttttattgtctgtgtcagacgtacagccagacatgttctctattggcatttttccgattctgttcagatgacagcgaccgccttttcattccccccgccacctgtactcaccctcacgctctttgaagaaaaaaaaaaaaatcaccttgtgtgttgtagctcatttgtttcaagagagaatcaacagatcatattcagtgtcttgaataaattgctctattttgatatta

SEQ ID NO: 32001 - DNA, 4674 bp, Homo sapiens
  source 1..4674: mol_type = unassigned DNA
gcccagggagcccaggagcaacgaagggcaggctcaagggaaggccccaccatgtccttctggggggccttgaatggcaactgatacataataagacacaatctattctgctgattcacaattatggagactgtatttccgtgagggtggaagaaaatcataccatatcagatgcctcgcagagcaccaggcccaccgtgaaagctcctggcaaccactattccactccctgcttctttgaatttcacaacttgaggtagcttgtgtaagtggaattattttaaaagctggttcatgttaaagtgcttagaacagagcttggtgagcatccggtcaacagctggtccctgcagacggcttcccatttttatgaccggatgctgggaagcctgctggtccacaggtccatacatgaagtcaccataagagggtggttcccacttcatcaacacctcatcgccgcgaggtgaggctaagatgagcataaccagtgacgaggtgaactttctggtgtatcggtatctccaggagtcaggtttttcccactcggctttcacgtttgggattgagagccacatcagccagtccaacatcaatgggacgctagtgccaccggccgccctcatctccattctccagaagggcctgcagtatgtagaggccgagatcagtatcaacgaggatggcacagtgttcgacggccgccccatagagtccctgtcactgatagacgccgtgatgcccgacgtggtgcagacgcggcagcaggcattccgagagaagctcgctcagcagcaagccagtgcggcggcggcggcggctgcggccacggcagcagcgacagcagccaccacgacctcagccggcgtttcccaccaaaatccatcgaagaacagagaggccacggtgaatggggaagagaacagagcacattcagtcaataatcacgcgaagccaatggaaatagatggagaggttgagattccatccagcaaagccacagtccttcggggccatgagtctgaggtgttcatttgtgcctggaatcctgtcagtgatttgctagcctccggatctggagactcaactgcaaggatatggaacctgaatgagaatagcaacgggggctccacccagctcgtgttgaggcactgtatacgagaggggggccatgacgtcccgagtaacaaagacgtcacctcactggactggaataccaatggaacactcttggctacgggttcatatgacggttttgcaagaatatggacggaagatggtaacctggccagcaccttaggccaacataaaggccccatctttgccttgaaatggaaccgaaaggggaattacattttgagtgctggtgtagacaaaacaacaataatttgggatgcccacacaggagaagccaaacagcagtttccttttcattcagcccctgcccttgatgtggactggcagaacaacacgacctttgcctcctgtagcacagacatgtgtatccatgtgtgcaggctcggctgtgaccgcccagtcaaaaccttccagggacacacaaacgaggtcaacgccatcaaatgggatccgtctggaatgttgctggcatcctgctcggatgacatgacattgaagatctggagcatgaaacaggaggtgtgcatccatgatcttcaggctcacaataaagagatctacaccatcaagtggagccccactgggcccgccaccagcaacccaaactccaacatcatgttggcaagtgcttcgtttgattctacggtgcgactgtgggacatagaacgaggcgtctgcacccacacgctcacgaagcatcaggagcctgtctatagcgtagctttcagccctgatgggaagtacttggccagtggatccttcgacaagtgcgtccatatctggaatactcagagtggaaatcttgtccacagctaccgaggcactggcggcatcttcgaggtgtgctggaacgcccgaggagacaaagtgggtgccagcgcgtccgacggctctgtgtgtgttttggatctgcggaagtaaccacaaaatattatcgaaaaaagaaaagaattctaatgaccagccgtgaatgtgtagggttgcagctctattctccaaaactgtaggaacttgacttgcgttagagtgtactctgaaaccaactcgtctctggccgcaggagtctatatgttttcgtaatcttcatcaagaagtttttaaaaggcaagcaaaaacagaagcaaatcatatcaaacggggatagaatggtttccactgaggacattcagcctgggaaggaggaagtcaccagctcgaggcgtgtggattggtttccacccggaacaggctctgtgatggctgaatggaaagaaacgtaaaaagctgtgccaaaaaaaaagcaaaatgctgtgataaaccaaacagggaagggggaaaaaccctcctccttgggattttttttttttgttttccctaacaatttggacactacaattgctctcacaaaggaggttcaaagaccagtttgtaccgatgaaacgcgcaactttgtaatcccaacactttctattttctagaatcttctttgttcattgggtggtttttcagtcggctggaattctatcttctgggggccttccgtctgagatggaagctgtcttgggcttgttgtctcttccttctgttgctccctgcccctccccctgcctttccactctgtctggtgagctctgctttttcagtgcaccatcaagagatgcagccccgtggacatgaagacacaatctcccacggacagctttcccccttccgccctctcccaccctctcctccccttgcgctcgcgctcgcgctcgctttctcactggcgtgctctctttctctctctctctccctctgtacctttctcatagttgcttcagatcttaggtctcaagggcactttggcgcgtagtaagtgctttatgtaagaaggcagggcaggggggctttttacaggagaaaaaaaaatgacttataagagaaagagcctggagtatttttggaaaaaaaaataatatttttatgttaaaacaattttaaaatcttaaaatggccatcagacatagagagctttgtgtgattcatgttttaaaaagaaccgaagaagccacaggcagggcctgagggagcccctggctttcccctcagcctcaggaaaggtggtcaggaaaactctggctggacaagggtcagtcttcggggtcagcagcgagattgctctgcagccagtgagggaggtccccgccatgccggctggaagaagaacctcgcatcttttggtgtgtatgcaccttggcagccagcaggaaagcagcgaagagccgcgcgccctctggcctcaagggagcattggcagaaccataaggtactgcagaagccgtcgaaaccgactgctcggctggattaggcgtgttggctacatctttcccacaaccgtataacgaccgatggtcatttctccaagagcaggcttggcgagtccttgcagagctgacatagaggcgcccgcatgtcacttagtctaacgctgacagaaatgaatgcagaaggaagattttcagtcctgaacgtgaattatagaggtagaacgtcgctaataatttctgccatctttataatttctttgtctcacagaagactaggagaaagatcttttttaaataatctttttgctgtttttaaaaaattaaacaaggctttgtgttcctagaagagcttcatttcagtgaatctggtgacctccatctgcttgctgtcataacccgacacggacttatttttgtcattagcaagggggaaaaggccaaaggacaagggcctcttctcccattggttttcctgtgggcagaagggctgaggaagatggcccagcccgtgggggctgctgggtcaccagcagtgggtagggtgcaatctggtgtgtgttccagcagtgagacggtgttattgtgaaggtggcattcatctgcggagccaaaacccagccatcggggaagggtcagggcttctgtggaacttggaacgtgccaggaccacctgcaaaagccagggtgcgttgatcattctcagatcattgattggcctccacttgggtatgtgaattattcatgtcccagaagaccaaaaagtgctctggttctgagatgagtattttattcgtgttctgtttccgaaacacttagcaaagaaggtcacagtgatgtggagtcgccgcacccatctttgaagatagccagtgtccctggatgaggtgatgatttcccgtcccaaggactctgtgaagtttagagtacagtttgttggggtccaaaagacaccatctctaccccacccaaataaaaatgcactcatctctgtagaacatctgctgtcaaaggccagcctgtcgttagggcatggcttatgcttgacaaaccagtaacaactgtgggatggcgatggtgggatgtgtcgcaagcaattcactagacaatcttcacatgaatgtcggtagccagggtctctcccgagggatggctttagtcttgatgaatgtgaaccatgtcggaattgttaggtagaaacctgggctgggaggcctcggaccccaggctccatccctggcttccccagcct

SEQ ID NO: 32002 - DNA, 5596 bp, Homo sapiens
  source 1..5596: mol_type = unassigned DNA
attgcatgtaatacctcagcatcagtctgcacaagcccagggagcccaggagcaacgaagggcaggctcaagggaaggccccaccatgtccttctggggggccttgaatggcaactgatacataataagacacaatctattctgctgattcacaattatggagactgtatttccgtgagggtggaagaaaatcataccatatcagatgcctcgcagagcaccaggcccaccgtgaaaggctggtccctgcagacggcttcccatttttatgaccggatgctgggaagcctgctggtccacaggtccatacatgaagtcaccataaggagccctggcctccttgcagaaacatcgaggtgacatgtagcatgaccgagctcgctggcgcctcttcatcgtgctgccaccgccctgcaggaagaggggccatgcagtcagtcttgcaccactttcaacgtttgcgagggagagagggtggttcccacttcatcaacacctcatcgccgcgaggtgaggctaagatgagcataaccagtgacgaggtgaactttctggtgtatcggtatctccaggagtcaggtttttcccactcggctttcacgtttgggattgagagccacatcagccagtccaacatcaatgggacgctagtgccaccggccgccctcatctccattctccagaagggcctgcagtatgtagaggccgagatcagtatcaacgaggatggcacagtgttcgacggccgccccatagagtccctgtcactgatagacgccgtgatgcccgacgtggtgcagacgcggcagcaggcattccgagagaagctcgctcagcagcaagccagtgcggcggcggcggcggctgcggccacggcagcagcgacagcagccaccacgacctcagccggcgtttcccaccaaaatccatcgaagaacagagaggccacggtgaatggggaagagaacagagcacattcagtcaataatcacgcgaagccaatggaaatagatggagaggttgagattccatccagcaaagccacagtccttcggggccatgagtctgaggtgttcatttgtgcctggaatcctgtcagtgatttgctagcctccggatctggagactcaactgcaaggatatggaacctgaatgagaatagcaacgggggctccacccagctcgtgttgaggcactgtatacgagaggggggccatgacgtcccgagtaacaaagacgtcacctcactggactggaataccaatggaacactcttggctacgggttcatatgacggttttgcaagaatatggacggaagatggtaacctggccagcaccttaggccaacataaaggccccatctttgccttgaaatggaaccgaaaggggaattacattttgagtgctggtgtagacaaaacaacaataatttgggatgcccacacaggagaagccaaacagcagtttccttttcattcagcccctgcccttgatgtggactggcagaacaacacgacctttgcctcctgtagcacagacatgtgtatccatgtgtgcaggctcggctgtgaccgcccagtcaaaaccttccagggacacacaaacgaggtcaacgccatcaaatgggatccgtctggaatgttgctggcatcctgctcggatgacatgacattgaagatctggagcatgaaacaggaggtgtgcatccatgatcttcaggctcacaataaagagatctacaccatcaagtggagccccactgggcccgccaccagcaacccaaactccaacatcatgttggcaagtgcttcgtttgattctacggtgcgactgtgggacatagaacgaggcgtctgcacccacacgctcacgaagcatcaggagcctgtctatagcgtagctttcagccctgatgggaagtacttggccagtggatccttcgacaagtgcgtccatatctggaatactcagagtggaaatcttgtccacagctaccgaggcactggcggcatcttcgaggtgtgctggaacgcccgaggagacaaagtgggtgccagcgcgtccgacggctctgtgtgtgttttggatctgcggaagtaaccacaaaatattatcgaaaaaagaaaagaattctaatgaccagccgtgaatgtgtagggttgcagctctattctccaaaactgtaggaacttgacttgcgttagagtgtactctgaaaccaactcgtctctggccgcaggagtctatatgttttcgtaatcttcatcaagaagtttttaaaaggcaagcaaaaacagaagcaaatcatatcaaacggggatagaatggtttccactgaggacattcagcctgggaaggaggaagtcaccagctcgaggcgtgtggattggtttccacccggaacaggctctgtgatggctgaatggaaagaaacgtaaaaagctgtgccaaaaaaaaagcaaaatgctgtgataaaccaaacagggaagggggaaaaaccctcctccttgggattttttttttttgttttccctaacaatttggacactacaattgctctcacaaaggaggttcaaagaccagtttgtaccgatgaaacgcgcaactttgtaatcccaacactttctattttctagaatcttctttgttcattgggtggtttttcagtcggctggaattctatcttctgggggccttccgtctgagatggaagctgtcttgggcttgttgtctcttccttctgttgctccctgcccctccccctgcctttccactctgtctggtgagctctgctttttcagtgcaccatcaagagatgcagccccgtggacatgaagacacaatctcccacggacagctttcccccttccgccctctcccaccctctcctccccttgcgctcgcgctcgcgctcgctttctcactggcgtgctctctttctctctctctctccctctgtacctttctcatagttgcttcagatcttaggtctcaagggcactttggcgcgtagtaagtgctttatgtaagaaggcagggcaggggggctttttacaggagaaaaaaaaatgacttataagagaaagagcctggagtatttttggaaaaaaaaataatatttttatgttaaaacaattttaaaatcttaaaatggccatcagacatagagagctttgtgtgattcatgttttaaaaagaaccgaagaagccacaggcagggcctgagggagcccctggctttcccctcagcctcaggaaaggtggtcaggaaaactctggctggacaagggtcagtcttcggggtcagcagcgagattgctctgcagccagtgagggaggtccccgccatgccggctggaagaagaacctcgcatcttttggtgtgtatgcaccttggcagccagcaggaaagcagcgaagagccgcgcgccctctggcctcaagggagcattggcagaaccataaggtactgcagaagccgtcgaaaccgactgctcggctggattaggcgtgttggctacatctttcccacaaccgtataacgaccgatggtcatttctccaagagcaggcttggcgagtccttgcagagctgacatagaggcgcccgcatgtcacttagtctaacgctgacagaaatgaatgcagaaggaagattttcagtcctgaacgtgaattatagaggtagaacgtcgctaataatttctgccatctttataatttctttgtctcacagaagactaggagaaagatcttttttaaataatctttttgctgtttttaaaaaattaaacaaggctttgtgttcctagaagagcttcatttcagtgaatctggtgacctccatctgcttgctgtcataacccgacacggacttatttttgtcattagcaagggggaaaaggccaaaggacaagggcctcttctcccattggttttcctgtgggcagaagggctgaggaagatggcccagcccgtgggggctgctgggtcaccagcagtgggtagggtgcaatctggtgtgtgttccagcagtgagacggtgttattgtgaaggtggcattcatctgcggagccaaaacccagccatcggggaagggtcagggcttctgtggaacttggaacgtgccaggaccacctgcaaaagccagggtgcgttgatcattctcagatcattgattggcctccacttgggtatgtgaattattcatgtcccagaagaccaaaaagtgctctggttctgagatgagtattttattcgtgttctgtttccgaaacacttagcaaagaaggtcacagtgatgtggagtcgccgcacccatctttgaagatagccagtgtccctggatgaggtgatgatttcccgtcccaaggactctgtgaagtttagagtacagtttgttggggtccaaaagacaccatctctaccccacccaaataaaaatgcactcatctctgtagaacatctgctgtcaaaggccagcctgtcgttagggcatggcttatgcttgacaaaccagtaacaactgtgggatggcgatggtgggatgtgtcgcaagcaattcactagacaatcttcacatgaatgtcggtagccagggtctctcccgagggatggctttagtcttgatgaatgtgaaccatgtcggaattgttaggtagaaacctgggctgggaggcctcggaccccaggctccatccctggcttccccagcctgcggccgcaagcaaaaccaagcgcgagatgcagctagcacccttcatatccatccccgttctcagcgggacaacaccatggacagccgttttcagagcctccagcatttgcacaccactactcaccctctctgctgctggcatgttggtagagtcatccctgtaatcaagaaatggcctgtggaatgttattgttcaacgttgtttacagctcttaaaacatggtgaggaatgcctaagtcttagtgaccaaacgtgaccttgaaagcagacatagcatgacagaccttcctagagtgtttggtcgggttcacagtgaccgagagtcaggtccagcacacacctgggaaagggatgctgccccaagggggaccaaaagggccggacgttacagggtgaaaccctctgacccctcgcgacaccgtaggacttgacttttgtttagtctttctaagaaatagatcatggagccaagtgaagtgcactttgtcaaatgtaagggtctgctttgttcttgttgcttttctgttttttaaccttttgttccgccatttaaaaaaagaaaaaaaaaaagcttatgtttcttgtcaaatgcagaaatgttccttccgccactcactgaagttttgcattctggcttgtgcagtttttattgtctgtgtcagacgtacagccagacatgttctctattggcatttttccgattctgttcagatgacagcgaccgccttttcattccccccgccacctgtactcaccctcacgctctttgaagaaaaaaaaaaaaatcaccttgtgtgttgtagctcatttgtttcaagagagaatcaacagatcatattcagtgtcttgaataaattgctctattttgatattaga

SEQ ID NO: 32003 - DNA, 565 bp, Homo sapiens
  source 1..565: mol_type = unassigned DNA
ccagggagcccaggagcaacgaagggcaggctcaagggaaggccccaccatgtccttctggggggccttgaatggcaactgatacataataagacacaatctattctgctgattcacaattatggagactgtatttccgtgagggtggaagaaaatcataccatatcagatgcctcgcagagcaccaggcccaccgtgaaaggctggtccctgcagacggcttcccatttttatgaccggatgctgggaagcctgctggtccacaggtccatacatgaagtcaccataagagggtggttcccacttcatcaacacctcatcgccgcgaggtgaggctaagatgagcataaccagtgacgaggtgaactttctggtgtatcggtatctccaggagtcaggtttttcccactcggctttcacgtttgggattgagagccacatcagccagtccaacatcaatgggacgctagtgccaccggccgccctcatctccattctccagaagggcctgcagtatgtagaggccgagatcagtatcaacgaggatggcacagtgttcgacggc

SEQ ID NO: 32004 - DNA, 496 bp, Homo sapiens
  source 1..496: mol_type = unassigned DNA
gcgggggcggcccgggggcggcgcgcggctgctccggggcgccgggccctcttcggccgccgcacggccgggactcggaggctgccggctggagggaggttcggagcgcggccgggcgcgcggcgccgccacaagttgcgctgctcgcgacgagatttccgtgagggtggaagaaaatcataccatatcagatgcctcgcagagcaccaggcccaccgtgaaaggctggtccctgcagacggcttcccatttttatgaccggatgctgggaagcctgctggtccacaggtccatacatgaagtcaccataagagggtggttcccacttcatcaacacctcatcgccgcgaggtgaggctaagatgagcataaccagtgacgaggtgaactttctggtgtatcggtatctccaggagtcaggtttttcccactcggctttcacgtttgggattgagagccacatcagccagtccaacatcaatgggacgctagtgcc

SEQ ID NO: 32005 - DNA, 5451 bp, Homo sapiens
  source 1..5451: mol_type = unassigned DNA
attgcatgtaatacctcagcatcagtctgcacaagcccagggagcccaggagcaacgaagggcaggctcaagggaaggccccaccatgtccttctggggggccttgaatggcaactgatacataataagacacaatctattctgctgattcacaattatggagactgtatttccgtgagggtggaagaaaatcataccatatcagatgcctcgcagagcaccaggcccaccgtgaaaggctggtccctgcagacggcttcccatttttatgaccggatgctgggaagcctgctggtccacaggtccatacatgaagtcaccataagagggtggttcccacttcatcaacacctcatcgccgcgaggtgaggctaagatgagcataaccagtgacgaggtgaactttctggtgtatcggtatctccaggagtcaggtttttcccactcggctttcacgtttgggattgagagccacatcagccagtccaacatcaatgggacgctagtgccaccggccgccctcatctccattctccagaagggcctgcagtatgtagaggccgagatcagtatcaacgaggatggcacagtgttcgacggccgccccatagagtccctgtcactgatagacgccgtgatgcccgacgtggtgcagacgcggcagcaggcattccgagagaagctcgctcagcagcaagccagtgcggcggcggcggcggctgcggccacggcagcagcgacagcagccaccacgacctcagccggcgtttcccaccaaaatccatcgaagaacagagaggccacggtgaatggggaagagaacagagcacattcagtcaataatcacgcgaagccaatggaaatagatggagaggttgagattccatccagcaaagccacagtccttcggggccatgagtctgaggtgttcatttgtgcctggaatcctgtcagtgatttgctagcctccggatctggagactcaactgcaaggatatggaacctgaatgagaatagcaacgggggctccacccagctcgtgttgaggcactgtatacgagaggggggccatgacgtcccgagtaacaaagacgtcacctcactggactggaataccaatggaacactcttggctacgggttcatatgacggttttgcaagaatatggacggaagatggtaacctggccagcaccttaggccaacataaaggccccatctttgccttgaaatggaaccgaaaggggaattacattttgagtgctggtgtagacaaaacaacaataatttgggatgcccacacaggagaagccaaacagcagtttccttttcattcagcccctgcccttgatgtggactggcagaacaacacgacctttgcctcctgtagcacagacatgtgtatccatgtgtgcaggctcggctgtgaccgcccagtcaaaaccttccagggacacacaaacgaggtcaacgccatcaaatgggatccgtctggaatgttgctggcatcctgctcggatgacatgacattgaagatctggagcatgaaacaggaggtgtgcatccatgatcttcaggctcacaataaagagatctacaccatcaagtggagccccactgggcccgccaccagcaacccaaactccaacatcatgttggcaagtgcttcgtttgattctacggtgcgactgtgggacatagaacgaggcgtctgcacccacacgctcacgaagcatcaggagcctgtctatagcgtagctttcagccctgatgggaagtacttggccagtggatccttcgacaagtgcgtccatatctggaatactcagagtggaaatcttgtccacagctaccgaggcactggcggcatcttcgaggtgtgctggaacgcccgaggagacaaagtgggtgccagcgcgtccgacggctctgtgtgtgttttggatctgcggaagtaaccacaaaatattatcgaaaaaagaaaagaattctaatgaccagccgtgaatgtgtagggttgcagctctattctccaaaactgtaggaacttgacttgcgttagagtgtactctgaaaccaactcgtctctggccgcaggagtctatatgttttcgtaatcttcatcaagaagtttttaaaaggcaagcaaaaacagaagcaaatcatatcaaacggggatagaatggtttccactgaggacattcagcctgggaaggaggaagtcaccagctcgaggcgtgtggattggtttccacccggaacaggctctgtgatggctgaatggaaagaaacgtaaaaagctgtgccaaaaaaaaagcaaaatgctgtgataaaccaaacagggaagggggaaaaaccctcctccttgggattttttttttttgttttccctaacaatttggacactacaattgctctcacaaaggaggttcaaagaccagtttgtaccgatgaaacgcgcaactttgtaatcccaacactttctattttctagaatcttctttgttcattgggtggtttttcagtcggctggaattctatcttctgggggccttccgtctgagatggaagctgtcttgggcttgttgtctcttccttctgttgctccctgcccctccccctgcctttccactctgtctggtgagctctgctttttcagtgcaccatcaagagatgcagccccgtggacatgaagacacaatctcccacggacagctttcccccttccgccctctcccaccctctcctccccttgcgctcgcgctcgcgctcgctttctcactggcgtgctctctttctctctctctctccctctgtacctttctcatagttgcttcagatcttaggtctcaagggcactttggcgcgtagtaagtgctttatgtaagaaggcagggcaggggggctttttacaggagaaaaaaaaatgacttataagagaaagagcctggagtatttttggaaaaaaaaataatatttttatgttaaaacaattttaaaatcttaaaatggccatcagacatagagagctttgtgtgattcatgttttaaaaagaaccgaagaagccacaggcagggcctgagggagcccctggctttcccctcagcctcaggaaaggtggtcaggaaaactctggctggacaagggtcagtcttcggggtcagcagcgagattgctctgcagccagtgagggaggtccccgccatgccggctggaagaagaacctcgcatcttttggtgtgtatgcaccttggcagccagcaggaaagcagcgaagagccgcgcgccctctggcctcaagggagcattggcagaaccataaggtactgcagaagccgtcgaaaccgactgctcggctggattaggcgtgttggctacatctttcccacaaccgtataacgaccgatggtcatttctccaagagcaggcttggcgagtccttgcagagctgacatagaggcgcccgcatgtcacttagtctaacgctgacagaaatgaatgcagaaggaagattttcagtcctgaacgtgaattatagaggtagaacgtcgctaataatttctgccatctttataatttctttgtctcacagaagactaggagaaagatcttttttaaataatctttttgctgtttttaaaaaattaaacaaggctttgtgttcctagaagagcttcatttcagtgaatctggtgacctccatctgcttgctgtcataacccgacacggacttatttttgtcattagcaagggggaaaaggccaaaggacaagggcctcttctcccattggttttcctgtgggcagaagggctgaggaagatggcccagcccgtgggggctgctgggtcaccagcagtgggtagggtgcaatctggtgtgtgttccagcagtgagacggtgttattgtgaaggtggcattcatctgcggagccaaaacccagccatcggggaagggtcagggcttctgtggaacttggaacgtgccaggaccacctgcaaaagccagggtgcgttgatcattctcagatcattgattggcctccacttgggtatgtgaattattcatgtcccagaagaccaaaaagtgctctggttctgagatgagtattttattcgtgttctgtttccgaaacacttagcaaagaaggtcacagtgatgtggagtcgccgcacccatctttgaagatagccagtgtccctggatgaggtgatgatttcccgtcccaaggactctgtgaagtttagagtacagtttgttggggtccaaaagacaccatctctaccccacccaaataaaaatgcactcatctctgtagaacatctgctgtcaaaggccagcctgtcgttagggcatggcttatgcttgacaaaccagtaacaactgtgggatggcgatggtgggatgtgtcgcaagcaattcactagacaatcttcacatgaatgtcggtagccagggtctctcccgagggatggctttagtcttgatgaatgtgaaccatgtcggaattgttaggtagaaacctgggctgggaggcctcggaccccaggctccatccctggcttccccagcctgcggccgcaagcaaaaccaagcgcgagatgcagctagcacccttcatatccatccccgttctcagcgggacaacaccatggacagccgttttcagagcctccagcatttgcacaccactactcaccctctctgctgctggcatgttggtagagtcatccctgtaatcaagaaatggcctgtggaatgttattgttcaacgttgtttacagctcttaaaacatggtgaggaatgcctaagtcttagtgaccaaacgtgaccttgaaagcagacatagcatgacagaccttcctagagtgtttggtcgggttcacagtgaccgagagtcaggtccagcacacacctgggaaagggatgctgccccaagggggaccaaaagggccggacgttacagggtgaaaccctctgacccctcgcgacaccgtaggacttgacttttgtttagtctttctaagaaatagatcatggagccaagtgaagtgcactttgtcaaatgtaagggtctgctttgttcttgttgcttttctgttttttaaccttttgttccgccatttaaaaaaagaaaaaaaaaaagcttatgtttcttgtcaaatgcagaaatgttccttccgccactcactgaagttttgcattctggcttgtgcagtttttattgtctgtgtcagacgtacagccagacatgttctctattggcatttttccgattctgttcagatgacagcgaccgccttttcattccccccgccacctgtactcaccctcacgctctttgaagaaaaaaaaaaaaatcaccttgtgtgttgtagctcatttgtttcaagagagaatcaacagatcatattcagtgtcttgaataaattgctctattttgatattaga

SEQ ID NO: 32006 - DNA, 520 bp, Homo sapiens
  source 1..520: mol_type = unassigned DNA
tctgcacaagcccagggagcccaggagcaacgaagggcaggctcaagggaaggccccaccatgtccttctggggggccttgaatggcaactgatacataataagacacaatctattctgctgattcacaattatggagactgtatttccgtgagggtggaagaaaatcataccatatcagatgcctcgcagagcaccaggcccaccgtgaaaggctggtccctgcagacggcttcccatttttatgaccggatgctgggaagcctgctggtccacaggtccatacatgaagtcaccataaggagccctggcctccttgcagaaacatcgaggtgacatgtagcatgaccgagctcgctggcgcctcttcatcgtgctgccaccgccctgcaggaagaggggccatgcagtcagtcttgcaccactttcaacgtttgcgagggagagagggtggttcccacttcatcaacacctcatcgccgcgaggtgaggctaagatgagcataaccagtgacgaggtg

SEQ ID NO: 32007 - DNA, 387 bp, Homo sapiens
  source 1..387: mol_type = unassigned DNA
caacttgaggtagcttgtgctggtccctgcagacggcttcccatttttatgaccggatgctgggaagcctgctggtccacaggtccatacatgaagtcaccataaggagccctggcctccttgcagaaacatcgaggtgacatgtagcatgaccgagctcgctggcgcctcttcatcgtgctgccaccgccctgcaggaagaggggccatgcagtcagtcttgcaccactttcaacgtttgcgagggagagagggtggttcccacttcatcaacacctcatcgccgcgaggtgaggctaagatgagcataaccagtgacgaggtgaactttctggtgtatcggtatctccaggagtcaggtttttcccactcggctttcacgtttgg

SEQ ID NO: 32008 - DNA, 2101 bp, Homo sapiens
  source 1..2101: mol_type = unassigned DNA
agcatcagtctgcacaagcccagggagcccaggagcaacgaagggcaggctcaagggaaggccccaccatgtccttctggggggccttgaatggcaactgatacataataagacacaatctattctgctgattcacaattatggagactgtatttccgtgagggtggaagaaaatcataccatatcagatgcctcgcagagcaccaggcccaccgtgaaaggctggtccctgcagacggcttcccatttttatgaccggatgctgggaagcctgctggtccacaggtccatacatgaagtcaccataaggagccctggcctccttgcagaaacatcgaggtgacatgtagcatgaccgagctcgctggcgcctcttcatcgtgctgccaccgccctgcaggaagaggggccatgcagtcagtcttgcaccactttcaacgtttgcgagggagagagggtggttcccacttcatcaacacctcatcgccgcgaggtgaggctaagatgagcataaccagtgacgaggtgaactttctggtgtatcggtatctccaggagtcaggtttttcccactcggctttcacgtttgggattgagagccacatcagccagtccaacatcaatgggacgctagtgccaccggccgccctcatctccattctccagaagggcctgcagtatgtagaggccgagatcagtatcaacgaggatggcacagtgttcgacggccgccccatagagtccctgtcactgatagacgccgtgatgcccgacgtggtgcagacgcggcagcaggcattccgagagaagctcgctcagcagcaagccagtgcggcggcggcggcggctgcggccacggcagcagcgacagcagccaccacgacctcagccggcgtttcccaccaaaatccatcgaagaacagagaggccacggtgaatggggaagagaacagagcacattcagtcaataatcacgcgaagccaatggaaatagatggagaggttgagattccatccagcaaagccacagtccttcggggccatgagtctgaggtgttcatttgtgcctggaatcctgtcagtgatttgctagcctccggatctggagactcaactgcaaggatatggaacctgaatgagaatagcaacgggggctccacccagctcgtgttgaggcactgtatacgagaggggggccatgacgtcccgagtaacaaagacgtcacctcactggactggaataccaatggaacactcttggctacgggttcatatgacggttttgcaagaatatggacggaagatggtaacctggccagcaccttaggccaacataaaggccccatctttgccttgaaatggaaccgaaaggggaattacattttgagtgctggtgtagacaaaacaacaataatttgggatgcccacacaggagaagccaaacagcagtttccttttcattcagcccctgcccttgatgtggactggcagaacaacacgacctttgcctcctgtagcacagacatgtgtatccatgtgtgcaggctcggctgtgaccgcccagtcaaaaccttccagggacacacaaacgaggtcaacgccatcaaatgggatccgtctggaatgttgctggcatcctgctcggatgacatgacattgaagatctggagcatgaaacaggaggtgtgcatccatgatcttcaggctcacaataaagagatctacaccatcaagtggagccccactgggcccgccaccagcaacccaaactccaacatcatgttggcaagtgcttcgtttgattctacggtgcgactgtgggacatagaacgaggcgtctgcacccacacgctcacgaagcatcaggagcctgtctatagcgtagctttcagccctgatgggaagtacttggccagtggatccttcgacaagtgcgtccatatctggaatactcagagtggaaatcttgtccacagctaccgaggcactggcggcatcttcgaggtgtgctggaacgcccgaggagacaaagtgggtgccagcgcgtccgacggctctgtgtgtgttttggatctgcggaagtaaccacaaaatattatcg

SEQ ID NO: 32009 - DNA, 2430 bp, Homo sapiens
  source 1..2430: mol_type = unassigned DNA
ccaggccccgcccctcgagcgccacaacagccgggccccaccccttgaggtgctttaacggccaggccccgccctgaaggcgttgtaacaaccaggctccgcccccaggcgctctaacggccaggcccagccgcttgaggctccccaacggccaggccgcgcccccgcgtgcgtgcgcggcccggcagagccgtgcgggcgcccgcgtactcactagctgaggtggcagtggttccaccaacatggagctctcgcagatgtcggagctcatggggctgtcggtgttgcttgggctgctggccctgatggcgacggcggcggtagcgcgggggtggctgcgcgcgggggaggagaggagcggccggcccgcctgccaaaaagcaaatggatttccacctgacaaatcttcgggatccaagaagcagaaacaatatcagcggattcggaaggagaagcctcaacaacacaacttcacccaccgcctcctggctgcagctctgaagagccacagcgggaacatatcttgcatggactttagcagcaatggcaaatacctggctacctgtgcagatgatcgcaccatccgcatctggagcaccaaggacttcctgcagcgagagcaccgcagcatgagagccaacgtggagctggaccacgccaccctggtgcgcttcagccctgactgcagagccttcatcgtctggctggccaacggggacaccctccgtgtcttcaagatgaccaagcgggaggatgggggctacaccttcacagccaccccagaggacttccctaaaaagcacaaggcgcctgtcatcgacattggcattgctaacacagggaagtttatcatgactgcctccagtgacaccactgtcctcatctggagcctgaagggtcaagtgctgtctaccatcaacaccaaccagatgaacaacacacacgctgctgtatctccctgtggcagatttgtagcctcgtgtggcttcaccccagatgtgaaggtttgggaagtctgctttggaaagaagggggagttccaggaggtggtgcgagccttcgaactaaagggccactccgcggctgtgcactcgtttgctttctccaacgactcacggaggatggcttctgtctccaaggatggtacatggaaactgtgggacacagatgtggaatacaagaagaagcaggacccctacttgctgaagacaggccgctttgaagaggcggcgggtgccgcgccgtgccgcctggccctctcccccaacgcccaggtcttggccttggccagtggcagtagtattcatctctacaatacccggcggggcgagaaggaggagtgctttgagcgggtccatggcgagtgtatcgccaacttgtcctttgacatcactggccgctttctggcctcctgtggggaccgggcggtgcggctgtttcacaacactcctggccaccgagccatggtggaggagatgcagggccacctgaagcgggcctccaacgagagcacccgccagaggctgcagcagcagctgacccaggcccaagagaccctgaagagcctgggtgccctgaagaagtgactctgggagggcccggcgcagaggattgaggaggagggatctggcctcctcatggcactgctgccatctttcctcccaggtggaagcctttcagaaggagtctcctggttttcttactggtggccctgcttcttcccattgaaactactcttgtctacttaggtctctctcttcttgctggctgtgactcctccctgactagtggccaaggtgcttttcttcctcccaggcccagtgggtggaatctgtccccacctggcactgaggagaatggtagagaggagaggagagagagagagaatgtgatttttggccttgtggcagcacatcctcacacccaaagaagtttgtaaatgttccagaacaacctagagaacacctgagtactaagcagcagttttgcaaggatgggagactgggatagcttcccatcacagaactgtgttccatcaaaaagacactaagggatttccttctgggcctcagttctatttgtaagatggagaataatcctctctgtgaactccttgcaaagatgatatgaggctaagagaatatcaagtccccaggtctggaagaaaagtagaaaagagtagtactattgtccaatgtcatgaaagtggtaaaagtgggaaccagtgtgctttgaaaccaaattagaaacacattccttgggaaggcaaagttttctgggacttgatcatacattttatatggttgggacttctctcttcgggagatgatatcttgtttaaggagacctcttttcagttcatcaagttcatcagatatttgagtgcccactctgtgcccaaataaatatgagctggggattaaatacgaa

SEQ ID NO: 32010 - DNA, 2165 bp, Homo sapiens
  source 1..2165: mol_type = unassigned DNA
gttccaccaacatggagctctcgcagatgtcggagctcatggggctgtcggtgttgcttgggctgctggccctgatggcgacggcggcggtagcgcgggggtggctgcgcgcgggggaggagaggagcggccggcccgcctgccaaaaagcaaatggatttccacctgacaaatcttcgggatccaagaagcagaaacaatatcagcggattcggaaggagaagcctcaacaacacaacttcacccaccgcctcctggctgcagctctgaagagccacagcgggaacatatcttgcatggactttagcagcaatggcaaatacctggctacctgtgcagatgatcgcaccatccgcatctggagcaccaaggacttcctgcagcgagagcaccgcagcatgagagccaacgtggagctggaccacgccaccctggtgcgcttcagccctgactgcagagccttcatcgtctggctggccaacggggacaccctccgtgtcttcaagatgaccaagcgggaggatgggggctacaccttcacagccaccccagaggacttccctaaaaagcacaaggcgcctgtcatcgacattggcattgctaacacagggaagtttatcatgactgcctccagtgacaccactgtcctcatctggagcctgaagggtcaagtgctgtctaccatcaacaccaaccagatgaacaacacacacgctgctgtatctccctgtggcagatttgtagcctcgtgtggcttcaccccagatgtgaaggtttgggaagtctgctttggaaagaagggggagttccaggaggtggtgcgagccttcgaactaaagggccactccgcggctgtgcactcgtttgctttctccaacgactcacggaggatggcttctgtctccaaggatggtacatggaaactgtgggacacagatgtggaatacaagaagaagcaggacccctacttgctgaagacaggccgctttgaagaggcggcgggtgccgcgccgtgccgcctggccctctcccccaacgcccaggtcttggccttggccagtggcagtagtattcatctctacaatacccggcggggcgagaaggaggagtgctttgagcgggtccatggcgagtgtatcgccaacttgtcctttgacatcactggccgctttctggcctcctgtggggaccgggcggtgcggctgtttcacaacactcctggccaccgagccatggtggaggagatgcagggccacctgaagcgggcctccaacgagagcacccgccagaggctgcagcagcagctgacccaggcccaagtgactctgggagggcccggcgcagaggattgaggaggagggatctggcctcctcatggcactgctgccatctttcctcccaggtggaagcctttcagaaggagtctcctggttttcttactggtggccctgcttcttcccattgaaactactcttgtctacttaggtctctctcttcttgctggctgtgactcctccctgactagtggccaaggtgcttttcttcctcccaggcccagtgggtggaatctgtccccacctggcactgaggagaatggtagagaggagaggagagagagagagaatgtgatttttggccttgtggcagcacatcctcacacccaaagaagtttgtaaatgttccagaacaacctagagaacacctgagtactaagcagcagttttgcaaggatgggagactgggatagcttcccatcacagaactgtgttccatcaaaaagacactaagggatttccttctgggcctcagttctatttgtaagatggagaataatcctctctgtgaactccttgcaaagatgatatgaggctaagagaatatcaagtccccaggtctggaagaaaagtagaaaagagtagtactattgtccaatgtcatgaaagtggtaaaagtgggaaccagtgtgctttgaaaccaaattagaaacacattccttgggaaggcaaagttttctgggacttgatcatacattttatatggttgggacttctctcttcgggagatgatatcttgtttaaggagacctcttttcagttcatcaagttcatcagatatttgagtgcccactctgtgcccaaataaatatgagctggggattaaatacg

SEQ ID NO: 32011 - DNA, 2620 bp, Homo sapiens
  source 1..2620: mol_type = unassigned DNA
gcgcggtgacgccatcgcagcgcgccgggagtgtggcgttctgtgaagagttcggtgctaacctccctcacgcggcggtggctgccgggaccctagcaggtttcagctggagcggcggcggcggcaacatggcagagaccgcggccggagtgggccgcttcaagaccaactatgctgtggagcgcaaaattgagcctttctacaagggcggaaaagcacagctggaccagactggccagcacctcttctgcgtctgtggcaccagagtcaacattctggaagtggcctcgggggccgtgctgcggagtctggagcaggaggaccaggaggacatcactgcctttgacctcagccctgacaacgaggtgctggtgacagccagtcgggcattgctgctggctcagtgggcctggcaagagggcagcgttacccgcctgtggaaggcgatacacacggcccccgtggccaccatggccttcgaccccacctccactctgctagccacaggtggctgtgatggggccgtgcgcgtctgggacatcgtgcggcactacgggacacaccacttccgaggctcgcccggtgtcgtgcacctagtggccttccacccggaccctacacgcctgctgctcttctcctcggccacggatgccgccatccgcgtgtggtcactgcaggaccggtcatgcctggctgtgctgactgcccactacagcgccgtcacctcactggccttcagcgccgacggccacaccatgctcagctccggccgtgacaagatatgtatcatctgggaccttcagagctgccaggccacgaggaccgtgcctgtgtttgagagcgtggaggctgctgtgctgttgccagaggagccagtgtcccagctgggtgtgaagtccccagggctgtactttctgacagctggcgaccaaggcactctgcgcgtgtgggaggcagcttctgggcagtgtgtgtacacgcaggcccagccgccgggccctgggcaggagctgacccactgcaccctggcacacaccgccggcgtggtcctcaccgccaccgccgaccacaacctgttgctctacgaggctcgctccctgcggctgcagaaacagttcgctggctacagtgaggaggttttggatgtccggtttcttgggcccgaggactcccacgttgtcgtggcctccaatagcccctgcctaaaagtgtttgagctgcagacgtcagcctgccagatcctccacggccacacggatatcgtcctggccctggatgtgttccggaaggggtggctctttgccagctgtgccaaggatcagagcgtccgtatctggagaatgaacaaggctggccaggtgatgtgcgtggctcagggttccggtcacacacacagtgtgggcaccgtctgctgctctaggctgaaggagtccttcctggtgacaggcagccaggactgcactgtgaagctgtggcctcttcccaaagccttgctgtccaagaacacagccccagacaacggccctatcctcctgcaggcccagaccactcagcgctgccatgataaggacatcaacagcgtggctattgcccccaacgacaagctgctggccacaggctcacaggaccgcacggccaagctctgggccctgccacagtgccagctgctgggtgtcttctcaggccaccggcgtggcctctggtgcgtccagttctctcccatggaccaggtgctggccacggcctcagctgatggcaccatcaagctctgggcactccaggacttcagctgtctcaagacatttgaggggcacgatgcttctgtgctgaaggtggcctttgtgagccgtggcacgcagctgctgtccagcggttcggatggcctcgtgaagctctggaccatcaagaacaacgagtgtgtgcggacgctggatgcccacgaggacaaggtctgggggctgcactgcagccggctggacgaccacgccctcactggggccagtgactcccgagtcatcctctggaaggatgtgaccgaggcggagcaggcagaggagcaggccaggcaagaggagcaggtggtcaggcagcaagagctggacaacctgctgcatgagaagcggtacctgcgggcgctgggcctggccatctccctggatcggccccacaccgtgctgactgtcatccaggccatccggagggaccctgaggcctgcgagaagctggaagccaccatgctccgactgcggcgcgaccagaaagaggccctgctgcgcttctgcgtcacgtggaacaccaactcgcggcactgccacgaggcccaggccgtgctgggtgtgctcttgaggcgagaggcccccgaggagctgctggcctacgaaggcgtgcgggcagcgcttgaggccctgctgccctacactgagcggcactttcagcggctcagcaggaccctccaggccgccgctttcttggacttcctgtggcacaacatgaagctccctgtgccggccgccgcccccaccccctgggaaacccataaaggcgcactgccctagccggtccggcctctctccagtccatcctgaacccctggaaaacccataaaggccgctctcctggc

SEQ ID NO: 32012 - DNA, 6803 bp, Homo sapiens
  source 1..6803: mol_type = unassigned DNA
gcgcggtgacgccatcgcagcgcgccgggagtgtggcgttctgtgaagagttcggtgctaacctccctcacgcggcggtggctgccgggaccctagcaggtttcagctggagcggcggcggcggcaacatggcagagaccgcggccggagtgggccgcttcaagaccaactatgctgtggagcgcaaaattgagcctttctacaagggcggaaaagcacagctggaccagactggccagcacctcttctgcgtctgtggcaccagagtcaacattctggaagtggcctcgggggccgtgctgcggagtctggagcaggaggaccaggaggacatcactgcctttgacctcagccctgacaacgaggtgctggtgacagccagtcgggcattgctgctggctcagtgggcctggcaagagggcagcgttacccgcctgtggaaggcgatacacacggcccccgtggccaccatggccttcgaccccacctccactctgctagccacaggtggctgtgatggggccgtgcgcgtctgggacatcgtgcggcactacgggacacaccacttccgaggctcgcccggtgtcgtgcacctagtggccttccacccggaccctacacgcctgctgctcttctcctcggccacggatgccgccatccgcgtgtggtcactgcaggaccggtcatgcctggctgtgctgactgcccactacagcgccgtcacctcactggccttcagcgccgacggccacaccatgctcagctccggccgtgacaagatatgtatcatctgggaccttcagagctgccaggccacgaggaccgtgcctgtgtttgagagcgtggaggctgctgtgctgttgccagaggagccagtgtcccagctgggtgtgaagtccccagggctgtactttctgacagctggcgaccaaggcactctgcgcgtgtgggaggcagcttctgggcagtgtgtgtacacgcaggcccagccgccgggccctgggcaggagctgacccactgcaccctggcacacaccgccggcgtggtcctcaccgccaccgccgaccacaacctgttgctctacgaggctcgctccctgcggctgcagaaacagttcgctggctacagtgaggaggttttggatgtccggtttcttgggcccgaggactcccacgttgtcgtggcctccaatagcccctgcctaaaagtgtttgagctgcagacgtcagcctgccagatcctccacggccacacggatatcgtcctggccctggatgtgttccggaaggggtggctctttgccagctgtgccaaggatcagagcgtccgtatctggagaatgaacaaggctggccaggtgatgtgcgtggctcagggttccggtcacacacacagtgtgggcaccgtctgctgctctaggctgaaggagtccttcctggtgacaggcagccaggactgcactgtgaagctgtggcctcttcccaaagccttgctgtccaagaacacagccccagacaacggccctatcctcctgcaggcccagaccactcagcgctgccatgataaggacatcaacagcgtggctattgcccccaacgacaagctgctggccacaggctcacaggaccgcacggccaagctctgggccctgccacagtgccagctgctgggtgtcttctcaggccaccggcgtggcctctggtgcgtccagttctctcccatggaccaggtgctggccacggcctcagctgatggcaccatcaagctctgggcactccaggacttcagctgtctcaagacatttgaggggcacgatgcttctgtgctgaaggtggcctttgtgagccgtggcacgcagctgctgtccagcggttcggatggcctcgtgaagctctggaccatcaagaacaacgagtgtgtgcggacgctggatgcccacgaggacaaggtctgggggctgcactgcagccggctggacgaccacgccctcactggggccagtgactcccgagtcatcctctggaaggatgtgaccgaggcggagcaggcagaggagcaggccaggcaagaggagcaggtggtcaggcagcaagagctggacaacctgctgcatgagaagcggtacctgcgggcgctgggcctggccatctccctggatcggccccacaccgtgctgactgtcatccaggccatccggagggaccctgaggcctgcgagaagctggaagccaccatgctccgactgcggcgcgaccagaaagaggccctgctgcgcttctgcgtcacgtggaacaccaactcgcggcactgccacgaggcccaggccgtgctgggtgtgctcttgaggcgagaggcccccgaggagctgctggcctacgaaggcgtgcgggcagcgcttgaggccctgctgccctacactgagcggcactttcagcggctcagcaggaccctccaggccgccgctttcttggacttcctgtggcacaacatgaagctccctgtgccggccgccgcccccaccccctgggaaacccataaaggcgcactgccctagccggtccggcctctctccagtccatcctgaacccctggaaaacccataaaggccgctctcctggccggctctgtctctctggactgcagtccagccccccaccctggccaacaccctacctagccagccagaagggcactggagctgatggtctcggccctgccacgcccatcccgcaccctggcctggcagagatccagcccgcggctccgcacgcttagacggtgggggtcatgcagaacaagctttactcagaggaacagcaaatggccccctcccatccctgctggccagggagatccgccctccccgctcctccccagccctgggatggcgcggtccatcccctcatcgggatcctcgcgctcactgctccgtcgtggggtgcggcacagagtccacgcaccctcgagggcggccctggcgccgtgggcgccgctccagggccctgcgtgtgacggtgcagcagcggctctggatggcgcccggcgaaggtcgggtgggcacggtggggggaggggcggtggcctgggagggttcagggaagccccgggcctcacccgccgggtcgtctcctccacggaaccccgtcccgctcaggagagcgcccagcccttccggccgcagcagcaccgcggggagtaggcccgcccggtcgccgtacctgcgaggggcggggtgtggttagggccccgcccgcctcggctagcctgccctgcccacgcccgctcccgcgtacctgcatagccaccagccgcggtctgacgtttccaacacgcgcacgcgcgcccccgcgggcacggacagctcatctgcgcggctgctctcgtaggcgcgggaagcacagaactggggacctggtgggagtgggtgtttggagtcaccgcggggccacagaggacgaggcccgcccgcacccttctccacattctccttgcttgagtctgctgacggcggggccgctctaagaccggttcggggcttcctctaggtgcggagaccaagcacgggctcctggcccgccctgcccgcggtgcttctggcccagtcttgccacacggtcaagccgcagtggtggcgtgaggggtggggttaggcgcataccgctgctccctagggacgggcctccctcccggccttggcccggggccgcctcctccaggtagggcgctggaaaccaggcggtctgccggtcttcgttctccaccagccaccagcctgtgcgcaagaagcgggcagggactcaaatctcgaggctccctcgggtccaggagcagaggagcaaatccctgggttcttggggggccctacctgaggggtgccgcagcagcacgtccaggctctcctgggcctgcgcctgaaaaggcctatcccgcgtgtcctgggtacagaagggctgcaggcagcgcaggctctgagcctccagactgtggatggagaggcggcccgcagcgcgagaaagaggctgctcctctggggtgggcaggatcacccggctgggaagggcagcccgtacgagtgagaggtaggcggatggggagggtgaaactgggggcgccaccccggcaagaccgccagcctcccactctctgcccctattcgctggctgttcccccccaccctggacctctcccagctccaaacgccgctgcatgctgggagtttggggcgagtcaggcacctgccgggtggcagcgcgggctccaggtccaggggttgcggtgcgaagaagccagtgatcgtcgggctccgtgccacgcgctctgcagtcgccagcagcctccgagaataggtttccaacagctgcaggcgcgccaggccgcggctcgtgcgccccacgcgtcccaacagtggtgcatcttaaggcaccacaaaaacgtactgtgatacgccgctttgggcttcactggtccctggcgcccccaggcaagccaccgccttccccgctcccgtacccaggctggcctgaccgagaagctttgggagaacgcggtcagatctccgcagcaggcccgcctccaccgggaaggtctccttgagggtcttctgagggcgggaaccagggcattggtcttccagagcccactgtgcacccttgagagggcggggtccctcacccggatggcaggggctgggagcttcagcagggacgaagggcctccagtgggagtcactgatgggaggcagtccagtgggaggcagccgcgtggggaagccgccaccgcggcatcagggtggcccagggtcactcaccttgagctgcctgaattcgtcccaactcctgcgcacgaaggtgtcgctgccgtctgaccagcgcacagagaaggcaaacgtctgggggacaaaaagttgggagtgccgtggaggtgctggtccaggcacccccttcctatcccttggggccactaaggacccagccaggtcttacttggagcctcttgatctgcaccagggctgccccttgcactgaaactgggtatcgggggcctgccatggctgtggcttccaggctgcagattcctgaaatgggcgaggacccttctgcctccccgtgcttgagagggctctgggggacccagaaaaccccctgggatagaatcctggcaacacctcaagcctgtggggtccttgtggagccgccccagctgagtcctttgcagctttcttgctgtcccccaagcccacgatctgggggcaggagcacagggattgggggacttccaggcagagctgctgggaggaagaagaagaatgagctttccagccctggaggcgtgcaagactgaagaaggggcgaagggtaggcgggactgctgcctggggccctcctgcctgcctctggccacaggaggagggaggagaaggcagggctaatcaaagcgccacctgtcctgcccacctctctggattcccctaccctgtgaggtaattgccctgccagggtgcgcccaacaactttgaactggcctggggatttctgtgcagaaccaaggactcagtgcttacagctttaagtgctttgtctgacttaatcctaatgctggaggaaaggtctcttaatgtccccaactcatagaggaggaaatgtgtgttaaatgcgtaattattgtgagctgttctatacatgctgggggaggggcagacctcacaggctcaccccaggggttcccctgcagtgaggagacttggggtaggagaaagagggcccatctgtgcagtcactggcatttggtgggtgggggtggtggtcagggaagtggtcactagggctgttttgagaaccacctctcaattcacgatttgccatgacttactgcaaacatggcctgggcagaggctcgcccaggtgccccacctctctggctgcttccttatagttcgggcttcggaagccacattcaaccctggcacacagtggtttttcctcgtgctggggccaccagttctgtgttgggatgcacctactccagccccttcagggagcagtcagcctctaaggcatccctccaggaagctgccctggctgcaacaaagggcctttgtgtgtctgtcccaccagcactctctctcatgccctcaagctgtccctggtcttggcatgggcaatgaacacctgctcacatagggctgatttgcagggttcccccagccagctgtcaccttctccctgtctcagctgagggcccagctgacctggtggggtccagcgtgtgaacccaggggagaccttgctcccctggaagacaggagaagctggggaggatttattcacaagcagaggcctagagggattctgaggccacctgcctaccccagctgacagctcctgccccacaccccatcagccctgcatggtttccactttttcctcccctaccctcttttcttgcctgaatagtacaccccaccctccatctgtatgctcctcacttgcccctacaaaatccactccaaggacagacacagtgcctcacctgtaatccaagtactttgggaggccgaggcagggggattgcttgagctcaggagttcgagaccagtctgggcaacatgttgagacctccatctgtgccccccaaaaatacaaaaattagctgggcgtggtggcgtgtgcctgtagtctacttgggaggctgaggtgggagatcacttgagcctaagcagtcgcggctgcagtgaacaagatcgcgccactgcactccaccctgggtaacggaacaagaccctgtctcaaaaaaaaaaaagaaa

SEQ ID NO: 32013 - DNA, 3294 bp, Homo sapiens
  source 1..3294: mol_type = unassigned DNA
aggagaagagcaaagaaaagcagtccgtctggatttgtttgcccaggactggcgccgcgcacgcggatcgccgaggggagtgcggtcggagtcaccgcgcccccgcctccccgcccgggcagctgaggccgggggttggagcgctgcccccgcgcacagtccccgagcgcccgacgtctccgcgcaggttcttgaagcagctgggcctggggcgcccactaatgtggccctgagggccggagcccgcaccgacgggagcgggagccggagcagctgcgggcgccgagtggccggtgcgcccggcggagcgcgcgtgcgtggccagcgcgctccccgcttctgcttggctttccggcttaattttcctcggcgggattaaagttggaaattgaccggagaattgagttgccggggaacagagccccggccgccgccagagcgatgttcccgcagagccggcacccgacgccgcaccaggctgcaggccagcccttcaagttcactatcccggagtccctggaccggattaaagaggaattccagttcctgcaggcgcagtatcacagccttaaattggaatgtgagaaactggcaagtgaaaagacagaaatgcagaggcactatgtgatgtattatgaaatgtcatatggattaaacattgaaatgcacaaacagactgaaatcgccaagagattgaatacgatttgtgcacaagtcatcccatttctgtctcaggaacatcaacaacaggtggcccaggctgttgaacgtgccaaacaggtgaccatggcagaattgaatgccatcatcggggtacgtggcctaccaggtctacctcctacacagcagcagttgcaagctcagcatctttctcatggccacggacccccagttccccttacgcctcacccttcgggacttcagcctcctggaatcccgcccctcgggggcagtgccggccttcttgcgctgtctagtgctctgagtgggcagtctcacttggcaataaaagatgacaagaagcaccacgatgcagagcaccacagaggtgagaggccgggcaagagtaattccctcctggtcccagacagtctaagaggcacagataaacgcagaaatggacctgaattttccaatgacatcaagaaaaggaaggtggatgataaggactccagccactatgacagtgatggtgacaaaagcgatgacaacttagttgtggatgtgtctaatgaggacccttcttctccgcgagcaagccctgcccactcgccccgggaaaatggaatcgacaaaaatcgcctgctaaagaaggatgcttctagcagtccagcttccacggcctcctcggcaagttccacttctttgaaatccaaagaaatgagcttgcatgaaaaagccagcacgcctgttctgaaatccagcacaccaacgcctcggagcgacatgccaacgccgggcaccagcgccactccaggcctccgtccaggtctcggcaagcctccagccatagaccccctcgttaaccaagcggcagctggcttgaggacacccctggcagtgcccggcccatatcctgctccttttgggatggtcccccacgctggcatgaacggcgagctgaccagcccaggcgctgcctacgccagtttacacaacatgtcgccccagatgagcgccgcagccgccgcggccgccgtggtggcctacgggcgctcccccatggtggggtttgatcctccccctcacatgagagtacctaccattcctccaaacctggcaggaatccctggggggaaacctgcatactccttccacgttactgcagacggtcagatgcagcctgtcccttttccccccgacgccctcatcggacccggaatcccccggcatgctcgccagatcaacaccctcaaccacggggaggtggtgtgcgctgtgaccatcagcaaccccacgagacacgtgtacacaggcgggaagggctgcgtcaaggtctgggacatcagccaccctggcaataagagccctgtctcccagctcgactgtctgaacagagacaattatatccgttcctgtaaattgctacccgatggctgcactctcatagtgggaggggaagccagtactttgtccatttgggacctggcggctccaaccccgcgcatcaaggcggagctgacgtcctcggcccccgcctgctacgccctggccatcagccccgattccaaggtctgcttctcatgctgcagcgacggcaacatcgctgtgtgggatctgcacaaccagacactagtgaggcaattccagggccacacagacggagccagctgtattgacatttctaatgatggcaccaagctctggacgggtggtttggacaacacagtcaggtcctgggacctgcgcgaggggcggcagctgcagcagcacgacttcacctcccagatcttctccctggggtactgccccaccggggagtggctggcagtgggcatggagagcagcaatgtggaggtgctgcacgtgaacaagcctgacaagtaccagctgcacctgcatgagagctgcgtgctgtccctgaaatttgcttactgtggtaaatggtttgtgagtactggaaaagataacctcctcaatgcttggcggaccccctatggagccagcatattccagtccaaagagtcctcgtcagtgcttagctgtgacatctctgtggatgataagtacatagtcactggctcgggggacaagaaggctacagtctatgaagtcatctactgaaaacattatgtggtttaacgtttatagttgaattgggccaaaatgtttcgaatttatagaaatagaaaagttgtaactttaaaagagaaaaaaaattacaaacacctgtttccaaaccttgacagaaaactactttgagtctacaaagaggaggcgacaagtccatcagcagaaagtcacctgtctacatagaccaaatggagcaccaaggccaagcggacagaggggccatgggttgtaggattgaggaacggaatctgccgactcacatgacagcccattctttctttctgggtgatctggggatcacgccttgcccaagtgtgagattacctttctgttccttgcagttcacctcactttccgtcctttgtagagcagtggtgtctccaatgaacttgtttcctggttttgcatcttgtgaaatgtttttttgtatttttgttgaaggttaaacatttgtataaattgtaaatatatttggtttattacagtaaaggctttagtacc

SEQ ID NO: 32014 - DNA, 1115 bp, Homo sapiens
  source 1..1115: mol_type = unassigned DNA
gaggaattccagttcctgcaggcgcagtatcacagccttaaattggaatgtgagaaactggcaagtgaaaagacagaaatgcagaggcactatgtgatgtattatgaaatgtcatatggattaaacattgaaatgcacaaacagactgaaatcgccaagagattgaatacgatttgtgcacaagtcatcccatttctgtctcaggaacatcaacaacaggtggcccaggctgttgaacgtgccaaacaggtgaccatggcagaattgaatgccatcatcgggcagcagcagttgcaagctcagcatctttctcatggccacggacccccagttccccttacgcctcacccttcgggacttcagcctcctggaatcccgcccctcgggggcagtgccggccttcttgcgctgtctagtgctctgagtgggcagtctcacttggcaataaaagatgacaagaagcaccacgatgcagagcaccacagaggtgagaggccgggcaagccagattaggactttgtcctcatactcttacagtgctgcaaagttgtgtgcatcgctaaagagagccccaacctatacagagagcaaacaatgagataagaggaactgtcgcaaagctttccactgaaacacaggtcaccctggaagtttgcagggtttgctgtgggcatctgtagatttctcgatctcgttagattgcaggcatcttgacatcttggcaactgcctagttaatgccagtggcctgtaccatattatggaaaactgttaactgcttaattgggtaattttcaaagaaagtaatgttgttaaatggggcgaaataagaagttaaatttgaaagtgaatgtgttcaaatgaaaggtttgataattgcatctgttactacttagtttcataggctttaattctagtatgcattaaatattgggcaaaattgcacttgactaattttttgaagaaaagtaatttattctgtcaagaaataaaaaaataggctttgtgtatggttaaactgtaaatcttatgtttacaaaatactgtaattttcaggaaatcactgtattaggaatgtgcaatgacttatataaataaaagccatttttaaaactg

SEQ ID NO: 32015 - DNA, 1800 bp, Homo sapiens
  source 1..1800: mol_type = unassigned DNA
aggagaagagcaaagaaaagcagtccgtctggatttgtttgcccaggactggcgccgcgcacgcggatcgccgaggggagtgcggtcggagtcaccgcgcccccgcctccccgcccgggcagctgaggccgggggttggagcgctgcccccgcgcacagtccccgagcgcccgacgtctccgcgcaggttcttgaagcagctgggcctggggcgcccactaatgtggccctgagggccggagcccgcaccgacgggagcgggagccggagcagctgcgggcgccgagtggccggtgcgcccggcggagcgcgcgtgcgtggccagcgcgctccccgcttctgcttggctttccggcttaattttcctcggcgggattaaagttggaaattgaccggagaattgagttgccggggaacagagccccggccgccgccagagcgatgttcccgcagagccggcacccgacgccgcaccaggctgcaggccagcccttcaagttcactatcccggagtccctggaccggattaaagaggaattccagttcctgcaggcgcagtatcacagccttaaattggaatgtgagaaactggcaagtgaaaagacagaaatgcagaggcactatgtgatgtattatgaaatgtcatatggattaaacattgaaatgcacaaacagactgaaatcgccaagagattgaatacgatttgtgcacaagtcatcccatttctgtctcaggaacatcaacaacaggtggcccaggctgttgaacgtgccaaacaggtgaccatggcagaattgaatgccatcatcgggcagcagcagttgcaagctcagcatctttctcatggccacggacccccagttccccttacgcctcacccttcgggacttcagcctcctggaatcccgcccctcgggggcagtgccggccttcttgcgctgtctagtgctctgagtgggcagtctcacttggcaataaaagatgacaagaagcaccacgatgcagagcaccacagagacagagagccgggcacaagtaattccctcctggtcccagacagtctaagaggcacagataaacgcagaaatggacctgaattttccaatgacatcaagaaaaggaaggtggatgataaggactccagccactatgacagtgatggtgacaaaagcgatgacaacttagttgtggatgtgtctaatgaggacccttcttctccgcgagcaagccctgcccactcgccccgggaaaatggaatcgacaaaaatcgcctgctaaagaaggatgcttctagcagtccagcttccacggcctcctcggcaagttccacttctttgaaatccaaagaaatgagcttgcatgaaaaagccagcacgcctgttctgaaatccagcacaccaacgcctcggagcgacatgccaacgccgggcaccagcgccactccaggcctccgtccaggtctcggcaagcctccagccatagaccccctcgttaaccaagcggcagctggcttgaggacacccctggcagtgcccggcccatatcctgctccttttgggatggtcccccacgctggcatgaacggcgagctgaccagcccaggcgctgcctacgccagtttacacaacatgtcgccccagatgagcgccgcagccgccgcggccgccgtggtggcctacgggcgctcccccatggtggggtttgatcctccccctcacatgagagtacctaccattcctccaaacctggcaggaatccctggggggaaaccgagccttgttcctgccccagcacattga

SEQ ID NO: 32016 - DNA, 666 bp, Homo sapiens
  source 1..666: mol_type = unassigned DNA
gcatgaaaaagccagcacgcctgttctgaaatccagcacaccaacgcctcggagcgacatgccaacgccgggcaccagcgccactccaggcctccgtccaggtctcggcaagcctccagccatagaccccctcgttaaccaagcggcagctggcttgaggacacccctggcagtgcccggcccatatcctgctccttttgggatggtcccccacgctggcatgaacggcgagctgaccagcccaggcgctgcctacgccagtttacacaacatgtcgccccagatgagcgccgcagccgccgcggccgccgtggtggcctacgggcgctcccccatggtggggtttgatcctccccctcacatgagagtacctaccattcctccaaacctggcaggaatccctggggggaaaccgagccttgttcctgccccagcacattgagaagtttggaaacgtgtaattgatagaggaagttaggtcctagaactcagaatcttaaatgttgactttggctggaatacttcctcatttatcaacttaggtcatctgtttcttgttttctttgcttgtaatcttcttttacatatccattttaagaagttttgtatttgcctttaaaaaaaataaatgaaaatagagtgtatgcctctaaataaggaaacaaa

SEQ ID NO: 32017 - DNA, 3893 bp, Homo sapiens
  source 1..3893: mol_type = unassigned DNA
tttgcccgccggggagggtggccgattggcggagcgcactcctgctgttttccccaccatctcgtggatgtcgtccctcgggtggtgagagaactttgcagtgggctggagcgccctttgcggagaagcacacgaaggtgaaggaaggaaagaaagaagaccgaggaagaaggagctcggaagaagggtccggagcggccggtccggccgtgcagggcgagtgcgcccgaggcgcggcgccctgatgctccccgggctcgaggagcattgggcacttgcgggactgctctcggtggagtagccccgtcgggcccggagggtttgtgcaaccgcggagaacaccgagtgctggtcgcacggggcgtgccgagccgcctcccggcgcgccctccgcactttccccgcctcgtcatccgtcgctccccggccaggagcctccgctgcgtcttcaacctcgctcccctttgcgtcccgggagcctgcgagcacccggccgaaggcgcagccgaatcttgcgggagtcgccccgaaagcgtcgggtttgtgtggggttagcgggggccgccgcgccacctgcacctcgcccgccgccgcctcggggaaagcccgaagaggaggcggaccaggagaagagcaaagaaaagcagtccgtctggatttgtttgcccaggactggcgccgcgcacgcggatcgccgaggggagtgcggtcggagtcaccgcgcccccgcctccccgcccgggcagctgaggccgggggttggagcgctgcccccgcgcacagtccccgagcgcccgacgtctccgcgcaggttcttgaagcagctgggcctggggcgcccactaatgtggccctgagggccggagcccgcaccgacgggagcgggagccggagcagctgcgggcgccgagtggccggtgcgcccggcggagcgcgcgtgcgtggccagcgcgctccccgcttctgcttggctttccggcttaattttcctcggcgggattaaagttggaaattgaccggagaattgagttgccggggaacagagccccggccgccgccagagcgatgttcccgcagagccggcacccgacgccgcaccaggctgcaggccagcccttcaagttcactatcccggagtccctggaccggattaaagaggaattccagttcctgcaggcgcagtatcacagccttaaattggaatgtgagaaactggcaagtgaaaagacagaaatgcagaggcactatgtgatgtattatgaaatgtcatatggattaaacattgaaatgcacaaacagactgaaatcgccaagagattgaatacgatttgtgcacaagtcatcccatttctgtctcaggaacatcaacaacaggtggcccaggctgttgaacgtgccaaacaggtgaccatggcagaattgaatgccatcatcgggcagcagcagttgcaagctcagcatctttctcatggccacggacccccagttccccttacgcctcacccttcgggacttcagcctcctggaatcccgcccctcgggggcagtgccggccttcttgcgctgtctagtgctctgagtgggcagtctcacttggcaataaaagatgacaagaagcaccacgatgcagagcaccacagagacagagagccgggcacaagtaattccctcctggtcccagacagtctaagaggcacagataaacgcagaaatggacctgaattttccaatgacatcaagaaaaggaaggtggatgataaggactccagccactatgacagtgatggtgacaaaagcgatgacaacttagttgtggatgtgtctaatgaggacccttcttctccgcgagcaagccctgcccactcgccccgggaaaatggaatcgacaaaaatcgcctgctaaagaaggatgcttctagcagtccagcttccacggcctcctcggcaagttccacttctttgaaatccaaagaaatgagcttgcatgaaaaagccagcacgcctgttctgaaatccagcacaccaacgcctcggagcgacatgccaacgccgggcaccagcgccactccaggcctccgtccaggtctcggcaagcctccagccatagaccccctcgttaaccaagcggcagctggcttgaggacacccctggcagtgcccggcccatatcctgctccttttgggatggtcccccacgctggcatgaacggcgagctgaccagcccaggcgctgcctacgccagtttacacaacatgtcgccccagatgagcgccgcagccgccgcggccgccgtggtggcctacgggcgctcccccatggtggggtttgatcctccccctcacatgagagtacctaccattcctccaaacctggcaggaatccctggggggaaacctgcatactccttccacgttactgcagacggtcagatgcagcctgtcccttttccccccgacgccctcatcggacccggaatcccccggcatgctcgccagatcaacaccctcaaccacggggaggtggtgtgcgctgtgaccatcagcaaccccacgagacacgtgtacacaggcgggaagggctgcgtcaaggtctgggacatcagccaccctggcaataagagccctgtctcccagctcgactgtctgaacagagacaattatatccgttcctgtaaattgctacccgatggctgcactctcatagtgggaggggaagccagtactttgtccatttgggacctggcggctccaaccccgcgcatcaaggcggagctgacgtcctcggcccccgcctgctacgccctggccatcagccccgattccaaggtctgcttctcatgctgcagcgacggcaacatcgctgtgtgggatctgcacaaccagacactagtgaggcaattccagggccacacagacggagccagctgtattgacatttctaatgatggcaccaagctctggacgggtggtttggacaacacagtcaggtcctgggacctgcgcgaggggcggcagctgcagcagcacgacttcacctcccagatcttctccctggggtactgccccaccggggagtggctggcagtgggcatggagagcagcaatgtggaggtgctgcacgtgaacaagcctgacaagtaccagctgcacctgcatgagagctgcgtgctgtccctgaaatttgcttactgtggtaaatggtttgtgagtactggaaaagataacctcctcaatgcttggcggaccccctatggagccagcatattccagtccaaagagtcctcgtcagtgcttagctgtgacatctctgtggatgataagtacatagtcactggctcgggggacaagaaggctacagtctatgaagtcatctactgaaaacattatgtggtttaacgtttatagttgaattgggccaaaatgtttcgaatttatagaaatagaaaagttgtaactttaaaagagaaaaaaaattacaaacacctgtttccaaaccttgacagaaaactactttgagtctacaaagaggaggcgacaagtccatcagcagaaagtcacctgtctacatagaccaaatggagcaccaaggccaagcggacagaggggccatgggttgtaggattgaggaacggaatctgccgactcacatgacagcccattctttctttctgggtgatctggggatcacgccttgcccaagtgtgagattacctttctgttccttgcagttcacctcactttccgtcctttgtagagcagtggtgtctccaatgaacttgtttcctggttttgcatcttgtgaaatgtttttttgtatttttgttgaaggttaaacatttgtataaattgtaaatatatttggtttattacagtaaaggctttagtaccaataa

SEQ ID NO: 32018 - DNA, 936 bp, Homo sapiens
  source 1..936: mol_type = unassigned DNA
gggccggagcccgcaccgacgggagcgggagccggagcagctgcgggcgccgagtggccggtgcgcccggcggagcgcgcgtgcgtggccagcgcgctccccgcttctgcttggctttccggcttaattttcctcggcgggattaaagttggaaattgaccggagaattgagttgccggggaacagagccccggccgccgccagagcgatgttcccgcagagccggcacccgacgccgcaccaggctgcaggccagcccttcaagttcactatcccggagtccctggaccggattaaagaggaattccagttcctgcaggcgcagtatcacagccttaaattggaatgtgagaaactggcaagtgaaaagacagaaatgcagaggcactatgtgatgtattatgaaatgtcatatggattaaacattgaaatgcacaaacagactgaaatcgccaagagattgaatacgatttgtgcacaagtcatcccatttctgtctcaggaacatcaacaacaggtggcccaggctgttgaacgtgccaaacaggtgaccatggcagaattgaatgccatcatcggggtacgtggcctaccaggtctacctcctacacagcagcagttgcaagctcagcatctttctcatggccacggacccccagttccccttacgcctcacccttcgggacttcagcctcctggaatcccgcccctcgggggcagtgccggccttcttgcgctgtctagtgctctgagtgggcagtctcacttggcaataaaagatgacaagaagcaccacgatgcagagcaccacagagacagagagccgggcacaagtaattccctcctggtcccagacagtctaagaggcacagataaacgcagaaatggacctgaattttccaatgacatcaagaaaaggaaggtggatgataagga

SEQ ID NO: 32019 - DNA, 2483 bp, Homo sapiens
  source 1..2483: mol_type = unassigned DNA
gaaaattgtactgagaattagaacttctgcaagggctcaagagtgtcagctagtaataataataataacaatagctgaagtgcaatggtgcaatcacggctcactgcaacctccgcctcccaagattctcctgcttcaggattacagaccccgctccagtccggccagcccttcaagttctcgatcttggagatctgcgaccgcatcaaagaagaattccagtttcttcaggctcaataccacagcctcaagctagaatgtgagaagctggccagcgagaagacggaaatgcagcgacattatgtcatgtattatgagatgtcgtacgggctcaacattgaaatgcataagcaggcggagattgtgaagcgtctgagcggtatctgcgctcagattatccccttcctgacccaggagcatcagcagcaggtgctccaggccgtagaacgcgccaagcaggtcaccgtgggggagctgaacagcctcatcgggcagcagcagctccagccgctgtcccaccacgcaccccctgtgcccctcaccccccgcccagccgggctggtgggcggcagtgctacggggctgcttgctctgtctggagccctggctgcccaggctcagctggcggcggctgtcaaggaggaccgtgcgggcgtggaggccgaggggtccagagtggagagagccccgagcaggagtgcatctccctcgccccctgagagtctcgtggaggaggagcgaccgagtggccctggtggtggcgggaagcagagagcagatgagaaggagccatcaggaccttatgaaagcgacgaagacaagagtgattacaatctggtggtggacgaggaccaaccctcagagccccccagcccggctaccaccccctgcggaaaggtacccatctgcattcctgcccgtcgggacctggtggacagtccagcctccttggcctctagccttggctcaccgctgcctagagccaaggagctcatcctgaatgaccttcccgccagcactcctgcctccaaatcctgtgactcctccccgccccaggacgcttccacccccgggcccagctcggccagtcacctctgccagcttgctgccaagccagcaccttccacggacagcgtcgccctgaggagccccctgactctgtccagtcccttcaccacgtccttcagcctgggctcccacagcactctcaacggagacctctccgtgcccagctcctacgtcagcctccacctgtccccccaggtcagcagctctgtggtgtacggacgctcccccgtgatggcatttgagtctcatccccatctccgagggtcatccgtctcttcctccctacccagcatccctgggggaaagccggcctactccttccacgtgtctgcggacgggcagatgcagccggttcccttcccctcggatgcactggtaggcgcgggcatcccgcggcacgcccggcagctgcacacgctggcccatggcgaggtggtctgcgcggtcaccatcagcggctccacacagcatgtgtacacgggcggcaagggctgtgtgaaggtgtgggacgtgggccagcctggggccaagacgcccgtggcccagctcgactgcctgaaccgagacaactacattcgttcctgcaagttgctgccggatggccggagtctgatcgtgggcggtgaggccagcaccttgtccatttgggacctggcggcgcccaccccccgtatcaaggccgagctgacttcctcagccccagcctgctacgccctggccgtcagccccgacgccaaggtttgcttctcctgctgcagcgatggcaacattgtggtctgggacctgcagaatcagactatggtcaggcagttccagggccacacggacggcgccagctgcattgatatttccgattacggcactcggctctggacagggggcctggacaacacggtgcgctgctgggacctgcgggagggccgccagctgcagcagcatgacttcagctcccagattttctccctgggccactgccctaaccaggactggctggcggtcggaatggagagtagcaacgtggagatcctgcacgtccgcaagccggagaaataccagctgcacctccacgagagctgcgtgctgtccctgaagtttgcctcctgcgtccaaggagtcgtcctcagtcctgagttgtgacatctccagaaataacaaatacatcgtgacaggctcgggggacaagaaggccaccgtgtatgaggtggtctactgagacatgaccccccttcctgtacccgaagtccagactcccaggggaatcagcagccaggacagacatcctagcagccgcctcccagccctgcctaggaaccgtacatcccatctgctctctggccaacggcttcacaccttcccctgctgcatgtgggggccgatgggcaggggacctcggtggaaataaaatgtatctatca

SEQ ID NO: 32020 - DNA, 2704 bp, Homo sapiens
  source 1..2704: mol_type = unassigned DNA
tcgccgcgctcccgccccggccgctgcccctgcccgccccgctcgccccgcgcaccccaacccggggaggggctcccacgaccccgggcgcgcgcgcttgggggcgcgccagggactccagggtcccttgccccgcgccgcttctccctcctccctctttcttcgggcagcctccccaccaccccacttcagcctcccccactcttgccgcctccatatcatcaagctctggtggcgcctggggggcttttcggatcggcaggatgtacccccagggaaggcacccgaccccgctccagtccggccagcccttcaagttctcgatcttggagatctgcgaccgcatcaaagaagaattccagtttcttcaggctcaataccacagcctcaagctagaatgtgagaagctggccagcgagaagacggaaatgcagcgacattatgtcatgtattatgagatgtcgtacgggctcaacattgaaatgcataagcaggcggagattgtgaagcgtctgagcggtatctgcgctcagattatccccttcctgacccaggagcatcagcagcaggtgctccaggccgtagaacgcgccaagcaggtcaccgtgggggagctgaacagcctcatcgggcagcagctccagccgctgtcccaccacgcaccccctgtgcccctcaccccccgcccagccgggctggtgggcggcagtgctacggggctgcttgctctgtctggagccctggctgcccaggctcagctggcggcggctgtcaaggaggaccgtgcgggcgtggaggccgaggggtccagagtggagagagccccgagcaggagtgcatctccctcgccccctgagagtctcgtggaggaggagcgaccgagtggccctggtggtggcgggaagcagagagcagatgagaaggagccatcaggaccttatgaaagcgacgaagacaagagtgattacaatctggtggtggacgaggaccaaccctcagagccccccagcccggctaccaccccctgcggaaaggtacccatctgcattcctgcccgtcgggacctggtggacagtccagcctccttggcctctagccttggctcaccgctgcctagagccaaggagctcatcctgaatgaccttcccgccagcactcctgcctccaaatcctgtgactcctccccgccccaggacgcttccacccccgggcccagctcggccagtcacctctgccagcttgctgccaagccagcaccttccacggacagcgtcgccctgaggagccccctgactctgtccagtcccttcaccacgtccttcagcctgggctcccacagcactctcaacggagacctctccgtgcccagctcctacgtcagcctccacctgtccccccaggtcagcagctctgtggtgtacggacgctcccccgtgatggcatttgagtctcatccccatctccgagggtcatccgtctcttcctccctacccagcatccctgggggaaagccggcctactccttccacgtgtctgcggacgggcagatgcagccggttcccttcccctcggatgcactggtaggcgcgggcatcccgcggcacgcccggcagctgcacacgctggcccatggcgaggtggtctgcgcggtcaccatcagcggctccacacagcatgtgtacacgggcggcaagggctgtgtgaaggtgtgggacgtgggccagcctggggccaagacgcccgtggcccagctcgactgcctgaaccgagacaactacattcgttcctgcaagttgctgccggatggccggagtctgatcgtgggcggtgaggccagcaccttgtccatttgggacctggcggcgcccaccccccgtatcaaggccgagctgacttcctcagccccagcctgctacgccctggccgtcagccccgacgccaaggtttgcttctcctgctgcagcgatggcaacattgtggtctgggacctgcagaatcagactatggtcaggcagttccagggccacacggacggcgccagctgcattgatatttccgattacggcactcggctctggacagggggcctggacaacacggtgcgctgctgggacctgcgggagggccgccagctgcagcagcatgacttcagctcccagattttctccctgggccactgccctaaccaggactggctggcggtcggaatggagagtagcaacgtggagatcctgcacgtccgcaagccggagaaataccagctgcacctccacgagagctgcgtgctgtccctgaagtttgcctcctgcggacggtggtttgtgagcaccgggaaggacaacctgctcaacgcctggaggacgccgtacggggccagcattttccagtccaaggagtcgtcctcagtcctgagttgtgacatctccagaaataacaaatacatcgtgacaggctcgggggacaagaaggccaccgtgtatgaggtggtctactgagacatgaccccccttcctgtacccgaagtccagactcccaggggaatcagcagccaggacagacatcctagcagccgcctcccagccctgcctaggaaccgtacatcccatctgctctctggccaacggcttcacaccttcccctgctgcatgtgggggccgatgggcaggggacctcggtggaaataaaatgtatctatcacatccgc

SEQ ID NO: 32021 - DNA, 1088 bp, Homo sapiens
  source 1..1088: mol_type = unassigned DNA
ctggcccatggcgaggtggtctgcgcggtcaccatcagcggctccacacagcatgtgtacacgggcggcaagggctgtgtgaaggtgtgggacgtggatggggcagtgtttgcaggtcaaaggggcggggctcaccagccaatcaggaaccgagacaactacattcgttcctgcaagttgctgccggatggccggagtctgatcgtgggcggtgaggccagcaccttgtccatttgggacctggcggcgcccaccccccgtatcaaggccgagctgacttcctcagccccagcctgctacgccctggccgtcagccccgacgccaaggtttgcttctcctgctgcagcgatggcaacattgtggtctgggacctgcagaatcagactatggtcaggcagttccagggccacacggacggcgccagctgcattgatatttccgattacggcactcggctctggacagggggcctggacaacacggtgcgctgctgggacctgcgggagggccgccagctgcagcagcatgacttcagctcccagattttctccctgggccactgccctaaccaggactggctggcggtcggaatggagagtagcaacgtggagatcctgcacgtccgcaagccggagaaataccagctgcacctccacgagagctgcgtgctgtccctgaagtttgcctcctgcggacggtggtttgtgagcaccgggaaggacaacctgctcaacgcctggaggacgccgtacggggccagcattttccagtccaaggagtcgtcctcagtcctgagttgtgacatctccagaaataacaaatacatcgtgacaggctcgggggacaagaaggccaccgtgtatgaggtggtctactgagacatgaccccccttcctgtacccgaagtccagactcccaggggaatcagcagccaggacagacatcctagcagccgcctcccagccctgcctaggaaccgtacatcccatctgctctctggccaacggcttcacaccttcccctgctgcatgtgggggccgatgggcaggggacctcggtggaaataaaatgtatctatcacatccgc

SEQ ID NO: 32022 - DNA, 2121 bp, Homo sapiens
  source 1..2121: mol_type = unassigned DNA
atggtgcaatcacggctcactgcaacctccgcctcccaagattctcctgcttcaggattacagaccccgctccagtccggccagcccttcaagttctcgatcttggagatctgcgaccgcatcaaagaagaattccagtttcttcaggctcaataccacagcctcaagctagaatgtgagaagctggccagcgagaagacggaaatgcagcgacattatgtcatgtattatgagatgtcgtacgggctcaacattgaaatgcataagcaggcggagattgtgaagcgtctgagcggtatctgcgctcagattatccccttcctgacccaggagcatcagcagcaggtgctccaggccgtagaacgcgccaagcaggtcaccgtgggggagctgaacagcctcatcgggcagcagcagctccagccgctgtcccaccacgcaccccctgtgcccctcaccccccgcccagccgggctggtgggcggcagtgctacggggctgcttgctctgtctggagccctggctgcccaggctcagctggcggcggctgtcaaggaggaccgtgcgggcgtggaggccgaggggtccagagtggagagagccccgagcaggagtgcatctccctcgccccctgagagtctcgtggaggaggagcgaccgagtggccctggtggtggcgggaagcagagagcagatgagaaggagccatcaggaccttatgaaagcgacgaagacaagagtgattacaatctggtggtggacgaggaccaaccctcagagccccccagcccggctaccaccccctgcggaaaggtacccatctgcattcctgcccgtcgggacctggtggacagtccagcctccttggcctctagccttggctcaccgctgcctagagccaaggagctcatcctgaatgaccttcccgccagcactcctgcctccaaatcctgtgactcctccccgccccaggacgcttccacccccgggcccagctcggccagtcacctctgccagcttgctgccaagccagcaccttccacggacagcgtcgccctgaggagccccctgactctgtccagtcccttcaccacgtccttcagcctgggctcccacagcactctcaacggagacctctccgtgcccagctcctacgtcagcctccacctgtccccccaggtcagcagctctgtggtgtacggacgctcccccgtgatggcatttgagtctcatccccatctccgagggtcatccgtctcttcctccctacccagcatccctgggggaaagccggcctactccttccacgtgtctgcggacgggcagatgcagccggttcccttcccctcggatgcactggtaggcgcgggcatcccgcggcacgcccggcagctgcacacgctggcccatggcgaggtggtctgcgcggtcaccatcagcggctccacacagcatgtgtacacgggcggcaagggctgtgtgaaggtgtgggacgtgggccagcctggggccaagacgcccgtggcccagctcgactgcctgaaccgagacaactacattcgttcctgcaagttgctgccggatggccggagtctgatcgtgggcggtgaggccagcaccttgtccatttgggacctggcggcgcccaccccccgtatcaaggccgagctgacttcctcagccccagcctgctacgccctggccgtcagccccgacgccaaggtttgcttctcctgctgcagcgatggcaacattgtggtctgggacctgcagaatcagactatggtcaggcagttccagggccacacggacggcgccagctgcattgatatttccgattacggcactcggctctggacagggggcctggacaacacggtgcgctgctgggacctgcgggagggccgccagctgcagcagcatgacttcagctcccagattttctccctgggccactgccctaaccaggactggctggcggtcggaatggagagtagcaacgtggagatcctgcacgtccgcaagccggagaaataccagctgcacctccacgagagctgcgtgctgtccctgaagtttgcctcctgcgtccaaggagtcgtcctcagtcctgagttgtga

SEQ ID NO: 32023 - DNA, 1343 bp, Homo sapiens
  source 1..1343: mol_type = unassigned DNA
tcgccgcgctcccgccccggccgctgcccctgcccgccccgctcgccccgcgcaccccaacccggggaggggctcccacgaccccgggcgcgcgcgcttgggggcgcgccagggactccagggtcccttgccccgcgccgcttctccctcctccctctttcttcgggcagcctccccaccaccccacttcagcctcccccactcttgccgcctccatatcatcaagctctggtggcgcctggggggcttttcggatcggcaggatgtacccccagggaaggcacccgaccccgctccagtccggccagcccttcaagttctcgatcttggagatctgcgaccgcatcaaagaagaattccagtttcttcaggctcaataccacagcctcaagctagaatgtgagaagctggccagcgagaagacggaaatgcagcgacattatgtcatgtattatgagatgtcgtacgggctcaacattgaaatgcataagcaggcggagattgtgaagcgtctgagcggtatctgcgctcagattatccccttcctgacccaggagagtgcatctccctcgccccctgagagtctcgtggaggaggagcgaccgagtggccctggtggtggcgggaagcagagagcagatgagaaggagccatcaggaccttatgaaagcgacgaagacaagagtgattacaatctggtggtggacgaggaccaaccctcagagccccccagcccggctaccaccccctgcggaaaggtacccatctgcattcctgcccgtcgggacctggtggacagtccagcctccttggcctctagccttggctcaccgctgcctagagccaaggagctcatcctgaatgaccttcccgccagcactcctgcctccaaatcctgtgactcctccccgccccaggacgcttccacccccgggcccagctcggccagtcacctctgccagcttgctgccaagccagcaccttccacggacagcgtcgccctgaggagccccctgactctgtccagtcccttcaccacgtccttcagcctgggctcccacagcactctcaacggagacctctccgtgcccagctcctacgtcagcctccacctgtccccccaggtcagcagctctgtggtgtacggacgctcccccgtgatggcatttgagtctcatccccatctccgagggtcatccgtctcttcctccctacccagcatccctgggggaaagccggcctactccttccacgtgtctgcggacgggcagatgcagccggttcccttcccctcggatgcactggtaggcgcgggcatcccgccgtggcccagctcgactgcc

SEQ ID NO: 32024 - DNA, 2108 bp, Homo sapiens
  source 1..2108: mol_type = unassigned DNA
agaaaagccatttccgactccagactggtccccgctccccgcaagcccccccccccgctcccacgaccccgctccagtccggccagcccttcaagttctcgatcttggagatctgcgaccgcatcaaagaagaattccagtttcttcaggctcaataccacagcctcaagctagaatgtgagaagctggccagcgagaagacggaaatgcagcgacattatgtcatgtattatgagatgtcgtacgggctcaacattgaaatgcataagcaggcggagattgtgaagcgtctgagcggtatctgcgctcagattatccccttcctgacccaggagcatcagcagcaggtgctccaggccgtagaacgcgccaagcaggtcaccgtgggggagctgaacagcctcatcgggagtgcatctccctcgccccctgagagtctcgtggaggaggagcgaccgagtggccctggtggtggcgggaagcagagagcagatgagaaggagccatcaggaccttatgaaagcgacgaagacaagagtgattacaatctggtggtggacgaggaccaaccctcagagccccccagcccggctaccaccccctgcggaaaggtacccatctgcattcctgcccgtcgggacctggtggacagtccagcctccttggcctctagccttggctcaccgctgcctagagccaaggagctcatcctgaatgaccttcccgccagcactcctgcctccaaatcctgtgactcctccccgccccaggacgcttccacccccgggcccagctcggccagtcacctctgccagcttgctgccaagccagcaccttccacggacagcgtcgccctgaggagccccctgactctgtccagtcccttcaccacgtccttcagcctgggctcccacagcactctcaacggagacctctccgtgcccagctcctacgtcagcctccacctgtccccccaggtcagcagctctgtggtgtacggacgctcccccgtgatggcatttgagtctcatccccatctccgagggtcatccgtctcttcctccctacccagcatccctgggggaaagccggcctactccttccacgtgtctgcggacgggcagatgcagccggttcccttcccctcggatgcactggtaggcgcgggcatcccgcggcacgcccggcagctgcacacgctggcccatggcgaggtggtctgcgcggtcaccatcagcggctccacacagcatgtgtacacgggcggcaagggctgtgtgaaggtgtgggacgtgggccagcctggggccaagacgcccgtggcccagctcgactgcctgaaccgagacaactacattcgttcctgcaagttgctgccggatggccggagtctgatcgtgggcggtgaggccagcaccttgtccatttgggacctggcggcgcccaccccccgtatcaaggccgagctgacttcctcagccccagcctgctacgccctggccgtcagccccgacgccaaggtttgcttctcctgctgcagcgatggcaacattgtggtctgggacctgcagaatcagactatggtcaggcagttccagggccacacggacggcgccagctgcattgatatttccgattacggcactcggctctggacagggggcctggacaacacggtgcgctgctgggacctgcgggagggccgccagctgcagcagcatgacttcagctcccagattttctccctgggccactgccctaaccaggactggctggcggtcggaatggagagtagcaacgtggagatcctgcacgtccgcaagccggagaaataccagctgcacctccacgagagctgcgtgctgtccctgaagtttgcctcctgcggacggtggtttgtgagcaccgggaaggacaacctgctcaacgcctggaggacgccgtacggggccagcattttccagtccaaggagtcgtcctcagtcctgagttgtgacatctccagaaataacaaatacatcgtgacaggctcgggggacaagaaggccaccgtgtatgaggtggtctactgagacatgaccccccttcctgtacccgaagtccagact

SEQ ID NO: 32025 - DNA, 2492 bp, Homo sapiens
  source 1..2492: mol_type = unassigned DNA
agatgaaatccttcccttgagtgtggcgtgctgagatctccacctggaggcatccccagctggtagatcagtcctgggaagcggaggagaccaagaaaggggccttgcctgggacagacgtgggccaagccggggctggaatctgggactccaggcggaggcccctttcctttgtttcagctgagcccagcacctctgagtgtctgcgtctgagcggagattgtgaagcgtctgagcggtatctgcgctcagattatccccttcctgacccaggagcatcagcagcaggtgctccaggccgtagaacgcgccaagcaggtcaccgtgggggagctgaacagcctcatcggggtgagtctctctagcccctgccccgccatggggagacgcccactcccaggtccctggcacccacccaggaggtgttaaagctggggtggtgtgtgggccttggctccagtggtcctgggaaccccaggggcacatgctgtgcttaggtcccatcccctgtgtctacctcttgggctggggaccgctgggctcctgccgccccccgccccggcccatcctgcctcctttctagcagcagcagctccagccgctgtcccaccacgcaccccctgtgcccctcaccccccgcccagccgggctggtgggcggcagtgctacggggctgcttgctctgtctggagccctggctgcccaggctcagctggcggcggctgtcaaggaggaccgtgcgggcgtggaggccgaggggtccagagtggagagagccccgagcaggagtgcatctccctcgccccctgagagtctcgtggaggaggagcgaccgagtggccctggtggtggcgggaagcagagagcagatgagaaggagccatcaggaccttatgaaagcgacgaagacaagagtgattacaatctggtggtggacgaggaccaaccctcagagccccccagcccggctaccaccccctgcggaaaggtacccatctgcattcctgcccgtcgggacctggtggacagtccagcctccttggcctctagccttggctcaccgctgcctagagccaaggagctcatcctgaatgaccttcccgccagcactcctgcctccaaatcctgtgactcctccccgccccaggacgcttccacccccgggcccagctcggccagtcacctctgccagcttgctgccaagccagcaccttccacggacagcgtcggtcagcagctctgtggtgtacggacgctcccccgtgatggcatttgagtctcatccccatctccgagggtcatccgtctcttcctccctacccagcatccctgggggaaagccggcctactccttccacgtgtctgcggacgggcagatgcagccggttcccttcccctcggatgcactggtaggcgcgggcatcccgcggcacgcccggcagctgcacacgctggcccatggcgaggtggtctgcgcggtcaccatcagcggctccacacagcatgtgtacacgggcggcaagggctgtgtgaaggtgtgggacgtgggccagcctggggccaagacgcccgtggcccagctcgactgcctgaaccgagacaactacattcgttcctgcaagttgctgccggatggccggagtctgatcgtgggcggtgaggccagcaccttgtccatttgggacctggcggcgcccaccccccgtatcaaggccgagctgacttcctcagccccagcctgctacgccctggccgtcagccccgacgccaaggtttgcttctcctgctgcagcgatggcaacattgtggtctgggacctgcagaatcagactatggtcaggcagttccagggccacacggacggcgccagctgcattgatatttccgattacggcactcggctctggacagggggcctggacaacacggtgcgctgctgggacctgcgggagggccgccagctgcagcagcatgacttcagctcccagattttctccctgggccactgccctaaccaggactggctggcggtcggaatggagagtagcaacgtggagatcctgcacgtccgcaagccggagaaataccagctgcacctccacgagagctgcgtgctgtccctgaagtttgcctcctgcggacggtggtttgtgagcaccgggaaggacaacctgctcaacgcctggaggacgccgtacggggccagcattttccagtccaaggagtcgtcctcagtcctgagttgtgacatctccagaaataacaaatacatcgtgacaggctcgggggacaagaaggccaccgtgtatgaggtggtctactgagacatgaccccccttcctgtacccgaagtccagactcccaggggaatcagcagccaggacagacatcctagcagccgcctcccagccctgcctaggaaccgtacatcccatctgctctctggccaacggcttcacaccttcccctgctgcatgtgggggccgatgggc

SEQ ID NO: 32026 - DNA, 2346 bp, Homo sapiens
  source 1..2346: mol_type = unassigned DNA
cagaccccgctccagtccggccagcccttcaagttctcgatcttggagatctgcgaccgcatcaaagaagaattccagtttcttcaggctcaataccacagcctcaagctagaatgtgagaagctggccagcgagaagacggaaatgcagcgacattatgtcatgtattatgagatgtcgtacgggctcaacattgaaatgcataagcaggcggagattgtgaagcgtctgagcggtatctgcgctcagattatccccttcctgacccaggagcatcagcagcaggtgctccaggccgtagaacgcgccaagcaggtcaccgtgggggagctgaacagcctcatcgggcagcagcagctccagccgctgtcccaccacgcaccccctgtgcccctcaccccccgcccagccgggctggtgggcggcagtgctacggggctgcttgctctgtctggagccctggctgcccaggctcagctggcggcggctgtcaaggaggaccgtgcgggcgtggaggccgaggggtccagagtggagagagccccgagcaggagtgcatctccctcgccccctgagagtctcgtggaggaggagcgaccgagtggccctggtggtggcgggaagcagagagcagatgagaaggagccatcaggaccttatgaaagcgacgaagacaagagtgattacaatctggtggtggacgaggaccaaccctcagagccccccagcccggctaccaccccctgcggaaaggtacccatctgcattcctgcccgtcgggacctggtggacagtccagcctccttggcctctagccttggctcaccgctgcctagagccaaggagctcatcctgaatgaccttcccgccagcactcctgcctccaaatcctgtgactcctccccgccccaggacgcttccacccccgggcccagctcggccagtcacctctgccagcttgctgccaagccagcaccttccacggacagcgtcgccctgaggagccccctgactctgtccagtcccttcaccacgtccttcagcctgggctcccacagcactctcaacggagacctctccgtgcccagctcctacgtcagcctccacctgtccccccaggtcagcagctctgtggtgtacggacgctcccccgtgatggcatttgagtctcatccccatctccgagggtcatccgtctcttcctccctacccagcatccctgggggaaagccggcctactccttccacgtgtctgcggacgggcagatgcagccggttcccttcccctcggatgcactggtaggcgcgggcatcccgcggcacgcccggcagctgcacacgctggcccatggcgaggtggtctgcgcggtcaccatcagcggctccacacagcatgtgtacacgggcggcaagggctgtgtgaaggtgtgggacgtgggccagcctggggccaagacgcccgtggcccagctcgactgcctgaaccgagacaactacattcgttcctgcaagttgctgccggatggccggagtctgatcgtgggcggtgaggccagcaccttgtccatttgggacctggcggcgcccaccccccgtatcaaggccgagctgacttcctcagccccagcctgctacgccctggccgtcagccccgacgccaaggtttgcttctcctgctgcagcgatggcaacattgtggtctgggacctgcagaatcagactatggtcaggcagttccagggccacacggacggcgccagctgcattgatatttccgattacggcactcggctctggacagggggcctggacaacacggtgcgctgctgggacctgcgggagggccgccagctgcagcagcatgacttcagctcccagattttctccctgggccactgccctaaccaggactggctggcggtcggaatggagagtagcaacgtggagatcctgcacgtccgcaagccggagaaataccagctgcacctccacgagagctgcgtgctgtccctgaagtttgcctcctgcgtccaaggagtcgtcctcagtcctgagttgtgacatctccagaaataacaaatacatcgtgacaggctcgggggacaagaaggccaccgtgtatgaggtggtctactgagacatgaccccccttcctgtacccgaagtccagactcccaggggaatcagcagccaggacagacatcctagcagccgcctcccagccctgcctaggaaccgtacatcccatctgctctctggccaacggcttcacaccttcccctgctgcatgtgggggccgatgggcaggggacctcggtggaaataaaatgtatctatcacatccgc

SEQ ID NO: 32027 - DNA, 2253 bp, Homo sapiens
  source 1..2253: mol_type = unassigned DNA
ccccgctcgccccgcgcaccccaacccgcccccccagaccccgctccagtccggccagcccttcaagttctcgatcttggagatctgcgaccgcatcaaagaagaattccagtttcttcaggctcaataccacagcctcaagctagaatgtgagaagctggccagcgagaagacggaaatgcagcgacattatgtcatgtattatgagatgtcgtacgggctcaacattgaaatgcataagcaggcggagattgtgaagcgtctgagcggtatctgcgctcagattatccccttcctgacccaggagcatcagcagcaggtgctccaggccgtagaacgcgccaagcaggtcaccgtgggggagctgaacagcctcatcgggagtgcatctccctcgccccctgagagtctcgtggaggaggagcgaccgagtggccctggtggtggcgggaagcagagagcagatgagaaggagccatcaggaccttatgaaagcgacgaagacaagagtgattacaatctggtggtggacgaggaccaaccctcagagccccccagcccggctaccaccccctgcggaaaggtacccatctgcattcctgcccgtcgggacctggtggacagtccagcctccttggcctctagccttggctcaccgctgcctagagccaaggagctcatcctgaatgaccttcccgccagcactcctgcctccaaatcctgtgactcctccccgccccaggacgcttccacccccgggcccagctcggccagtcacctctgccagcttgctgccaagccagcaccttccacggacagcgtcgccctgaggagccccctgactctgtccagtcccttcaccacgtccttcagcctgggctcccacagcactctcaacggagacctctccgtgcccagctcctacgtcagcctccacctgtccccccaggtcagcagctctgtggtgtacggacgctcccccgtgatggcatttgagtctcatccccatctccgagggtcatccgtctcttcctccctacccagcatccctgggggaaagccggcctactccttccacgtgtctgcggacgggcagatgcagccggttcccttcccctcggatgcactggtaggcgcgggcatcccgcggcacgcccggcagctgcacacgctggcccatggcgaggtggtctgcgcggtcaccatcagcggctccacacagcatgtgtacacgggcggcaagggctgtgtgaaggtgtgggacgtgggccagcctggggccaagacgcccgtggcccagctcgactgcctgaaccgagacaactacattcgttcctgcaagttgctgccggatggccggagtctgatcgtgggcggtgaggccagcaccttgtccatttgggacctggcggcgcccaccccccgtatcaaggccgagctgacttcctcagccccagcctgctacgccctggccgtcagccccgacgccaaggtttgcttctcctgctgcagcgatggcaacattgtggtctgggacctgcagaatcagactatggtcaggcagttccagggccacacggacggcgccagctgcattgatatttccgattacggcactcggctctggacagggggcctggacaacacggtgcgctgctgggacctgcgggagggccgccagctgcagcagcatgacttcagctcccagattttctccctgggccactgccctaaccaggactggctggcggtcggaatggagagtagcaacgtggagatcctgcacgtccgcaagccggagaaataccagctgcacctccacgagagctgcgtgctgtccctgaagtttgcctcctgcggacggtggtttgtgagcaccgggaaggacaacctgctcaacgcctggaggacgccgtacggggccagcattttccagtccaaggagtcgtcctcagtcctgagttgtgacatctccagaaataacaaatacatcgtgacaggctcgggggacaagaaggccaccgtgtatgaggtggtctactgagacatgaccccccttcctgtacccgaagtccagactcccaggggaatcagcagccaggacagacatcctagcagccgcctcccagccctgcctaggaaccgtacatcccatctgctctctggccaacggcttcacaccttcccctgctgcatgtgggggccgatgggcaggggacctcggtggaaataaaatgtatctatcacatccgc

SEQ ID NO: 32028 - DNA, 5207 bp, Homo sapiens
  source 1..5207: mol_type = unassigned DNA
gctctcgcggcagttcagacctcgtgctcgtccccttcgcctgtctgtgtgtggtatccgtaggtccggggcacttttttttttggtgtgtgtgtgtgtgcgtgcgcgcgtgtgtgtgtgttgggtgtgtgtgttttgggggtttgccggggcgcggagaggagagccgggccgaggggaaggaaggaagccgtagagctccccggtctcgggctgcgtctcccctccagcgctctcctgcctgtgcgctccgacgcggcagcggcggtggcgctgagcgctcctcggtggggacgcggtgctcaagctgggagcagcgagaaccctttgcggaggcttcccgtgcccgctggacttaggatgccagggcgtttgatttgcacctactgagcccggagttcctccccggccctgggaagggcttgcagcggcggcggcggcggcggcagcggcagtagcagacggaacagcaggctctcctctccgagggggggcgtcgaagcgcccgcgccgggctcccgccctcaccctccggcgctcctgcggccccaagccaccacctcgtagcccgcctccttcctcttctcgccgcgagccccaggcccggacgcctctaggatcggacccgcgcgccccggatgcttggggctgccccggcgcgcccccctacaggcgcgacccgctgagtgacccggagggggcccgagctcgccccaggaggggcccccggcctcgggaccccgcgccggacctgctggggagccgacgatgtccgcgcagtcccaggcattgacgcgctcgacgcagcccagggaaggcggccggccgctgcccgccgagccctaggcgcacaaagcccgcgcccgccgcccggccccggcgcccgccgacgactttgccgcctgctccgcggctctttgtctccacttggggcgggcgcccgactctgggatttcgctgcgagaacgagctgggggggccgggggcgagctctcggtttcccggccgccccccgctcgggctcggctcccccctcccccgcacctccccggcccgggctctcggcgcttccacgctctcggaatcacgacccctccctgccatgtatccgcagggcagacatccggctccccatcaacccgggcagccgggatttaaattcacggtggctgagtcttgtgacaggatcaaagacgaattccagttcctgcaagctcagtatcacagcctcaaagtggagtacgacaagctggcaaacgagaagacggagatgcagcgccattatgtgatgtactatgagatgtcctatggcttgaacattgaaatgcacaagcagacagagattgcgaagagactgaacacaattttagcacagatcatgcctttcctgtcacaagagcaccagcagcaggtggcgcaggcagtggagcgcgccaagcaggtcaccatgacggagctgaacgccatcatcgggcagcagcagctccaggcgcagcacctctcccatgccacacacggccccccggtccagttgccaccccacccgtcaggtctccagcctccaggaatccccccagtgacagggagcagctccgggctgctggcactgggcgccctgggcagccaggcccatctgacggtgaaggatgagaagaaccaccatgaactcgatcacagagagagagaatccagtgcgaataactctgtgtcaccctcggaaagcctccgggccagtgagaagcaccggggctctgcggactacagcatggaagccaagaagcggaaggcggaggagaaggacagcttgagccgatacgacagtgatggagacaagagtgatgatctggtggtggatgtttccaatgaggaccccgcaacgccccgggtcagcccggcacactcccctcctgaaaatgggctggacaaggcccgtagcctgaaaaaagatgcccccaccagccctgcctcggtggcctcttccagtagcacaccttcctccaagaccaaagaccttggtcataacgacaaatcctccacccctgggctcaagtccaacacaccaaccccaaggaacgacgccccaactccaggcaccagcacgaccccagggctcaggtcgatgccggcctcggctctgcgcacgcccatctccatcaccagctcctatgcggcgcccttcgccatgatgagccaccatgagatgaacggctccctcaccagtcctggcgcctacgccggcctccacaacatcccaccccagatgagcgccgccgccgctgctgcagccgctgcctatggccgatcgccaatggtgagctttggagctgttggttttgaccctcaccccccgatgcgggccacaggcctcccctcaagcctggcctccattcctggaggaaaaccagcgtactcattccatgtgagtgctgatgggcagatgcagcccgtgcccttcccccacgacgccctggcaggccccggcatcccgaggcacgcccggcagatcaacacactcagccacggggaggtggtgtgtgccgtgaccatcagcaaccccacgaggcacgtctacacaggtggcaagggctgcgtgaagatctgggacatcagccagccaggcagcaagagccccatctcccagctggactgcctgaacagggacaattacatccgctcctgcaagctgctccctgatgggcgcacgctcatcgtgggcggcgaggccagcacgctcaccatctgggacctggcctcgcccacgccccgcatcaaggccgagctgacgtcctcggctcccgcctgttatgccctggccattagccctgacgccaaagtctgcttctcctgctgcagcgatgggaacattgctgtctgggacctgcacaaccagaccctggtcaggcagttccagggccacacagatggggccagctgcatagacatctcccatgatggcaccaaactgtggacagggggcctggacaacacggtgcgctcctgggacctgcgggagggccgacagctacagcagcatgacttcacttcccagatcttctcgctgggctactgccccactggggagtggctggctgtgggcatggagagcagcaacgtggaggtgctgcaccacaccaagcctgacaagtaccagctgcacctgcacgagagctgcgtgctctccctcaagttcgcctactgcggcaagtggttcgtgagcactgggaaagataaccttctcaacgcctggaggacgccttatggagccagcatattccagtctaaagaatcctcgtctgtcttgagttgtgacatttcagcggatgacaaatacattgtaacaggctctggtgacaagaaggccacagtttatgaggtcatctactaaacaagaactccagcagggctgtcaaactctgggagaaaccgactcggctctgacagggagacccccaggcgaggggccccgaggatggcggaggatgggccgcaggcagccgagcgttcagggctgcgctccggccggctgagagggcacgtgccccgtcacagtctggactcctgggcctggattgatgtgtctcacagactcggaagggttctgctcctcctcctccccctgaacaatgctggcagttgctacaaatagatttattggaggcttatggctccggttcccccacagacccgctcatgagtctctgtttgttcttcccttttcttttgccctgtccctcaccttgggtcgggggtgctggagtggaccacaatgttgtgctgggggatgggggggtctctctttgccgattgtgcagtgcacaagatttgtgaaaaatgtaaataacagactcctattgcggactgatcagtgggagaggaggccccttcccaccggaaactctgagtgtgtatttcgcctgctgtatttgtaatccactcgtggtggtggcttttttttttttttttttttaaataaacagatgctctcacctgggaagaggagacagggaggggaaccaattgaagaaagaggagaaaagtcttagagtgtggaaaaggcaaccaggttggccgtaaggtgcctgctggaatgcgtgtgcctccacacgggtctgggcatccggactgataaccagccggccagactgagggatggaaggcactgagatgggggcccgtccaggcggacacccgcagaaatggagctttctgtggtctcttgcactctggctgcctcttgccctctctgtgtctctctttcttggtctctccctctctcctcctcagcctggtctttctctttggtgcacacttagttattgttgtgagcaatggaagttcaaaggaactccctctccagctcttctgaatcttgggacacagcctaaaaaggacaaaaagttagaagacagcatagcaactcagctcagggagctaccagagaaaaatagcaactgatgtgggtgctttttttttttttttaatttgaataaaaagaattagaagtgatgtccttttataaaatgccttctcccccttcccgcctacagtctcttcctctccccttagaggggggaaagtgtataaacctacagggttgtgagtctgaaaagaggatccccctcacccccaccctgggcagagcagtgggggttggggggtgggagagggggacacagatcctggcacactgtggatatttcttgcagattgcagtctcttgtggcccaaacaggttaggtagactatcgcctctggcaggtgccaccttttggtaccaacatgttctgaggtgttaggatttgggttgggttttttttgtttgttttttttttccttttggtctttttttttttctccttttaaagaaaagctaaaggccgctgtgagtcctggtggcaggctctccatggatgtagcatatcgaagataatttttatactgcatttttatggattattttgtaatgtgtgattccgtctgctgaggaggtgggaggggctccagggaaagccacccaccttcagtgaggttgctccccagctgagcgcaccgggcatgggatgtggaggctggcgacacaccctgtgcctctccaaggctgggcgcgtggggcgtccagagtctctctgggtctcagatgtccatctgccacctcttgttaaggctctagccagaagggagggtgagggtagaagaaagttattccc

SEQ ID NO: 32029 - DNA, 2657 bp, Homo sapiens
  source 1..2657: mol_type = unassigned DNA
atttaagcatctatcatggcagggtaaacgaggcagtttatctggcacctccattttgcttgttgctacctttatggctccccatcaacccgggcagccgggatttaaattcacggtggctgagtcttgtgacaggatcaaagacgaattccagttcctgcaagctcagtatcacagcctcaaagtggagtacgacaagctggcaaacgagaagacggagatgcagcgccattatgtgatgtactatgagatgtcctatggcttgaacattgaaatgcacaagcagacagagattgcgaagagactgaacacaattttagcacagatcatgcctttcctgtcacaagagcaccagcagcaggtggcgcaggcagtggagcgcgccaagcaggtcaccatgacggagctgaacgccatcatcgggcagcagcagctccaggcgcagcacctctcccatgccacacacggccccccggtccagttgccaccccacccgtcaggtctccagcctccaggaatccccccagtgacagggagcagctccgggctgctggcactgggcgccctgggcagccaggcccatctgacggtgaaggatgagaagaaccaccatgaactcgatcacagagagagagaatccagtgcgaataactctgtgtcaccctcggaaagcctccgggccagtgagaagcaccggggctctgcggactacagcatggaagccaagaagcggaaggcggaggagaaggacagcttgagccgatacgacagtgatggagacaagagtgatgatctggtggtggatgtttccaatgaggaccccgcaacgccccgggtcagcccggcacactcccctcctgaaaatgggctggacaaggcccgtagcctgaaaaaagatgcccccaccagccctgcctcggtggcctcttccagtagcacaccttcctccaagaccaaagaccttggtcataacgacaaatcctccacccctgggctcaagtccaacacaccaaccccaaggaacgacgccccaactccaggcaccagcacgaccccagggctcaggtcgatgccgggtaaacctccgggcatggacccgatagcctcggctctgcgcacgcccatctccatcaccagctcctatgcggcgcccttcgccatgatgagccaccatgagatgaacggctccctcaccagtcctggcgcctacgccggcctccacaacatcccaccccagatgagcgccgccgccgctgctgcagccgctgcctatggccgatcgccaatggtgagctttggagctgttggttttgaccctcaccccccgatgcgggccacaggcctcccctcaagcctggcctccattcctggaggaaaaccagcgtactcattccatgtgagtgctgatgggcagatgcagcccgtgcccttcccccacgacgccctggcaggccccggcatcccgaggcacgcccggcagatcaacacactcagccacggggaggtggtgtgtgccgtgaccatcagcaaccccacgaggcacgtctacacaggtggcaagggctgcgtgaagatctgggacatcagccagccaggcagcaagagccccatctcccagctggactgcctgaacagggacaattacatccgctcctgcaagctgctccctgatgggcgcacgctcatcgtgggcggcgaggccagcacgctcaccatctgggacctggcctcgcccacgccccgcatcaaggccgagctgacgtcctcggctcccgcctgttatgccctggccattagccctgacgccaaagtctgcttctcctgctgcagcgatgggaacattgctgtctgggacctgcacaaccagaccctggtcaggcagttccagggccacacagatggggccagctgcatagacatctcccatgatggcaccaaactgtggacagggggcctggacaacacggtgcgctcctgggacctgcgggagggccgacagctacagcagcatgacttcacttcccagatcttctcgctgggctactgccccactggggagtggctggctgtgggcatggagagcagcaacgtggaggtgctgcaccacaccaagcctgacaagtaccagctgcacctgcacgagagctgcgtgctctccctcaagttcgcctactgcggcaagtggttcgtgagcactgggaaagataaccttctcaacgcctggaggacgccttatggagccagcatattccagtctaaagaatcctcgtctgtcttgagttgtgacatttcagcggatgacaaatacattgtaacaggctctggtgacaagaaggccacagtttatgaggtcatctactaaacaagaactccagcagggctgtcaaactctgggagaaaccgactcggctctgacagggagacccccaggcgaggggccccgaggatggcggaggatgggccgcaggcagccgagcgttcagggctgcgctccggccggctgagagggcacgtgccccgtcacagtctggactcctgggcctggattgatgtgtctcacagactcggaagggttctgctcctcctcctccccctgaacaatgctggcagttgctacaaatagatttattggaggcttatggctccggttcccccac

SEQ ID NO: 32030 - DNA, 5307 bp, Homo sapiens
  source 1..5307: mol_type = unassigned DNA
agtccctatttggaactgctctcgcggcagttcagacctcgtgctcgtccccttcgcctgtctgtgtgtggtatccgtaggtccggggcacttttttttttggtgtgtgtgtgtgtgcgtgcgcgcgtgtgtgtgtgttgggtgtgtgtgttttgggggtttgccggggcgcggagaggagagccgggccgaggggaaggaaggaagccgtagagctccccggtctcgggctgcgtctcccctccagcgctctcctgcctgtgcgctccgacgcggcagcggcggtggcgctgagcgctcctcggtggggacgcggtgctcaagctgggagcagcgagaaccctttgcggaggcttcccgtgcccgctggacttaggatgccagggcgtttgatttgcacctactgagcccggagttcctccccggccctgggaagggcttgcagcggcggcggcggcggcggcagcggcagtagcagacggaacagcaggctctcctctccgagggggggcgtcgaagcgcccgcgccgggctcccgccctcaccctccggcgctcctgcggccccaagccaccacctcgtagcccgcctccttcctcttctcgccgcgagccccaggcccggacgcctctaggatcggacccgcgcgccccggatgcttggggctgccccggcgcgcccccctacaggcgcgacccgctgagtgacccggagggggcccgagctcgccccaggaggggcccccggcctcgggaccccgcgccggacctgctggggagccgacgatgtccgcgcagtcccaggcattgacgcgctcgacgcagcccagggaaggcggccggccgctgcccgccgagccctaggcgcacaaagcccgcgcccgccgcccggccccggcgcccgccgacgactttgccgcctgctccgcggctctttgtctccacttggggcgggcgcccgactctgggatttcgctgcgagaacgagctgggggggccgggggcgagctctcggtttcccggccgccccccgctcgggctcggctcccccctcccccgcacctccccggcccgggctctcggcgcttccacgctctcggaatcacgacccctccctgccatgtatccgcagggcagacatccggctccccatcaacccgggcagccgggatttaaattcacggtggctgagtcttgtgacaggatcaaagacgaattccagttcctgcaagctcagtatcacagcctcaaagtggagtacgacaagctggcaaacgagaagacggagatgcagcgccattatgtgatgtactatgagatgtcctatggcttgaacattgaaatgcacaagcagacagagattgcgaagagactgaacacaattttagcacagatcatgcctttcctgtcacaagagcaccagcagcaggtggcgcaggcagtggagcgcgccaagcaggtcaccatgacggagctgaacgccatcatcgggcagcagcagctccaggcgcagcacctctcccatgccacacacggccccccggtccagttgccaccccacccgtcaggtctccagcctccaggaatccccccagtgacagggagcagctccgggctgctggcactgggcgccctgggcagccaggcccatctgacggtgaaggatgagaagaaccaccatgaactcgatcacagagagaggagttcagcttctaataactctgtgtcaccctcggaaagcctccgggccagtgagaagcaccggggctctgcggactacagcatggaagccaagaagcggaaggcggaggagaaggacagcttgagccgatacgacagtgatggagacaagagtgatgatctggtggtggatgtttccaatgaggaccccgcaacgccccgggtcagcccggcacactcccctcctgaaaatgggctggacaaggcccgtagcctgaaaaaagatgcccccaccagccctgcctcggtggcctcttccagtagcacaccttcctccaagaccaaagaccttggtcataacgacaaatcctccacccctgggctcaagtccaacacaccaaccccaaggaacgacgccccaactccaggcaccagcacgaccccagggctcaggtcgatgccgggtaaacctccgggcatggacccgatagcctcggctctgcgcacgcccatctccatcaccagctcctatgcggcgcccttcgccatgatgagccaccatgagatgaacggctccctcaccagtcctggcgcctacgccggcctccacaacatcccaccccagatgagcgccgccgccgctgctgcagccgctgcctatggccgatcgccaatggttggttttgaccctcaccccccgatgcgggccacaggcctcccctcaagcctggcctccattcctggaggaaaaccagcgtactcattccatgtgagtgctgatgggcagatgcagcccgtgcccttcccccacgacgccctggcaggccccggcatcccgaggcacgcccggcagatcaacacactcagccacggggaggtggtgtgtgccgtgaccatcagcaaccccacgaggcacgtctacacaggtggcaagggctgcgtgaagatctgggacatcagccagccaggcagcaagagccccatctcccagctggactgcctgaacagggacaattacatccgctcctgcaagctgctccctgatgggcgcacgctcatcgtgggcggcgaggccagcacgctcaccatctgggacctggcctcgcccacgccccgcatcaaggccgagctgacgtcctcggctcccgcctgttatgccctggccattagccctgacgccaaagtctgcttctcctgctgcagcgatgggaacattgctgtctgggacctgcacaaccagaccctggtcaggcagttccagggccacacagatggggccagctgcatagacatctcccatgatggcaccaaactgtggacagggggcctggacaacacggtgcgctcctgggacctgcgggagggccgacagctacagcagcatgacttcacttcccagatcttctcgctgggctactgccccactggggagtggctggctgtgggcatggagagcagcaacgtggaggtgctgcaccacaccaagcctgacaagtaccagctgcacctgcacgagagctgcgtgctctccctcaagttcgcctactgcggcaagtggttcgtgagcactgggaaagataaccttctcaacgcctggaggacgccttatggagccagcatattccagtctaaagaatcctcgtctgtcttgagttgtgacatttcagcggatgacaaatacattgtaacaggctctggtgacaagaaggccacagtttatgaggtcatctactaaacaagaactccagcagggctgtcaaactctgggagaaaccgactcggctctgacagggagacccccaggcgaggggccccgaggatggcggaggatgggccgcaggcagccgagcgttcagggctgcgctccggccggctgagagggcacgtgccccgtcacagtctggactcctgggcctggattgatgtgtctcacagactcggaagggttctgctcctcctcctccccctgaacaatgctggcagttgctacaaatagatttattggaggcttatggctccggttcccccacagacccgctcatgagtctctgtttgttcttcccttttcttttgccctgtccctcaccttgggtcgggggtgctggagtggaccacaatgttgtgctgggggatgggggggtctctctttgccgattgtgcagtgcacaagatttgtgaaaaatgtaaataacagactcctattgcggactgatcagtgggagaggaggccccttcccaccggaaactctgagtgtgtatttcgcctgctgtatttgtaatccactcgtggtggtggcttttttttttttttttttttaaataaacagatgctctcacctgggaagaggagacagggaggggaaccaattgaagaaagaggagaaaagtcttagagtgtggaaaaggcaaccaggttggccgtaaggtgcctgctggaatgcgtgtgcctccacacgggtctgggcatccggactgataaccagccggccagactgagggatggaaggcactgagatgggggcccgtccaggcggacacccgcagaaatggagctttctgtggtctcttgcactctggctgcctcttgccctctctgtgtctctctttcttggtctctccctctctcctcctcagcctggtctttctctttggtgcacacttagttattgttgtgagcaatggaagttcaaaggaactccctctccagctcttctgaatcttgggacacagcctaaaaaggacaaaaagttagaagacagcatagcaactcagctcagggagctaccagagaaaaatagcaactgatgtgggtgctttttttttttttttaatttgaataaaaagaattagaagtgatgtccttttataaaatgccttctcccccttcccgcctacagtctcttcctctccccttagaggggggaaagtgtataaacctacagggttgtgagtctgaaaagaggatccccctcacccccaccctgggcagagcagtgggggttggggggtgggagagggggacacagatcctggcacactgtggatatttcttgcagattgcagtctcttgtggcccaaacaggttaggtagactatcgcctctggcaggtgccaccttttggtaccaacatgttctgaggtgttaggatttgggttgggttttttttgtttgttttttttttccttttggtctttttttttttctccttttaaagaaaagctaaaggccgctgtgagtcctggtggcaggctctccatggatgtagcatatcgaagataatttttatactgcatttttatggattattttgtaatgtgtgattccgtctgctgaggaggtgggaggggctccagggaaagccacccaccttcagtgaggttgctccccagctgagcgcaccgggcatgggatgtggaggctggcgacacaccctgtgcctctccaaggctgggcgcgtggggcgtccagagtctctctgggtctcagatgtccatctgccacctcttgttaaggctctagccagaagggagggtgagggtagaagaaagttattcccgaagaaaaaaagaatgaaaagtcattgtactgaactgtttttatatttttaaaagttactatttaaaggtt

SEQ ID NO: 32031 - DNA, 5322 bp, Homo sapiens
  source 1..5322: mol_type = unassigned DNA
agtccctatttggaactgctctcgcggcagttcagacctcgtgctcgtccccttcgcctgtctgtgtgtggtatccgtaggtccggggcacttttttttttggtgtgtgtgtgtgtgcgtgcgcgcgtgtgtgtgtgttgggtgtgtgtgttttgggggtttgccggggcgcggagaggagagccgggccgaggggaaggaaggaagccgtagagctccccggtctcgggctgcgtctcccctccagcgctctcctgcctgtgcgctccgacgcggcagcggcggtggcgctgagcgctcctcggtggggacgcggtgctcaagctgggagcagcgagaaccctttgcggaggcttcccgtgcccgctggacttaggatgccagggcgtttgatttgcacctactgagcccggagttcctccccggccctgggaagggcttgcagcggcggcggcggcggcggcagcggcagtagcagacggaacagcaggctctcctctccgagggggggcgtcgaagcgcccgcgccgggctcccgccctcaccctccggcgctcctgcggccccaagccaccacctcgtagcccgcctccttcctcttctcgccgcgagccccaggcccggacgcctctaggatcggacccgcgcgccccggatgcttggggctgccccggcgcgcccccctacaggcgcgacccgctgagtgacccggagggggcccgagctcgccccaggaggggcccccggcctcgggaccccgcgccggacctgctggggagccgacgatgtccgcgcagtcccaggcattgacgcgctcgacgcagcccagggaaggcggccggccgctgcccgccgagccctaggcgcacaaagcccgcgcccgccgcccggccccggcgcccgccgacgactttgccgcctgctccgcggctctttgtctccacttggggcgggcgcccgactctgggatttcgctgcgagaacgagctgggggggccgggggcgagctctcggtttcccggccgccccccgctcgggctcggctcccccctcccccgcacctccccggcccgggctctcggcgcttccacgctctcggaatcacgacccctccctgccatgtatccgcagggcagacatccggctccccatcaacccgggcagccgggatttaaattcacggtggctgagtcttgtgacaggatcaaagacgaattccagttcctgcaagctcagtatcacagcctcaaagtggagtacgacaagctggcaaacgagaagacggagatgcagcgccattatgtgatgtactatgagatgtcctatggcttgaacattgaaatgcacaagcagacagagattgcgaagagactgaacacaattttagcacagatcatgcctttcctgtcacaagagcaccagcagcaggtggcgcaggcagtggagcgcgccaagcaggtcaccatgacggagctgaacgccatcatcgggcagcagcagctccaggcgcagcacctctcccatgccacacacggccccccggtccagttgccaccccacccgtcaggtctccagcctccaggaatccccccagtgacagggagcagctccgggctgctggcactgggcgccctgggcagccaggcccatctgacggtgaaggatgagaagaaccaccatgaactcgatcacagagagagagaatccagtgcgaataactctgtgtcaccctcggaaagcctccgggccagtgagaagcaccggggctctgcggactacagcatggaagccaagaagcggaaggcggaggagaaggacagcttgagccgatacgacagtgatggagacaagagtgatgatctggtggtggatgtttccaatgaggaccccgcaacgccccgggtcagcccggcacactcccctcctgaaaatgggctggacaaggcccgtagcctgaaaaaagatgcccccaccagccctgcctcggtggcctcttccagtagcacaccttcctccaagaccaaagaccttggtcataacgacaaatcctccacccctgggctcaagtccaacacaccaaccccaaggaacgacgccccaactccaggcaccagcacgaccccagggctcaggtcgatgccgggtaaacctccgggcatggacccgatagcctcggctctgcgcacgcccatctccatcaccagctcctatgcggcgcccttcgccatgatgagccaccatgagatgaacggctccctcaccagtcctggcgcctacgccggcctccacaacatcccaccccagatgagcgccgccgccgctgctgcagccgctgcctatggccgatcgccaatggtgagctttggagctgttggttttgaccctcaccccccgatgcgggccacaggcctcccctcaagcctggcctccattcctggaggaaaaccagcgtactcattccatgtgagtgctgatgggcagatgcagcccgtgcccttcccccacgacgccctggcaggccccggcatcccgaggcacgcccggcagatcaacacactcagccacggggaggtggtgtgtgccgtgaccatcagcaaccccacgaggcacgtctacacaggtggcaagggctgcgtgaagatctgggacatcagccagccaggcagcaagagccccatctcccagctggactgcctgaacagggacaattacatccgctcctgcaagctgctccctgatgggcgcacgctcatcgtgggcggcgaggccagcacgctcaccatctgggacctggcctcgcccacgccccgcatcaaggccgagctgacgtcctcggctcccgcctgttatgccctggccattagccctgacgccaaagtctgcttctcctgctgcagcgatgggaacattgctgtctgggacctgcacaaccagaccctggtcaggcagttccagggccacacagatggggccagctgcatagacatctcccatgatggcaccaaactgtggacagggggcctggacaacacggtgcgctcctgggacctgcgggagggccgacagctacagcagcatgacttcacttcccagatcttctcgctgggctactgccccactggggagtggctggctgtgggcatggagagcagcaacgtggaggtgctgcaccacaccaagcctgacaagtaccagctgcacctgcacgagagctgcgtgctctccctcaagttcgcctactgcggcaagtggttcgtgagcactgggaaagataaccttctcaacgcctggaggacgccttatggagccagcatattccagtctaaagaatcctcgtctgtcttgagttgtgacatttcagcggatgacaaatacattgtaacaggctctggtgacaagaaggccacagtttatgaggtcatctactaaacaagaactccagcagggctgtcaaactctgggagaaaccgactcggctctgacagggagacccccaggcgaggggccccgaggatggcggaggatgggccgcaggcagccgagcgttcagggctgcgctccggccggctgagagggcacgtgccccgtcacagtctggactcctgggcctggattgatgtgtctcacagactcggaagggttctgctcctcctcctccccctgaacaatgctggcagttgctacaaatagatttattggaggcttatggctccggttcccccacagacccgctcatgagtctctgtttgttcttcccttttcttttgccctgtccctcaccttgggtcgggggtgctggagtggaccacaatgttgtgctgggggatgggggggtctctctttgccgattgtgcagtgcacaagatttgtgaaaaatgtaaataacagactcctattgcggactgatcagtgggagaggaggccccttcccaccggaaactctgagtgtgtatttcgcctgctgtatttgtaatccactcgtggtggtggcttttttttttttttttttttaaataaacagatgctctcacctgggaagaggagacagggaggggaaccaattgaagaaagaggagaaaagtcttagagtgtggaaaaggcaaccaggttggccgtaaggtgcctgctggaatgcgtgtgcctccacacgggtctgggcatccggactgataaccagccggccagactgagggatggaaggcactgagatgggggcccgtccaggcggacacccgcagaaatggagctttctgtggtctcttgcactctggctgcctcttgccctctctgtgtctctctttcttggtctctccctctctcctcctcagcctggtctttctctttggtgcacacttagttattgttgtgagcaatggaagttcaaaggaactccctctccagctcttctgaatcttgggacacagcctaaaaaggacaaaaagttagaagacagcatagcaactcagctcagggagctaccagagaaaaatagcaactgatgtgggtgctttttttttttttttaatttgaataaaaagaattagaagtgatgtccttttataaaatgccttctcccccttcccgcctacagtctcttcctctccccttagaggggggaaagtgtataaacctacagggttgtgagtctgaaaagaggatccccctcacccccaccctgggcagagcagtgggggttggggggtgggagagggggacacagatcctggcacactgtggatatttcttgcagattgcagtctcttgtggcccaaacaggttaggtagactatcgcctctggcaggtgccaccttttggtaccaacatgttctgaggtgttaggatttgggttgggttttttttgtttgttttttttttccttttggtctttttttttttctccttttaaagaaaagctaaaggccgctgtgagtcctggtggcaggctctccatggatgtagcatatcgaagataatttttatactgcatttttatggattattttgtaatgtgtgattccgtctgctgaggaggtgggaggggctccagggaaagccacccaccttcagtgaggttgctccccagctgagcgcaccgggcatgggatgtggaggctggcgacacaccctgtgcctctccaaggctgggcgcgtggggcgtccagagtctctctgggtctcagatgtccatctgccacctcttgttaaggctctagccagaagggagggtgagggtagaagaaagttattcccgaagaaaaaaagaatgaaaagtcattgtactgaactgtttttatatttttaaaagttactatttaaaggtt

SEQ ID NO: 32032 - DNA, 2295 bp, Homo sapiens
  source 1..2295: mol_type = unassigned DNA
atgtatccgcagggcagacatccggctccccatcaacccgggcagccgggatttaaattcacggtggctgagtcttgtgacaggatcaaagacgaattccagttcctgcaagctcagtatcacagcctcaaagtggagtacgacaagctggcaaacgagaagacggagatgcagcgccattatgtgatgtactatgagatgtcctatggcttgaacattgaaatgcacaagcagacagagattgcgaagagactgaacacaattttagcacagatcatgcctttcctgtcacaagagcaccagcagcaggtggcgcaggcagtggagcgcgccaagcaggtcaccatgacggagctgaacgccatcatcgggcagcagcagctccaggcgcagcacctctcccatgccacacacggccccccggtccagttgccaccccacccgtcaggtctccagcctccaggaatccccccagtgacagggagcagctccgggctgctggcactgggcgccctgggcagccaggcccatctgacggtgaaggatgagaagaaccaccatgaactcgatcacagagagagagaatccagtgcgaataactctgtgtcaccctcggaaagcctccgggccagtgagaagcaccggggctctgcggactacagcatggaagccaagaagcggaaggcggaggagaaggacagcttgagccgatacgacagtgatggagacaagagtgatgatctggtggtggatgtttccaatgaggaccccgcaacgccccgggtcagcccggcacactcccctcctgaaaatgggctggacaaggcccgtagcctgaaaaaagatgcccccaccagccctgcctcggtggcctcttccagtagcacaccttcctccaagaccaaagaccttggtcataacgacaaatcctccacccctgggctcaagtccaacacaccaaccccaaggaacgacgccccaactccaggcaccagcacgaccccagggctcaggtcgatgccgggtaaacctccgggcatggacccgatagcctcggctctgcgcacgcccatctccatcaccagctcctatgcggcgcccttcgccatgatgagccaccatgagatgaacggctccctcaccagtcctggcgcctacgccggcctccacaacatcccaccccagatgagcgccgccgccgctgctgcagccgctgcctatggccgatcgccaatggttggttttgaccctcaccccccgatgcgggccacaggcctcccctcaagcctggcctccattcctggaggaaaaccagcgtactcattccatgtgagtgctgatgggcagatgcagcccgtgcccttcccccacgacgccctggcaggccccggcatcccgaggcacgcccggcagatcaacacactcagccacggggaggtggtgtgtgccgtgaccatcagcaaccccacgaggcacgtctacacaggtggcaagggctgcgtgaagatctgggacatcagccagccaggcagcaagagccccatctcccagctggactgcctgaacagggacaattacatccgctcctgcaagctgctccctgatgggcgcacgctcatcgtgggcggcgaggccagcacgctcaccatctgggacctggcctcgcccacgccccgcatcaaggccgagctgacgtcctcggctcccgcctgttatgccctggccattagccctgacgccaaagtctgcttctcctgctgcagcgatgggaacattgctgtctgggacctgcacaaccagaccctggtcaggcagttccagggccacacagatggggccagctgcatagacatctcccatgatggcaccaaactgtggacagggggcctggacaacacggtgcgctcctgggacctgcgggagggccgacagctacagcagcatgacttcacttcccagatcttctcgctgggctactgccccactggggagtggctggctgtgggcatggagagcagcaacgtggaggtgctgcaccacaccaagcctgacaagtaccagctgcacctgcacgagagctgcgtgctctccctcaagttcgcctactgcggcaagtggttcgtgagcactgggaaagataaccttctcaacgcctggaggacgccttatggagccagcatattccagtctaaagaatcctcgtctgtcttgagttgtgacatttcagcggatgacaaatacattgtaacaggctctggtgacaagaaggccacagtttatgaggtcatctactaa

SEQ ID NO: 32033 - DNA, 6004 bp, Homo sapiens
  source 1..6004: mol_type = unassigned DNA
tataatatatatctatttattatatgtctttcggttaattcctgatctgaggagcgctgtttttcactcccatgcgaaagtcaccagcgggtagggcctgattgctacttttcatgcatagttttagacacaagagggcattgtgacgtcgcgcccagcggcacccagtcgtaggccgagtcccgcagccccacgtgggggccccgcgctcccattggccagcgccggacgaagctgccacattattttgttacttttcagtccctatttggaactgctctcgcggcagttcagacctcgtgctcgtccccttcgcctgtctgtgtgtggtatccgtaggtccggggcacttttttttttggtgtgtgtgtgtgtgcgtgcgcgcgtgtgtgtgtgttgggtgtgtgtgttttgggggtttgccggggcgcggagaggagagccgggccgaggggaaggaaggaagccgtagagctccccggtctcgggctgcgtctcccctccagcgctctcctgcctgtgcgctccgacgcggcagcggcggtggcgctgagcgctcctcggtggggacgcggtgctcaagctgggagcagcgagaaccctttgcggaggcttcccgtgcccgctggacttaggatgccagggcgtttgatttgcacctactgagcccggagttcctccccggccctgggaagggcttgcagcggcggcggcggcggcggcagcggcagtagcagacggaacagcaggctctcctctccgagggggggcgtcgaagcgcccgcgccgggctcccgccctcaccctccggcgctcctgcggccccaagccaccacctcgtagcccgcctccttcctcttctcgccgcgagccccaggcccggacgcctctaggatcggacccgcgcgccccggatgcttggggctgccccggcgcgcccccctacaggcgcgacccgctgagtgacccggagggggcccgagctcgccccaggaggggcccccggcctcgggaccccgcgccggacctgctggggagccgacgatgtccgcgcagtcccaggcattgacgcgctcgacgcagcccagggaaggcggccggccgctgcccgccgagccctaggcgcacaaagcccgcgcccgccgcccggccccggcgcccgccgacgactttgccgcctgctccgcggctctttgtctccacttggggcgggcgcccgactctgggatttcgctgcgagaacgagctgggggggccgggggcgagctctcggtttcccggccgccccccgctcgggctcggctcccccctcccccgcacctccccggcccgggctctcggcgcttccacgctctcggaatcacgacccctccctgccatgtatccgcagggcagacatccggctccccatcaacccgggcagccgggatttaaattcacggtggctgagtcttgtgacaggatcaaagacgaattccagttcctgcaagctcagtatcacagcctcaaagtggagtacgacaagctggcaaacgagaagacggagatgcagcgccattatgtgatgtactatgagatgtcctatggcttgaacattgaaatgcacaagcagacagagattgcgaagagactgaacacaattttagcacagatcatgcctttcctgtcacaagagcaccagcagcaggtggcgcaggcagtggagcgcgccaagcaggtcaccatgacggagctgaacgccatcatcgggcagcagcagctccaggcgcagcacctctcccatgccacacacggccccccggtccagttgccaccccacccgtcaggtctccagcctccaggaatccccccagtgacagggagcagctccgggctgctggcactgggcgccctgggcagccaggcccatctgacggtgaaggatgagaagaaccaccatgaactcgatcacagagagagagaatccagtgcgaataactctgtgtcaccctcggaaagcctccgggccagtgagaagcaccggggctctgcggactacagcatggaagccaagaagcggaaggcggaggagaaggacagcttgagccgatacgacagtgatggagacaagagtgatgatctggtggtggatgtttccaatgaggaccccgcaacgccccgggtcagcccggcacactcccctcctgaaaatgggctggacaaggcccgtagcctgaaaaaagatgcccccaccagccctgcctcggtggcctcttccagtagcacaccttcctccaagaccaaagaccttggtcataacgacaaatcctccacccctgggctcaagtccaacacaccaaccccaaggaacgacgccccaactccaggcaccagcacgaccccagggctcaggtcgatgccgggtaaacctccgggcatggacccgataggtataatggcctcggctctgcgcacgcccatctccatcaccagctcctatgcggcgcccttcgccatgatgagccaccatgagatgaacggctccctcaccagtcctggcgcctacgccggcctccacaacatcccaccccagatgagcgccgccgccgctgctgcagccgctgcctatggccgatcgccaatggtgagctttggagctgttggttttgaccctcaccccccgatgcgggccacaggcctcccctcaagcctggcctccattcctggaggaaaaccagcgtactcattccatgtgagtgctgatgggcagatgcagcccgtgcccttcccccacgacgccctggcaggccccggcatcccgaggcacgcccggcagatcaacacactcagccacggggaggtggtgtgtgccgtgaccatcagcaaccccacgaggcacgtctacacaggtggcaagggctgcgtgaagatctgggacatcagccagccaggcagcaagagccccatctcccagctggactgcctgaacagggacaattacatccgctcctgcaagctgctccctgatgggcgcacgctcatcgtgggcggcgaggccagcacgctcaccatctgggacctggcctcgcccacgccccgcatcaaggccgagctgacgtcctcggctcccgcctgttatgccctggccattagccctgacgccaaagtctgcttctcctgctgcagcgatgggaacattgctgtctgggacctgcacaaccagaccctggtcaggcagttccagggccacacagatggggccagctgcatagacatctcccatgatggcaccaaactgtggacagggggcctggacaacacggtgcgctcctgggacctgcgggagggccgacagctacagcagcatgacttcacttcccagatcttctcgctgggctactgccccactggggagtggctggctgtgggcatggagagcagcaacgtggaggtgctgcaccacaccaagcctgacaagtaccagctgcacctgcacgagagctgcgtgctctccctcaagttcgcctactgcggcaagtggttcgtgagcactgggaaagataaccttctcaacgcctggaggacgccttatggagccagcatattccagtctaaagaatcctcgtctgtcttgagttgtgacatttcagcggatgacaaatacattgtaacaggctctggtgacaagaaggccacagtttatgaggtcatctactaaacaagaactccagcagggctgtcaaactctgggagaaaccgactcggctctgacagggagacccccaggcgaggggccccgaggatggcggaggatgggccgcaggcagccgagcgttcagggctgcgctccggccggctgagagggcacgtgccccgtcacagtctggactcctgggcctggattgatgtgtctcacagactcggaagggttctgctcctcctcctccccctgaacaatgctggcagttgctacaaatagatttattggaggcttatggctccggttcccccacagacccgctcatgagtctctgtttgttcttcccttttcttttgccctgtccctcaccttgggtcgggggtgctggagtggaccacaatgttgtgctgggggatgggggggtctctctttgccgattgtgcagtgcacaagatttgtgaaaaatgtaaataacagactcctattgcggactgatcagtgggagaggaggccccttcccaccggaaactctgagtgtgtatttcgcctgctgtatttgtaatccactcgtggtggtggcttttttttttttttttttttaaataaacagatgctctcacctgggaagaggagacagggaggggaaccaattgaagaaagaggagaaaagtcttagagtgtggaaaaggcaaccaggttggccgtaaggtgcctgctggaatgcgtgtgcctccacacgggtctgggcatccggactgataaccagccggccagactgagggatggaaggcactgagatgggggcccgtccaggcggacacccgcagaaatggagctttctgtggtctcttgcactctggctgcctcttgccctctctgtgtctctctttcttggtctctccctctctcctcctcagcctggtctttctctttggtgcacacttagttattgttgtgagcaatggaagttcaaaggaactccctctccagctcttctgaatcttgggacacagcctaaaaaggacaaaaagttagaagacagcatagcaactcagctcagggagctaccagagaaaaatagcaactgatgtgggtgctttttttttttttttaatttgaataaaaagaattagaagtgatgtccttttataaaatgccttctcccccttcccgcctacagtctcttcctctccccttagaggggggaaagtgtataaacctacagggttgtgagtctgaaaagaggatccccctcacccccaccctgggcagagcagtgggggttggggggtgggagagggggacacagatcctggcacactgtggatatttcttgcagattgcagtctcttgtggcccaaacaggttaggtagactatcgcctctggcaggtgccaccttttggtaccaacatgttctgaggtgttaggatttgggttgggttttttttgtttgttttttttttccttttggtctttttttttttctccttttaaagaaaagctaaaggccgctgtgagtcctggtggcaggctctccatggatgtagcatatcgaagataatttttatactgcatttttatggattattttgtaatgtgtgattccgtctgctgaggaggtgggaggggctccagggaaagccacccaccttcagtgaggttgctccccagctgagcgcaccgggcatgggatgtggaggctggcgacacaccctgtgcctctccaaggctgggcgcgtggggcgtccagagtctctctgggtctcagatgtccatctgccacctcttgttaaggctctagccagaagggagggtgagggtagaagaaagttattcccgaagaaaaaaagaatgaaaagtcattgtactgaactgtttttatatttttaaaagttactatttaaaggttggtttgattgttgcgtcttaattgcctctccccccagtttgccagtcccgccccccgccccccgggaaaacagccaggccactgttgctgtcacattctggagcctgggccagggccatttcccatcgatgtgagctcttctcatctcacagcattccctgcgctgcttccacccccttctccccttccagatacccagcatcgcagcagggatttcacaatcccatactgtgtcgcctcccatccaagcgccagggagggtggggggtaggagctaagacttcctctggacagatgggcagggcagagttcactgaggtgaaggaagaccacaggttaacaccaaagtattgtacagctgtcaatgcaaaacttttttggaaaaaaattaaacgtaatgaacttgaagcgaaa

SEQ ID NO: 32034 - DNA, 2918 bp, Homo sapiens
  source 1..2918: mol_type = unassigned DNA
aattccgcgcgagtggcgcggggggctgcttgtgttccagggggagctgttcacgcggtccccggccccgctctgaagtctcccaactcacccggcttgtctcccgcccccgccttactggggagagggaggcccttggtgaaaggcatgggagccccgctgccgacggggagagatggggcgccccccctccgccccgtcggagagctgagaaacttgctgggaaggttctgggctgagggtggcctcttttggttgggcgccgttggggaggggccggggccgctctgagcgcggtctcatgcccccgccccctcccctgtcttgtcttcgcgggctccaggctccccatcaacccgggcagccgggatttaaattcacggtggctgagtcttgtgacaggatcaaagacgaattccagttcctgcaagctcagtatcacagcctcaaagtggagtacgacaagctggcaaacgagaagacggagatgcagcgccattatgtgatgtactatgagatgtcctatggcttgaacattgaaatgcacaagcagacagagattgcgaagagactgaacacaattttagcacagatcatgcctttcctgtcacaagagcaccagcagcaggtggcgcaggcagtggagcgcgccaagcaggtcaccatgacggagctgaacgccatcatcgggcagcagctccaggcgcagcacctctcccatgccacacacggccccccggtccagttgccaccccacccgtcaggtctccagcctccaggaatccccccagtgacagggagcagctccgggctgctggcactgggcgccctgggcagccaggcccatctgacggtgaaggatgagaagaaccaccatgaactcgatcacagagagagagaatccagtgcgaataactctgtgtcaccctcggaaagcctccgggccagtgagaagcaccggggctctgcggactacagcatggaagccaagaagcggaaggcggaggagaaggacagcttgagccgatacgacagtgatggagacaagagtgatgatctggtggtggatgtttccaatgaggaccccgcaacgccccgggtcagcccggcacactcccctcctgaaaatgggctggacaaggcccgtagcctgaaaaaagatgcccccaccagccctgcctcggtggcctcttccagtagcacaccttcctccaagaccaaagaccttggtcataacgacaaatcctccacccctgggctcaagtccaacacaccaaccccaaggaacgacgccccaactccaggcaccagcacgaccccagggctcaggtcgatgccgggtaaacctccgggcatggacccgataggtataatggcctcggctctgcgcacgcccatctccatcaccagctcctatgcggcgcccttcgccatgatgagccaccatgagatgaacggctccctcaccagtcctggcgcctacgccggcctccacaacatcccaccccagatgagcgccgccgccgctgctgcagccgctgcctatggccgatcgccaatggttggttttgaccctcaccccccgatgcgggccacaggcctcccctcaagcctggcctccattcctggaggaaaaccagcgtactcattccatgtgagtgctgatgggcagatgcagcccgtgcccttcccccacgacgccctggcaggccccggcatcccgaggcacgcccggcagatcaacacactcagccacggggaggtggtgtgtgccgtgaccatcagcaaccccacgaggcacgtctacacaggtggcaagggctgcgtgaagatctgggacatcagccagccaggcagcaagagccccatctcccagctggactgcctgaacagggacaattacatccgctcctgcaagctgctccctgatgggcgcacgctcatcgtgggcggcgaggccagcacgctcaccatctgggacctggcctcgcccacgccccgcatcaaggccgagctgacgtcctcggctcccgcctgttatgccctggccattagccctgacgccaaagtctgcttctcctgctgcagcgatgggaacattgctgtctgggacctgcacaaccagaccctggtcaggcagttccagggccacacagatggggccagctgcatagacatctcccatgatggcaccaaactgtggacagggggcctggacaacacggtgcgctcctgggacctgcgggagggccgacagctacagcagcatgacttcacttcccagatcttctcgctgggctactgccccactggggagtggctggctgtgggcatggagagcagcaacgtggaggtgctgcaccacaccaagcctgacaagtaccagctgcacctgcacgagagctgcgtgctctccctcaagttcgcctactgcggcaagtggttcgtgagcactgggaaagataaccttctcaacgcctggaggacgccttatggagccagcatattccagtctaaagaatcctcgtctgtcttgagttgtgacatttcagcggatgacaaatacattgtaacaggctctggtgacaagaaggccacagtttatgaggtcatctactaaacaagaactccagcagggctgtcaaactctgggagaaaccgactcggctctgacagggagacccccaggcgaggggccccgaggatggcggaggatgggccgcaggcagccgagcgttcagggctgcgctccggccggctgagagggcacgtgccccgtcacagtctggactcctgggcctggattgatgtgtctcacagactcggaagggttctgctcctcctcctccccctgaacaatgctggcagttgctacaaatagatttattggaggcttatggctccggttcccccacaga

SEQ ID NO: 32035 - DNA, 3021 bp, Homo sapiens
  source 1..3021: mol_type = unassigned DNA
cattttgcttgttgctacctttatggtgtgtgtgtttgtgtgtgtgctctcacacaaagggggatgcggccggggggcgccgttgagagaggaggttaattccgcgcgagtggcgcggggggctgcttgtgttccagggggagctgttcacgcggtccccggccccgctctgaagtctcccaactcacccggcttgtctcccgcccccgccttactggggagagggaggcccttggtgaaaggcatgggagccccgctgccgacggggagagatggggcgccccccctccgccccgtcggagagctgagaaacttgctgggaaggttctgggctgagggtggcctcttttggttgggcgccgttggggaggggccggggccgctctgagcgcggtctcatgcccccgccccctcccctgtcttgtcttcgcgggctccaggctccccatcaacccgggcagccgggatttaaattcacggtggctgagtcttgtgacaggatcaaagacgaattccagttcctgcaagctcagtatcacagcctcaaagtggagtacgacaagctggcaaacgagaagacggagatgcagcgccattatgtgatgtactatgagatgtcctatggcttgaacattgaaatgcacaagcagacagagattgcgaagagactgaacacaattttagcacagatcatgcctttcctgtcacaagagcaccagcagcaggtggcgcaggcagtggagcgcgccaagcaggtcaccatgacggagctgaacgccatcatcgggcagcagctccaggcgcagcacctctcccatgccacacacggccccccggtccagttgccaccccacccgtcaggtctccagcctccaggaatccccccagtgacagggagcagctccgggctgctggcactgggcgccctgggcagccaggcccatctgacggtgaaggatgagaagaaccaccatgaactcgatcacagagagagagaatccagtgcgaataactctgtgtcaccctcggaaagcctccgggccagtgagaagcaccggggctctgcggactacagcatggaagccaagaagcggaaggcggaggagaaggacagcttgagccgatacgacagtgatggagacaagagtgatgatctggtggtggatgtttccaatgaggaccccgcaacgccccgggtcagcccggcacactcccctcctgaaaatgggctggacaaggcccgtagcctgaaaaaagatgcccccaccagccctgcctcggtggcctcttccagtagcacaccttcctccaagaccaaagaccttggtcataacgacaaatcctccacccctgggctcaagtccaacacaccaaccccaaggaacgacgccccaactccaggcaccagcacgaccccagggctcaggtcgatgccgggtaaacctccgggcatggacccgatagcctcggctctgcgcacgcccatctccatcaccagctcctatgcggcgcccttcgccatgatgagccaccatgagatgaacggctccctcaccagtcctggcgcctacgccggcctccacaacatcccaccccagatgagcgccgccgccgctgctgcagccgctgcctatggccgatcgccaatggtgagctttggagctgttggttttgaccctcaccccccgatgcgggccacaggcctcccctcaagcctggcctccattcctggaggaaaaccagcgtactcattccatgtgagtgctgatgggcagatgcagcccgtgcccttcccccacgacgccctggcaggccccggcatcccgaggcacgcccggcagatcaacacactcagccacggggaggtggtgtgtgccgtgaccatcagcaaccccacgaggcacgtctacacaggtggcaagggctgcgtgaagatctgggacatcagccagccaggcagcaagagccccatctcccagctggactgcctgaacagggacaattacatccgctcctgcaagctgctccctgatgggcgcacgctcatcgtgggcggcgaggccagcacgctcaccatctgggacctggcctcgcccacgccccgcatcaaggccgagctgacgtcctcggctcccgcctgttatgccctggccattagccctgacgccaaagtctgcttctcctgctgcagcgatgggaacattgctgtctgggacctgcacaaccagaccctggtcaggcagttccagggccacacagatggggccagctgcatagacatctcccatgatggcaccaaactgtggacagggggcctggacaacacggtgcgctcctgggacctgcgggagggccgacagctacagcagcatgacttcacttcccagatcttctcgctgggctactgccccactggggagtggctggctgtgggcatggagagcagcaacgtggaggtgctgcaccacaccaagcctgacaagtaccagctgcacctgcacgagagctgcgtgctctccctcaagttcgcctactgcggcaagtggttcgtgagcactgggaaagataaccttctcaacgcctggaggacgccttatggagccagcatattccagtctaaagaatcctcgtctgtcttgagttgtgacatttcagcggatgacaaatacattgtaacaggctctggtgacaagaaggccacagtttatgaggtcatctactaaacaagaactccagcagggctgtcaaactctgggagaaaccgactcggctctgacagggagacccccaggcgaggggccccgaggatggcggaggatgggccgcaggcagccgagcgttcagggctgcgctccggccggctgagagggcacgtgccccgtcacagtctggactcctgggcctggattgatgtgtctcacagactcggaagggttctgctcctcctcctccccctgaacaatgctggcagttgctacaaatagatttattggaggcttatggctccggttcccccacaga

SEQ ID NO: 32036 - DNA, 1977 bp, Homo sapiens
  source 1..1977: mol_type = unassigned DNA
agtttcctcttggcctgaacttggctgacctccgcagcttccgcccgactctggctaaagtcttggaggctactgccttgaagatgacctctagggaccagcccagacccaagggccccccgaaaagcacttcgccttgtcctgggatctcgaactctgagagctctccgacgctgaattatcagggcattctaaatcggctcaagcagttccccaggttttctcctcattttgctgcggagttggagagcatttactactcgctgcacaagatccagcaggatgtggcagaacatcacaagcagataggaaacgtcttacagattgtggagagctgcagccaactccagggtttccagtctgaggaggtctcacctgctgaaccagccagccctgggacgccccagcaggtgaaggacaagaccctgcaggagtcgagctttgaggacatcatggccaccaggtcctccgactggctccggcggcctttgggggaggacaatcagccggagacccagctgttctgggacaaggagccttggttttggcacgacactctgaccgagcaactctggcggatttttgccggcgtccacgatgagaaggcaaagcccagagacagacagcaggcaccaggcctggggcaggaaagcaaggcaccaggatcctgtgacccaggaacagacccatgtcctgaagatgcctccacccccaggccacctgaggcctcctccagtccccctgagggttcccaagacaggaacacaagttggggtgtggtccaggagcctcctggaagagcctctcggtttctacagtccatatcctgggaccctgaggactttgaagatgcatggaagaggccagatgccttgcccgggcagtcaaagagactcgccgtcccgtgcaaactggaaaagatgcggatcttggcacacggggagctcgtgctcgccacggccatcagcagcttcacgcggcacgtgttcacctgtggcagaagaggcatcaaggtgtggagcctgactggacaggtggctgaggacaggttccctgagagccacctgcctatacagacccctggggccttcctgcgcacctgcctgctgtcctcaaacagcaggagcctgctcaccggtggctacaacctggccagcgtgagcgtgtgggacctggcggcgccctccctgcatgtgaaggagcagttgccctgtgcaggtctcaactgccaggccctggatgccaacctggatgccaacctggccttcgccagcttcaccagtggtgtggtcaggatctgggacctgcgggatcagagtgtggtcagggacctcaagggttatcctgatggagtcaagagtatcgtggtcaagggctacaacatctggactgggggtccggatgcctgtctgcggtgctgggaccagaggaccatcatgaaacctctggagtaccaattcaagtctcagataatgagcctgtcccacagcccccaggaggactgggtgctgctgggcatggccaatggccagcagtggctgcaaagcaccagcgggagccagcggcacatggtggggcaaaaagacagcgtcatcctgagcgtcaagttctccccctttggccagtggtgggcaagcgttggaatggacgacttccttggcgtctacagcatgccggcggggacaaaagtgttcgaggtgcctgagatgtctccagtcacgtgctgtgacgtctcttccaacaaccgcctcgttgtcacaggctccggggagcacgcctccgtgtaccagatcacctactgaggggcctcgctgctgtcatcccactccggctcctcttttcatccccccccttccccccccccaacaagggggacatggtggagggaagcgggaaggctcttctgtggcatcgcacgatctagtctgtggtgtagactggtcgccatcacgtgtaataaagcacccgggaaaggca

SEQ ID NO: 32037 - DNA, 1880 bp, Homo sapiens
  source 1..1880: mol_type = unassigned DNA
gaacttggctgacctccgcagcttccgcccggtgagggacccttgtcctgggatctcgaactctgagagctctccgacgctgaattatcagggcattctaaatcggctcaagcagttccccaggttttctcctcattttgctgcggagttggagagcatttactactcgctgcacaagatccagcaggatgtggcagaacatcacaagcagataggaaacgtcttacagattgtggagagctgcagccaactccagggtttccagtctgaggaggtctcacctgctgaaccagccagccctgggacgccccagcaggtgaaggacaagaccctgcaggagtcgagctttgaggacatcatggccaccaggtcctccgactggctccggcggcctttgggggaggacaatcagccggagacccagctgttctgggacaaggagccttggttttggcacgacactctgaccgagcaactctggcggatttttgccggcgtccacgatgagaaggcaaagcccagagacagacagcaggcaccaggcctggggcaggaaagcaaggcaccaggatcctgtgacccaggaacagacccatgtcctgaagatgcctccacccccaggccacctgaggcctcctccagtccccctgagggttcccaagacaggaacacaagttggggtgtggtccaggagcctcctggaagagcctctcggtttctacagtccatatcctgggaccctgaggactttgaagatgcatggaagaggccagatgccttgcccgggcagtcaaagagactcgccgtcccgtgcaaactggaaaagatgcggatcttggcacacggggagctcgtgctcgccacggccatcagcagcttcacgcggcacgtgttcacctgtggcagaagaggcatcaaggtgtggagcctgactggacaggtggctgaggacaggttccctgagagccacctgcctatacagacccctggggccttcctgcgcacctgcctgctgtcctcaaacagcaggagcctgctcaccggtggctacaacctggccagcgtgagcgtgtgggacctggcggcgccctccctgcatgtgaaggagcagttgccctgtgcaggtctcaactgccaggccctggatgccaacctggatgccaacctggccttcgccagcttcaccagtggtgtggtcaggatctgggacctgcgggatcagagtgtggtcagggacctcaagggttatcctgatggagtcaagagtatcgtggtcaagggctacaacatctggactgggggtccggatgcctgtctgcggtgctgggaccagaggaccatcatgaaacctctggagtaccaattcaagtctcagataatgagcctgtcccacagcccccaggaggactgggtgctgctgggcatggccaatggccagcagtggctgcaaagcaccagcgggagccagcggcacatggtggggcaaagacagcgtcatcctgagcgtcaagttctccccctttggccagtggtgggcaagcgttggaatggacgacttccttggcgtctacagcatgccggcggggacaaaagtgttcgaggtgcctgagatgtctccagtcacgtgctgtgacgtctcttccaacaaccgcctcgttgtcacaggctccggggagcacgcctccgtgtaccagatcacctactgaggggcctcgctgctgtcatcccactccggctcctcttttcatccccccccttccccccccccaacaagggggacatggtggagggaagcgggaaggctcttctgtggcatcgcacgatctagtctgtggtgtagactggtcgccatcacgtgtaataaagcacccgggaaaggc

SEQ ID NO: 32038 - DNA, 2039 bp, Homo sapiens
  source 1..2039: mol_type = unassigned DNA
attgatctgcttcgcggtccaggtggcggctgggtggggcctgggcgggacggggcggggacaaggcgggacgaggcggggcccgatgggtcaaatggcccccggtgggggaaggaggagtttcctcttggcctgaacttggctgacctccgcagcttccgcccgactctggctaaagtcttggaggctactgccttgaagatgacctctagggaccagcccagacccaagggccccccgaaaagcacttcgccttgtcctgggatctcgaactctgagagctctccgacgctgaattatcagggcattctaaatcggctcaagcagttccccaggttttctcctcattttgctgcggagttggagagcatttactactcgctgcacaagatccagcaggatgtggcagaacatcacaagcagataggaaacgtcttacagattgtggagagctgcagccaactccagggtttccagtctgaggaggtctcacctgctgaaccagccagccctgggacgccccagcaggtgaaggacaagaccctgcaggagtcgagctttgaggacatcatggccaccaggtcctccgactggctccggcggcctttgggggaggacaatcagccggagacccagctgttctgggacaaggagccttggttttggcacgacactctgaccgagcaactctggcggatttttgccggcgtccacgatgagaaggcaaagcccagagacagacacttttccattttccaggggcaggaaagcaaggcaccaggatcctgtgacccaggaacagacccatgtcctgaagatgcctccacccccaggccacctgaggcctcctccagtccccctgagggttcccaagacaggaacacaagttggggtgtggtccaggagcctcctggaagagcctctcggtttctacagtccatatcctgggaccctgaggactttgaagatgcatggaagaggccagatgccttgcccgggcagtcaaagagactcgccgtcccgtgcaaactggaaaagatgcggatcttggcacacggggagctcgtgctcgccacggccatcagcagcttcacgcggcacgtgttcacctgtggcagaagaggcatcaaggtgtggagcctgactggacaggtggctgaggacaggttccctgagagccacctgcctatacagacccctggggccttcctgcgcacctgcctgctgtcctcaaacagcaggagcctgctcaccggtggctacaacctggccagcgtgagcgtgtgggacctggcggcgccctccctgcatgtgaaggagcagttgccctgtgcaggtctcaactgccaggccctggatgccaacctggatgccaacctggccttcgccagcttcaccagtggtgtggtcaggatctgggacctgcgggatcagagtgtggtcagggacctcaagggttatcctgatggagtcaagagtatcgtggtcaagggctacaacatctggactgggggtccggatgcctgtctgcggtgctgggaccagaggaccatcatgaaacctctggagtaccaattcaagtctcagataatgagcctgtcccacagcccccaggaggactgggtgctgctgggcatggccaatggccagcagtggctgcaaagcaccagcgggagccagcggcacatggtggggcaaaaagacagcgtcatcctgagcgtcaagttctccccctttggccagtggtgggcaagcgttggaatggacgacttccttggcgtctacagcatgccggcggggacaaaagtgttcgaggtgcctgagatgtctccagtcacgtgctgtgacgtctcttccaacaaccgcctcgttgtcacaggctccggggagcacgcctccgtgtaccagatcacctactgaggggcctcgctgctgtcatcccactccggctcctcttttcatccccccccttccccccccccaacaagggggacatggtggagggaagcgggaaggctcttctgtggcatcgcacgatc

SEQ ID NO: 32039 - DNA, 1883 bp, Homo sapiens
  source 1..1883: mol_type = unassigned DNA
gaacttggctgacctccgcagcttccgcccggtgagggacccttgtcctgggatctcgaactctgagagctctccgacgctgaattatcagggcattctaaatcggctcaagcagttccccaggttttctcctcattttgctgcggagttggagagcatttactactcgctgcacaagatccagcaggatgtggcagaacatcacaagcagataggaaacgtcttacagattgtggagagctgcagccaactccagggtttccagtctgaggaggtctcacctgctgaaccagccagccctgggacgccccagcaggtgaaggacaagaccctgcaggagtcgagctttgaggacatcatggccaccaggtcctccgactggctccggcggcctttgggggaggacaatcagccggagacccagctgttctgggacaaggagccttggttttggcacgacactctgaccgagcaactctggcggatttttgccggcgtccacgatgagaaggcaaagcccagagacagacagcaggcaccaggcctggggcaggaaagcaaggcaccaggatcctgtgacccaggaacagacccatgtcctgaagatgcctccacccccaggccacctgaggcctcctccagtccccctgagggttcccaagacaggaacacaagttggggtgtggtccaggagcctcctggaagagcctctcggtttctacagtccatatcctgggaccctgaggactttgaagatgcatggaagaggccagatgccttgcccgggcagtcaaagagactcgccgtcccgtgcaaactggaaaagatgcggatcttggcacacggggagctcgtgctcgccacggccatcagcagcttcacgcggcacgtgttcacctgtggcagaagaggcatcaaggtgtggagcctgactggacaggtggctgaggacaggttccctgagagccacctgcctatacagacccctggggccttcctgcgcacctgcctgctgtcctcaaacagcaggagcctgctcaccggtggctacaacctggccagcgtgagcgtgtgggacctggcggcgccctccctgcatgtgaaggagcagttgccctgtgcaggtctcaactgccaggccctggatgccaacctggatgccaacctggccttcgccagcttcaccagtggtgtggtcaggatctgggacctgcgggatcagagtgtggtcagggacctcaagggttatcctgatggagtcaagagtatcgtggtcaagggctacaacatctggactgggggtccggatgcctgtctgcggtgctgggaccagaggaccatcatgaaacctctggagtaccaattcaagtctcagataatgagcctgtcccacagcccccaggaggactgggtgctgctgggcatggccaatggccagcagtggctgcaaagcaccagcgggagccagcggcacatggtggggcaaaaagacagcgtcatcctgagcgtcaagttctccccctttggccagtggtgggcaagcgttggaatggacgacttccttggcgtctacagcatgccggcggggacaaaagtgttcgaggtgcctgagatgtctccagtcacgtgctgtgacgtctcttccaacaaccgcctcgttgtcacaggctccggggagcacgcctccgtgtaccagatcacctactgaggggcctcgctgctgtcatcccactccggctcctcttttcatccccccccttccccccccccaacaagggggacatggtggagggaagcgggaaggctcttctgtggcatcgcacgatctagtctgtggtgtagactggtcgccatcacgtgtaataaagcacccgggaaaggca

SEQ ID NO: 32040 - DNA, 2143 bp, Homo sapiens
  source 1..2143: mol_type = unassigned DNA
acagaagcgagtccgactgtgctcgctgctcagcgccgcacccggaagatgaggctcgccgtgggagccctgctggtctgcgccgtcctgggcaaacgaagcggatgctgtgacactggatgcaggtttggtgtatgatgcttacctggctcccaataacctgaagcctgtggtggcagagttctatgggtcaaaagaggatccacagactttctattatgctgttgctgtggtgaagaaggatagtggcttccagatgaaccagcttcgaggcaagaagtcctgccacacgggtctaggcaggtccgctgggtggaacatccccataggcttactttactgtgacttacctgagccacgtaaacctcttgagaaagcagtggccaatttcttctcgggcagctgtgccccttgtgcggatgggacggacttcccccagctgtgtcaactgtgtccagggtgtggctgctccacccttaaccaatacttcggctactcgggagccttcaagtgtctgaaggatggtgctggggatgtggcctttgtcaagcactcgactatatttgagaacttggcaaacaaggctgacagggaccagtatgagctgctttgcctggacaacacccggaagccggtagatgaatacaaggactgccacttggcccaggtcccttctcataccgtcgtggcccgaagtatgggcggcaaggaggacttgatctgggagcttctcaaccaggcccaggaacattttggcaaagacaaatcaaaagaattccaactattcagctctcctcatgggaaggacctgctgtttaaggactctgcccacgggtttttaaaagtcccccccaggatggatgccaagatgtacctgggctatgagtatgtcactgccatccggaatctacgggaaggcacatgcccagaagccccaacagatgaatgcaagcctgtgaagtggtgtgcgctgagccaccacgagaggctcaagtgtgatgagtggagtgttaacagtgtagggaaaatagagtgtgtatcagcagagaccaccgaagactgcatcgccaagatcatgaatggagaagctgatgccatgagcttggatggagggtttgtctacatagcgggcaagtgtggtctggtgcctgtcttggcagaaaactacaataagagcgataattgtgaggatacaccagaggcagggtattttgctatagcagtggtgaagaaatcagcttctgacctcacctgggacaatctgaaaggcaagaagtcctgccatacggcagttggcagaaccgctggctggaacatccccatgggcctgctctacaataagatcaaccactgcagatttgatgaatttttcagtgaaggttgtgcccctgggtctaagaaagactccagtctctgtaagctgtgtatgggctcaggcctaaacctgtgtgaacccaacaacaaagagggatactacggctacacaggcgctttcaggtgtctggttgagaagggagatgtggcctttgtgaaacaccagactgtcccacagaacactgggggaaaaaaccctgatccatgggctaagaatctgaatgaaaaagactatgagttgctgtgccttgatggtaccaggaaacctgtggaggagtatgcgaactgccacctggccagagccccgaatcacgctgtggtcacacggaaagataaggaagcttgcgtccacaagatattacgtcaacagcagcacctatttggaagcaacgtaactgactgctcgggcaacttttgtttgttccggtcggaaaccaaggaccttctgttcagagatgacacagtatgtttggccaaacttcatgacagaaacacatatgaaaaatacttaggagaagaatatgtcaaggctgttggtaacctgagaaaatgctccacctcatcactcctggaagcctgcactttccgtagaccttaaaatctcagaggtagggctgccaccaaggtgaagatgggaacgcagatgatccatgagtttgccctggtttcactggcccaagtggtttgtgctaaccacgtctgtcttcacagctctgtgttgccatgtgtgctgaacaaaaaataaaaattattattgattttatatttc

SEQ ID NO: 32041 - DNA, 2968 bp, Homo sapiens
  source 1..2968: mol_type = unassigned DNA
gggctttgcctgtcattctgcagttctagtgtggggtctgggcgcagttcttttccctctccagcctcggagtcttcctctgtggactgcgcagataggactggtggcacggaccagctctgcagccctggagtcaggagcagagccccccggctcccagcccgccgtagccgctcctggcaccgagcgagccgcgatgacaatggctgcattgtgcttcatgtcccttcccatcaacatttctgtgctggactccttccactcgcgggtcgtctccagagctcagaaaatgaggtgatcagtgggacgagtaaggaaggggggttgggagaggggcgattgggcaacccggctgcacaaacacgggaggtcaaagattgcgcccagcccgcccaggccgggaatggaataaagggacgcggggcgccggaggctgcacagaagcgagtccgactgtgctcgctgctcagcgccgcacccggaagatgaggctcgccgtgggagccctgctggtctgcgccgtcctggggctgtgtctggctgtccctgataaaactgtgagatggtgtgcagtgtcggagcatgaggccactaagtgccagagtttccgcgaccatatgaaaagcgtcattccatccgatggtcccagtgttgcttgtgtgaagaaagcctcctaccttgattgcatcagggccattgcggcaaacgaagcggatgctgtgacactggatgcaggtttggtgtatgatgcttacctggctcccaataacctgaagcctgtggtggcagagttctatgggtcaaaagaggatccacagactttctattatgctgttgctgtggtgaagaaggatagtggcttccagatgaaccagcttcgaggcaagaagtcctgccacacgggtctaggcaggtccgctgggtggaacatccccataggcttactttactgtgacttacctgagccacgtaaacctcttgagaaagcagtggccaatttcttctcgggcagctgtgccccttgtgcggatgggacggacttcccccagctgtgtcaactgtgtccagggtgtggctgctccacccttaaccaatacttcggctactcgggagccttcaagtgtctgaaggatggtgctggggatgtggcctttgtcaagcactcgactatatttgagaacttggcaaacaaggctgacagggaccagtatgagctgctttgcctggacaacacccggaagccggtagatgaatacaaggactgccacttggcccaggtcccttctcataccgtcgtggcccgaagtatgggcggcaaggaggacttgatctgggagcttctcaaccaggcccaggaacattttggcaaagacaaatcaaaagaattccaactattcagctctcctcatgggaaggacctgctgtttaaggactctgcccacgggtttttaaaagtcccccccaggatggatgccaagatgtacctgggctatgagtatgtcactgccatccggaatctacgggaaggcacatgcccagaagccccaacagatgaatgcaagcctgtgaagtggtgtgcgctgagccaccacgagaggctcaagtgtgatgagtggagtgttaacagtgtagggaaaatagagtgtgtatcagcagagaccaccgaagactgcatcgccaagatcatgaatggagaagctgatgccatgagcttggatggagggtttgtctacatagcgggcaagtgtggtctggtgcctgtcttggcagaaaactacaataagagcgataattgtgaggatacaccagaggcagggtattttgctatagcagtggtgaagaaatcagcttctgacctcacctgggacaatctgaaaggcaagaagtcctgccatacggcagttggcagaaccgctggctggaacatccccatgggcctgctctacaataagatcaaccactgcagatttgatgaatttttcagtgaaggttgtgcccctgggtctaagaaagactccagtctctgtaagctgtgtatgggctcaggcctaaacctgtgtgaacccaacaacaaagagggatactacggctacacaggcgctttcaggtgtctggttgagaagggagatgtggcctttgtgaaacaccagactgtcccacagaacactgggggaaaaaaccctgatccatgggctaagaatctgaatgaaaaagactatgagttgctgtgccttgatggtaccaggaaacctgtggaggagtatgcgaactgccacctggccagagccccgaatcacgctgtggtcacacggaaagataaggaagcttgcgtccacaagatattacgtcaacagcagcacctatttggaagcaacgtaactgactgctcgggcaacttttgtttgttccggtcggaaaccaaggaccttctgttcagagatgacacagtatgtttggccaaacttcatgacagaaacacatatgaaaaatacttaggagaagaatatgtcaaggctgttggtaacctgagaaaatgctccacctcatcactcctggaagcctgcactttccgtagaccttaaaatctcagaggtagggctgccaccaaggtgaagatgggaacgcagatgatccatgagtttgccctggtttcactggcccaagtggtttgtgctaaccacgtctgtcttcacagctctgtgttgccatgtgtgctgaacaaaaaataaaaattattattgattttatatttcaaaaactccattctttcctaaatattttcaacaaaggatttctttatgcattctgcctaaatacctatgcaactgagcccttccttctcagctcaagattcgtctggtctttccctacagctttgtgtgtgccatggccacatctcctgggtacagttcaaggagacatcttttctaaaagggtctgcgtgatcattaaaatataatcaaatgta

SEQ ID NO: 32042 - DNA, 5111 bp, Homo sapiens
  source 1..5111: mol_type = unassigned DNA
ctcgcgagcgtacgtgcctcaggaagtgacgcacagcccccctgggggccgggggcggggccaggctataaaccgccggttaggggccgccatcccctcagagcgtcgggatatcgggtggcggctcgggacggaggacgcgctagtgttcttctgtgtggcagttcagaatgatggatcaagctagatcagcattctctaacttgtttggtggagaaccattgtcatatacccggttcagcctggctcggcaagtagatggcgataacagtcatgtggagatgaaacttgctgtagatgaagaagaaaatgctgacaataacacaaaggccaatgtcacaaaaccaaaaaggtgtagtggaagtatctgctatgggactattgctgtgatcgtctttttcttgattggatttatgattggctacttgggctattgtaaaggggtagaaccaaaaactgagtgtgagagactggcaggaaccgagtctccagtgagggaggagccaggagaggacttccctgcagcacgtcgcttatattgggatgacctgaagagaaagttgtcggagaaactggacagcacagacttcaccggcaccatcaagctgctgaatgaaaattcatatgtccctcgtgaggctggatctcaaaaagatgaaaatcttgcgttgtatgttgaaaatcaatttcgtgaatttaaactcagcaaagtctggcgtgatcaacattttgttaagattcaggtcaaagacagcgctcaaaactcggtgatcatagttgataagaacggtagacttgtttacctggtggagaatcctgggggttatgtggcgtatagtaaggctgcaacagttactggtaaactggtccatgctaattttggtactaaaaaagattttgaggatttatacactcctgtgaatggatctatagtgattgtcagagcagggaaaatcacctttgcagaaaaggttgcaaatgctgaaagcttaaatgcaattggtgtgttgatatacatggaccagactaaatttcccattgttaacgcagaactttcattctttggacatgctcatctggggacaggtgacccttacacacctggattcccttccttcaatcacactcagtttccaccatctcggtcatcaggattgcctaatatacctgtccagacaatctccagagctgctgcagaaaagctgtttgggaatatggaaggagactgtccctctgactggaaaacagactctacatgtaggatggtaacctcagaaagcaagaatgtgaagctcactgtgagcaatgtgctgaaagagataaaaattcttaacatctttggagttattaaaggctttgtagaaccagatcactatgttgtagttggggcccagagagatgcatggggccctggagctgcaaaatccggtgtaggcacagctctcctattgaaacttgcccagatgttctcagatatggtcttaaaagatgggtttcagcccagcagaagcattatctttgccagttggagtgctggagactttggatcggttggtgccactgaatggctagagggatacctttcgtccctgcatttaaaggctttcacttatattaatctggataaagcggttcttggtaccagcaacttcaaggtttctgccagcccactgttgtatacgcttattgagaaaacaatgcaaaatgtgaagcatccggttactgggcaatttctatatcaggacagcaactgggccagcaaagttgagaaactcactttagacaatgctgctttccctttccttgcatattctggaatcccagcagtttctttctgtttttgcgaggacacagattatccttatttgggtaccaccatggacacctataaggaactgattgagaggattcctgagttgaacaaagtggcacgagcagctgcagaggtcgctggtcagttcgtgattaaactaacccatgatgttgaattgaacctggactatgagaggtacaacagccaactgctttcatttgtgagggatctgaaccaatacagagcagacataaaggaaatgggcctgagtttacagtggctgtattctgctcgtggagacttcttccgtgctacttccagactaacaacagatttcgggaatgctgagaaaacagacagatttgtcatgaagaaactcaatgatcgtgtcatgagagtggagtatcacttcctctctccctacgtatctccaaaagagtctcctttccgacatgtcttctggggctccggctctcacacgctgccagctttactggagaacttgaaactgcgtaaacaaaataacggtgcttttaatgaaacgctgttcagaaaccagttggctctagctacttggactattcagggagctgcaaatgccctctctggtgacgtttgggacattgacaatgagttttaaatgtgatacccatagcttccatgagaacagcagggtagtctggtttctagacttgtgctgatcgtgctaaattttcagtagggctacaaaacctgatgttaaaattccatcccatcatcttggtactactagatgtctttaggcagcagcttttaatacagggtagataacctgtacttcaagttaaagtgaataaccacttaaaaaatgtccatgatggaatattcccctatctctagaattttaagtgctttgtaatgggaactgcctctttcctgttgttgttaatgaaaatgtcagaaaccagttatgtgaatgatctctctgaatcctaagggctggtctctgctgaaggttgtaagtggtcgcttactttgagtgatcctccaacttcatttgatgctaaataggagataccaggttgaaagaccttctccaaatgagatctaagcctttccataaggaatgtagctggtttcctcattcctgaaagaaacagttaactttcagaagagatgggcttgttttcttgccaatgaggtctgaaatggaggtccttctgctggataaaatgaggttcaactgttgattgcaggaataaggccttaatatgttaacctcagtgtcatttatgaaaagaggggaccagaagccaaagacttagtatattttcttttcctctgtcccttcccccataagcctccatttagttctttgttatttttgtttcttccaaagcacattgaaagagaaccagtttcaggtgtttagttgcagactcagtttgtcagactttaaagaataatatgctgccaaattttggccaaagtgttaatcttaggggagagctttctgtccttttggcactgagatatttattgtttatttatcagtgacagagttcactataaatggtgtttttttaatagaatataattatcggaagcagtgccttccataattatgacagttatactgtcggttttttttaaataaaagcagcatctgctaataaaacccaacagatactggaagttttgcatttatggtcaacacttaagggttttagaaaacagccgtcagccaaatgtaattgaataaagttgaagctaagatttagagatgaattaaatttaattaggggttgctaagaagcgagcactgaccagataagaatgctggttttcctaaatgcagtgaattgtgaccaagttataaatcaatgtcacttaaaggctgtggtagtactcctgcaaaattttatagctcagtttatccaaggtgtaactctaattcccattttgcaaaatttccagtacctttgtcacaatcctaacacattatcgggagcagtgtcttccataatgtataaagaacaaggtagtttttacctaccacagtgtctgtatcggagacagtgatctccatatgttacactaagggtgtaagtaattatcgggaacagtgtttcccataattttcttcatgcaatgacatcttcaaagcttgaagatcgttagtatctaacatgtatcccaactcctataattccctatcttttagttttagttgcagaaacattttgtggtcattaagcattgggtgggtaaattcaaccactgtaaaatgaaattactacaaaatttgaaatttagcttgggtttttgttacctttatggtttctccaggtcctctacttaatgagatagtagcatacatttataatgtttgctattgacaagtcattttaactttatcacattatttgcatgttacctcctataaacttagtgcggacaagttttaatccagaattgaccttttgacttaaagcagagggactttgtatagaaggtttgggggctgtggggaaggagagtcccctgaaggtctgacacgtctgcctacccattcgtggtgatcaattaaatgtaggtatgaataagttcgaagctccgtgagtgaaccatcattataaacgtgatgatcagctgtttgtcatagggcagttggaaacggcctcctagggaaaagttcatagggtctcttcaggttcttagtgtcacttacctagatttacagcctcacttgaatgtgtcactactcacagtctctttaatcttcagttttatctttaatctcctcttttatcttggactgacatttagcgtagctaagtgaaaaggtcatagctgagattcctggttcgggtgttacgcacacgtacttaaatgaaagcatgtggcatgttcatcgtataacacaatatgaatacagggcatgcattttgcagcagtgagtctcttcagaaaacccttttctacagttagggttgagttacttcctatcaagccagtacgtgctaacaggctcaatattcctgaatgaaatatcagactagtgacaagctcctggtcttgagatgtcttctcgttaaggagatgggccttttggaggtaaaggataaaatgaatgagttctgtcatgattcactattctagaacttgcatgacctttactgtgttagctctttgaatgttcttgaaattttagactttctttgtaaacaaatgatatgtccttatcattgtataaaagctgttatgtgcaacagtgtggagattccttgtctgatttaataaaatacttaaacactga

SEQ ID NO: 32043 - DNA, 5032 bp, Homo sapiens
  source 1..5032: mol_type = unassigned DNA
agagcgtcgggatatcgggtggcggctcgggacggaggacgcgctagtgtgagtgcgggcttctagaactacaccgaccctcgtgtcctcccttcatcctgcggggctggctggagcggccgctccggtgctgtccagcagccatagggagccgcacggggagcgggaaagcggtcgcggccccaggcggggcggccgggatggagcggggccgcgagcctgtggggaaggggctgtggcggcgcctcgagcggctgcaggttcttctgtgtggcagttcagaatgatggatcaagctagatcagcattctctaacttgtttggtggagaaccattgtcatatacccggttcagcctggctcggcaagtagatggcgataacagtcatgtggagatgaaacttgctgtagatgaagaagaaaatgctgacaataacacaaaggccaatgtcacaaaaccaaaaaggtgtagtggaagtatctgctatgggactattgctgtgatcgtctttttcttgattggatttatgattggctacttgggctattgtaaaggggtagaaccaaaaactgagtgtgagagactggcaggaaccgagtctccagtgagggaggagccaggagaggacttccctgcagcacgtcgcttatattgggatgacctgaagagaaagttgtcggagaaactggacagcacagacttcaccggcaccatcaagctgctgaatgaaaattcatatgtccctcgtgaggctggatctcaaaaagatgaaaatcttgcgttgtatgttgaaaatcaatttcgtgaatttaaactcagcaaagtctggcgtgatcaacattttgttaagattcaggtcaaagacagcgctcaaaactcggtgatcatagttgataagaacggtagacttgtttacctggtggagaatcctgggggttatgtggcgtatagtaaggctgcaacagttactggtaaactggtccatgctaattttggtactaaaaaagattttgaggatttatacactcctgtgaatggatctatagtgattgtcagagcagggaaaatcacctttgcagaaaaggttgcaaatgctgaaagcttaaatgcaattggtgtgttgatatacatggaccagactaaatttcccattgttaacgcagaactttcattctttggacatgctcatctggggacaggtgacccttacacacctggattcccttccttcaatcacactcagtttccaccatctcggtcatcaggattgcctaatatacctgtccagacaatctccagagctgctgcagaaaagctgtttgggaatatggaaggagactgtccctctgactggaaaacagactctacatgtaggatggtaacctcagaaagcaagaatgtgaagctcactgtgagcaatgtgctgaaagagataaaaattcttaacatctttggagttattaaaggctttgtagaaccagatcactatgttgtagttggggcccagagagatgcatggggccctggagctgcaaaatccggtgtaggcacagctctcctattgaaacttgcccagatgttctcagatatggtcttaaaagatgggtttcagcccagcagaagcattatctttgccagttggagtgctggagactttggatcggttggtgccactgaatggctagagggatacctttcgtccctgcatttaaaggctttcacttatattaatctggataaagcggttcttggtaccagcaacttcaaggtttctgccagcccactgttgtatacgcttattgagaaaacaatgcaaaatgtgaagcatccggttactgggcaatttctatatcaggacagcaactgggccagcaaagttgagaaactcactttagacaatgctgctttccctttccttgcatattctggaatcccagcagtttctttctgtttttgcgaggacacagattatccttatttgggtaccaccatggacacctataaggaactgattgagaggattcctgagttgaacaaagtggcacgagcagctgcagaggtcgctggtcagttcgtgattaaactaacccatgatgttgaattgaacctggactatgagaggtacaacagccaactgctttcatttgtgagggatctgaaccaatacagagcagacataaaggaaatgggcctgagtttacagtggctgtattctgctcgtggagacttcttccgtgctacttccagactaacaacagatttcgggaatgctgagaaaacagacagatttgtcatgaagaaactcaatgatcgtgtcatgagagtggagtatcacttcctctctccctacgtatctccaaaagagtctcctttccgacatgtcttctggggctccggctctcacacgctgccagctttactggagaacttgaaactgcgtaaacaaaataacggtgcttttaatgaaacgctgttcagaaaccagttggctctagctacttggactattcagggagctgcaaatgccctctctggtgacgtttgggacattgacaatgagttttaaatgtgatacccatagcttccatgagaacagcagggtagtctggtttctagacttgtgctgatcgtgctaaattttcagtagggctacaaaacctgatgttaaaattccatcccatcatcttggtactactagatgtctttaggcagcagcttttaatacagggtagataacctgtacttcaagttaaagtgaataaccacttaaaaaatgtccatgatggaatattcccctatctctagaattttaagtgctttgtaatgggaactgcctctttcctgttgttgttaatgaaaatgtcagaaaccagttatgtgaatgatctctctgaatcctaagggctggtctctgctgaaggttgtaagtggtcgcttactttgagtgatcctccaacttcatttgatgctaaataggagataccaggttgaaagaccttctccaaatgagatctaagcctttccataaggaatgtagctggtttcctcattcctgaaagaaacagttaactttcagaagagatgggcttgttttcttgccaatgaggtctgaaatggaggtccttctgctggataaaatgaggttcaactgttgattgcaggaataaggccttaatatgttaacctcagtgtcatttatgaaaagaggggaccagaagccaaagacttagtatattttcttttcctctgtcccttcccccataagcctccatttagttctttgttatttttgtttcttccaaagcacattgaaagagaaccagtttcaggtgtttagttgcagactcagtttgtcagactttaaagaataatatgctgccaaattttggccaaagtgttaatcttaggggagagctttctgtccttttggcactgagatatttattgtttatttatcagtgacagagttcactataaatggtgtttttttaatagaatataattatcggaagcagtgccttccataattatgacagttatactgtcggttttttttaaataaaagcagcatctgctaataaaacccaacagatactggaagttttgcatttatggtcaacacttaagggttttagaaaacagccgtcagccaaatgtaattgaataaagttgaagctaagatttagagatgaattaaatttaattaggggttgctaagaagcgagcactgaccagataagaatgctggttttcctaaatgcagtgaattgtgaccaagttataaatcaatgtcacttaaaggctgtggtagtactcctgcaaaattttatagctcagtttatccaaggtgtaactctaattcccattttgcaaaatttccagtacctttgtcacaatcctaacacattatcgggagcagtgtcttccataatgtataaagaacaaggtagtttttacctaccacagtgtctgtatcggagacagtgatctccatatgttacactaagggtgtaagtaattatcgggaacagtgtttcccataattttcttcatgcaatgacatcttcaaagcttgaagatcgttagtatctaacatgtatcccaactcctataattccctatcttttagttttagttgcagaaacattttgtggtcattaagcattgggtgggtaaattcaaccactgtaaaatgaaattactacaaaatttgaaatttagcttgggtttttgttacctttatggtttctccaggtcctctacttaatgagatagtagcatacatttataatgtttgctattgacaagtcattttaactttatcacattatttgcatgttacctcctataaacttagtgcggacaagttttaatccagaattgaccttttgacttaaagcagagggactttgtatagaaggtttgggggctgtggggaaggagagtcccctgaaggtctgacacgtctgcctacccattcgtggtgatcaattaaatgtaggtatgaataagttcgaagctccgtgagtgaaccatcattataaacgtgatgatcagctgtttgtcatagggcagttggaaacggcctcctagggaaaagttcatagggtctcttcaggttcttagtgtcacttacctagatttacagcctcacttgaatgtgtcactactcacagtctctttaatcttcagttttatctttaatctcctcttttatcttggactgacatttagcgtagctaagtgaaaaggtcatagctgagattcctggttcgggtgttacgcacacgtacttaaatgaaagcatgtggcatgttcatcgtataacacaatatgaatacagggcatgcattttgcagcagtgagtctcttcagaaaacccttttctacagttagggttgagttacttcctatcaagccagtacgtgctaacaggctcaatattcctgaatgaaatatcagactagtgacaagctcctggtcttgagatgtcttctcgttaaggagatgggccttttggaggtaaaggata

SEQ ID NO: 32044 - DNA, 2137 bp, Homo sapiens
  source 1..2137: mol_type = unassigned DNA
cagagcgtcgggatatcgggtggcggctcgggacggaggacgcgctagtgttcttctgtgtggcagttcagaatgatggatcaagctagatcagcattctctaacttggctgctgaatgaaaattcatatgtccctcgtgaggctggatctcaaaaagatgaaaatcttgcgttgtatgttgaaaatcaatttcgtgaatttaaactcagcaaagtctggcgtgatcaacattttgttaagattcaggtcaaagacagcgctcaaaactcggtgatcatagttgataagaacggtagacttgtttacctggtggagaatcctgggggttatgtggcgtatagtaaggctgcaacagttactggtaaactggtccatgctaattttggtactaaaaaagattttgaggatttatacactcctgtgaatggatctatagtgattgtcagagcagggaaaatcacctttgcagaaaaggttgcaaatgctgaaagcttaaatgcaattggtgtgttgatatacatggaccagactaaatttcccattgttaacgcagaactttcattctttggacatgctcatctggggacaggtgacccttacacacctggattcccttccttcaatcacactcagtttccaccatctcggtcatcaggattgcctaatatacctgtccagacaatctccagagctgctgcagaaaagctgtttgggaatatggaaggagactgtccctctgactggaaaacagactctacatgtaggatggtaacctcagaaagcaagaatgtgaagctcactgtgagcaatgtgctgaaagagataaaaattcttaacatctttggagttattaaaggctttgtagaaccagatcactatgttgtagttggggcccagagagatgcatggggccctggagctgcaaaatccggtgtaggcacagctctcctattgaaacttgcccagatgttctcagatatggtcttaaaagatgggtttcagcccagcagaagcattatctttgccagttggagtgctggagactttggatcggttggtgccactgaatggctagagggatacctttcgtccctgcatttaaaggctttcacttatattaatctggataaagcggttcttggtaccagcaacttcaaggtttctgccagcccactgttgtatacgcttattgagaaaacaatgcaaaatgtgaagcatccggttactgggcaatttctatatcaggacagcaactgggccagcaaagttgagaaactcactttagacaatgctgctttccctttccttgcatattctggaatcccagcagtttctttctgtttttgcgaggacacagattatccttatttgggtaccaccatggacacctataaggaactgattgagaggattcctgagttgaacaaagtggcacgagcagctgcagaggtcgctggtcagttcgtgattaaactaacccatgatgttgaattgaacctggactatgagaggtacaacagccaactgctttcatttgtgagggatctgaaccaatacagagcagacataaaggaaatgggcctgagtttacagtggctgtattctgctcgtggagacttcttccgtgctacttccagactaacaacagatttcgggaatgctgagaaaacagacagatttgtcatgaagaaactcaatgatcgtgtcatgagagtggagtatcacttcctctctccctacgtatctccaaaagagtctcctttccgacatgtcttctggggctccggctctcacacgctgccagctttactggagaacttgaaactgcgtaaacaaaataacggtgcttttaatgaaacgctgttcagaaaccagttggctctagctacttggactattcagggagctgcaaatgccctctctggtgacgtttgggacattgacaatgagttttaaatgtgatacccatagcttccatgagaacagcagggtagtctggtttctagacttgtgctgatcgtgctaaattttcagtagggctacaaaacctgatgttaaaattccatcccatcatcttggtactactagatgtctttaggcagcagcttttaatacagggtagataacctgtacttc

SEQ ID NO: 32045 - DNA, 4809 bp, Homo sapiens
  source 1..4809: mol_type = unassigned DNA
agagcgtcgggatatcgggtggcggctcgggacggaggacgcgctagtgttcttctgtgtggcagttcagaatgatggatcaagctagatcagcattctctaacttggatttatgattggctacttgggctattgtaaaggggtagaaccaaaaactgagtgtgagagactggcaggaaccgagtctccagtgagggaggagccaggagaggacttccctgcagcacgtcgcttatattgggatgacctgaagagaaagttgtcggagaaactggacagcacagacttcaccggcaccatcaagctgctgaatgaaaattcatatgtccctcgtgaggctggatctcaaaaagatgaaaatcttgcgttgtatgttgaaaatcaatttcgtgaatttaaactcagcaaagtctggcgtgatcaacattttgttaagattcaggtcaaagacagcgctcaaaactcggtgatcatagttgataagaacggtagacttgtttacctggtggagaatcctgggggttatgtggcgtatagtaaggctgcaacagttactggtaaactggtccatgctaattttggtactaaaaaagattttgaggatttatacactcctgtgaatggatctatagtgattgtcagagcagggaaaatcacctttgcagaaaaggttgcaaatgctgaaagcttaaatgcaattggtgtgttgatatacatggaccagactaaatttcccattgttaacgcagaactttcattctttggacatgctcatctggggacaggtgacccttacacacctggattcccttccttcaatcacactcagtttccaccatctcggtcatcaggattgcctaatatacctgtccagacaatctccagagctgctgcagaaaagctgtttgggaatatggaaggagactgtccctctgactggaaaacagactctacatgtaggatggtaacctcagaaagcaagaatgtgaagctcactgtgagcaatgtgctgaaagagataaaaattcttaacatctttggagttattaaaggctttgtagaaccagatcactatgttgtagttggggcccagagagatgcatggggccctggagctgcaaaatccggtgtaggcacagctctcctattgaaacttgcccagatgttctcagatatggtcttaaaagatgggtttcagcccagcagaagcattatctttgccagttggagtgctggagactttggatcggttggtgccactgaatggctagagggatacctttcgtccctgcatttaaaggctttcacttatattaatctggataaagcggttcttggtaccagcaacttcaaggtttctgccagcccactgttgtatacgcttattgagaaaacaatgcaaaatgtgaagcatccggttactgggcaatttctatatcaggacagcaactgggccagcaaagttgagaaactcactttagacaatgctgctttccctttccttgcatattctggaatcccagcagtttctttctgtttttgcgaggacacagattatccttatttgggtaccaccatggacacctataaggaactgattgagaggattcctgagttgaacaaagtggcacgagcagctgcagaggtcgctggtcagttcgtgattaaactaacccatgatgttgaattgaacctggactatgagaggtacaacagccaactgctttcatttgtgagggatctgaaccaatacagagcagacataaaggaaatgggcctgagtttacagtggctgtattctgctcgtggagacttcttccgtgctacttccagactaacaacagatttcgggaatgctgagaaaacagacagatttgtcatgaagaaactcaatgatcgtgtcatgagagtggagtatcacttcctctctccctacgtatctccaaaagagtctcctttccgacatgtcttctggggctccggctctcacacgctgccagctttactggagaacttgaaactgcgtaaacaaaataacggtgcttttaatgaaacgctgttcagaaaccagttggctctagctacttggactattcagggagctgcaaatgccctctctggtgacgtttgggacattgacaatgagttttaaatgtgatacccatagcttccatgagaacagcagggtagtctggtttctagacttgtgctgatcgtgctaaattttcagtagggctacaaaacctgatgttaaaattccatcccatcatcttggtactactagatgtctttaggcagcagcttttaatacagggtagataacctgtacttcaagttaaagtgaataaccacttaaaaaatgtccatgatggaatattcccctatctctagaattttaagtgctttgtaatgggaactgcctctttcctgttgttgttaatgaaaatgtcagaaaccagttatgtgaatgatctctctgaatcctaagggctggtctctgctgaaggttgtaagtggtcgcttactttgagtgatcctccaacttcatttgatgctaaataggagataccaggttgaaagaccttctccaaatgagatctaagcctttccataaggaatgtagctggtttcctcattcctgaaagaaacagttaactttcagaagagatgggcttgttttcttgccaatgaggtctgaaatggaggtccttctgctggataaaatgaggttcaactgttgattgcaggaataaggccttaatatgttaacctcagtgtcatttatgaaaagaggggaccagaagccaaagacttagtatattttcttttcctctgtcccttcccccataagcctccatttagttctttgttatttttgtttcttccaaagcacattgaaagagaaccagtttcaggtgtttagttgcagactcagtttgtcagactttaaagaataatatgctgccaaattttggccaaagtgttaatcttaggggagagctttctgtccttttggcactgagatatttattgtttatttatcagtgacagagttcactataaatggtgtttttttaatagaatataattatcggaagcagtgccttccataattatgacagttatactgtcggttttttttaaataaaagcagcatctgctaataaaacccaacagatactggaagttttgcatttatggtcaacacttaagggttttagaaaacagccgtcagccaaatgtaattgaataaagttgaagctaagatttagagatgaattaaatttaattaggggttgctaagaagcgagcactgaccagataagaatgctggttttcctaaatgcagtgaattgtgaccaagttataaatcaatgtcacttaaaggctgtggtagtactcctgcaaaattttatagctcagtttatccaaggtgtaactctaattcccattttgcaaaatttccagtacctttgtcacaatcctaacacattatcgggagcagtgtcttccataatgtataaagaacaaggtagtttttacctaccacagtgtctgtatcggagacagtgatctccatatgttacactaagggtgtaagtaattatcgggaacagtgtttcccataattttcttcatgcaatgacatcttcaaagcttgaagatcgttagtatctaacatgtatcccaactcctataattccctatcttttagttttagttgcagaaacattttgtggtcattaagcattgggtgggtaaattcaaccactgtaaaatgaaattactacaaaatttgaaatttagcttgggtttttgttacctttatggtttctccaggtcctctacttaatgagatagtagcatacatttataatgtttgctattgacaagtcattttaactttatcacattatttgcatgttacctcctataaacttagtgcggacaagttttaatccagaattgaccttttgacttaaagcagagggactttgtatagaaggtttgggggctgtggggaaggagagtcccctgaaggtctgacacgtctgcctacccattcgtggtgatcaattaaatgtaggtatgaataagttcgaagctccgtgagtgaaccatcattataaacgtgatgatcagctgtttgtcatagggcagttggaaacggcctcctagggaaaagttcatagggtctcttcaggttcttagtgtcacttacctagatttacagcctcacttgaatgtgtcactactcacagtctctttaatcttcagttttatctttaatctcctcttttatcttggactgacatttagcgtagctaagtgaaaaggtcatagctgagattcctggttcgggtgttacgcacacgtacttaaatgaaagcatgtggcatgttcatcgtataacacaatatgaatacagggcatgcattttgcagcagtgagtctcttcagaaaacccttttctacagttagggttgagttacttcctatcaagccagtacgtgctaacaggctcaatattcctgaatgaaatatcagactagtgacaagctcctggtcttgagatgtcttctcgttaaggagatgggccttttggaggtaaaggataaaatgaatgagttctgtcatgattcactattctagaacttgcatgacctttactgtgttagctctttgaatgttcttgaaattttagactttctttgtaaacaaatgatatgtccttatcattgtataaaagctgttatgtgcaacagtgtggagattccttgtctgatttaataaaatacttaaacactg

SEQ ID NO: 32046 - DNA, 12590 bp, Homo sapiens
  source 1..12590: mol_type = unassigned DNA
cgcgccggggcctggtgctcggtcggcgggtgctgccgctttaagcgggggcgggactgcgcgcggccgagcggttgcgacgagggctcggctgggggtcgccggggtcgcgggccgggcctgcaggagccgggccgccgaggtcggggctggttgaactcatggacctgatacttttctcttgagaagcaaaccagcccaaaagaaaaatggcgtttgttgcaacacagggggccacggtggttgaccagaccactttgatgaaaaagtaccttcagtttgtggcagctctcacagatgtgaatacacctgatgaaacaaagttgaaaatgatgcaagaagttagtgaaaattttgagaatgtcacgtcatctcctcagtattctacattcctagaacatatcatccctcgattccttacatttctccaagatggagaagttcagtttcttcaggagaaaccagcacagcaactgcggaagctcgtacttgaaataattcatagaataccaaccaacgaacatcttcgtcctcacacaaaaaatgttttgtctgtgatgtttcgctttttagagacggaaaatgaagaaaatgttcttatttgtctaagaataattattgagctacacaaacagttcaggccaccgatcacacaagaaattcatcattttctggattttgtgaaacagatttacaaggagcttccaaaagtagtgaaccgctactttgagaaccctcaagtgatccccgagaacacagtgcctcccccagaaatggttggtatgataacaacgattgctgtgaaagtcaacccggagcgtgaggacagtgagactcgaacacattccatcattccgaggggatcactttctctgaaagtgttggcagaattgcccattattgttgttttaatgtatcagctctacaaactgaacatccacaatgttgttgctgagtttgtgcccttgatcatgaacaccattgccattcaggtgtctgcacaagcgaggcaacataagctttacaacaaggagttgtatgctgacttcattgctgctcagattaaaacattgtcatttttagcttacattatcaggatttaccaggagttggtgactaagtattctcagcagatggtgaaaggaatgctccagttactttcaaattgtccagcagagactgcacacctcagaaaggagcttctgattgctgccaaacacatcctcaccacagagctgagaaaccagttcattccttgcatggacaagctgtttgatgaatccatactaattggctcaggatatactgccagagagactctaaggcccctcgcctacagcacgctggccgacctcgtgcaccatgtccgccagcacctgcccctcagcgacctctccctcgccgtccagctcttcgccaagaacatcgacgatgagtccctgcccagcagcatccagaccatgtcctgcaagctcctgctgaacctggtggactgcatccgttccaagagcgagcaggagagtggcaatgggagagacgtcctgatgcggatgctggaggttttcgttctcaaattccacacaattgctcggtaccagctctctgccatttttaagaagtgtaagcctcagtcagaacttggagccgtggaagcagctctgcctggggtgcccactgcccctgcagctcctggccctgctccctccccagcccctgtccctgccccacctccacccccgcccccacccccacctgccacccctgtgaccccggcccccgtgcctcccttcgagaagcaaggagaaaaggacaaggaagacaagcagacattccaagtcacagactgtcgaagtttggtcaaaaccttggtgtgtggtgtcaagacaatcacgtggggcataacatcatgcaaagcacctggtgaagctcagttcattcccaacaagcagttacaacccaaagagacacagatttacatcaaacttgtgaaatatgcaatgcaagctttagatatttatcaggtccagatagcaggaaatggacagacatacatccgtgtggccaactgccagactgtgagaatgaaagaggagaaggaggtattggagcatttcgctggtgtgttcacaatgatgaaccccttaacgttcaaagaaatcttccaaactacggtcccttatatggtggagagaatctcaaaaaattatgctcttcagattgttgccaattccttcttggcaaatcctactacctctgctctgtttgctacgattctggtggaatatctccttgatcgcctgccagaaatgggctccaacgtggagctctccaacctgtacctcaagctgttcaagctggtctttggctctgtctccctctttgcagctgaaaatgaacaaatgctgaagcctcacttgcacaagattgtgaacagctctatggagctcgcgcagactgccaaggaaccctacaactacttcttgctgctacgggcgctgtttcgctctattggtggaggtagccacgatctcttgtatcaggagttcttgcctctccttccaaacctcctgcaagggctgaacatgcttcagagtggcctgcacaagcagcacatgaaggacctctttgtggagctgtgtctcaccgtccctgtgcggctgagctcgcttttgccgtacctgcccatgcttatggatcccttggtgtctgcactcaatgggtctcagacattggtcagccaaggcctcaggacgctggagctgtgtgtggacaacctgcagcccgacttcctctacgaccacatccagccggtgcgcgcagagctcatgcaggctctgtggcgcaccttacgcaaccctgctgacagcatctcccacgtggcctaccgtgtgctcggtaagtttggcggcagtaacaggaagatgctgaaggagtcgcagaagctgcactacgttgtgaccgaggttcagggccccagcatcactgtggagttttccgactgcaaagcttctctccagctccccatggagaaggccattgaaactgctctggactgcctgaaaagcgccaacactgagccctactaccggaggcaggcgtgggaagtgatcaaatgcttcctggtggccatgatgagcctggaggacaacaagcacgcactctaccagctcctggcacaccccaactttacagaaaagaccatccccaatgttatcatctcacatcgctacaaagcccaggacactccagcccggaagacttttgagcaggccctgacaggcgccttcatgtctgctgtcattaaggacctgcggcccagcgccctgccctttgtcgccagcttgatccgccactatacgatggtggcagtcgcccagcagtgtggccctttcttgctgccttgctaccaggtgggcagccagcccagcacagccatgtttcacagtgaagaaaatggctcgaaaggaatggatcctttggttctcattgatgcaattgctatttgtatggcatatgaagaaaaggagctttgcaaaatcggggaggtggccctagctgtgatatttgatgttgcaagtatcatcctgggctccaaggagagggcctgccagctgcccctgttttcttacatcgtggagcgcctgtgtgcatgttgttatgaacaggcgtggtatgcaaagctggggggtgtggtgtctattaagtttctcatggagcggctgcctctcacttgggttctccagaaccagcagacattcctgaaagcacttctctttgtcatgatggacttaactggagaggtttccaatggggcagtcgctatggcaaagaccacgctggagcagcttctgatgcggtgcgcaacgcctttaaaagacgaggagagagccgaagagatcgtggccgcccaggaaaagtctttccaccatgtgacacacgacttggttcgagaagtcacctctccaaactccactgtgaggaagcaggccatgcattcgctgcaggtgttggcccaggtcactgggaagagtgtcacggtgatcatggaaccccacaaagaggtcctgcaggatatggtcccccctaagaagcacctgctccgacaccagcctgccaacgcacagattggcctgatggaggggaacacgttctgtaccacgttgcagcccaggctcttcacaatggaccttaacgtggtggagcataaggtgttctacacagagctgttgaatttgtgtgaggctgaagattcagctttaacaaagctgccctgttataaaagccttccgtcactcgtacctttacgaattgcggcattaaatgcacttgctgcctgcaattaccttcctcagtccagggagaaaatcatcgctgcactcttcaaagccctgaattccaccaatagtgagctccaagaggccggagaagcctgtatgagaaagtttttagaaggtgctaccatagaagtcgatcaaatccacacacatatgcgacctttgctgatgatgctgggagattaccggagcttgacgctgaatgttgtgaatcgcctgacttcggtcacgaggctcttcccaaattccttcaatgataaattttgtgatcagatgatgcaacatctgcgcaagtggatggaagtggtggtgatcacccacaaagggggccagaggagcgacggaaacgaaatgaagatttgctcagcaattataaacctttttcatctgatcccggctgctcctcagacactggtgaagcctttgctagaggttgtcatgaaaacggagcgggcgatgctgatcgaggcggggagtccattccgagagcccctgatcaagttcctgactcgacatccctcgcagacagtggagctgttcatgatggaagccacactgaacgatccccagtggagcagaatgtttatgagttttttaaaacacaaagacgccagacctctgcgggatgtgctggctgccaaccccaacaggttcatcaccctgctgctgccggggggtgcccagacggctgtgcgccccggttcgcccagcaccagcaccatgcgcctggacctccagttccaggccatcaagatcataagcattatagtgaaaaacgatgactcctggctggccagccagcactctctggtgagccagttgcgacgtgtgtgggtgagtgagaacttccaagagaggcaccgcaaggagaacatggcagccaccaactggaaggagcccaagctgctggcctactgcctgctgaactactgcaaaaggaattacggagatatagaattgctgttccagctgctccgagcctttactggtcgttttctctgcaacatgacattcttaaaagagtatatggaggaagagattcccaaaaattacagcatcgctcagaaacgtgccctgttctttcgctttgtagacttcaacgaccccaacttcggagatgaattaaaagctaaagttctgcagcatatcttgaatcctgctttcttgtacagctttgagaagggggaaggagagcagctcttgggacctcccaatccagaaggagataacccagaaagcatcaccagtgtgtttattaccaaggtcctggaccccgagaagcaggcggacatgctggactcgctgcggatctacctgctgcagtacgccacgctgctggtggagcacgccccccaccacatccatgacaacaacaagaaccgcaacagcaagctgcgccgcctcatgaccttcgcctggccctgcctgctctccaaggcctgcgtggacccagcctgcaagtacagcggacacttgctcctggcgcacattatcgccaaattcgccatacacaagaagatcgtcctgcaggtttttcatagtctcctcaaggctcacgcaatggaagctcgagcgatcgtcagacaggcgatggccattctgaccccggcggtgccggccaggatggaggacgggcaccagatgctgacccactggacccggaagatcattgtggaggaggggcacaccgtcccgcagctggtccacattctgcacctgatagtgcaacacttcaaggtgtactacccggtacggcaccacttggtgcagcacatggtgagcgccatgcagaggctgggcttcacgcccagtgtcaccatcgagcagaggcggctggccgtggacctgtctgaagtcgtcatcaagtgggagctgcagaggatcaaggaccagcagccggattcagatatggacccaaattccagtggagaaggagtcaattctgtctcatcctccattaagagaggcctgtccgtggattctgcccaggaagtgaaacgctttaggacggccaccggagccatcagtgcagtctttgggaggagccagtcgctacctggagcagactctctcctcgccaagcccattgacaagcagcacacagacactgtggtgaacttccttatccgcgtggcctgtcaggttaatgacaacaccaacacagcggggtcccctggggaggtgctctctcgccggtgtgtgaaccttctgaagactgcgttgcggccagacatgtggcccaagtccgaactcaagctgcagtggttcgacaagctgctgatgactgtggagcagccaaaccaagtgaactatgggaatatctgcacgggcctagaagtgctgagcttcctgctaactgtcctccagtccccagccatcctcagtagcttcaaacctctgcagcgtggaattgccgcctgcatgacatgtggaaacaccaaggtgttgcgagccgtccacagccttctctcgcgcctgatgagcattttcccaacagagccgagtacttccagtgtggcctccaaatatgaagagctggagtgcctctacgcagccgtcggaaaggtcatctatgaagggctcaccaactacgagaaggccaccaatgccaatccctcccagctcttcgggacccttatgatcctcaagtctgcctgcagcaacaaccccagctacatagacaggctgatctccgtctttatgcgctccctgcagaagatggtccgggagcatttaaaccctcaggcagcgtcaggaagcaccgaagccacctcaggtacaagcgagctggtgatgctgagtctggagctggtgaagacgcgcctggcagtgatgagcatggagatgcggaagaacttcatccaggccatcctgacatccctcatcgaaaaatcaccagatgccaaaatcctccgggctgtggtcaaaatcgtggaagaatgggtcaagaataactccccaatggcagccaatcagacacctacactccgggagaagtccattttgcttgtgaagatgatgacttacatagaaaaacgctttccggaagaccttgaattaaatgcccagtttttagatcttgttaactatgtctacagggatgagaccctctctggcagcgagctgacggcgaaacttgagcctgcctttctctctgggctgcgctgtgcccagccactcatcagggcaaagtttttcgaggtttttgacaactccatgaaacgtcgtgtctacgagcgcttgctctatgtgacctgttcgcagaactgggaagccatggggaaccacttctggatcaagcagtgcattgagctgcttctggccgtgtgtgagaagagcacccccattggcaccagctgccaaggagccatgctcccgtccatcaccaacgtcatcaacctggccgatagccacgaccgtgccgccttcgccatggtcacacatgtcaagcaggagccccgggagcgggagaacagcgagtccaaagaggaggatgtagagatagacatcgaactagctcctggggatcagaccagcacgcccaaaaccaaagaactttcagaaaaggacattggaaaccagctgcacatgctaaccaacaggcacgacaagtttctggacactctccgagaggtgaagactggagcgctgctcagcgctttcgttcagctgtgccacatttccacgacgctggcagagaagacgtgggtccagcttttccccagattgtggaagatcctctctgacagacagcagcatgcactcgcgggtgagataagtccatttctgtgcagcggcagtcaccaggtgcagcgggactgccagcccagcgcgctgaactgctttgtggaagccatgtcccagtgcgtgccgccaatccccatccgaccctgcgtcctgaagtacctggggaagacacacaacctctggttccggtccacgctgatgttggagcaccaggcttttgaaaagggtctgagtcttcagattaagccgaagcaaacaacggagttttatgagcaggagagcatcaccccgccgcagcaggagatactggattcccttgcggagctttactccctgttacaagaggaagatatgtgggctggtctgtggcagaagcggtgcaagtactcggagacagcgactgcgattgcttacgagcagcacgggttctttgagcaggcacaagaatcctatgaaaaggcaatggataaagccaaaaaagaacatgagaggagtaacgcctcccctgctattttccctgaataccagctctgggaagaccactggattcgatgctccaaggaattgaaccagtgggaagccctgacggagtacggtcagtccaaaggccacatcaacccctacctcgtcctggagtgcgcctggcgggtgtccaactggactgccatgaaggaggcgctggtgcaggtggaagtgagctgtccgaaggagatggcctggaaggtgaacatgtaccgcggatacctggccatctgccaccccgaggagcagcagctcagcttcatcgagcgcctggtggagatggccagcagcctggccatccgcgagtggcggcggctgccccacgtagtgtcccacgtgcacacgcctctcctacaggcagcccagcaaatcatcgaactccaggaagctgcacaaatcaacgcaggcttacagccaaccaacctgggaaggaacaacagcctgcacgacatgaagacggtggtgaagacctggaggaaccgactgcccatcgtgtctgacgacttgtcccactggagcagcatcttcatgtggaggcagcatcattaccaggcgattgtaactgcctatgagaatagctctcagcatgatcccagttcaaataacgctatgcttggggttcatgcatcagcttcagcgatcatccagtatggaaaaatcgcccggaaacaaggactggtcaatgtagctctggatatattaagtcggattcatactattccaactgttcctatcgtggattgcttccagaagattcgacagcaagttaaatgctacctccagctggcaggcgtcatgggcaaaaacgagtgcatgcagggccttgaagttattgaatctacaaatttaaaatacttcacaaaagagatgacagccgaattttatgcactgaagggaatgttcttggctcagatcaacaagtccgaggaggcaaacaaagccttctctgcagctgtgcagatgcacgatgtgctggtgaaagcctgggccatgtggggcgactacctggagaacatctttgtgaaggagcggcagctgcacctgggcgtgtctgccatcacctgctacctgcacgcctgccggcatcagaacgagagcaaatcgaggaaatacttagccaaggtgctgtggcttttgagttttgatgatgacaaaaacactttggcagatgccgtcgacaagtactgcattggtgtgccacccatccagtggctggcctggatcccacagctgctcacctgcctggttggctcggagggaaagctgctcttgaacctcattagccaggttggacgcgtgtatccccaagcggtctactttcccatccggaccctgtacctgaccctgaaaatagaacagcgggaacgctacaagagcgatccagggcccataagagcaacagcacccatgtggcgctgcagccgaatcatgcacatgcagcgagagctccaccccacccttctgtcttccctggaaggcatcgtcgatcagatggtctggttcagagaaaattggcatgaagaggttctcaggcagctccaacagggcctggcgaaatgttactccgtggcgtttgagaaaagtggagcggtgtccgatgctaaaatcaccccccacactctcaattttgtgaagaagttggtgagcacgtttggggtgggcctggagaatgtgtccaacgtctcgaccatgttctccagcgcagcctctgagtctctggcccggcgggcgcaggccactgcacaagaccctgtctttcagaagctgaaaggccagttcacgacggattttgacttcagcgttccaggatccatgaagcttcataatcttatttctaagttgaaaaagtggatcaaaatcttggaggccaagaccaagcaactccccaaattcttcctcatagaggaaaagtgccggttcttgagcaatttctcggcacagacagctgaagtggaaattcctggggagtttctgatgccaaagccaacgcattattacatcaagattgcacggttcatgccccgggtagagattgtgcagaagcacaacaccgcagcccggcggctgtacatccggggacacaatggcaagatctacccatacctcgtcatgaacgacgcctgcctcacagagtcacggcgagaggagcgtgtgttgcagctgctgcgtctgctgaacccctgtttggagaagagaaaggagaccaccaagaggcacttgtttttcacagtgccccgggttgtggcagtttccccacagatgcgcctcgtggaggacaacccctcttcactttcccttgtggagatctacaagcagcgctgcgccaagaagggcatcgagcatgacaaccccatctcccgttactatgaccggctggctacggtgcaggcgcggggaacccaagccagccaccaggtcctccgcgacatcctcaaggaggttcagagtaacatggtgccgcgcagcatgctcaaggagtgggcgctgcacaccttccccaatgccacggactactggacgttccggaagatgttcaccatccagctggctctgataggcttcgcggaattcgtcctgcatttaaatagactcaaccccgagatgttacagatcgctcaggacactggcaaactgaatgttgcctactttcgatttgacataaacgacgcgactggagacctggatgccaaccgtcctgtcccatttcgactcacgcccaacatttctgagtttctgaccaccatcggggtctccggcccgttgacagcgtccatgattgcggtcgcccggtgcttcgcccagccaaactttaaggtggatggcattctgaaaacggttctccgggacgagatcattgcttggcacaaaaaaacacaagaggacacgtcctctcctctctcggccgccgggcagccagagaacatggacagccagcaactggtgtccctggttcagaaagccgtcaccgccatcatgacccgcctgcacaacctcgcccagttcgaaggcggggaaagcaaggtgaacaccctggtggccgcggcaaacagcctggacaatctgtgccgcatggaccccgcctggcacccctggctgtgactgtggccgccacggccacccggaatgtgaagggcgctccgggctctgagcccgcagcttttacgacttctccctgcctcgttccttatattcacagaagccccatagtttcactgggttgcggttattttcctggtagtttgcgtgtaagaaagggagaatatagttttagaggaagctgaactatgacgatgctgggcgaagcggttggaaatggcagagctgaaacttattccaagctttcaaaataatcttttaagaagccaggattctccggtctggaatttctgagtgagtcctttttttatggtgtcctccctctgtgaatgtacaggcggaactgtacgaacagctcccttccatccatttttaactctttcggaaataacacctcacagcagcttcgtgcttttgtacagacctttgtaacaagtgtacagaaaactcattttgtttgagaaacaggagttgatgaacccatcatgctggtttttctctgagcacaaagttttaggctgtacacagccagccttgggaatctcgttgagcgttcggcgtggatccacggggccaggccaccctgcgggagcgccacacgcatccacttcggattcagtgggtgaagacagaactctgagagtctgcaggcggctcctgtgctttttatttctggctcttcggatgtcttctagacatttactatcactgcacctgaagaaaaaatcacttttaccttcctaatttaaaaagacaaaacagaaatgtacgttccttcgctagctttagtctttctgttcccatttttataaatctgagcattgataatgttctatctaaatttgtacagtgtgatttttttttttagaataaatattttataaaagggtt

SEQ ID NO: 32047 - DNA, 12677 bp, Homo sapiens
  source 1..12677: mol_type = unassigned DNA
cgcgccggggcctggtgctcggtcggcgggtgctgccgctttaagcgggggcgggactgcgcgcggccgagcggttgcgacgagggctcggctgggggtcgccggggtcgcgggccgggcctgcaggagccgggccgccgaggtcggggctggttgaactcatggacctgatacttttctcttgagaagcaaaccagcccaaaagaaaaatggcgtttgttgcaacacagggggccacggtggttgaccagaccactttgatgaaaaagtaccttcagtttgtggcagctctcacagatgtgaatacacctgatgaaacaaagttgaaaatgatgcaagaagttagtgaaaattttgagaatgtcacgtcatctcctcagtattctacattcctagaacatatcatccctcgattccttacatttctccaagatggagaagttcagtttcttcaggagaaaccagcacagcaactgcggaagctcgtacttgaaataattcatagaataccaaccaacgaacatcttcgtcctcacacaaaaaatgttttgtctgtgatgtttcgctttttagagacggaaaatgaagaaaatgttcttatttgtctaagaataattattgagctacacaaacagttcaggccaccgatcacacaagaaattcatcattttctggattttgtgaaacagatttacaaggagcttccaaaagtagtgaaccgctactttgagaaccctcaagtgatccccgagaacacagtgcctcccccagaaatggttggtatgataacaacgattgctgtgaaagtcaacccggagcgtgaggacagtgagactcgaacacattccatcattccgaggggatcactttctctgaaagtgttggcagaattgcccattattgttgttttaatgtatcagctctacaaactgaacatccacaatgttgttgctgagtttgtgcccttgatcatgaacaccattgccattcaggtgtctgcacaagcgaggcaacataagctttacaacaaggagttgtatgctgacttcattgctgctcagattaaaacattgtcatttttagcttacattatcaggatttaccaggagttggtgactaagtattctcagcagatggtgaaaggaatgctccagttactttcaaattgtccagcagagactgcacacctcagaaaggagcttctgattgctgccaaacacatcctcaccacagagctgagaaaccagttcattccttgcatggacaagctgtttgatgaatccatactaattggctcaggatatactgccagagagactctaaggcccctcgcctacagcacgctggccgacctcgtgcaccatgtccgccagcacctgcccctcagcgacctctccctcgccgtccagctcttcgccaagaacatcgacgatgagtccctgcccagcagcatccagaccatgtcctgcaagctcctgctgaacctggtggactgcatccgttccaagagcgagcaggagagtggcaatgggagagacgtcctgatgcggatgctggaggttttcgttctcaaattccacacaattgctcggtaccagctctctgccatttttaagaagtgtaagcctcagtcagaacttggagccgtggaagcagctctgcctggggtgcccactgcccctgcagctcctggccctgctccctccccagcccctgtccctgccccacctccacccccgcccccacccccacctgccacccctgtgaccccggcccccgtgcctcccttcgagaagcaaggagaaaaggacaaggaagacaagcagacattccaagtcacagactgtcgaagtttggtcaaaaccttggtgtgtggtgtcaagacaatcacgtggggcataacatcatgcaaagcacctggtgaagctcagttcattcccaacaagcagttacaacccaaagagacacagatttacatcaaacttgtgaaatatgcaatgcaagctttagatatttatcaggtccagatagcaggaaatggacagacatacatccgtgtggccaactgccagactgtgagaatgaaagaggagaaggaggtattggagcatttcgctggtgtgttcacaatgatgaaccccttaacgttcaaagaaatcttccaaactacggtcccttatatggtggagagaatctcaaaaaattatgctcttcagattgttgccaattccttcttggcaaatcctactacctctgctctgtttgctacgattctggtggaatatctccttgatcgcctgccagaaatgggctccaacgtggagctctccaacctgtacctcaagctgttcaagctggtctttggctctgtctccctctttgcagctgaaaatgaacaaatgctgaagcctcacttgcacaagattgtgaacagctctatggagctcgcgcagactgccaaggaaccctacaactacttcttgctgctacgggcgctgtttcgctctattggtggaggtagccacgatctcttgtatcaggagttcttgcctctccttccaaacctcctgcaagggctgaacatgcttcagagtggcctgcacaagcagcacatgaaggacctctttgtggagctgtgtctcaccgtccctgtgcggctgagctcgcttttgccgtacctgcccatgcttatggatcccttggtgtctgcactcaatgggtctcagacattggtcagccaaggcctcaggacgctggagctgtgtgtggacaacctgcagcccgacttcctctacgaccacatccagccggtgcgcgcagagctcatgcaggctctgtggcgcaccttacgcaaccctgctgacagcatctcccacgtggcctaccgtgtgctcggtaagtttggcggcagtaacaggaagatgctgaaggagtcgcagaagctgcactacgttgtgaccgaggttcagggccccagcatcactgtggagttttccgactgcaaagcttctctccagctccccatggagaaggccattgaaactgctctggactgcctgaaaagcgccaacactgagccctactaccggaggcaggcgtgggaagtgatcaaatgcttcctggtggccatgatgagcctggaggacaacaagcacgcactctaccagctcctggcacaccccaactttacagaaaagaccatccccaatgttatcatctcacatcgctacaaagcccaggacactccagcccggaagacttttgagcaggccctgacaggcgccttcatgtctgctgtcattaaggacctgcggcccagcgccctgccctttgtcgccagcttgatccgccactatacgatggtggcagtcgcccagcagtgtggccctttcttgctgccttgctaccaggtgggcagccagcccagcacagccatgtttcacagtgaagaaaatggctcgaaaggaatggatcctttggttctcattgatgcaattgctatttgtatggcatatgaagaaaaggagctttgcaaaatcggggaggtggccctagctgtgatatttgatgttgcaagtatcatcctgggctccaaggagagggcctgccagctgcccctgttttcttacatcgtggagcgcctgtgtgcatgttgttatgaacaggcgtggtatgcaaagctggggggtgtggtgtctattaagtttctcatggagcggctgcctctcacttgggttctccagaaccagcagacattcctgaaagcacttctctttgtcatgatggacttaactggagaggtttccaatggggcagtcgctatggcaaagaccacgctggagcagcttctgatgcggtgcgcaacgcctttaaaagacgaggagagagccgaagagatcgtggccgcccaggaaaagtctttccaccatgtgacacacgacttggttcgagaagtcacctctccaaactccactgtgaggaagcaggccatgcattcgctgcaggtgttggcccaggtcactgggaagagtgtcacggtgatcatggaaccccacaaagaggtcctgcaggatatggtcccccctaagaagcacctgctccgacaccagcctgccaacgcacagattggcctgatggaggggaacacgttctgtaccacgttgcagcccaggctcttcacaatggaccttaacgtggtggagcataaggtgttctacacagagctgttgaatttgtgtgaggctgaagattcagctttaacaaagctgccctgttataaaagccttccgtcactcgtacctttacgaattgcggcattaaatgcacttgctgcctgcaattaccttcctcagtccagggagaaaatcatcgctgcactcttcaaagccctgaattccaccaatagtgagctccaagaggccggagaagcctgtatgagaaagtttttagaaggtgctaccatagaagtcgatcaaatccacacacatatgcgacctttgctgatgatgctgggagattaccggagcttgacgctgaatgttgtgaatcgcctgacttcggtcacgaggctcttcccaaattccttcaatgataaattttgtgatcagatgatgcaacatctgcgcaagtggatggaagtggtggtgatcacccacaaagggggccagaggagcgacggaaacgaaagcatttccgagtgcgggagatgtcccttgtctccattctgtcagtttgaggaaatgaagatttgctcagcaattataaacctttttcatctgatcccggctgctcctcagacactggtgaagcctttgctagaggttgtcatgaaaacggagcgggcgatgctgatcgaggcggggagtccattccgagagcccctgatcaagttcctgactcgacatccctcgcagacagtggagctgttcatgatggaagccacactgaacgatccccagtggagcagaatgtttatgagttttttaaaacacaaagacgccagacctctgcgggatgtgctggctgccaaccccaacaggttcatcaccctgctgctgccggggggtgcccagacggctgtgcgccccggttcgcccagcaccagcaccatgcgcctggacctccagttccaggccatcaagatcataagcattatagtgaaaaacgatgactcctggctggccagccagcactctctggtgagccagttgcgacgtgtgtgggtgagtgagaacttccaagagaggcaccgcaaggagaacatggcagccaccaactggaaggagcccaagctgctggcctactgcctgctgaactactgcaaaaggaattacggagatatagaattgctgttccagctgctccgagcctttactggtcgttttctctgcaacatgacattcttaaaagagtatatggaggaagagattcccaaaaattacagcatcgctcagaaacgtgccctgttctttcgctttgtagacttcaacgaccccaacttcggagatgaattaaaagctaaagttctgcagcatatcttgaatcctgctttcttgtacagctttgagaagggggaaggagagcagctcttgggacctcccaatccagaaggagataacccagaaagcatcaccagtgtgtttattaccaaggtcctggaccccgagaagcaggcggacatgctggactcgctgcggatctacctgctgcagtacgccacgctgctggtggagcacgccccccaccacatccatgacaacaacaagaaccgcaacagcaagctgcgccgcctcatgaccttcgcctggccctgcctgctctccaaggcctgcgtggacccagcctgcaagtacagcggacacttgctcctggcgcacattatcgccaaattcgccatacacaagaagatcgtcctgcaggtttttcatagtctcctcaaggctcacgcaatggaagctcgagcgatcgtcagacaggcgatggccattctgaccccggcggtgccggccaggatggaggacgggcaccagatgctgacccactggacccggaagatcattgtggaggaggggcacaccgtcccgcagctggtccacattctgcacctgatagtgcaacacttcaaggtgtactacccggtacggcaccacttggtgcagcacatggtgagcgccatgcagaggctgggcttcacgcccagtgtcaccatcgagcagaggcggctggccgtggacctgtctgaagtcgtcatcaagtgggagctgcagaggatcaaggaccagcagccggattcagatatggacccaaattccagtggagaaggagtcaattctgtctcatcctccattaagagaggcctgtccgtggattctgcccaggaagtgaaacgctttaggacggccaccggagccatcagtgcagtctttgggaggagccagtcgctacctggagcagactctctcctcgccaagcccattgacaagcagcacacagacactgtggtgaacttccttatccgcgtggcctgtcaggttaatgacaacaccaacacagcggggtcccctggggaggtgctctctcgccggtgtgtgaaccttctgaagactgcgttgcggccagacatgtggcccaagtccgaactcaagctgcagtggttcgacaagctgctgatgactgtggagcagccaaaccaagtgaactatgggaatatctgcacgggcctagaagtgctgagcttcctgctaactgtcctccagtccccagccatcctcagtagcttcaaacctctgcagcgtggaattgccgcctgcatgacatgtggaaacaccaaggtgttgcgagccgtccacagccttctctcgcgcctgatgagcattttcccaacagagccgagtacttccagtgtggcctccaaatatgaagagctggagtgcctctacgcagccgtcggaaaggtcatctatgaagggctcaccaactacgagaaggccaccaatgccaatccctcccagctcttcgggacccttatgatcctcaagtctgcctgcagcaacaaccccagctacatagacaggctgatctccgtctttatgcgctccctgcagaagatggtccgggagcatttaaaccctcaggcagcgtcaggaagcaccgaagccacctcaggtacaagcgagctggtgatgctgagtctggagctggtgaagacgcgcctggcagtgatgagcatggagatgcggaagaacttcatccaggccatcctgacatccctcatcgaaaaatcaccagatgccaaaatcctccgggctgtggtcaaaatcgtggaagaatgggtcaagaataactccccaatggcagccaatcagacacctacactccgggagaagtccattttgcttgtgaagatgatgacttacatagaaaaacgctttccggaagaccttgaattaaatgcccagtttttagatcttgttaactatgtctacagggatgagaccctctctggcagcgagctgacggcgaaacttgagcctgcctttctctctgggctgcgctgtgcccagccactcatcagggcaaagtttttcgaggtttttgacaactccatgaaacgtcgtgtctacgagcgcttgctctatgtgacctgttcgcagaactgggaagccatggggaaccacttctggatcaagcagtgcattgagctgcttctggccgtgtgtgagaagagcacccccattggcaccagctgccaaggagccatgctcccgtccatcaccaacgtcatcaacctggccgatagccacgaccgtgccgccttcgccatggtcacacatgtcaagcaggagccccgggagcgggagaacagcgagtccaaagaggaggatgtagagatagacatcgaactagctcctggggatcagaccagcacgcccaaaaccaaagaactttcagaaaaggacattggaaaccagctgcacatgctaaccaacaggcacgacaagtttctggacactctccgagaggtgaagactggagcgctgctcagcgctttcgttcagctgtgccacatttccacgacgctggcagagaagacgtgggtccagcttttccccagattgtggaagatcctctctgacagacagcagcatgcactcgcgggtgagataagtccatttctgtgcagcggcagtcaccaggtgcagcgggactgccagcccagcgcgctgaactgctttgtggaagccatgtcccagtgcgtgccgccaatccccatccgaccctgcgtcctgaagtacctggggaagacacacaacctctggttccggtccacgctgatgttggagcaccaggcttttgaaaagggtctgagtcttcagattaagccgaagcaaacaacggagttttatgagcaggagagcatcaccccgccgcagcaggagatactggattcccttgcggagctttactccctgttacaagaggaagatatgtgggctggtctgtggcagaagcggtgcaagtactcggagacagcgactgcgattgcttacgagcagcacgggttctttgagcaggcacaagaatcctatgaaaaggcaatggataaagccaaaaaagaacatgagaggagtaacgcctcccctgctattttccctgaataccagctctgggaagaccactggattcgatgctccaaggaattgaaccagtgggaagccctgacggagtacggtcagtccaaaggccacatcaacccctacctcgtcctggagtgcgcctggcgggtgtccaactggactgccatgaaggaggcgctggtgcaggtggaagtgagctgtccgaaggagatggcctggaaggtgaacatgtaccgcggatacctggccatctgccaccccgaggagcagcagctcagcttcatcgagcgcctggtggagatggccagcagcctggccatccgcgagtggcggcggctgccccacgtagtgtcccacgtgcacacgcctctcctacaggcagcccagcaaatcatcgaactccaggaagctgcacaaatcaacgcaggcttacagccaaccaacctgggaaggaacaacagcctgcacgacatgaagacggtggtgaagacctggaggaaccgactgcccatcgtgtctgacgacttgtcccactggagcagcatcttcatgtggaggcagcatcattaccagggtaaaccgacctggtccggcatgcattcatcatcgattgtaactgcctatgagaatagctctcagcatgatcccagttcaaataacgctatgcttggggttcatgcatcagcttcagcgatcatccagtatggaaaaatcgcccggaaacaaggactggtcaatgtagctctggatatattaagtcggattcatactattccaactgttcctatcgtggattgcttccagaagattcgacagcaagttaaatgctacctccagctggcaggcgtcatgggcaaaaacgagtgcatgcagggccttgaagttattgaatctacaaatttaaaatacttcacaaaagagatgacagccgaattttatgcactgaagggaatgttcttggctcagatcaacaagtccgaggaggcaaacaaagccttctctgcagctgtgcagatgcacgatgtgctggtgaaagcctgggccatgtggggcgactacctggagaacatctttgtgaaggagcggcagctgcacctgggcgtgtctgccatcacctgctacctgcacgcctgccggcatcagaacgagagcaaatcgaggaaatacttagccaaggtgctgtggcttttgagttttgatgatgacaaaaacactttggcagatgccgtcgacaagtactgcattggtgtgccacccatccagtggctggcctggatcccacagctgctcacctgcctggttggctcggagggaaagctgctcttgaacctcattagccaggttggacgcgtgtatccccaagcggtctactttcccatccggaccctgtacctgaccctgaaaatagaacagcgggaacgctacaagagcgatccagggcccataagagcaacagcacccatgtggcgctgcagccgaatcatgcacatgcagcgagagctccaccccacccttctgtcttccctggaaggcatcgtcgatcagatggtctggttcagagaaaattggcatgaagaggttctcaggcagctccaacagggcctggcgaaatgttactccgtggcgtttgagaaaagtggagcggtgtccgatgctaaaatcaccccccacactctcaattttgtgaagaagttggtgagcacgtttggggtgggcctggagaatgtgtccaacgtctcgaccatgttctccagcgcagcctctgagtctctggcccggcgggcgcaggccactgcacaagaccctgtctttcagaagctgaaaggccagttcacgacggattttgacttcagcgttccaggatccatgaagcttcataatcttatttctaagttgaaaaagtggatcaaaatcttggaggccaagaccaagcaactccccaaattcttcctcatagaggaaaagtgccggttcttgagcaatttctcggcacagacagctgaagtggaaattcctggggagtttctgatgccaaagccaacgcattattacatcaagattgcacggttcatgccccgggtagagattgtgcagaagcacaacaccgcagcccggcggctgtacatccggggacacaatggcaagatctacccatacctcgtcatgaacgacgcctgcctcacagagtcacggcgagaggagcgtgtgttgcagctgctgcgtctgctgaacccctgtttggagaagagaaaggagaccaccaagaggcacttgtttttcacagtgccccgggttgtggcagtttccccacagatgcgcctcgtggaggacaacccctcttcactttcccttgtggagatctacaagcagcgctgcgccaagaagggcatcgagcatgacaaccccatctcccgttactatgaccggctggctacggtgcaggcgcggggaacccaagccagccaccaggtcctccgcgacatcctcaaggaggttcagagtaacatggtgccgcgcagcatgctcaaggagtgggcgctgcacaccttccccaatgccacggactactggacgttccggaagatgttcaccatccagctggctctgataggcttcgcggaattcgtcctgcatttaaatagactcaaccccgagatgttacagatcgctcaggacactggcaaactgaatgttgcctactttcgatttgacataaacgacgcgactggagacctggatgccaaccgtcctgtcccatttcgactcacgcccaacatttctgagtttctgaccaccatcggggtctccggcccgttgacagcgtccatgattgcggtcgcccggtgcttcgcccagccaaactttaaggtggatggcattctgaaaacggttctccgggacgagatcattgcttggcacaaaaaaacacaagaggacacgtcctctcctctctcggccgccgggcagccagagaacatggacagccagcaactggtgtccctggttcagaaagccgtcaccgccatcatgacccgcctgcacaacctcgcccagttcgaaggcggggaaagcaaggtgaacaccctggtggccgcggcaaacagcctggacaatctgtgccgcatggaccccgcctggcacccctggctgtgactgtggccgccacggccacccggaatgtgaagggcgctccgggctctgagcccgcagcttttacgacttctccctgcctcgttccttatattcacagaagccccatagtttcactgggttgcggttattttcctggtagtttgcgtgtaagaaagggagaatatagttttagaggaagctgaactatgacgatgctgggcgaagcggttggaaatggcagagctgaaacttattccaagctttcaaaataatcttttaagaagccaggattctccggtctggaatttctgagtgagtcctttttttatggtgtcctccctctgtgaatgtacaggcggaactgtacgaacagctcccttccatccatttttaactctttcggaaataacacctcacagcagcttcgtgcttttgtacagacctttgtaacaagtgtacagaaaactcattttgtttgagaaacaggagttgatgaacccatcatgctggtttttctctgagcacaaagttttaggctgtacacagccagccttgggaatctcgttgagcgttcggcgtggatccacggggccaggccaccctgcgggagcgccacacgcatccacttcggattcagtgggtgaagacagaactctgagagtctgcaggcggctcctgtgctttttatttctggctcttcggatgtcttctagacatttactatcactgcacctgaagaaaaaatcacttttaccttcctaatttaaaaagacaaaacagaaatgtacgttccttcgctagctttagtctttctgttcccatttttataaatctgagcattgataatgttctatctaaatttgtacagtgtgatttttttttttagaataaatattttataaaagggtt

SEQ ID NO: 32048 - DNA, 550 bp, Homo sapiens
  source 1..550: mol_type = unassigned DNA
aggcctctctccatccagttttgatggaggtagctctgcctgccatgtggatccagcctcggagggtctcggtccatctccagccgtcaccttcccaaagaccctcctggcctcctctccattctgcgggccgagaagaaccccaggagagcagcggggaccgggagcgaggagtgggggtggcaaaccctaccctgcctgccaccttcagtccagtggtggacaatacctggaccccatagctgccaactcgggaagccgcgcccccccccaggctggttgaactcatggacctgatacttttctcttgagaagcaaaccagcccaaaagaaaaatggcgtttgttgcaacacagggggccacggtggttgaccagaccactttgatgaaaaagtaccttcagtttgtggcagctctcacagatgtgaatacacctgatgaaacaaagttgaaaatgatgcaagaagttagtgaaaattttgagaatgtcacgtcatctcctcagtattctacattcctagaacatatcatccctcgattccttacatt

SEQ ID NO: 32049 - DNA, 288 bp, Homo sapiens
  source 1..288: mol_type = unassigned DNA
gagcccgtgcggaggcggtgcggagcatttcggctctgagcggctgggcgaccggcgcgtcgtgcggggctgcggcggagcctccttaaggaaggtgcaagaggttggcagcttcgattgaagcacatcgaccggcgacagcagccaggagtcatgagcgacagcggcgagcagaactacggcgagcgggttaatgttgaagaaggaaaatgcggaagtcgtcatttgacaagttttataaatgagtatttgaagctcaggaataagtgaagctgaaatttgaaaaaa

SEQ ID NO: 32050 - DNA, 976 bp, Homo sapiens
  source 1..976: mol_type = unassigned DNA
agagcgaggaggggcgaggccaagaaagcgcgcgtttctgggaggggaggagcctggctaaggagcgccgcgtcacatccggtagagttagagcccgtgcggaggcggtgcggagcatttcggctctgagcggctgggcgaccggcgcgtcgtgcggggctgcggcggagcctccttaaggaaggtgcaagaggttggcagcttcgattgaagcacatcgaccggcgacagcagccaggagtcatgagcgacagcggcgagcagaactacggcgagcgggtctagatccagaagaagctcccgaaggcattatacccggtcacggtctcgctcccgctcccatagacgatcacgtagcaggtcttacagtcgagattatcgtagacggcacagccacagccattctcccatgtctactcgcaggcgtcatgttgggaatcgggcaaatcctgatcctaactgttgtcttggagtatttgggctgagcttgtacaccacagaaagagatctaagagaagtgttctctaaatatggtcccattgccgatgtgtctattgtatatgaccagcagtctaggcgttcaagaggatttgcctttgtatattttgaaaatgtagatgatgccaaggaagctaaagaacgtgccaatggaatggagcttgatgggcgtaggatcagagttgatttctctataacaaaaagaccacatacgccaacaccaggaatttacatggggagacctacctatggcagctctcgccgtcgggattactatgacagaggatatgatcggggctatgatgatcgggactactatagcagatcatacagaggaggaggtggaggaggaggaggatggagagctgcccaagacagggatcagatttatagaaggcggtcaccttctccttactatagtcgtggaggatacagatcacgttccagatctcgatcatactcacctcgtcgctattaa

SEQ ID NO: 32051 - DNA, 2952 bp, Homo sapiens
  source 1..2952: mol_type = unassigned DNA
gtgcgggacgcgctgcagctggagaggaaaggcagagcgaggaggggcgaggccaagaaagcgcgcgtttctgggaggggaggagcctggctaaggagcgccgcgtcacatccggtagagttagagcccgtgcggaggcggtgcggagcatttcggctctgagcggctgggcgaccggcgcgtcgtgcggggctgcggcggagcctccttaaggaaggtgcaagaggttggcagcttcgattgaagcacatcgaccggcgacagcagccaggagtcatgagcgacagcggcgagcagaactacggcgagcgggaatcccgttctgcttccagaagtggaagtgctcacggatcggggaaatctgcaaggcatacccctgcaaggtctcgctccaaggaagattccaggcgttccagatcaaagtccaggtcccgatctgaatctaggtctagatccagaagaagctcccgaaggcattatacccggtcacggtctcgctcccgctcccatagacgatcacgtagcaggtcttacagtcgagattatcgtagacggcacagccacagccattctcccatgtctactcgcaggcgtcatgttgggaatcgggcaaatcctgatcctaactgttgtcttggagtatttgggctgagcttgtacaccacagaaagagatctaagagaagtgttctctaaatatggtcccattgccgatgtgtctattgtatatgaccagcagtctaggcgttcaagaggatttgcctttgtatattttgaaaatgtagatgatgccaaggaagctaaagaacgtgccaatggaatggagcttgatgggcgtaggatcagagttgatttctctataacaaaaagaccacatacgccaacaccaggaatttacatggggagacctacctatggcagctctcgccgtcgggattactatgacagaggatatgatcggggctatgatgatcgggactactatagcagatcatacagaggaggaggtggaggaggaggaggatggagagctgcccaagacagggatcagatttatagaaggcggtcaccttctccttactatagtcgtggaggatacagatcacgttccagatctcgatcatactcacctcgtcgctattaaagcatgaagactttctgaaacctgccctagagctgggatattgtttgtgggcaatattttttattgtctcttgtttaaaaagtgaacagtgcctagtgaagttaggtgacttttacaccttttacgatgactacttttggtggagttgaaatgctgttttcattctgcatttgtgtagtttggtgctttgttccaagttaagtgttttcagaaaagtatgttttgcatgtatttttttacagtctaaattttgactgctgagaagtttctattgtacaaaacttcatttaaaaggtttttctactgaatccagggtattctgaagatcgaagcctgtgtaaaatgctaccaaatggcaaaaagcaacaataaacagtttgatttttacttttctttctaacatatcaatgcttagcagaactattcagattgtcagtagtaaatttaaagacaaatgcccgttttcctccagtccatgaaacataccatacttatatacctgcaactaagtgtttaaaattatgctctgtaactctgtactgctagtattagaactaaaaatcttaaaatacagccagtgcttaatgcttatatcaatgtggatttgtcggcttttatgtaatctgtaatatgtatagcaggaaatacgaagagttacacagtgtatgccttaaaaggctgtttcttaaaggtgttacaaggggataatggtatttcaactagttatcagcaagtgacaatacattccaccacaaatacactcttgttcttctagcttttagactatatgaaaaaaccgggtgcttcaaagtacatgataagggaacactatacctgtcatggatgaactgaagactttgcctgttcattttttaaatattattttcaggtcctttgcttaccaaaggaggcccaatttcactcaaatgttttgagaactgtgtttaaataaacgcaaatgaaaagaaaaatgttggtgcagctgttcacaaagaagtgttcttgttctattataattagagttcttctgtagtttaatcgttagggcagtgtgttccttgggctgaggtgtatctttgctattttgggctgggttgagggggggatgaatttctgtattcctggaaaattcagagtgcataactaggtattagagtgatctccatttggggatggagttacagtaaataactagactgcgggtactttaatacatgttcttattattttgcatttaagtaattttcatgaccaattgtagggatgttgctacaggtgggttattttgttgccttgctaacctttatcgcatctaggtattagtatgtttcaggtactttgggaagaactttacatataatctttagcaatgaaatgatgtagagtaacttaccttagttcaaatagctgtttaagtggcaatgccacgatctgaattgaacctaggtgatcttagtccacagttctcttgatcatgatgtctcaaatctgggtacctgggtgatggaaaataccagtaatggagcataggcagtattggcaggtcttaatttgtaaaacttactgtccagggtgttttcagtgtttgccaacttgtggtaaattaatatgcttagagaactacccttaggtttgtttctgataagcatgtggaaacaacttagtatatgcctgatgggttatttcaaattgttctcaatgagttttgaaacaagaatttgtagtatttatatataaagttgagttttagggtgtggtcccagagggggttgtgttatggatggatacattaaaggctgagaaacctgg

SEQ ID NO: 32052 - DNA, 4310 bp, Homo sapiens
  source 1..4310: mol_type = unassigned DNA
gtcagctgtgccccggtcgccgagtggcgaggaggtgacggtagccgccttcctatttccgcccggcgggcagcgctgcggggcgagtgccagcagagaggcgctcggtcctccctccgccctcccgcgccgggggcaggccctgcctagtctgcgtctttttcccccgcaccgcggcgccgctccgccactcgggcaccgcaggtagggcaggaggctggagagcctgctgcccgcccgcccgtaaaatggtcccctcggctggacagctcgccctgttcgctctgggtattgtgttggctgcgtgccaggccttggagaacagcacgtccccgctgagtgcagacccgcccgtggctgcagcagtggtgtcccattttaatgactgcccagattcccacactcagttctgcttccatggaacctgcaggtttttggtgcaggaggacaagccagcatgtgtctgccattctgggtacgttggtgcacgctgtgagcatgcggacctcctggccgtggtggctgccagccagaagaagcaggccatcaccgccttggtggtggtctccatcgtggccctggctgtccttatcatcacatgtgtgctgatacactgctgccaggtccgaaaacactgtgagtggtgccgggccctcatctgccggcacgagaagcccagcgccctcctgaagggaagaaccgcttgctgccactcagaaacagtggtctgaagagcccagaggaggagtttggccaggtggactgtggcagatcaataaagaaaggcttcttcaggacagcactgccagagatgcctgggtgtgccacagaccttcctacttggcctgtaatcacctgtgcagccttttgtgggccttcaaaactctgtcaagaactccgtctgcttggggttattcagtgtgacctagagaagaaatcagcggaccacgatttcaagacttgttaaaaaagaactgcaaagagacggactcctgttcacctaggtgaggtgtgtgcagcagttggtgtctgagtccacatgtgtgcagttgtcttctgccagccatggattccaggctatatatttctttttaatgggccacctccccacaacagaattctgcccaacacaggagatttctatagttattgttttctgtcatttgcctactggggaagaaagtgaaggaggggaaactgtttaatatcacatgaagaccctagctttaagagaagctgtatcctctaaccacgagaccctcaaccagcccaacatcttccatggacacatgacattgaagaccatcccaagctatcgccacccttggagatgatgtcttatttattagatggataatggttttatttttaatctcttaagtcaatgtaaaaagtataaaaccccttcagacttctacattaatgatgtatgtgttgctgactgaaaagctatactgattagaaatgtctggcctcttcaagacagctaaggcttgggaaaagtcttccagggtgcggagatggaaccagaggctgggttactggtaggaataaaggtaggggttcagaaatggtgccattgaagccacaaagccggtaaatgcctcaatacgttctgggagaaaacttagcaaatccatcagcagggatctgtcccctctgttggggagagaggaagagtgtgtgtgtctacacaggataaacccaatacatattgtactgctcagtgattaaatgggttcacttcctcgtgagccctcggtaagtatgtttagaaatagaacattagccacgagccataggcatttcaggccaaatccatgaaagggggaccagtcatttattttccattttgttgcttggttggtttgttgctttatttttaaaaggagaagtttaactttgctatttattttcgagcactaggaaaactattccagtaatttttttttcctcatttccattcaggatgccggctttattaacaaaaactctaacaagtcacctccactatgtgggtcttcctttcccctcaagagaaggagcaattgttcccctgagcatctgggtccatctgacccatggggcctgcctgtgagaaacagtgggtcccttcaaatacatagtggatagctcatccctaggaattttcattaaaatttggaaacagagtaatgaagaaataatatataaactccttatgtgaggaaatgctactaatatctgaaaagtgaaagatttctatgtattaactcttaagtgcacctagcttattacatcgtgaaaggtacatttaaaatatgttaaattggcttgaaattttcagagaattttgtcttcccctaattcttcttccttggtctggaagaacaatttctatgaattttctctttatttttttttataattcagacaattctatgacccgtgtcttcatttttggcactcttatttaacaatgccacacctgaagcacttggatctgttcagagctgaccccctagcaacgtagttgacacagctccaggtttttaaattactaaaataagttcaagtttacatcccttgggccagatatgtgggttgaggcttgactgtagcatcctgcttagagaccaatcaacggacactggtttttagacctctatcaatcagtagttagcatccaagagactttgcagaggcgtaggaatgaggctggacagatggcggaagcagaggttccctgcgaagacttgagatttagtgtctgtgaatgttctagttcctaggtccagcaagtcacacctgccagtgccctcatccttatgcctgtaacacacatgcagtgagaggcctcacatatacgcctccctagaagtgccttccaagtcagtcctttggaaaccagcaggtctgaaaaagaggctgcatcaatgcaagcctggttggaccattgtccatgcctcaggatagaacagcctggcttatttggggatttttcttctagaaatcaaatgactgataagcattggatccctctgccatttaatggcaatggtagtctttggttagctgcaaaaatactccatttcaagttaaaaatgcatcttctaatccatctctgcaagctccctgtgtttccttgccctttagaaaatgaattgttcactacaattagagaatcatttaacatcctgacctggtaagctgccacacacctggcagtggggagcatcgctgtttccaatggctcaggagacaatgaaaagcccccatttaaaaaaataacaaacattttttaaaaggcctccaatactcttatggagcctggatttttcccactgctctacaggctgtgactttttttaagcatcctgacaggaaatgttttcttctacatggaaagatagacagcagccaaccctgatctggaagacagggccccggctggacacacgtggaaccaagccagggatgggctggccattgtgtccccgcaggagagatgggcagaatggccctagagttcttttccctgagaaaggagaaaaagatgggattgccactcacccacccacactggtaagggaggagaatttgtgcttctggagcttctcaagggattgtgttttgcaggtacagaaaactgcctgttatcttcaagccaggttttcgagggcacatgggtcaccagttgctttttcagtcaatttggccgggatggactaatgaggctctaacactgctcaggagacccctgccctctagttggttctgggctttgatctcttccaacctgcccagtcacagaaggaggaatgactcaaatgcccaaaaccaagaacacattgcagaagtaagacaaacatgtatatttttaaatgttctaacataagacctgttctctctagccattgatttaccaggctttctgaaagatctagtggttcacacagagagagagagagtactgaaaaagcaactcctcttcttagtcttaataatttactaaaatggtcaacttttcattatctttattataataaacctgatgcttttttttagaactccttactctgatgtctgtatatgttgcactgaaaaggttaatatttaatgttttaatttattttgtgtggtaagttaattttgatttctgtaatgtgttaatgtgattagcagttattttccttaatatctgaattatacttaaagagtagtgagcaatataagacgcaattgtgtttttcagtaatgtgcattgttattgagttgtactgtaccttatttggaaggatgaaggaatgaatctttttttcctaaatcaa

SEQ ID NO: 32053 - DNA, 1225 bp, Homo sapiens
  source 1..1225: mol_type = unassigned DNA
actcgggcaccgcaggtagggcaggaggctggagagcctgctgcccgcccgcccgtaaaatggtcccctcggctggacagctcgccctgttcgctctgggtattgtgttggctgcgtgccaggccttggagaacagcacgtccccgctgagtgacccgcccgtggctgcagcagtggtgtcccattttaatgactgcccagattcccacactcagttctgcttccatggaacctgcaggtttttggtgcaggaggacaagccagcatgtgtctgccattctgggtacgttggtgcacgctgtgagcatgcggacctcctggccgtggtggctgccagccagaagaagcaggccatcaccgccttggtggtggtctccatcgtggccctggctgtccttatcatcacatgtgtgctgatacactgctgccaggtccgaaaacactgtgagtggtgccgggccctcatctgccggcacgagaagcccagcgccctcctgaagggaagaaccgcttgctgccactcagaaacagtggtctgaagagcccagaggaggagtttggccaggtggactgtggcagatcaataaagaaaggcttcttcaggacagcactgccagagatgcctgggtgtgccacagaccttcctacttggcctgtaatcacctgtgcagccttttgtgggccttcaaaactctgtcaagaactccgtctgcttggggttattcagtgtgacctagagaagaaatcagcggaccacgatttcaagacttgttaaaaaagaactgcaaagagacggactcctgttcacctaggtgaggtgtgtgcagcagttggtgtctgagtccacatgtgtgcagttgtcttctgccagccatggattccaggctatatatttctttttaatgggccacctccccacaacagaattctgcccaacacaggagatttctatagttattgttttctgtcatttgcctactggggaagaaagtgaaggaggggaaactgtttaatatcacatgaagaccctagctttaagagaagctgtatcctctaaccacgagaccctcaaccagcccaacatcttccatggacacatgacattgaagaccatcccaagctatcgccacccttggagatgatgtcttatttattagatggataatggttttatttttaatctcttaagtcaatgtaaaaagtataaaaccccttcagacttcta

SEQ ID NO: 32054 - DNA, 2901 bp, Homo sapiens
  source 1..2901: mol_type = unassigned DNA
cagcagatcagccagtagacatgatgagcatcaaagcctttacgcttgtctctgctgtggagcgggagctgctgatgggcgacaaggagcgcgtcaacatagagtgcgtggagtgctgcggcagggacctctacgtgggcaccaacgactgcttcgtctaccacttcctgttggaggagaggccagtgcctgctgggccagccacgttcactgccaccaaacagctgcagagacacttgggcttcaagaagcccgtgaacgagctgcgtgcggcctcagcactcaacaggctgctggtgctgtgtgacaactccatcagcctggtcaacatgctgaacctcgagccagtgccttcgggggcccgcatcaagggggcagccacgtttgcactgaacgagaaccctgtgagtggggaccccttctgtgtagaagtttgcatcatctctgtcaaacgcagaaccatccagatgtttctggtgtacgaggaccgggtgcagatcgtcaaggaggtgtcgactgccgagcagcccctcgctgtggctgtggacggccacttcctgtgtctggctctgaccactcagtacatcatccacaattacagcacaggcgtctcccaggacctgtttccctactgcagtgaggagaggccgccgatcgtcaagaggatagggagacaggagttcctgctggcgggccccggagggctgggcatgtttgccacagtcgcagggatatcccagcgcgcccccgtgcactggtcggagaatgtgattggggcggctgtgtcctttccatacgtcatagcgctcgatgacgaattcatcacagtccacagcatgttggatcagcaacagaagcagacgctgccctttaaggagggccatatcctacaggactttgaaggaagagtgatcgttgccacaagtaaaggagtttacatcttggttccattacctttggaaaaacaaatacaggatcttctagcaagccgcagagtagaagaggctttggttttagcaaaaggagcccggaggaacattccaaaggaaaaatttcaggtaatgtacagaaggattctgcagcaggcgggatttatacagtttgcacaacttcagttcctggaagctaaagagctcttcagaagcggccagcttgatgtccgggagctgatctctctctaccccttcctgttgcccacctcctcctccttcacccggtcccaccctcctcttcatgagtacgcagacctgaaccagctgacccagggggaccaggagaagatggccaagtgcaaacgcttcctcatgagctacctgaacgaggtccgcagcacagaggtagcaaatggctacaaggaggacatcgacacagccttgctcaaactgtatgcagaggctgaccacgacagcctgctggacctcctggtcactgagaacttctgtcttctgacggacagtgctgcctggctagagaagcacaaaaagtattttgcacttggactgctctatcattataataaccaagatgctgctgcagttcagttgtgggtgaacattgtgaatggcgatgtccaggactccacacgctcagacctgtatgaatacatcgtggattttcttacctactgcttagacgaggaactagtgtgggcctatgctgattgggtcctgcagaaaagtgaagaggtcggagttcaggttttcaccaagagacctttggatgaacagcagaagaacagttttaatccagacgacattatcaattgccttaaaaaataccctaaagcccttgtgaagtatctggaacatcttgtgatagacaagagactgcagaaagaagagtatcacacccacttagctgtgctgtacctggaagaggtgctgctgcagagggcctccgccagtggcaagggtgcagaggccaccgagacgcaggccaagctgcggcggctgctccagaaatctgatttataccgagtccactttcttctcgagaggctgcagggagctggcctgcccatggagagcgccatcctgcacgggaagctgggcgagcatgagaaggcgctgcatatcctggtgcacgagctgcaggactttgcagcggccgaggactactgcctgtggtgctccgagggccgagacccaccccaccgccagcaactctttcacacgctgctggccatctacctgcatgctggccccactgcccacgagctggccgtggctgccgtggacctgctgaaccgccacgccaccgaatttgatgcagcccaggtgctgcagatgctgcctgacacctggtcagtgcagctcctctgcccattcctgatgggggccatgagggacagcatccatgccaggaggaccatgcaggtggctctcggcctggccaggtccgaaaacttaatctacacctacgataagatgaagttgaaaggaagctcaatccaactctcagacaaaaagctttgtcagatatgccaaaatcccttttgtgagcctgtgtttgttagatacccaaatggtggtcttgtgcacacccactgtgccgccagcagacacacaaaccccagctcatccagtcctggcactcggacttgaaaagcttggcccaagggtgcgaggggaactccgagttctttctgagcctgctggacatgaagagcagatgaccaccatgctctgtgtcagccaggacgaagggagacatctgggtgccagggagccttccgtccatacgcaacaaggactcctcgctgctgaccaggctctatgaatgtacatggaatgaccaggctctatgaatgtacatggaaaacccctaaaaatccccaaaacagaaacatacaagagttcacctgtccaggtacatagtaatccaagacagaggtctactttg

SEQ ID NO: 32055 - DNA, 5979 bp, Homo sapiens
  source 1..5979: mol_type = unassigned DNA
cccgcagcggcgggggcggagaagagacctcagccccgcgggctcgcacagctggcgcggaccacgctctcgcccggggccggcggcctcagcgccccccgaatgaacaccttccgcccgctggccgccccgcgaggcgggccgtgtcgtggccccggtgcacggagggggacgccgaggcccggagcagggcccgtctcggcctgtgctcggagccaggcggcagggcccgcgggccggcgggcggcgcggagacggctgcgctcccgccctccgccagcgcctggcggccgccccacgtgacgggaagcggcggctgcggggtcgggccagcccaggagccgcgggccggagcggggcggcggggccccaggccgcggggcggcgcgggacggcgggcgccggcgccgcagatcagccagtagacatgatgagcatcaaagcctttacgcttgtctctgctgtggagcgggagctgctgatgggcgacaaggagcgcgtcaacatagagtgcgtggagtgctgcggcagggacctctacgtgggcaccaacgactgcttcgtctaccacttcctgttggaggagaggccagtgcctgctgggccagccacgttcactgccaccaaacagctgcagagacacttgggcttcaagaagcccgtgaacgagctgcgtgcggcctcagcactcaacaggctgctggtgctgtgtgacaactccatcagcctggtcaacatgctgaacctcgagccagtgccttcgggggcccgcatcaagggggcagccacgtttgcactgaacgagaaccctgtgagtggggaccccttctgtgtagaagtttgcatcatctctgtcaaacgcagaaccatccagatgtttctggtgtacgaggaccgggtgcagatcgtcaaggaggtgtcgactgccgagcagcccctcgctgtggctgtggacggccacttcctgtgtctggctctgaccactcagtacatcatccacaattacagcacaggcgtctcccaggacctgtttccctactgcagtgaggagaggccgccgatcgtcaagaggatagggagacaggagttcctgctggcgggccccggagggctgggcatgtttgccacagtcgcagggatatcccagcgcgcccccgtgcactggtcggagaatgtgattggggcggctgtgtcctttccatacgtcatagcgctcgatgacgaattcatcacagtccacagcatgttggatcagcaacagaagcagacgctgccctttaaggagggccatatcctacaggactttgaaggaagagtgatcgttgccacaagtaaaggagtttacatcttggttccattacctttggaaaaacaaatacaggatcttctagcaagccgcagagtagaagaggctttggttttagcaaaaggagcccggaggaacattccaaaggaaaaatttcaggtaatgtacagaaggattctgcagcaggcgggatttatacagtttgcacaacttcagttcctggaagctaaagagctcttcagaagcggccagcttgatgtccgggagctgatctctctctaccccttcctgttgcccacctcctcctccttcacccggtcccaccctcctcttcatgagtacgcagacctgaaccagctgacccagggggaccaggagaagatggccaagtgcaaacgcttcctcatgagctacctgaacgaggtccgcagcacagaggtagcaaatggctacaaggaggacatcgacacagccttgctcaaactgtatgcagaggctgaccacgacagcctgctggacctcctggtcactgagaacttctgtcttctgacggacagtgctgcctggctagagaagcacaaaaagtattttgcacttggactgctctatcattataataaccaagatgctgctgcagttcagttgtgggtgaacattgtgaatggcgatgtccaggactccacacgctcagacctgtatgaatacatcgtggattttcttacctactgcttagacgaggaactagtgtgggcctatgctgattgggtcctgcagaaaagtgaagaggtcggagttcaggttttcaccaagagacctttggatgaacagcagaagaacagttttaatccagacgacattatcaattgccttaaaaaataccctaaagcccttgtgaagtatctggaacatcttgtgatagacaagagactgcagaaagaagagtatcacacccacttagctgtgctgtacctggaagaggtgctgctgcagagggcctccgccagtggcaagggtgcagaggccaccgagacgcaggccaagctgcggcggctgctccagaaatctgatttataccgagtccactttcttctcgagaggctgcagggagctggcctgcccatggagagcgccatcctgcacgggaagctgggcgagcatgagaaggcgctgcatatcctggtgcacgagctgcaggactttgcagcggccgaggactactgcctgtggtgctccgagggccgagacccaccccaccgccagcaactctttcacacgctgctggccatctacctgcatgctggccccactgcccacgagctggccgtggctgccgtggacctgctgaaccgccacgccaccgaatttgatgcagcccaggtgctgcagatgctgcctgacacctggtcagtgcagctcctctgcccattcctgatgggggccatgagggacagcatccatgccaggaggaccatgcaggtggctctcggcctggccaggtccgaaaacttaatctacacctacgataagatgaagttgaaaggaagctcaatccaactctcagacaaaaagctttgtcagatatgccaaaatcccttttgtgagcctgtgtttgttagatacccaaatggtggtcttgtgcacacccactgtgccgccagcagacacacaaaccccagctcatccagtcctggcactcggacttgaaaagcttggcccaagggtgcgaggggaactccgagttctttctgagcctgctggacatgaagagcagatgaccaccatgctctgtgtcagccaggacgaagggagacatctgggtgccagggagccttccgtccatacgcaacaaggactcctcgctgctgaccaggctctatgaatgtacatggaatgaccaggctctatgaatgtacatggaaaacccctaaaaatccccaaaacagaaacatacaagagttcacctgtccaggtacatagtaatccaagacagaggtctactttgaaaaaaaaaaaaagggagtcttcctcatgcagtccagacccaggtgggggatcccccaccacccccacactccaacctttagactcatgtttgcactggaaacgtggcttcaccatggctggcgacaaagtcctctcttgcctgggtgagtggcgagggcacagagcctcatgggggtcagccttgccctcctgcagaaacacgttctccatccacgccgctcactcatgggcccatttcccagggttacctcgtgggctctgcctttgccctcagaaacggctgaccctggagaagtacctttgttccttctttcttcctctccggctctcagctcccaaaagattctgccttgtgtacccaagcactcactcttgggtgaactaatgcttctggctgcctagcaagtgaagatctgttgagaaactgagaacgctccaagagagaagctgctctcccctccttgaagaagccgcggacacgggaaacccacggcgggcaagggcccagctgtgtgctcctttcctgtcatggcatctgctgatttgaaactccatgacgaacacgttgaactaaacatttttatttaaatttgtatcatgttcgtagttgctctcttgttgagagagtcatctgtcctgtttgttaggggtattttttcttgttaaaatgtatctcctgttgaatactcgggaaattcaaagggaagtgtggtcagcacacactgagcgttcttttctggagaggccggttttagcctcgtacctttagcaggaccgacagcgggtggaagggcccgtgtgctggatgggggtgtcgcctcctggatggcacaccctcccgaggacatccagacaggctgtgtcaccctccagcactttatgtgcctgctctgaggtgtcctgaacacacagcaacggcctctccttcatcacaggccggggattccttttgtgtttctgtataacatcgatgacgagctgaagctgttgtcacttcactgccctctttggaatttcttcattgtgctgactgattctattaggggctaacaataaaggcagtctacccactactatcatgcttgggaaacaagcgtcagcttgtacatatgacaagagaggaccctgaatacaccctctcttcatcagcccaagccttactgaggtgggatgaagacctcattctctgttctttaaaacatgtttcgtgaactaatattggtccatgtattttttgtccttttgggactctaagtgggtcaagaagcaaaaacatccatgtgttgtttggggggaattggcaccattttttcctgactatgtttcaattaactaaagaataaatgatgaagaaattctccttgtagcacaactgtatgctgtgtaaattggtgtgagctcaaagcccagtcatgtgttttacctgtgggtgactctgttgtagaatggtcatattactgcatatgttatcatgacaacttgtgagtttgagtttatatttctcaaagaacaagttacccgtatatgcaacattgcgccattaaaagcttatttctctgtacacaaaatgggtaaaatcttgaaaaaacttagtaatttctcattcctaacacacagacagagtctcactctgtcacccaggctggagtgcagtggcgcaatctcggctcactgcaacctccacctcctgggttcaagcgattctgctgcctcagcctcccgagtagctgggactacaggtgcatgccaccacgcccagctaatttttgtatttttagtagagacggggtttcaccatgttggccaggatggtctcggtctcctgacctcgtgatctgcctgcctcggcctcccaaagtgctgggattacaggcgtgagccactgcgcccagccaacactagtcatttttattttttcactgaacattgatcaatactctaaaatgtttgtcatcctttagaataatgggaattaaagttgagcagttttccatctctaccaaatccttcaccacaagcagcattctattacagtatgaagaattgtctcatatgttaaaactgtacttttctctaacctttctctcactcctacaaggcccttttctcaaatcatatttctgagagaaatgtatggttctttctcacaggcctgctgatttgtaactgtgccatcgaatagagcaattagatccatcagacctttttcccctcattaggttcagtggaaccattctggttaaaacagcatgaactgaactcagtttacattcatattctatgggcaataccatttggtttttggaactgtttatctgctgttccctatcaagtattaatgtagggatgtcactcaggctgcgttgcactgggctgagttcaactgcgacgctctcactgacgcgtgcttacatgtgcttctcacttccggagcacaggcaggtggctgcggggtcccagctctgaatggatgcccatgatgcaactggggcagcccttgctttttgcttgctctcccacagaaacctttgtccttgcaactttatcctttgtcccgattgggtcccagatacacaaaatgtacaaatgtaaacttgctcattttattaaaattcttttagttctttgttctttctgtaattttttaaaataaaaattgccttgatgga

SEQ ID NO: 32056 - DNA, 2006 bp, Homo sapiens
  source 1..2006: mol_type = unassigned DNA
agcagacgctgccctttaaggagggccatatcctacaggactttgaaggaagagtgatcgttgccacaagtaaaggagtttacatcttggttccattacctttggaaaaacaaatacaggatcttctagcaagccgcagagtagaagaggctttggttttagcaaaaggagcccggaggaacattccaaaggaaaaatttcaggtaatgtacagaaggattctgcagcaggcgggatttatacagtttgcacaacttcagttcctggaagctaaagagctcttcagaagcggccagcttgatgtccgggagctgatctctctctaccccttcctgttgcccacctcctcctccttcacccggtcccaccctcctcttcatgagtacgcagacctgaaccagctgacccagggggaccaggagaagatggccaagtgcaaacgcttcctcatgagctacctgaacgaggtccgcagcacagaggtagcaaatggctacaaggaggacatcgacacagccttgctcaaactgtatgcagaggctgaccacgacagcctgctggacctcctggtcactgagaacttctgtcttctgacggacagtgctgcctggctagagaagcacaaaaagtattttgcacttggactgctctatcattataataaccaagatgctgctgcagttcagttgtgggtgaacattgtgaatggcgatgtccaggactccacacgctcagacctgtatgaatacatcgtggattttcttacctactgcttagacgaggaactagtgtgggcctatgctgattgggtcctgcagaaaagtgaagaggtcggttcaggttttcaccaagagacctttggatgaacagcagaagaacagttttaatccagacgacattatcaattgccttaaaaaataccctaaagcccttgtgaagtatctggaacatcttgtgatagacaagagactgcagaaagaagagtatcacacccacttagctgtgctgtacctggaagaggtgctgctgcagagggcctccgccagtggcaagggtgcagaggccaccgagacgcaggccaagctgcggcggctgctccagaaatctgatttataccgagtccactttcttctcgagaggctgcagggagctggcctgcccatggagagcgccatcctgcacgggaagctgggcgagcatgagaaggcgctgcatatcctggtgcacgagctgcaggactttgcagcggccgaggactactgcctgtggtgctccgagggccgagacccaccccaccgccagcaactctttcacacgctgctggccatctacctgcatgctggccccactgcccacgagctggccgtggctgccgtggacctgctgaaccgccacgccaccgaatttgatgcagcccaggtgctgcagatgctgcctgacacctggtcagtgcagctcctctgcccattcctgatgggggccatgagggacagcatccatgccaggaggaccatgcaggtggctctcggcctggccaggtccgaaaacttaatctacacctacgataagatgaagttgaaaggaagctcaatccaactctcagacaaaaagctttgtcagatatgccaaaatcccttttgtgagcctgtgtttgttagatacccaaatggtggtcttgtgcacacccactgtgccgccagcagacacacaaaccccagctcatccagtcctggcactcggacttgaaaagcttggcccaagggtgcgaggggaactccgagttctttctgagcctgctggacatgaagagcagatgaccaccatgctctgtgtcagccaggacgaagggagacatctgggtgccagggagccttccgtccatacgcaacaaggactcctcgctgctgaccaggctctatgaatgtacatggaaaatccccaaaacagaaacatacaagagttcacctgtccaggtacatagtaatccaagacagaggtctactttg

SEQ ID NO: 32057 - DNA, 4621 bp, Homo sapiens
  source 1..4621: mol_type = unassigned DNA
ggagagggagaaggctctcgggcggagagaggtcctgcccagctgttggcgaggagtttcctgtttcccccgcagcgctgagttgaagttgagtgagtcactcgcgcgcacggagcgacgacacccccgcgcgtgcacccgctcgggacaggagccggactcctgtgcagcttccctcggccgccgggggcctccccgcgcctcgccggcctccaggccccctcctggctggcgagcgggcgccacatctggcccgcacatctgcgctgccggcccggcgcggggtccggagagggcgcggcgcggaggcgcagccaggggtccgggaaggcgccgtccgctgcgctgggggctcggtctatgacgagcagcggggtctgccatgggtcgggggctgctcaggggcctgtggccgctgcacatcgtcctgtggacgcgtatcgccagcacgatcccaccgcacgttcagaagtcggttaataacgacatgatagtcactgacaacaacggtgcagtcaagtttccacaactgtgtaaattttgtgatgtgagattttccacctgtgacaaccagaaatcctgcatgagcaactgcagcatcacctccatctgtgagaagccacaggaagtctgtgtggctgtatggagaaagaatgacgagaacataacactagagacagtttgccatgaccccaagctcccctaccatgactttattctggaagatgctgcttctccaaagtgcattatgaaggaaaaaaaaaagcctggtgagactttcttcatgtgttcctgtagctctgatgagtgcaatgacaacatcatcttctcagaagaatataacaccagcaatcctgacttgttgctagtcatatttcaagtgacaggcatcagcctcctgccaccactgggagttgccatatctgtcatcatcatcttctactgctaccgcgttaaccggcagcagaagctgagttcaacctgggaaaccggcaagacgcggaagctcatggagttcagcgagcactgtgccatcatcctggaagatgaccgctctgacatcagctccacgtgtgccaacaacatcaaccacaacacagagctgctgcccattgagctggacaccctggtggggaaaggtcgctttgctgaggtctataaggccaagctgaagcagaacacttcagagcagtttgagacagtggcagtcaagatctttccctatgaggagtatgcctcttggaagacagagaaggacatcttctcagacatcaatctgaagcatgagaacatactccagttcctgacggctgaggagcggaagacggagttggggaaacaatactggctgatcaccgccttccacgccaagggcaacctacaggagtacctgacgcggcatgtcatcagctgggaggacctgcgcaagctgggcagctccctcgcccgggggattgctcacctccacagtgatcacactccatgtgggaggcccaagatgcccatcgtgcacagggacctcaagagctccaatatcctcgtgaagaacgacctaacctgctgcctgtgtgactttgggctttccctgcgtctggaccctactctgtctgtggatgacctggctaacagtgggcaggtgggaactgcaagatacatggctccagaagtcctagaatccaggatgaatttggagaatgttgagtccttcaagcagaccgatgtctactccatggctctggtgctctgggaaatgacatctcgctgtaatgcagtgggagaagtaaaagattatgagcctccatttggttccaaggtgcgggagcacccctgtgtcgaaagcatgaaggacaacgtgttgagagatcgagggcgaccagaaattcccagcttctggctcaaccaccagggcatccagatggtgtgtgagacgttgactgagtgctgggaccacgacccagaggcccgtctcacagcccagtgtgtggcagaacgcttcagtgagctggagcatctggacaggctctcggggaggagctgctcggaggagaagattcctgaagacggctccctaaacactaccaaatagctcttctggggcaggctgggccatgtccaaagaggctgcccctctcaccaaagaacagaggcagcaggaagctgcccctgaactgatgcttcctggaaaaccaagggggtcactcccctccctgtaagctgtggggataagcagaaacaacagcagcagggagtgggtgacatagagcattctatgcctttgacattgtcataggataagctgtgttagcacttcctcaggaaatgagattgatttttacaatagccaataacatttgcactttattaatgcctgtatataaatatgaatagctatgttttatatatatatatatatatctatatatgtctatagctctatatatatagccataccttgaaaagagacaaggaaaaacatcaaatattcccaggaaattggttttattggagaactccagaaccaagcagagaaggaagggacccatgacagcattagcatttgacaatcacacatgcagtggttctctgactgtaaaacagtgaactttgcatgaggaaagaggctccatgtctcacagccagctatgaccacattgcacttgcttttgcaaaataatcattccctgcctagcacttctcttctggccatggaactaagtacagtggcactgtttgaggaccagtgttcccggggttcctgtgtgcccttatttctcctggacttttcatttaagctccaagccccaaatctggggggctagtttagaaactctccctcaacctagtttagaaactctaccccatctttaataccttgaatgttttgaaccccactttttaccttcatgggttgcagaaaaatcagaacagatgtccccatccatgcgattgccccaccatctactaatgaaaaattgttctttttttcatctttcccctgcacttatgttactattctctgctcccagccttcatccttttctaaaaaggagcaaattctcactctaggctttatcgtgtttactttttcattacacttgacttgattttctagttttctatacaaacaccaatgggttccatctttctgggctcctgattgctcaagcacagtttggcctgatgaagaggatttcaactacacaatactatcattgtcaggactatgacctcaggcactctaaacatatgttttgtttggtcagcacagcgtttcaaaaagtgaagccactttataaatatttggagattttgcaggaaaatctggatccccaggtaaggatagcagatggttttcagttatctccagtccacgttcacaaaatgtgaaggtgtggagacacttacaaagctgcctcacttctcactgtaaacattagctctttccactgcctacctggaccccagtctaggaattaaatctgcacctaaccaaggtcccttgtaagaaatgtccattcaagcagtcattctctgggtatataatatgattttgactaccttatctggtgttaagatttgaagttggccttttattggactaaaggggaactcctttaagggtctcagttagcccaagtttcttttgcttatatgttaatagttttaccctctgcattggagagaggagtgctttactccaagaagctttcctcatggttaccgttctctccatcatgccagccttctcaacctttgcagaaattactagagaggatttgaatgtgggacacaaaggtcccatttgcagttagaaaatttgtgtccacaaggacaagaacaaagtatgagctttaaaactccataggaaacttgttaatcaacaaagaagtgttaatgctgcaagtaatctcttttttaaaactttttgaagctacttattttcagccaaataggaatattagagagggactggtagtgagaatatcagctctgtttggatggtggaaggtctcattttattgagatttttaagatacatgcaaaggtttggaaatagaacctctaggcaccctcctcagtgtgggtgggctgagagttaaagacagtgtggctgcagtagcatagaggcgcctagaaattccacttgcaccgtagggcatgctgataccatcccaatagctgttgcccattgacctctagtggtgagtttctagaatactggtccattcatgagatattcaagattcaagagtattctcacttctgggttatcagcataaactggaatgtagtgtcagaggatactgtggcttgttttgtttatgtttttttttcttattcaagaaaaaagaccaaggaataacattctgtagttcctaaaaatactgacttttttcactactatacataaagggaaagttttattcttttatggaacacttcagctgtactcatgtattaaaataggaatgtgaatgctatatactctttttatatcaaaagtctcaagcacttatttttattctatgcattgtttgtcttttacataaataaaatgtttattagattgaataaagcaaaatactcaggtgagcatcctgcctcctgttcccattcctag

SEQ ID NO: 32058 - DNA, 4605 bp, Homo sapiens
  source 1..4605: mol_type = unassigned DNA
actcgcgcgcacggagcgacgacacccccgcgcgtgcacccgctcgggacaggagccggactcctgtgcagcttccctcggccgccgggggcctccccgcgcctcgccggcctccaggccccctcctggctggcgagcgggcgccacatctggcccgcacatctgcgctgccggcccggcgcggggtccggagagggcgcggcgcggaggcgcagccaggggtccgggaaggcgccgtccgctgcgctgggggctcggtctatgacgagcagcggggtctgccatgggtcgggggctgctcaggggcctgtggccgctgcacatcgtcctgtggacgcgtatcgccagcacgatcccaccgcacgttcagaagtcggatgtggaaatggaggcccagaaagatgaaatcatctgccccagctgtaataggactgcccatccactgagacatattaataacgacatgatagtcactgacaacaacggtgcagtcaagtttccacaactgtgtaaattttgtgatgtgagattttccacctgtgacaaccagaaatcctgcatgagcaactgcagcatcacctccatctgtgagaagccacaggaagtctgtgtggctgtatggagaaagaatgacgagaacataacactagagacagtttgccatgaccccaagctcccctaccatgactttattctggaagatgctgcttctccaaagtgcattatgaaggaaaaaaaaaagcctggtgagactttcttcatgtgttcctgtagctctgatgagtgcaatgacaacatcatcttctcagaagaatataacaccagcaatcctgacttgttgctagtcatatttcaagtgacaggcatcagcctcctgccaccactgggagttgccatatctgtcatcatcatcttctactgctaccgcgttaaccggcagcagaagctgagttcaacctgggaaaccggcaagacgcggaagctcatggagttcagcgagcactgtgccatcatcctggaagatgaccgctctgacatcagctccacgtgtgccaacaacatcaaccacaacacagagctgctgcccattgagctggacaccctggtggggaaaggtcgctttgctgaggtctataaggccaagctgaagcagaacacttcagagcagtttgagacagtggcagtcaagatctttccctatgaggagtatgcctcttggaagacagagaaggacatcttctcagacatcaatctgaagcatgagaacatactccagttcctgacggctgaggagcggaagacggagttggggaaacaatactggctgatcaccgccttccacgccaagggcaacctacaggagtacctgacgcggcatgtcatcagctgggaggacctgcgcaagctgggcagctccctcgcccgggggattgctcacctccacagtgatcacactccatgtgggaggcccaagatgcccatcgtgcacagggacctcaagagctccaatatcctcgtgaagaacgacctaacctgctgcctgtgtgactttgggctttccctgcgtctggaccctactctgtctgtggatgacctggctaacagtgggcaggtgggaactgcaagatacatggctccagaagtcctagaatccaggatgaatttggagaatgttgagtccttcaagcagaccgatgtctactccatggctctggtgctctgggaaatgacatctcgctgtaatgcagtgggagaagtaaaagattatgagcctccatttggttccaaggtgcgggagcacccctgtgtcgaaagcatgaaggacaacgtgttgagagatcgagggcgaccagaaattcccagcttctggctcaaccaccagggcatccagatggtgtgtgagacgttgactgagtgctgggaccacgacccagaggcccgtctcacagcccagtgtgtggcagaacgcttcagtgagctggagcatctggacaggctctcggggaggagctgctcggaggagaagattcctgaagacggctccctaaacactaccaaatagctcttctggggcaggctgggccatgtccaaagaggctgcccctctcaccaaagaacagaggcagcaggaagctgcccctgaactgatgcttcctggaaaaccaagggggtcactcccctccctgtaagctgtggggataagcagaaacaacagcagcagggagtgggtgacatagagcattctatgcctttgacattgtcataggataagctgtgttagcacttcctcaggaaatgagattgatttttacaatagccaataacatttgcactttattaatgcctgtatataaatatgaatagctatgttttatatatatatatatatatctatatatgtctatagctctatatatatagccataccttgaaaagagacaaggaaaaacatcaaatattcccaggaaattggttttattggagaactccagaaccaagcagagaaggaagggacccatgacagcattagcatttgacaatcacacatgcagtggttctctgactgtaaaacagtgaactttgcatgaggaaagaggctccatgtctcacagccagctatgaccacattgcacttgcttttgcaaaataatcattccctgcctagcacttctcttctggccatggaactaagtacagtggcactgtttgaggaccagtgttcccggggttcctgtgtgcccttatttctcctggacttttcatttaagctccaagccccaaatctggggggctagtttagaaactctccctcaacctagtttagaaactctaccccatctttaataccttgaatgttttgaaccccactttttaccttcatgggttgcagaaaaatcagaacagatgtccccatccatgcgattgccccaccatctactaatgaaaaattgttctttttttcatctttcccctgcacttatgttactattctctgctcccagccttcatccttttctaaaaaggagcaaattctcactctaggctttatcgtgtttactttttcattacacttgacttgattttctagttttctatacaaacaccaatgggttccatctttctgggctcctgattgctcaagcacagtttggcctgatgaagaggatttcaactacacaatactatcattgtcaggactatgacctcaggcactctaaacatatgttttgtttggtcagcacagcgtttcaaaaagtgaagccactttataaatatttggagattttgcaggaaaatctggatccccaggtaaggatagcagatggttttcagttatctccagtccacgttcacaaaatgtgaaggtgtggagacacttacaaagctgcctcacttctcactgtaaacattagctctttccactgcctacctggaccccagtctaggaattaaatctgcacctaaccaaggtcccttgtaagaaatgtccattcaagcagtcattctctgggtatataatatgattttgactaccttatctggtgttaagatttgaagttggccttttattggactaaaggggaactcctttaagggtctcagttagcccaagtttcttttgcttatatgttaatagttttaccctctgcattggagagaggagtgctttactccaagaagctttcctcatggttaccgttctctccatcatgccagccttctcaacctttgcagaaattactagagaggatttgaatgtgggacacaaaggtcccatttgcagttagaaaatttgtgtccacaaggacaagaacaaagtatgagctttaaaactccataggaaacttgttaatcaacaaagaagtgttaatgctgcaagtaatctcttttttaaaactttttgaagctacttattttcagccaaataggaatattagagagggactggtagtgagaatatcagctctgtttggatggtggaaggtctcattttattgagatttttaagatacatgcaaaggtttggaaatagaacctctaggcaccctcctcagtgtgggtgggctgagagttaaagacagtgtggctgcagtagcatagaggcgcctagaaattccacttgcaccgtagggcatgctgataccatcccaatagctgttgcccattgacctctagtggtgagtttctagaatactggtccattcatgagatattcaagattcaagagtattctcacttctgggttatcagcataaactggaatgtagtgtcagaggatactgtggcttgttttgtttatgtttttttttcttattcaagaaaaaagaccaaggaataacattctgtagttcctaaaaatactgacttttttcactactatacataaagggaaagttttattcttttatggaacacttcagctgtactcatgtattaaaataggaatgtgaatgctatatactctttttatatcaaaagtctcaagcacttatttttattctatgcattgtttgtcttttacataaataaaatgtttattagattgaataaagcaaaatactcaggtgagcatcctgcctcctgttcccattcctagtagctaaa

SEQ ID NO: 32059 - DNA, 2385 bp, Homo sapiens
  source 1..2385: mol_type = unassigned DNA
actcgcgcgcacggagcgacgacacccccgcgcgtgcacccgctcgggacaggagccggactcctgtgcagcttccctcggccgccgggggcctccccgcgcctcgccggcctccaggccccctcctggctggcgagcgggcgccacatctggcccgcacatctgcgctgccggcccggcgcggggtccggagagggcgcggcgcggaggcgcagccaggggtccgggaaggcgccgtccgctgcgctgggggctcggtctatgacgagcagcggggtctgccatgggtcgggggctgctcaggggcctgtggccgctgcacatcgtcctgtggacgcgtatcgccagcacgatcccaccgcacgttcagaagtcggatgtggaaatggaggcccagaaagatgaaatcatctgccccagctgtaataggactgcccatccactgagacatattaataacgacatgatagtcactgacaacaacggtgcagtcaagtttccacaactgtgtaaattttgtgatgtgagattttccacctgtgacaaccagaaatcctgcatgagcaactgcagcatcacctccatctgtgagaagccacaggaagtctgtgtggctgtatggagaaagaatgacgagaacataacactagagacagtttgccatgaccccaagctcccctaccatgactttattctggaagatgctgcttctccaaagtgcattatgaaggaaaaaaaaaagcctggtgagactttcttcatgtgttcctgtagctctgatgagtgcaatgacaacatcatcttctcagaaggtagatgtaaaatcagacatataggttcaaacaatcgattgcaaaggagcacttgtcaaaacactggctgggaatctgctcatgtgatgaagaccccagggtttagagaatataacaccagcaatcctgacttgttgctagtcatatttcaagtgacaggcatcagcctcctgccaccactgggagttgccatatctgtcatcatcatcttctactgctaccgcgttaaccggcagcagaagctgagttcaacctgggaaaccggcaagacgcggaagctcatggagttcagcgagcactgtgccatcatcctggaagatgaccgctctgacatcagctccacgtgtgccaacaacatcaaccacaacacagagctgctgcccattgagctggacaccctggtggggaaaggtcgctttgctgaggtctataaggccaagctgaagcagaacacttcagagcagtttgagacagtggcagtcaagatctttccctatgaggagtatgcctcttggaagacagagaaggacatcttctcagacatcaatctgaagcatgagaacatactccagttcctgacggctgaggagcggaagacggagttggggaaacaatactggctgatcaccgccttccacgccaagggcaacctacaggagtacctgacgcggcatgtcatcagctgggaggacctgcgcaagctgggcagctccctcgcccgggggattgctcacctccacagtgatcacactccatgtgggaggcccaagatgcccatcgtgcacagggacctcaagagctccaatatcctcgtgaagaacgacctaacctgctgcctgtgtgactttgggctttccctgcgtctggaccctactctgtctgtggatgacctggctaacagtgggcaggtgggaactgcaagatacatggctccagaagtcctagaatccaggatgaatttggagaatgttgagtccttcaagcagaccgatgtctactccatggctctggtgctctgggaaatgacatctcgctgtaatgcagtgggagaagtaaaagattatgagcctccatttggttccaaggtgcgggagcacccctgtgtcgaaagcatgaaggacaacgtgttgagagatcgagggcgaccagaaattcccagcttctggctcaaccaccagggcatccagatggtgtgtgagacgttgactgagtgctgggaccacgacccagaggcccgtctcacagcccagtgtgtggcagaacgcttcagtgagctggagcatctggacaggctctcggggaggagctgctcggaggagaagattcctgaagacggctccctaaacactaccaaatagctcttctggggcaggctgggccatgtccaaagaggctgcccctctcaccaaagaacagaggcagcaggaagctgcccctgaactgatgcttcctggaaaaccaagggggtcactcccctccctgtaagctgtggggataagcagaaacaacagcagcagggagtgggtgacatagagcattctatgcctttgacattgtcataggataagctgtg

SEQ ID NO: 32060 - DNA, 2013 bp, Homo sapiens
  source 1..2013: mol_type = unassigned DNA
ttatttcccctgtagcttttctcaagagacttcatggactaatttcccaataatcatagtagctaccacttattgaggtcttgctactgcacggatcatgctgagtacttcaggtgtattaaccctcaaaacaactttagaagatgtggaaatggaggcccagaaagatgaaatcatctgccccagctgtaataggactgcccatccactgagacatattaataacgacatgatagtcactgacaacaacggtgcagtcaagtttccacaactgtgtaaattttgtgatgtgagattttccacctgtgacaaccagaaatcctgcatgagcaactgcagcatcacctccatctgtgagaagccacaggaagtctgtgtggctgtatggagaaagaatgacgagaacataacactagagacagtttgccatgaccccaagctcccctaccatgactttattctggaagatgctgcttctccaaagtgcattatgaaggaaaaaaaaaagcctggtgagactttcttcatgtgttcctgtagctctgatgagtgcaatgacaacatcatcttctcagaagaatataacaccagcaatcctgacttgttgctagtcatatttcaagtgacaggcatcagcctcctgccaccactgggagttgccatatctgtcatcatcatcttctactgctaccgcgttaaccggcagcagaagctgagttcaacctgggaaaccggcaagacgcggaagctcatggagttcagcgagcactgtgccatcatcctggaagatgaccgctctgacatcagctccacgtgtgccaacaacatcaaccacaacacagagctgctgcccattgagctggacaccctggtggggaaaggtcgctttgctgaggtctataaggccaagctgaagcatgagaacatactccagttcctgacggctgaggagcggaagacggagttggggaaacaatactggctgatcaccgccttccacgccaagggcaacctacaggagtacctgacgcggcatgtcatcagctgggaggacctgcgcaagctgggcagctccctcgcccgggggattgctcacctccacagtgatcacactccatgtgggaggcccaagatgcccatcgtgcacagggacctcaagagctccaatatcctcgtgaagaacgacctaacctgctgcctgtgtgactttgggctttccctgcgtctggaccctactctgtctgtggatgacctggctaacagtgggcaggtgggaactgcaagatacatggctccagaagtcctagaatccaggatgaatttggagaatgttgagtccttcaagcagaccgatgtctactccatggctctggtgctctgggaaatgacatctcgctgtaatgcagtgggagaagtaaaagattatgagcctccatttggttccaaggtgcgggagcacccctgtgtcgaaagcatgaaggacaacgtgttgagagatcgagggcgaccagaaattcccagcttctggctcaaccaccagggcatccagatggtgtgtgagacgttgactgagtgctgggaccacgacccagaggcccgtctcacagcccagtgtgtggcagaacgcttcagtgagctggagcatctggacaggctctcggggaggagctgctcggaggagaagattcctgaagacggctccctaaacactaccaaatagctcttctggggcaggctgggccatgtccaaagaggctgcccctctcaccaaagaacagaggcagcaggaagctgcccctgaactgatgcttcctggaaaaccaagggggtcactcccctccctgtaagctgtggggataagcagaaacaacagcagcagggagtgggtgacatagagcattctatgcctttgacattgtcataggataagctgtgttagcacttcctcaggaaatgagattgatttttacaatagccaataacatttgcactttattaatgcctgtatataaa

SEQ ID NO: 32061 - DNA, 6416 bp, Homo sapiens
  source 1..6416: mol_type = unassigned DNA
gattgctgtggcgtcctgcccgtccccgcccgcgtgtgtgcgagggagggcgagtgcgccgggtcggcctgatgggggtaatcgagggtttcggggacgccgagcggcactttcctcttcccagcgagtgaaggagggcagtcggcggctctcgcgccccggccactttccctgcgcgattcccggagctccctgcaggaggtgagagtccccagcgggtccggatggcgtagttttgccgcggcgcagcagctgccggagctcgccgccgccgagcgctgggcggggaaacttgccgccgctttcctccaacttgctgcgggtggatctccgctggacacaccgcctccgaggcagtttgaaaattgcaaggagggactttaagactacttctgatttgcaaagattgtctgtgctctgagcaggctgaagtgactggacgagacgcactgttggagaaataaaaatgacttcccattatgtgattgccatctttgccctgatgagctcctgtttagccactgcaggtccagagcctggtgcactgtgtgaactgtcacctgtcagtgcctcccatcctgtccaggccttgatggagagcttcactgttttgtcaggctgtgccagcagaggcacaactgggctgccacaggaggtgcatgtcctgaatctccgcactgcaggccaggggcctggccagctacagagagaggtcacacttcacctgaatcccatctcctcagtccacatccaccacaagtctgttgtgttcctgctcaactccccacaccccctggtgtggcatctgaagacagagagacttgccactggggtctccagactgtttttggtgtctgagggttctgtggtccagttttcatcagcaaacttctccttgacagcagaaacagaagaaaggaacttcccccatggaaatgaacatctgttaaattgggcccgaaaagagtatggagcagttacttcattcaccgaactcaagatagcaagaaacatttatattaaagtgggggaagatcaagtgttccctccaaagtgcaacatagggaagaattttctctcactcaattaccttgctgagtaccttcaacccaaagcagcagaagggtgtgtgatgtccagccagccccagaatgaggaagtacacatcatcgagctaatcacccccaactctaacccctacagtgctttccaggtggatataacaattgatataagaccttctcaagaggatcttgaagtggtcaaaaatctcatcctgatcttgaagtgcaaaaagtctgtcaactgggtgatcaaatcttttgatgttaagggaagcctgaaaattattgctcctaacagtattggctttggaaaagagagtgaaagatctatgacaatgaccaaatcaataagagatgacattccttcaacccaagggaatctggtgaagtgggctttggacaatggctatagtccaataacttcatacacaatggctcctgtggctaatagatttcatcttcggcttgaaaataatgcagaggagatgggagatgaggaagtccacactattcctcctgagctacggatcctgctggaccctggtgccctgcctgccctgcagaacccgcccatccggggaggggaaggccaaaatggaggccttccgtttcctttcccagatatttccaggagagtctggaatgaagagggagaagatgggctccctcggccaaaggaccctgtcattcccagcatacaactgtttcctggtctcagagagccagaagaggtgcaagggagcgtggatattgccctgtctgtcaaatgtgacaatgagaagatgatcgtggctgtagaaaaagattcttttcaggccagtggctactcggggatggacgtcaccctgttggatcctacctgcaaggccaagatgaatggcacacactttgttttggagtctcctctgaatggctgcggtactcggccccggtggtcagcccttgatggtgtggtctactataactccattgtgatacaggttccagcccttggggacagtagtggttggccagatggttatgaagatctggagtcaggtgataatggatttccgggagatatggatgaaggagatgcttccctgttcacccgacctgaaatcgtggtgtttaattgcagccttcagcaggtgaggaaccccagcagcttccaggaacagccccacggaaacatcaccttcaacatggagctatacaacactgacctctttttggtgccctcccagggcgtcttctctgtgccagagaatggacacgtttatgttgaggtatctgttactaaggctgaacaagaactgggatttgccatccaaacgtgctttatctctccatattcgaaccctgataggatgtctcattacaccattattgagaatatttgtcctaaagatgaatctgtgaaattctacagtcccaagagagtgcactttcctatcccgcaagctgacatggataagaagcgattcagctttgtcttcaagcctgtcttcaacacctcactgctctttctacagtgtgagctgacgctgtgtacgaagatggagaagcacccccagaagttgcctaagtgtgtgcctcctgacgaagcctgcacctcgctggacgcctcgataatctgggccatgatgcagaataagaagacgttcactaagccccttgctgtgatccaccatgaagcagaatctaaagaaaaaggtccaagcatgaaggaaccaaatccaatttctccaccaattttccatggtctggacaccctaaccgtgatgggcattgcgtttgcagcctttgtgatcggagcactcctgacgggggccttgtggtacatctattctcacacaggggagacagcaggaaggcagcaagtccccacctccccgccagcctcggaaaacagcagtgctgcccacagcatcggcagcacgcagagcacgccttgctccagcagcagcacggcctagcccaacccagcccaacccggcccaacccagcccagcccagctcagctcagctactgccaagggcaggaccaatggctgagcctcgtgtccagactcagagggctggattttggttcccttgtaaagacagagtgaatttcagtataaagatcacccgttgtattcaccccacacccagggctagtataaacatgaccctgggcttctgtaccacactagaattcatgtgagaaagctaaaatggtggtcttctccaccagcccctcacaggcttgggggttttcaatgtgaaacacatgccagtttttaaaatgctgctttgtccaggtgagaacatccataatttggggccctgagttttacccagactcaaggagttggtaaagggttaatagccagatagtagaaccagtgaggagatgcggccaaagattctttatatctgaaccaagatgtaaaacaagaaatgctttgaggctttctaagcgatcctcctgtctaatttgcacctttgtctggatgcacacttctgaccttgctgccacaacctgtggggtctgatgtgtcccttgatgggtgctgccctcagggactgcaccctgacaagtgttaaggcaacattcctttcttgtgccctgggccaaaaccaatgctgatgaccttatcagcttcctgtttcttcccatacttgcatacaccactgcaaaatgtcttaatgcaaattttgtatttcttacaggcctacagaaattgaaaatgaccaaaatcaggaaccacagatttgtgcccattcctaatattttgttctgcaaattaatgtataatttgaggtgaaattcagttataaagtcaaggacgaatttgcacagtgatatatttctatgtgtatgcaagtacaagtatataatatgtcacctggcacattcattttctcagttgaagaagagaaaatttgaaaatgtccttatgcttttagagttgcaacttaagtatatttggtagggtgagtgtttccactcaaaatatgtcaacttaaaaaaaaataggccctttcataaaaaccaaactgtagcaagatgcaaatgcatggcaaatcctgtcggtctccagttggttatctgaatagtgtcaccaattccaccaagacagtgctgagattggaaaagggcactcatttggattgccttacttctcttgccttaaatatatcccatatatttaatatgtcaaaaagggcttgaggtgaatttcattaaatggaataatatgatgccactttgcagctaaaataagctcagtgatacctccttgttaaaaaaaaaaaaaaaaaaaaagaatgccaggggggaattatcatgctaaattattttactgctgaagatagcttcattgcaaattattctttttccagaatttcccccaaacaacttagaattccataagtagaacaagatagattctacccccaaaatattcataagcaaatcccactgcccttaaaataaggaagttatgcctggttgtctgtgaatggaacctcagtaggtaatcctgatgaagcttaaaaccttagggcagtgtctacatgggaaacaagtatgtggaaattgacaatcatttttaccaaatcgttgagtaataatatgacttacctgatagatatacacattcaataaggaacatttttttttttcaataaggaacattttaactaaaacattactttagggctgagatttccaggctatctacattgatctactgaaaaatttctagatttccatatacaaacgaagaagacatgagtttagagaatttttttcctttaatttttttttaacagaagggtatcagagtggaggacctagattacgctacctgtgtttgaaaatattgcgctttgcctaaccttcggtggaatgtattgtttcagcatattctatgtataaaaaagtttaaagatgtcttcaaagaagactagagtctttaagtcacttatagctatattttactacaaaatttgtgtataaagatatatttaagtgttttagataaatttaagttactccatatgaaatgtttaatttcagctactgtgaattctttcgatcagtcctttgcttttttaaaaaatcttttccatcgtgttaaaaagaaaattagctattaggagatattaaaagattgatgtcttagaaggacagggttaaaaccttctgtaatatatttaaatatatatttttaagagagatgctacattgccaatgattttataaataatttaaaattaatttacaaatttatagatgcaaaccaaaagatctttttaaaagagagagagaggaaaaaaatcaccttttatttgtttgggtctcattgtcagaattattattcagatcaagaaatctgtgtcgataaaacctaatctcatattggagagtgaatgtcgttaagtatttctgaaatgtttctaaaaaatgaacatgaaaaaaataaggtattttctccctagcttctcattacagtatttctaattgcttcacactttacagttttaatacaaagtacaagctctacttttataacgtgtactacaagtttctttaaaagtattgttgtatttcagctgaactcttgtatctgcagtcttttgttatttctgcaggctacacccttaatttgcagaggccattttgttgtttgtttgatgctgaagctgttgttaaaatgccccaaactccaaggcagattgtctgtataatacgctatagcttttcaccatgtggtgtttaccagctgttactctgtattttaaaaagccagagatttcttctgtctaaactgtttctatagcattttctaaacaaaaaaaatggtttttttctttgccttgtaataagattgtaaatccatttcctgcttgtgttcttagtgggcatgattgtgagtgtgtgtggggtgctcacacgcgtgccagtctttttgtactgtaactacctcatggtttgaatgatgattgtactgctggttgtgttaacagagcacattttgttgggtgagtcctatgtgatttttttcatgtttgttttatctgggggttgttcatgaaactgacagatgtttttctaaaaaggactattatcagtttccaaatacaatacttctctcttctggtttttcctgaatgagcctgattttgttgctggttttcatcatctatgagggtaaaacgagtacccttaaaatccctgtggccagtttgaacacccctgttgtattcttttctctgttcagtgtgtcagctattttgtgaagatgcttagatgtatagttttgataaccacagttttaaatcttttatctgtgcataataaaaagatatatatcagttatt

SEQ ID NO: 32062 - DNA, 4550 bp, Homo sapiens
  source 1..4550: mol_type = unassigned DNA
aagaatcttgtttttttgagacggagtctcaccctgtcgcccgggctggagtgcagtggcgcgatcgcaacctccgcttcccgggttcaagggattctcctgcctcagcctcctgagtagctgggactacaggcgcacgccactacacccggccaatttttgtatttatttattttattttattttattttttagtagagacggggtttcaccatgttggccagaacagtctcgatctcctaacctcgtgatccacccgcctcgggctcccaaagtgttgagattacaggcgtgagccaccgcgcccgtccagaattatctttaaaatttatttctttaagatttgtagctactaagaaagaaaggagctttttttccttgggccttcaaactgaaagaaccgcatgagcctgaagctgcgcatggtcttaacatcaggctgtgcaggaagaagctatctgcagatggatgccagcacacacaaggaagcagagctctggcaacattgagtcaaagcaaggacacaacatcagagggacggcagagaatccttgtgtgtagatctttggtggcagtttgaaaattgcaaggagggactttaagactacttctgatttgcaaagattgtctgtgctctgagcaggctgaagtgactggacgagacgcactgttggagaaataaaaatgacttcccattatgtgattgccatctttgccctgatgagctcctgtttagccactgcaggtccagagcctggtgcactgtgtgaactgtcacctgtcagtgcctcccatcctgtccaggccttgatggagagcttcactgttttgtcaggctgtgccagcagaggcacaactgggctgccacaggaggtgcatgtcctgaatctccgcactgcaggccaggggcctggccagctacagagagaggtcacacttcacctgaatcccatctcctcagtccacatccaccacaagtctgttgtgttcctgctcaactccccacaccccctggtgtggcatctgaagacagagagacttgccactggggtctccagactgtttttggtgtctgagggttctgtggtccagttttcatcagcaaacttctccttgacagcagaaacagaagaaaggaacttcccccatggaaatgaacatctgttaaattgggcccgaaaagagtatggagcagttacttcattcaccgaactcaagatagcaagaaacatttatattaaagtgggggaagatcaagtgttccctccaaagtgcaacatagggaagaattttctctcactcaattaccttgctgagtaccttcaacccaaagcagcagaagggtgtgtgatgtccagccagccccagaatgaggaagtacacatcatcgagctaatcacccccaactctaacccctacagtgctttccaggtggatataacaattgatataagaccttctcaagaggatcttgaagtggtcaaaaatctcatcctgatcttgaagtgcaaaaagtctgtcaactgggtgatcaaatcttttgatgttaagggaagcctgaaaattattgctcctaacagtattggctttggaaaagagagtgaaagatctatgacaatgaccaaatcaataagagatgacattccttcaacccaagggaatctggtgaagtgggctttggacaatggctatagtccaataacttcatacacaatggctcctgtggctaatagatttcatcttcggcttgaaaataatgaggagatgggagatgaggaagtccacactattcctcctgagctacggatcctgctggaccctggtgccctgcctgccctgcagaacccgcccatccggggaggggaaggccaaaatggaggccttccgtttcctttcccagatatttccaggagagtctggaatgaagagggagaagatgggctccctcggccaaaggaccctgtcattcccagcatacaactgtttcctggtctcagagagccagaagaggtgcaagggagcgtggatattgccctgtctgtcaaatgtgacaatgagaagatgatcgtggctgtagaaaaagattcttttcaggccagtggctactcggggatggacgtcaccctgttggatcctacctgcaaggccaagatgaatggcacacactttgttttggagtctcctctgaatggctgcggtactcggccccggtggtcagcccttgatggtgtggtctactataactccattgtgatacaggttccagcccttggggacagtagtggttggccagatggttatgaagatctggagtcaggtgataatggatttccgggagatatggatgaaggagatgcttccctgttcacccgacctgaaatcgtggtgtttaattgcagccttcagcaggtgaggaaccccagcagcttccaggaacagccccacggaaacatcaccttcaacatggagctatacaacactgacctctttttggtgccctcccagggcgtcttctctgtgccagagaatggacacgtttatgttgaggtatctgttactaaggctgaacaagaactgggatttgccatccaaacgtgctttatctctccatattcgaaccctgataggatgtctcattacaccattattgagaatatttgtcctaaagatgaatctgtgaaattctacagtcccaagagagtgcactttcctatcccgcaagctgacatggataagaagcgattcagctttgtcttcaagcctgtcttcaacacctcactgctctttctacagtgtgagctgacgctgtgtacgaagatggagaagcacccccagaagttgcctaagtgtgtgcctcctgacgaagcctgcacctcgctggacgcctcgataatctgggccatgatgcagaataagaagacgttcactaagccccttgctgtgatccaccatgaagcagaatctaaagaaaaaggtccaagcatgaaggaaccaaatccaatttctccaccaattttccatggtctggacaccctaaccgtgatgggcattgcgtttgcagcctttgtgatcggagcactcctgacgggggccttgtggtacatctattctcacacaggggagacagcaggaaggcagcaagtccccacctccccgccagcctcggaaaacagcagtgctgcccacagcatcggcagcacgcagagcacgccttgctccagcagcagcacggcctagcccaacccagcccaacccggcccaacccagcccagcccagctcagctcagctactgccaagggcaggaccaatggctgagcctcgtgtccagactcagagggctggattttggttcccttgtaaagacagagtgaatttcagtataaagatcacccgttgtattcaccccacacccagggctagtataaacatgaccctgggcttctgtaccacactagaattcatgtgagaaagctaaaatggtggtcttctccaccagcccctcacaggcttgggggttttcaatgtgaaacacatgccagtttttaaaatgctgctttgtccaggtgagaacatccataatttggggccctgagttttacccagactcaaggagttggtaaagggttaatagccagatagtagaaccagtgaggagatgcggccaaagattctttatatctgaaccaagatgtaaaacaagaaatgctttgaggctttctaagcgatcctcctgtctaatttgcacctttgtctggatgcacacttctgaccttgctgccacaacctgtggggtctgatgtgtcccttgatgggtgctgccctcagggactgcaccctgacaagtgttaaggcaacattcctttcttgtgccctgggccaaaaccaatgctgatgaccttatcagcttcctgtttcttcccatacttgcatacaccactgcaaaatgtcttaatgcaaattttgtatttcttacaggcctacagaaattgaaaatgaccaaaatcaggaaccacagatttgtgcccattcctaatattttgttctgcaaattaatgtataatttgaggtgaaattcagttataaagtcaaggacgaatttgcacagtgatatatttctatgtgtatgcaagtacaagtatataatatgtcacctggcacattcattttctcagttgaagaagagaaaatttgaaaatgtccttatgcttttagagttgcaacttaagtatatttggtagggtgagtgtttccactcaaaatatgtcaacttaaaaaaaaataggccctttcataaaaaccaaactgtagcaagatgcaaatgcatggcaaatcctgtcggtctccagttggttatctgaatagtgtcaccaattccaccaagacagtgctgagattggaaaagggcactcatttggattgccttacttctcttgccttaaatatatcccatatatttaatatgtcaaaaagggcttgaggtgaatttcattaaatggaataatatgatgccactttgcagctaaaataagctcagtgatacctccttgtt

SEQ ID NO: 32063 - DNA, 551 bp, Homo sapiens
  source 1..551: mol_type = unassigned DNA
actttcctcttcccagcgagtgaaggagggcagtcggcggctctcgcgccccggccactttccctgcgcgattcccggagctccctgcaggaggtgagagtccccagcgggtccggatggcgtagttttgccgcggcgcagcagctgccggagctcgccgccgccgagcgctgggcggggaaacttgccgccgctttcctccaacttgctgcgggtggatctccgctggacacaccgcctccgagctctgcagctctcctccctcctgtaatgcttcctctgcctgcagtgtcattcatcacctgacttttaaaatcttcgcttatcctcaggcagtttgaaaattgcaaggagggactttaagactacttctgatttgcaaagattgtctgtgctctgagcaggctgaagtgactggacgagacgcactgttggagaaataaaaatgacttcccattatgtgattgccatctttgccctgatgagctcctgtttagccactgcaggtccagagcctggtgcactgtgtgaactgtcacctgtcagtgcct

SEQ ID NO: 32064 - DNA, 2908 bp, Homo sapiens
  source 1..2908: mol_type = unassigned DNA
cagcgagtgaaggagggcagtcggcggctctcgcgccccggccactttccctgcgcgattcccggagctccctgcaggaggtgagagtccccagcgggtccggatggcgtagttttgccgcggcgcagcagctgccggagctcgccgccgccgagcgctgggcggggaaacttgccgccgctttcctccaacttgctgcgggtggatctccgctggacacaccgcctccgaggcagtttgaaaattgcaaggagggactttaagactacttctgatttgcaaagattgtctgtgctctgagcaggctgaagtgactggacgagacgcactgttggagaaataaaaatgacttcccattatgtgattgccatctttgccctgatgagctcctgtttagccactgcaggtccagagcctggtgcactgtgtgaactgtcacctgtcagtgcctcccatcctgtccaggccttgatggagagcttcactgttttgtcaggctgtgccagcagaggcacaactgggctgccacaggaggtgcatgtcctgaatctccgcactgcaggccaggggcctggccagctacagagagaggtcacacttcacctgaatcccatctcctcagtccacatccaccacaagtctgttgtgttcctgctcaactccccacaccccctggtgtggcatctgaagacagagagacttgccactggggtctccagactgtttttggtgtctgagggttctgtggtccagttttcatcagcaaacttctccttgacagcagaaacagaagaaaggaacttcccccatggaaatgaacatctgttaaattgggcccgaaaagagtatggagcagttacttcattcaccgaactcaagatagcaagaaacatttatattaaagtgggggaagatcaagtgttccctccaaagtgcaacatagggaagaattttctctcactcaattaccttgctgagtaccttcaacccaaagcagcagaagggtgtgtgatgtccagccagccccagaatgaggaagtacacatcatcgagctaatcacccccaactctaacccctacagtgctttccaggtggatataacaattgatataagaccttctcaagaggatcttgaagtggtcaaaaatctcatcctgatcttgaagtgcaaaaagtctgtcaactgggtgatcaaatcttttgatgttaagggaagcctgaaaattattgctcctaacagtattggctttggaaaagagagtgaaagatctatgacaatgaccaaatcaataagagatgacattccttcaacccaagggaatctggtgaagtgggctttggacaatggctatagtccaataacttcatacacaatggctcctgtggctaatagatttcatcttcggcttgaaaataatgaggagatgggagatgaggaagtccacactattcctcctgagctacggatcctgctggaccctggtgccctgcctgccctgcagaacccgcccatccggggaggggaaggccaaaatggaggccttccgtttcctttcccagatatttccaggagagtctggaatgaagagggagaagatgggctccctcggccaaaggaccctgtcattcccagcatacaactgtttcctggtctcagagagccagaagaggtgcaagggagcgtggatattgccctgtctgtcaaatgtgacaatgagaagatgatcgtggctgtagaaaaagattcttttcaggccagtggctactcggggatggacgtcaccctgttggatcctacctgcaaggccaagatgaatggcacacactttgttttggagtctcctctgaatggctgcggtactcggccccggtggtcagcccttgatggtgtggtctactataactccattgtgatacaggttccagcccttggggacagtagtggttggccagatggttatgaagatctggagtcaggtgataatggatttccgggagatatggatgaaggagatgcttccctgttcacccgacctgaaatcgtggtgtttaattgcagccttcagcaggtgaggaaccccagcagcttccaggaacagccccacggaaacatcaccttcaacatggagctatacaacactgacctctttttggtgccctcccagggcgtcttctctgtgccagagaatggacacgtttatgttgaggtatctgttactaaggctgaacaagaactgggatttgccatccaaacgtgctttatctctccatattcgaaccctgataggatgtctcattacaccattattgagaatatttgtcctaaagatgaatctgtgaaattctacagtcccaagagagtgcactttcctatcccgcaagctgacatggataagaagcgattcagctttgtcttcaagcctgtcttcaacacctcactgctctttctacagtgtgagctgacgctgtgtacgaagatggagaagcacccccagaagttgcctaagtgtgtgcctcctgacgaagcctgcacctcgctggacgcctcgataatctgggccatgatgcagaataagaagacgttcactaagccccttgctgtgatccaccatgaagcagaatctaaagaaaaaggtccaagcatgaaggaaccaaatccaatttctccaccaattttccatggtctggacaccctaaccgtgatgggcattgcgtttgcagcctttgtgatcggagcactcctgacgggggccttgtggtacatctattctcacacaggggagacagcaggaaggcagcaagtccccacctccccgccagcctcggaaaacagcagtgctgcccacagcatcggcagcacgcagagcacgccttgctccagcagcagcacggcctagcccaacccag

SEQ ID NO: 32065 - DNA, 3927 bp, Homo sapiens
  source 1..3927: mol_type = unassigned DNA
gattgtctgtgctctgagcaggctgaagtgactggacgagacgcactgttggagaaataaaaatgacttcccattatgtgattgccatctttgccctgatgagctcctgtttagccactgcaggtccagagcctggtgcactgtgtgaactgtcacctgtcagtgcctcccatcctgtccaggccttgatggagagcttcactgttttgtcaggctgtgccagcagaggcacaactgggctgccacaggaggtgcatgtcctgaatctccgcactgcaggccaggggcctggccagctacagagagaggtcacacttcacctgaatcccatctcctcagtccacatccaccacaagtctgttgtgttcctgctcaactccccacaccccctggtgtggcatctgaagacagagagacttgccactggggtctccagactgtttttggtgtctgagggttctgtggtccagttttcatcagcaaacttctccttgacagcagaaacagaagaaaggaacttcccccatggaaatgaacatctgttaaattgggcccgaaaagagtatggagcagttacttcattcaccgaactcaagatagcaagaaacatttatattaaagtgggggaagatcaagtgttccctccaaagtgcaacatagggaagaattttctctcactcaattaccttgctgagtaccttcaacccaaagcagcagaagggtgtgtgatgtccagccagccccagaatgaggaagtacacatcatcgagctaatcacccccaactctaacccctacagtgctttccaggtggatataacaattgatataagaccttctcaagaggatcttgaagtggtcaaaaatctcatcctgatcttgaagtgcaaaaagtctgtcaactgggtgatcaaatcttttgatgttaagggaagcctgaaaattattgctcctaacagtattggctttggaaaagagagtgaaagatctatgacaatgaccaaatcaataagagatgacattccttcaacccaagggaatctggtgaagtgggctttggacaatggctatagtccaataacttcatacacaatggctcctgtggctaatagatttcatcttcggcttgaaaataatgcagaggagatgggagatgaggaagtccacactattcctcctgagctacggatcctgctggaccctggtgccctgcctgccctgcagaacccgcccatccggggaggggaaggccaaaatggaggccttccgtttcctttcccagatatttccaggagagtctggaatgaagagggagaagatgggctccctcggccaaaggaccctgtcattcccagcatacaactgtttcctggtctcagagagccagaagaggtgcaagggagcgtggatattgccctgtctgtcaaatgtgacaatgagaagatgatcgtggctgtagaaaaagattcttttcaggccagtggctactcggggatggacgtcaccctgttggatcctacctgcaaggccaagatgaatggcacacactttgttttggagtctcctctgaatggctgcggtactcggccccggtggtcagcccttgatggtgtggtctactataactccattgtgatacaggttccagcccttggggacagtagtggttggccagatggttatgaagatctggagtcaggtgataatggatttccgggagatatggatgaaggagatgcttccctgttcacccgacctgaaatcgtggtgtttaattgcagccttcagcaggtgaggaaccccagcagcttccaggaacagccccacggaaacatcaccttcaacatggagctatacaacactgacctctttttggtgccctcccagggcgtcttctctgtgccagagaatggacacgtttatgttgaggtatctgttactaaggctgaacaagaactgggatttgccatccaaacgtgctttatctctccatattcgaaccctgataggatgtctcattacaccattattgagaatatttgtcctaaagatgaatctgtgaaattctacagtcccaagagagtgcactttcctatcccgcaagctgacatggataagaagcgattcagctttgtcttcaagcctgtcttcaacacctcactgctctttctacagtgtgagctgacgctgtgtacgaagatggagaagcacccccagaagttgcctaagtgtgtgcctcctgacgaagcctgcacctcgctggacgcctcgataatctgggccatgatgcagaataagaagacgttcactaagccccttgctgtgatccaccatgaagcagaatctaaagaaaaaggtccaagcatgaaggaaccaaatccaatttctccaccaattttccatggtctggacaccctaaccgtgatgggcattgcgtttgcagcctttgtgatcggagcactcctgacgggggccttgtggtacatctattctcacacaggggagacagcaggaaggcagcaagtccccacctccccgccagcctcggaaaacagcagtgctgcccacagcatcggcagcacgcagagcacgccttgctccagcagcagcacggcctagcccaacccagcccaacccggcccaacccagcccagcccagctcagctcagctactgccaagggcaggaccaatggctgagcctcgtgtccagactcagagggctggattttggttcccttgtaaagacagagtgaatttcagtataaagatcacccgttgtattcaccccacacccagggctagtataaacatgaccctgggcttctgtaccacactagaattcatgtgagaaagctaaaatggtggtcttctccaccagcccctcacaggcttgggggttttcaatgtgaaacacatgccagtttttaaaatgctgctttgtccaggtgagaacatccataatttggggccctgagttttacccagactcaaggagttggtaaagggttaatagccagatagtagaaccagtgaggagatgcggccaaagattctttatatctgaaccaagatgtaaaacaagaaatgctttgaggctttctaagcgatcctcctgtctaatttgcacctttgtctggatgcacacttctgaccttgctgccacaacctgtggggtctgatgtgtcccttgatgggtgctgccctcagggactgcaccctgacaagtgttaaggcaacattcctttcttgtgccctgggccaaaaccaatgctgatgaccttatcagcttcctgtttcttcccatacttgcatacaccactgcaaaatgtcttaatgcaaattttgtatttcttacaggcctacagaaattgaaaatgaccaaaatcaggaaccacagatttgtgcccattcctaatattttgttctgcaaattaatgtataatttgaggtgaaattcagttataaagtcaaggacgaatttgcacagtgatatatttctatgtgtatgcaagtacaagtatataatatgtcacctggcacattcattttctcagttgaagaagagaaaatttgaaaatgtccttatgcttttagagttgcaacttaagtatatttggtagggtgagtgtttccactcaaaatatgtcaacttaaaaaaaaataggccctttcataaaaaccaaactgtagcaagatgcaaatgcatggcaaatcctgtcggtctccagttggttatctgaatagtgtcaccaattccaccaagacagtgctgagattggaaaagggcactcatttggattgccttacttctcttgccttaaatatatcccatatatttaatatgtcaaaaagggcttgaggtgaatttcattaaatggaataatatgatgccactttgcagctaaaataagctcagtgatacctcct

SEQ ID NO: 32066 - DNA, 2695 bp, Homo sapiens
  source 1..2695: mol_type = unassigned DNA
gccgcccgcttgcccgtcggtcgctagctcgctcggtgcgcgtcgtcccgctccatggcgctcttcgtgcggctgctggctctcgccctggctctggccctgggccccgccgcgaccctggcgggtcccgccaagtcgccctaccagctggtgctgcagcacagcaggctccggggccgccagcacggccccaacgtgtgtgctgtgcagaaggttattggcactaataggaagtacttcaccaactgcaagcagtggtaccaaaggaaaatctgtggcaaatcaacagtcatcagctacgagtgctgtcctggatatgaaaaggtccctggggagaagggctgtccagcagccctaccactctcaaacctttacgagaccctgggagtcgttggatccaccaccactcagctgtacacggaccgcacggagaagctgaggcctgagatggaggggcccggcagcttcaccatcttcgcccctagcaacgaggcctgggcctccttgccagctgaagtgctggactccctggtcagcaatgtcaacattgagctgctcaatgccctccgctaccatatggtgggcaggcgagtcctgactgatgagctgaaacacggcatgaccctcacctctatgtaccagaattccaacatccagatccaccactatcctaatgggattgtaactgtgaactgtgcccggctgctgaaagccgaccaccatgcaaccaacggggtggtgcacctcatcgataaggtcatctccaccatcaccaacaacatccagcagatcattgagatcgaggacacctttgagacccttcgggctgctgtggctgcatcagggctcaacacgatgcttgaaggtaacggccagtacacgcttttggccccgaccaatgaggccttcgagaagatccctagtgagactttgaaccgtatcctgggcgacccagaagccctgagagacctgctgaacaaccacatcttgaagtcagctatgtgtgctgaagccatcgttgcggggctgtctgtagagaccctggagggcacgacactggaggtgggctgcagcggggacatgctcactatcaacgggaaggcgatcatctccaataaagacatcctagccaccaacggggtgatccactacattgatgagctactcatcccagactcagccaagacactatttgaattggctgcagagtctgatgtgtccacagccattgaccttttcagacaagccggcctcggcaatcatctctctggaagtgagcggttgaccctcctggctcccctgaattctgtattcaaagatggaacccctccaattgatgcccatacaaggaatttgcttcggaaccacataattaaagaccagctggcctctaagtatctgtaccatggacagaccctggaaactctgggcggcaaaaaactgagagtttttgtttatcgtaatagcctctgcattgagaacagctgcatcgcggcccacgacaagagggggaggtacgggaccctgttcacgatggaccgggtgctgacccccccaatggggactgtcatggatgtcctgaagggagacaatcgctttagcatgctggtagctgccatccagtctgcaggactgacggagaccctcaaccgggaaggagtctacacagtctttgctcccacaaatgaagccttccgagccctgccaccaagagaacggagcagactcttgggagatgccaaggaacttgccaacatcctgaaataccacattggtgatgaaatcctggttagcggaggcatcggggccctggtgcggctaaagtctctccaaggtgacaagctggaagtcagcttgaaaaacaatgtggtgagtgtcaacaaggagcctgttgccgagcctgacatcatggccacaaatggcgtggtccatgtcatcaccaatgttctgcagcctccagccaacagacctcaggaaagaggggatgaacttgcagactctgcgcttgagatcttcaaacaagcatcagcgttttccaggcctgagcagcctcaggtcctctgttcccctgtctatcaaaagttattagagaggatgaagcattagcttgaagcactacaggaggaatgcaccacggcagctctccgccaatttctctcagatttccacagagactgtttgaatgttttcaaaaccaagtatcacactttaatgtacatgggccgcaccataatgagatgtgagccttgtgcatgtgggggaggagggagagagatgtactttttaaatcatgttccccctaaacatggctgttaacccactgcatgcagaaacttggatgtcactgcctgacattcacttccagagaggacctatcccaaatgtggaattgactgcctatgccaagtccctggaaaaggagcttcagtattgtggggctcataaaacatgaatcaagcaatccagcctcatgggaagtcctggcacagtttttgtaaagcccttgcacagctggagaaatggcatcattataagctatgagttgaaatgttctgtcaaatgtgtctcacatctacacgtggcttggaggcttttatggggccctgtccaggtagaaaagaaatggtatgtagagcttagatttccctattgtgacagagccatggtgtgtttgtaataataaaaccaaagaaac

SEQ ID NO: 32067 - DNA, 1942 bp, Homo sapiens
  source 1..1942: mol_type = unassigned DNA
tctcacttccctggagccgcccgcttgcccgtcggtcgctagctcgctcggtgcgcgtcgtcccgctccatggcgctcttcgtgcggctgctggctctcgccctggctctggccctgggccccgccgcgaccctggcgggtcccgccaagtcgccctaccagctgcatcagggctcaacacgatgcttgaaggtaacggccagtacacgcttttggccccgaccaatgaggccttcgagaagatccctagtgagactttgaaccgtatcctgggcgacccagaagccctgagagacctgctgaacaaccacatcttgaagtcagctatgtgtgctgaagccatcgttgcggggctgtctgtagagaccctggagggcacgacactggaggtgggctgcagcggggacatgctcactatcaacgggaaggcgatcatctccaataaagacatcctagccaccaacggggtgatccactacattgatgagctactcatcccagactcagccaagacactatttgaattggctgcagagtctgatgtgtccacagccattgaccttttcagacaagccggcctcggcaatcatctctctggaagtgagcggttgaccctcctggctcccctgaattctgtattcaaagatggaacccctccaattgatgcccatacaaggaatttgcttcggaaccacataattaaagaccagctggcctctaagtatctgtaccatggacagaccctggaaactctgggcggcaaaaaactgagagtttttgtttatcgtaatagcctctgcattgagaacagctgcatcgcggcccacgacaagagggggaggtacgggaccctgttcacgatggaccgggtgctgacccccccaatggggactgtcatggatgtcctgaagggagacaatcgctttagcatgctggtagctgccatccagtctgcaggactgacggagaccctcaaccgggaaggagtctacacagtctttgctcccacaaatgaagccttccgagccctgccaccaagagaacggagcagactcttgggagatgccaaggaacttgccaacatcctgaaataccacattggtgatgaaatcctggttagcggaggcatcggggccctggtgcggctaaagtctctccaaggtgacaagctggaagtcagcttgaaaaacaatgtggtgagtgtcaacaaggagcctgttgccgagcctgacatcatggccacaaatggcgtggtccatgtcatcaccaatgttctgcagcctccagccaacagacctcaggaaagaggggatgaacttgcagactctgcgcttgagatcttcaaacaagcatcagcgttttccagggcttcccagaggtctgtgcgactagcccctgtctatcaaaagttattagagaggatgaagcattagcttgaagcactacaggaggaatgcaccacggcagctctccgccaatttctctcagatttccacagagactgtttgaatgttttcaaaaccaagtatcacactttaatgtacatgggccgcaccataatgagatgtgagccttgtgcatgtgggggaggagggagagagatgtactttttaaatcatgttccccctaaacatggctgttaacccactgcatgcagaaacttggatgtcactgcctgacattcacttccagagaggacctatcccaaatgtggaattgactgcctatgccaagtccctggaaaaggagcttcagtattgtggggctcataaaacatgaatcaagcaatccagcctcatgggaagtcctggcacagtttttgtaaagcccttgcacagctggagaaatggcatcattataagctatgagttgaaatgttctgtcaaatgtgtctcacatctacacgtggcttggaggcttttatggggccctgtccaggtag

SEQ ID NO: 32068 - DNA, 2804 bp, Homo sapiens
  source 1..2804: mol_type = unassigned DNA
ctccttgcacgggccggcccagcttccccgcccctggcgtccgctccctcccgctcgcagcttacttaacctggcccgggcggcggaggcgctctcacttccctggagccgcccgcttgcccgtcggtcgctagctcgctcggtgcgcgtcgtcccgctccatggcgctcttcgtgcggctgctggctctcgccctggctctggccctgggccccgccgcgaccctggcgggtcccgccaagtcgccctaccagctggtgctgcagcacagcaggctccggggccgccagcacggccccaacgtgtgtgctgtgcagaaggttattggcactaataggaagtacttcaccaactgcaagcagtggtaccaaaggaaaatctgtggcaaatcaacagtcatcagctacgagtgctgtcctggatatgaaaaggtccctggggagaagggctgtccagcagccctaccactctcaaacctttacgagaccctgggagtcgttggatccaccaccactcagctgtacacggaccgcacggagaagctgaggcctgagatggaggggcccggcagcttcaccatcttcgcccctagcaacgaggcctgggcctccttgccagctgaagtgctggactccctggtcagcaatgtcaacattgagctgctcaatgccctccgctaccatatggtgggcaggcgagtcctgactgatgagctgaaacacggcatgaccctcacctctatgtaccagaattccaacatccagatccaccactatcctaatgggattgtaactgtgaactgtgcccggctgctgaaagccgaccaccatgcaaccaacggggtggtgcacctcatcgataaggtcatctccaccatcaccaacaacatccagcagatcattgagatcgaggacacctttgagacccttcgggctgctgtggctgcatcagggctcaacacgatgcttgaaggtaacggccagtacacgcttttggccccgaccaatgaggccttcgagaagatccctagtgagactttgaaccgtatcctgggcgacccagaagccctgagagacctgctgaacaaccacatcttgaagtcagctatgtgtgctgaagccatcgttgcggggctgtctgtagagaccctggagggcacgacactggaggtgggctgcagcggggacatgctcactatcaacgggaaggcgatcatctccaataaagacatcctagccaccaacggggtgatccactacattgatgagctactcatcccagactcagccaagacactatttgaattggctgcagagtctgatgtgtccacagccattgaccttttcagacaagccggcctcggcaatcatctctctggaagtgagcggttgaccctcctggctcccctgaattctgtattcaaagatggaacccctccaattgatgcccatacaaggaatttgcttcggaaccacataattaaagaccagctggcctctaagtatctgtaccatggacagaccctggaaactctgggcggcaaaaaactgagagtttttgtttatcgtaatagcctctgcattgagaacagctgcatcgcggcccacgacaagagggggaggtacgggaccctgttcacgatggaccgggtgctgacccccccaatggggactgtcatggatgtcctgaagggagacaatcgctttagcatgctggtagctgccatccagtctgcaggactgacggagaccctcaaccgggaaggagtctacacagtctttgctcccacaaatgaagccttccgagccctgccaccaagagaacggagcagactcttgggagatgccaaggaacttgccaacatcctgaaataccacattggtgatgaaatcctggttagcggaggcatcggggccctggtgcggctaaagtctctccaaggtgacaagctggaagtcagcttgaaaaacaatgtggtgagtgtcaacaaggagcctgttgccgagcctgacatcatggccacaaatggcgtggtccatgtcatcaccaatgttctgcagcctccagccaacagacctcaggaaagaggggatgaacttgcagactctgcgcttgagatcttcaaacaagcatcagcgttttccagggcttcccagaggtctgtgcgactagcccctgtctatcaaaagttattagagaggatgaagcattagcttgaagcactacaggaggaatgcaccacggcagctctccgccaatttctctcagatttccacagagactgtttgaatgttttcaaaaccaagtatcacactttaatgtacatgggccgcaccataatgagatgtgagccttgtgcatgtgggggaggagggagagagatgtactttttaaatcatgttccccctaaacatggctgttaacccactgcatgcagaaacttggatgtcactgcctgacattcacttccagagaggacctatcccaaatgtggaattgactgcctatgccaagtccctggaaaaggagcttcagtattgtggggctcataaaacatgaatcaagcaatccagcctcatgggaagtcctggcacagtttttgtaaagcccttgcacagctggagaaatggcatcattataagctatgagttgaaatgttctgtcaaatgtgtctcacatctacacgtggcttggaggcttttatggggccctgtccaggtagaaaagaaatggtatgtagagcttagatttccctattgtgacagagccatggtgtgtttgtaataataaaaccaaagaaacat

SEQ ID NO: 32069 - DNA, 6513 bp, Homo sapiens
  source 1..6513: mol_type = unassigned DNA
cagaggtctagcagccgggcgccgcgggccgggggcctgaggaggccacaggacgggcgtcttcccggctagtggagcccggcgcggggcccgctgcggccgcaccgtgaggggaggaggccgaggaggacgcagcgccggctgccggcgggaggaagcgctccaccagggcccccgacggcactcgtttaaccacatccgcgcctctgctggaaacgcttgctggcgcctgtcaccggttccctccattttgaaagggaaaaaggctctccccacccattcccctgcccctaggagctggagccggaggagccgcgctcatggcgttcagcccgtggcagatcctgtcccccgtgcagtgggcgaaatggacgtggtctgcggtacgcggcggggccgccggcgaggacgaggctggcgggcccgagggcgaccccgaggaggaggattcgcaagccgagaccaaatccttgagtttcaggagtggctgtaaggtgaagaagcatgaaactcagtctctcgccctggatgcatgttctcgggatgaaggggcagtgatctcccagatttcagacatttctaatagggatggccatgctactgatgaggagaaactggcatccacgtcatgtggtcagaaatcagctggtgccgaggtgaaaggtgagccagaggaagacctggagtactttgaatgttccaatgttcctgtgtctaccataaatcatgcgttttcatcctcagaagcaggcatagagaaggagacgtgccagaagatggaagaagacgggtccactgtgcttgggctgctggagtcctctgcagagaaggcccctgtgtcggtgtcctgtggaggtgagagccccctggatgggatctgcctcagcgaatcagacaagacagccgtgctcaccttaataagagaagagataattactaaagagattgaagcaaatgaatggaagaagaaatacgaagagacccggcaagaagttttggagatgaggaaaattgtagctgaatatgaaaagactattgctcaaatgattgaagatgaacaaaggacaagtatgacctctcagaagagcttccagcaactgaccatggagaaggaacaggccctggctgaccttaactctgtggaaaggtccctttctgatctcttcaggagatatgagaacctgaaaggtgttctggaagggttcaagaagaatgaagaagccttgaagaaatgtgctcaggattacttagccagagttaaacaagaggagcagcgataccaggccctgaaaatccacgcagaagagaaactggacaaagccaatgaagagattgctcaggttcgaacaaaagcaaaggctgagagtgcagctctccatgctggactccgcaaagagcagatgaaggtggagtccctggaaagggccctgcagcagaagaaccaagaaattgaagaactgacaaaaatctgtgatgagctgattgcaaagctgggaaagactgactgagacactccccctgttagctcaacagatctgcatttggctgcttctcttgtgaccacaattatcttgccttatccaggaataattgcccctttgcagagaaaaaaaaaaacttaaaaaaagcacatgcctactgctgcctgtcccgctttgctgccaatgcaacagccctggaagaaaccctagagggttgcatagtctagaaaggagtgtgacctgacagtgctggagcctcctagtttccccctatgaaggttcccttaggctgctgagtttgggtttgtgatttatctttagtttgttttaaagtcatctttactttcccaaatgtgttaaatttgtaactcctctttggggtcttctccaccacctgtctgatttttttgtgatctgtttaatcttttaattttttagtatcagtggttttatttaaggagacagtttggcctattgttacttccaatttataatcaagaaggggctctggatccccttttaaattacacacactctcacacacatacatgtatgtttatagatgctgctgctcttttccctgaagcatagtcaagtaagaactgctctacagaaggacatatttccttggatgtgagaccctattttgaaatagagtcctgactcagaacaccaacttaagaatttgggggattaaagatgtgaagaccacagtcttgggttttcatatctggagaagactatttgccatgacgttttgttgccctggtatttggacactcctcagctttaatgggtgtggcccctttagggttagtcctcagactaatgatagtgtctgctttctgcatgaacggcaatatgggactccctccaagctagggtttggcaagtctgccctagagtcatttactctcctctgcctccatttgttaatacagaatcaacatttagtcttcattatctttttttttttttttgagacagagtttcgatctattttaagtatgtgaagaaaatctacttgtaaaaggctcagatcttaattaaaaggtaattgtagcacattaccaattataaggtgaagaaatgtttttttcccaagtgtgatgcattgttcttcagatgttgaaaagaaagcaaaaaataccttctaacttaagacagaatttttaacaaaatgagcagtaaaagtcacatgaaccactccaaaaatcagtgcattttgcatatttttaaacaaagacagcttgttgaatactgagaagaggagtgcaaggagaaggtctgtactaacaaagccaaattcctcaagctcttactggactcagttcagagtggtgggccattaaccccaacatggaatttttccatataaatctcaatgaattccctttcatttgaataggcaaacccaaatccatgcaagtgttttaaagcactgtcctgtcttaatcttacatgctgaaagtcttcatggtgatatgcactatattcagtatacgtatgttttcctacttctcttgtaaaactgttgcatgatccaacttcagcaatgaattgtgcctagtggagaacctctatagatcttaaaaaatgaattattctttagcagtgtattactcacatgggtgcaatctttagccccagggaggtcaataatgtcttttaaagccagaagtcacattttaccaatatgcatttatcataattggtgcttaggctgtatattcaagcctgttgtcttaacattttgtataaaaaagaacaacagaaattatctgtcatttgagaagtggcttgacaatcatttgagctttgaaagcagtcactgtggtgtaatatgaatgctgtcctagtggtcatagtaccaagggcacgtgtctccccttggtataactgatttcctttttagtcctctactgctaaataagttaattttgcattttgcagaaagaaacattgattgctaaatctttttgctgctgtgttttggtgttttcatgtttacttgttttatattgatctgttttaagtatgagaggcttatagtgccctccattgtaaatccatagtcatctttttaagcttattgtgtttaagaaagtagctatgtgttaaacagaggtgatggcagcccttccctagcacactggtggaagagaccccttaagaacctgaccccagtgaatgaagctgatgcacagggagcaccaaaggaccttcgttaagtgataattgtcctggcctctcagccatgaccgttatgaggaaatatcccccattcgaacttaacagatgcctcctctccaaagagaattaaaatcgtagcttgtacagatcaagagaatatactgggcagaatgaagtatgtttgtttatttttctttaaaaataaaggattttggaactctggagagtaagaatatagtatagagtttgcctcaacacatgtgagggccaaataacctgctagctaggcagtaataaactctgttacagaagagaaaaagggccgggcacagtggcttattcctgtaatcccaacactgtggaaggccgaggcaggaggatcacttgagtccaggagtttgaaacctacctaggcaacatggtgaaaccttgtctctaccaaaataaaaattagctgggcatggtggcacgtgcctgtggtcccagctacttgggaggctgaggtgggagcctgggaggtcaaggctgcagtgagccatgatcatgccactgcactccatcctgggtgacagcaagatcttgtctcaaaaaaaaaaaaaaaaaaaaaaaaaccaggagtgaaaaaggaaagtagaaggcagctgctggcctagatgttggtttgggaatattaggtgatcctgttgagattctggatccagagcaatttctttagcttttgactttgccaaagtgtagatagcctttatccagcagtattttaagtggggaatgcaacgtgaggccaactgaacaattccccccgtggctgcccagatagtcacagtcaaggttggagagtctccttccagccagtgacctacccaaaccttttgttctgtaaaactgctctggaaataccgggaagcccagttttctcacgtggtttctagcttcttcagactcagcccaaattaggaagtgcagaagcacatgatggtgaaaaacctaggatttggcagccttccagaatggtatggaatctgagggaagatttatgtttcgttttggaggatagctcaagttgaattttctttccagccagttaccctttcaacctacccatactttgtacaactcttacacaaatacttagatatttattagatagccctgaattcactctaattataaacagggagtgtaaactgcccccagatgttcctgggctgggtaaaagcagctggagtgaagcactcattttccataaaggtaacaaagggcagctcagtggttactcaagctcaaaagggtttttttaagagcaagcattggttaagtctgtgtatactgagttggaagtgatttcagcacattcttttttagtggagtgaaagttctgaagcccccttttaacttcctcttggtttttcattataattggtagccatctcatgaactgtctctgactgttgtctctttgtggtcatgtgattgtgagcttgctttctgacttgcatttctgactttatcctgttgttaggaagatagaaactaggttttgaaagattacatgattcaagcgagggattttaaagtaaagatgtatttattctgaagaatctaaaagataacagattatttgcttatgaaagaacaatatagtctgggaatcccagaatgtcaagccaaaggtctaagaagtcatctccttcaaatactttaataaagaagtatttcgaggagatatctgtccaaaaaggtttgactggcctccagattccagttatttttaaaaagcaacttaccactaaatccttgagtctccatagagtaacagtaaagaaactgatgtaacagactctcctctcaaaggatctcctctggaagagactatcagcggcagcattctccagggaagacccatcccctagtgccagagcttgcatcctggagactaaagattgcacttttttgtagttttttgtccaaatgcaatcccatttctgtgcctcttagcatgcagttagatttggacaaacaagattcctaaggaatgactttattaactataatatggttacagctattatataaatatatattctggttatagttctaatatggagatgttgtgtgcaatgctggcctgtggtggtctgtgtaatgctttaacttgtatggaggaggccaggctcagagctgagatgtggcctgaaccttccctgtatcgatcctttaatttagaactgtcaagatgtcactttctccccctctgccttttagtggtatctgacatatactcaaaacagtaatttcctggtcacatcattaactgctaattctgtatttataaagaattttcagatggacatgtacaaatttgaactcaaaccatccccagtccagatacagggcagcgtgtaggtgaccacaccagagcctcagcctcggtccttctcagccgtcgggataggatccaggcatttcttttaaatctcagaggtagcagtaaacttttcagtattgctgttagcaagtgtgtgtttgccaatagatacccattatactaatgtgccaagtaaatgttcattgcacatctgcttccactgtgttcccacgggtgccatgaagtgtgtgaggagcccctcatctggagggatgagtgctgcgttgactactgctatcaggattgtgttgtgtggaatattcatctacataaattttatatgcacagtaatttccctttttatatgtcaagtaactatttgtaaaagttatactcacaaattattataatgattactaatatattttttccatgtttcattgcctgaataaaaactgtttaccactgtta

SEQ ID NO: 32070 - DNA, 7802 bp, Homo sapiens
  source 1..7802: mol_type = unassigned DNA
agctgatgcgcgccccgccggccgggaggcgggagtccgcgagccgggagcgggagcagcagaggtctagcagccgggcgccgcgggccgggggcctgaggaggccacaggacgggcgtcttcccggctagtggagcccggcgcggggcccgctgcggccgcaccgtgaggggaggaggccgaggaggacgcagcgccggctgccggcgggaggaagcgctccaccagggcccccgacggcactcgtttaaccacatccgcgcctctgctggaaacgcttgctggcgcctgtcaccggttccctccattttgaaagggaaaaaggctctccccacccattcccctgcccctaggagctggagccggaggagccgcgctcatggcgttcagcccgtggcagatcctgtcccccgtgcagtgggcgaaatggacgtggtctgcggtacgcggcggggccgccggcgaggacgaggctggcgggcccgagggcgaccccgaggaggaggattcgcaagccgagaccaaatccttgagtttcagctcggattctgaaggtaattttgagactcctgaagctgaaaccccgatccgatcacctttcaaggagtcctgtgatccatcactcggattggcaggacctggggccaaaagccaagaatcacaagaagctgatgaacagcttgtagcagaagtggttgaaaaatgttcatctaagacttgttctaaaccttcagaaaatgaagtgccacagcaggccattgactctcactcagtcaagaatttcagagaagaacctgaacatgattttagcaaaatttccatcgtgaggccattttcaatagaaacgaaggattccacggatatctcggcagtcctcggaacaaaagcagctcatggctgtgtaactgcagtctcaggcaaggctctgccttccagcccgccagacgccctccaggacgaggcgatgacagaaggcagcatgggggtcaccctcgaggcctccgcagaagctgatctaaaagctggcaactcctgtccagagcttgtgcccagcagaagaagcaagctgagaaagcccaagcctgtccccctgaggaagaaagcaattggaggagagttctcagacaccaacgctgctgtggagggcacacctctccccaaggcatcctatcacttcagtcctgaagagttggatgagaacacaagtcctttgctaggagatgccaggttccagaagtctccccctgaccttaaagaaactcccggcactctcagtagtgacaccaacgactcaggggttgagctgggggaggagtcgaggagctcacctctcaagcttgagtttgatttcacagaagatacaggaaacatagaggccaggaaagcccttccaaggaagcttggcaggaaactgggtagcacactgactcccaagatacaaaaagatggcatcagtaagtcagcaggtttagaacagcctacagacccagtggcacgagacgggcctctctcccaaacatcttccaagccagatcctagtcagtgggaaagccccagcttcaacccctttgggagccactctgttctgcagaactccccacccctctcttctgagggctcctaccactttgacccagataactttgacgaatccatggatccctttaaaccaactacgaccttaacaagcagtgacttttgttctcccactggtaatcacgttaatgaaatcttagaatcacccaagaaggcaaagtcgcgtttaataacgagtggctgtaaggtgaagaagcatgaaactcagtctctcgccctggatgcatgttctcgggatgaaggggcagtgatctcccagatttcagacatttctaatagggatggccatgctactgatgaggagaaactggcatccacgtcatgtggtcagaaatcagctggtgccgaggtgaaaggtgagccagaggaagacctggagtactttgaatgttccaatgttcctgtgtctaccataaatcatgcgttttcatcctcagaagcaggcatagagaaggagacgtgccagaagatggaagaagacgggtccactgtgcttgggctgctggagtcctctgcagagaaggcccctgtgtcggtgtcctgtggaggtgagagccccctggatgggatctgcctcagcgaatcagacaagacagccgtgctcaccttaataagagaagagataattactaaagagattgaagcaaatgaatggaagaagaaatacgaagagacccggcaagaagttttggagatgaggaaaattgtagctgaatatgaaaagactattgctcaaatgattgaagatgaacaaaggacaagtatgacctctcagaagagcttccagcaactgaccatggagaaggaacaggccctggctgaccttaactctgtggaaaggtccctttctgatctcttcaggagatatgagaacctgaaaggtgttctggaagggttcaagaagaatgaagaagccttgaagaaatgtgctcaggattacttagccagagttaaacaagaggagcagcgataccaggccctgaaaatccacgcagaagagaaactggacaaagccaatgaagagattgctcaggttcgaacaaaagcaaaggctgagagtgcagctctccatgctggactccgcaaagagcagatgaaggtggagtccctggaaagggccctgcagcagaagaaccaagaaattgaagaactgacaaaaatctgtgatgagctgattgcaaagctgggaaagactgactgagacactccccctgttagctcaacagatctgcatttggctgcttctcttgtgaccacaattatcttgccttatccaggaataattgcccctttgcagagaaaaaaaaaaacttaaaaaaagcacatgcctactgctgcctgtcccgctttgctgccaatgcaacagccctggaagaaaccctagagggttgcatagtctagaaaggagtgtgacctgacagtgctggagcctcctagtttccccctatgaaggttcccttaggctgctgagtttgggtttgtgatttatctttagtttgttttaaagtcatctttactttcccaaatgtgttaaatttgtaactcctctttggggtcttctccaccacctgtctgatttttttgtgatctgtttaatcttttaattttttagtatcagtggttttatttaaggagacagtttggcctattgttacttccaatttataatcaagaaggggctctggatccccttttaaattacacacactctcacacacatacatgtatgtttatagatgctgctgctcttttccctgaagcatagtcaagtaagaactgctctacagaaggacatatttccttggatgtgagaccctattttgaaatagagtcctgactcagaacaccaacttaagaatttgggggattaaagatgtgaagaccacagtcttgggttttcatatctggagaagactatttgccatgacgttttgttgccctggtatttggacactcctcagctttaatgggtgtggcccctttagggttagtcctcagactaatgatagtgtctgctttctgcatgaacggcaatatgggactccctccaagctagggtttggcaagtctgccctagagtcatttactctcctctgcctccatttgttaatacagaatcaacatttagtcttcattatctttttttttttttttgagacagagtttcgatctattttaagtatgtgaagaaaatctacttgtaaaaggctcagatcttaattaaaaggtaattgtagcacattaccaattataaggtgaagaaatgtttttttcccaagtgtgatgcattgttcttcagatgttgaaaagaaagcaaaaaataccttctaacttaagacagaatttttaacaaaatgagcagtaaaagtcacatgaaccactccaaaaatcagtgcattttgcatatttttaaacaaagacagcttgttgaatactgagaagaggagtgcaaggagaaggtctgtactaacaaagccaaattcctcaagctcttactggactcagttcagagtggtgggccattaaccccaacatggaatttttccatataaatctcaatgaattccctttcatttgaataggcaaacccaaatccatgcaagtgttttaaagcactgtcctgtcttaatcttacatgctgaaagtcttcatggtgatatgcactatattcagtatacgtatgttttcctacttctcttgtaaaactgttgcatgatccaacttcagcaatgaattgtgcctagtggagaacctctatagatcttaaaaaatgaattattctttagcagtgtattactcacatgggtgcaatctttagccccagggaggtcaataatgtcttttaaagccagaagtcacattttaccaatatgcatttatcataattggtgcttaggctgtatattcaagcctgttgtcttaacattttgtataaaaaagaacaacagaaattatctgtcatttgagaagtggcttgacaatcatttgagctttgaaagcagtcactgtggtgtaatatgaatgctgtcctagtggtcatagtaccaagggcacgtgtctccccttggtataactgatttcctttttagtcctctactgctaaataagttaattttgcattttgcagaaagaaacattgattgctaaatctttttgctgctgtgttttggtgttttcatgtttacttgttttatattgatctgttttaagtatgagaggcttatagtgccctccattgtaaatccatagtcatctttttaagcttattgtgtttaagaaagtagctatgtgttaaacagaggtgatggcagcccttccctagcacactggtggaagagaccccttaagaacctgaccccagtgaatgaagctgatgcacagggagcaccaaaggaccttcgttaagtgataattgtcctggcctctcagccatgaccgttatgaggaaatatcccccattcgaacttaacagatgcctcctctccaaagagaattaaaatcgtagcttgtacagatcaagagaatatactgggcagaatgaagtatgtttgtttatttttctttaaaaataaaggattttggaactctggagagtaagaatatagtatagagtttgcctcaacacatgtgagggccaaataacctgctagctaggcagtaataaactctgttacagaagagaaaaagggccgggcacagtggcttattcctgtaatcccaacactgtggaaggccgaggcaggaggatcacttgagtccaggagtttgaaacctacctaggcaacatggtgaaaccttgtctctaccaaaataaaaattagctgggcatggtggcacgtgcctgtggtcccagctacttgggaggctgaggtgggagcctgggaggtcaaggctgcagtgagccatgatcatgccactgcactccatcctgggtgacagcaagatcttgtctcaaaaaaaaaaaaaaaaaaaaaaaaaccaggagtgaaaaaggaaagtagaaggcagctgctggcctagatgttggtttgggaatattaggtgatcctgttgagattctggatccagagcaatttctttagcttttgactttgccaaagtgtagatagcctttatccagcagtattttaagtggggaatgcaacgtgaggccaactgaacaattccccccgtggctgcccagatagtcacagtcaaggttggagagtctccttccagccagtgacctacccaaaccttttgttctgtaaaactgctctggaaataccgggaagcccagttttctcacgtggtttctagcttcttcagactcagcccaaattaggaagtgcagaagcacatgatggtgaaaaacctaggatttggcagccttccagaatggtatggaatctgagggaagatttatgtttcgttttggaggatagctcaagttgaattttctttccagccagttaccctttcaacctacccatactttgtacaactcttacacaaatacttagatatttattagatagccctgaattcactctaattataaacagggagtgtaaactgcccccagatgttcctgggctgggtaaaagcagctggagtgaagcactcattttccataaaggtaacaaagggcagctcagtggttactcaagctcaaaagggtttttttaagagcaagcattggttaagtctgtgtatactgagttggaagtgatttcagcacattcttttttagtggagtgaaagttctgaagcccccttttaacttcctcttggtttttcattataattggtagccatctcatgaactgtctctgactgttgtctctttgtggtcatgtgattgtgagcttgctttctgacttgcatttctgactttatcctgttgttaggaagatagaaactaggttttgaaagattacatgattcaagcgagggattttaaagtaaagatgtatttattctgaagaatctaaaagataacagattatttgcttatgaaagaacaatatagtctgggaatcccagaatgtcaagccaaaggtctaagaagtcatctccttcaaatactttaataaagaagtatttcgaggagatatctgtccaaaaaggtttgactggcctccagattccagttatttttaaaaagcaacttaccactaaatccttgagtctccatagagtaacagtaaagaaactgatgtaacagactctcctctcaaaggatctcctctggaagagactatcagcggcagcattctccagggaagacccatcccctagtgccagagcttgcatcctggagactaaagattgcacttttttgtagttttttgtccaaatgcaatcccatttctgtgcctcttagcatgcagttagatttggacaaacaagattcctaaggaatgactttattaactataatatggttacagctattatataaatatatattctggttatagttctaatatggagatgttgtgtgcaatgctggcctgtggtggtctgtgtaatgctttaacttgtatggaggaggccaggctcagagctgagatgtggcctgaaccttccctgtatcgatcctttaatttagaactgtcaagatgtcactttctccccctctgccttttagtggtatctgacatatactcaaaacagtaatttcctggtcacatcattaactgctaattctgtatttataaagaattttcagatggacatgtacaaatttgaactcaaaccatccccagtccagatacagggcagcgtgtaggtgaccacaccagagcctcagcctcggtccttctcagccgtcgggataggatccaggcatttcttttaaatctcagaggtagcagtaaacttttcagtattgctgttagcaagtgtgtgtttgccaatagatacccattatactaatgtgccaagtaaatgttcattgcacatctgcttccactgtgttcccacgggtgccatgaagtgtgtgaggagcccctcatctggagggatgagtgctgcgttgactactgctatcaggattgtgttgtgtggaatattcatctacataaattttatatgcacagtaatttccctttttatatgtcaagtaactatttgtaaaagttatactcacaaattattataatgattactaatatattttttccatgtttcattgcctgaataaaaactgtttaccactgtta

SEQ ID NO: 32071 - DNA, 6145 bp, Homo sapiens
  source 1..6145: mol_type = unassigned DNA
atgggaggctcccactctcagaccccgaggggccgggaacccgccggggagaggcacccgagacccacggagaccgcgactactgaacaagtgaaatttctctgttttctgttgagtggctgtaaggtgaagaagcatgaaactcagtctctcgccctggatgcatgttctcgggatgaaggggcagtgatctcccagatttcagacatttctaatagggatggccatgctactgatgaggagaaactggcatccacgtcatgtggtcagaaatcagctggtgccgaggtgaaaggtgagccagaggaagacctggagtactttgaatgttccaatgttcctgtgtctaccataaatcatgcgttttcatcctcagaagcaggcatagagaaggagacgtgccagaagatggaagaagacgggtccactgtgcttgggctgctggagtcctctgcagagaaggcccctgtgtcggtgtcctgtggaggtgagagccccctggatgggatctgcctcagcgaatcagacaagacagccgtgctcaccttaataagagaagagataattactaaagagattgaagcaaatgaatggaagaagaaatacgaagagacccggcaagaagttttggagatgaggaaaattgtagctgaatatgaaaagactattgctcaaatgattgaagatgaacaaaggacaagtatgacctctcagaagagcttccagcaactgaccatggagaaggaacaggccctggctgaccttaactctgtggaaaggtccctttctgatctcttcaggagatatgagaacctgaaaggtgttctggaagggttcaagaagaatgaagaagccttgaagaaatgtgctcaggattacttagccagagttaaacaagaggagcagcgataccaggccctgaaaatccacgcagaagagaaactggacaaagccaatgaagagattgctcaggttcgaacaaaagcaaaggctgagagtgcagctctccatgctggactccgcaaagagcagatgaaggtggagtccctggaaagggccctgcagcagaagaaccaagaaattgaagaactgacaaaaatctgtgatgagctgattgcaaagctgggaaagactgactgagacactccccctgttagctcaacagatctgcatttggctgcttctcttgtgaccacaattatcttgccttatccaggaataattgcccctttgcagagaaaaaaaaaaacttaaaaaaagcacatgcctactgctgcctgtcccgctttgctgccaatgcaacagccctggaagaaaccctagagggttgcatagtctagaaaggagtgtgacctgacagtgctggagcctcctagtttccccctatgaaggttcccttaggctgctgagtttgggtttgtgatttatctttagtttgttttaaagtcatctttactttcccaaatgtgttaaatttgtaactcctctttggggtcttctccaccacctgtctgatttttttgtgatctgtttaatcttttaattttttagtatcagtggttttatttaaggagacagtttggcctattgttacttccaatttataatcaagaaggggctctggatccccttttaaattacacacactctcacacacatacatgtatgtttatagatgctgctgctcttttccctgaagcatagtcaagtaagaactgctctacagaaggacatatttccttggatgtgagaccctattttgaaatagagtcctgactcagaacaccaacttaagaatttgggggattaaagatgtgaagaccacagtcttgggttttcatatctggagaagactatttgccatgacgttttgttgccctggtatttggacactcctcagctttaatgggtgtggcccctttagggttagtcctcagactaatgatagtgtctgctttctgcatgaacggcaatatgggactccctccaagctagggtttggcaagtctgccctagagtcatttactctcctctgcctccatttgttaatacagaatcaacatttagtcttcattatctttttttttttttttgagacagagtttcgatctattttaagtatgtgaagaaaatctacttgtaaaaggctcagatcttaattaaaaggtaattgtagcacattaccaattataaggtgaagaaatgtttttttcccaagtgtgatgcattgttcttcagatgttgaaaagaaagcaaaaaataccttctaacttaagacagaatttttaacaaaatgagcagtaaaagtcacatgaaccactccaaaaatcagtgcattttgcatatttttaaacaaagacagcttgttgaatactgagaagaggagtgcaaggagaaggtctgtactaacaaagccaaattcctcaagctcttactggactcagttcagagtggtgggccattaaccccaacatggaatttttccatataaatctcaatgaattccctttcatttgaataggcaaacccaaatccatgcaagtgttttaaagcactgtcctgtcttaatcttacatgctgaaagtcttcatggtgatatgcactatattcagtatacgtatgttttcctacttctcttgtaaaactgttgcatgatccaacttcagcaatgaattgtgcctagtggagaacctctatagatcttaaaaaatgaattattctttagcagtgtattactcacatgggtgcaatctttagccccagggaggtcaataatgtcttttaaagccagaagtcacattttaccaatatgcatttatcataattggtgcttaggctgtatattcaagcctgttgtcttaacattttgtataaaaaagaacaacagaaattatctgtcatttgagaagtggcttgacaatcatttgagctttgaaagcagtcactgtggtgtaatatgaatgctgtcctagtggtcatagtaccaagggcacgtgtctccccttggtataactgatttcctttttagtcctctactgctaaataagttaattttgcattttgcagaaagaaacattgattgctaaatctttttgctgctgtgttttggtgttttcatgtttacttgttttatattgatctgttttaagtatgagaggcttatagtgccctccattgtaaatccatagtcatctttttaagcttattgtgtttaagaaagtagctatgtgttaaacagaggtgatggcagcccttccctagcacactggtggaagagaccccttaagaacctgaccccagtgaatgaagctgatgcacagggagcaccaaaggaccttcgttaagtgataattgtcctggcctctcagccatgaccgttatgaggaaatatcccccattcgaacttaacagatgcctcctctccaaagagaattaaaatcgtagcttgtacagatcaagagaatatactgggcagaatgaagtatgtttgtttatttttctttaaaaataaaggattttggaactctggagagtaagaatatagtatagagtttgcctcaacacatgtgagggccaaataacctgctagctaggcagtaataaactctgttacagaagagaaaaagggccgggcacagtggcttattcctgtaatcccaacactgtggaaggccgaggcaggaggatcacttgagtccaggagtttgaaacctacctaggcaacatggtgaaaccttgtctctaccaaaataaaaattagctgggcatggtggcacgtgcctgtggtcccagctacttgggaggctgaggtgggagcctgggaggtcaaggctgcagtgagccatgatcatgccactgcactccatcctgggtgacagcaagatcttgtctcaaaaaaaaaaaaaaaaaaaaaaaaaccaggagtgaaaaaggaaagtagaaggcagctgctggcctagatgttggtttgggaatattaggtgatcctgttgagattctggatccagagcaatttctttagcttttgactttgccaaagtgtagatagcctttatccagcagtattttaagtggggaatgcaacgtgaggccaactgaacaattccccccgtggctgcccagatagtcacagtcaaggttggagagtctccttccagccagtgacctacccaaaccttttgttctgtaaaactgctctggaaataccgggaagcccagttttctcacgtggtttctagcttcttcagactcagcccaaattaggaagtgcagaagcacatgatggtgaaaaacctaggatttggcagccttccagaatggtatggaatctgagggaagatttatgtttcgttttggaggatagctcaagttgaattttctttccagccagttaccctttcaacctacccatactttgtacaactcttacacaaatacttagatatttattagatagccctgaattcactctaattataaacagggagtgtaaactgcccccagatgttcctgggctgggtaaaagcagctggagtgaagcactcattttccataaaggtaacaaagggcagctcagtggttactcaagctcaaaagggtttttttaagagcaagcattggttaagtctgtgtatactgagttggaagtgatttcagcacattcttttttagtggagtgaaagttctgaagcccccttttaacttcctcttggtttttcattataattggtagccatctcatgaactgtctctgactgttgtctctttgtggtcatgtgattgtgagcttgctttctgacttgcatttctgactttatcctgttgttaggaagatagaaactaggttttgaaagattacatgattcaagcgagggattttaaagtaaagatgtatttattctgaagaatctaaaagataacagattatttgcttatgaaagaacaatatagtctgggaatcccagaatgtcaagccaaaggtctaagaagtcatctccttcaaatactttaataaagaagtatttcgaggagatatctgtccaaaaaggtttgactggcctccagattccagttatttttaaaaagcaacttaccactaaatccttgagtctccatagagtaacagtaaagaaactgatgtaacagactctcctctcaaaggatctcctctggaagagactatcagcggcagcattctccagggaagacccatcccctagtgccagagcttgcatcctggagactaaagattgcacttttttgtagttttttgtccaaatgcaatcccatttctgtgcctcttagcatgcagttagatttggacaaacaagattcctaaggaatgactttattaactataatatggttacagctattatataaatatatattctggttatagttctaatatggagatgttgtgtgcaatgctggcctgtggtggtctgtgtaatgctttaacttgtatggaggaggccaggctcagagctgagatgtggcctgaaccttccctgtatcgatcctttaatttagaactgtcaagatgtcactttctccccctctgccttttagtggtatctgacatatactcaaaacagtaatttcctggtcacatcattaactgctaattctgtatttataaagaattttcagatggacatgtacaaatttgaactcaaaccatccccagtccagatacagggcagcgtgtaggtgaccacaccagagcctcagcctcggtccttctcagccgtcgggataggatccaggcatttcttttaaatctcagaggtagcagtaaacttttcagtattgctgttagcaagtgtgtgtttgccaatagatacccattatactaatgtgccaagtaaatgttcattgcacatctgcttccactgtgttcccacgggtgccatgaagtgtgtgaggagcccctcatctggagggatgagtgctgcgttgactactgctatcaggattgtgttgtgtggaatattcatctacataaattttatatgcacagtaatttccctttttatatgtcaagtaactatttgtaaaagttatactcacaaattattataatgattactaatatattttttccatgtttcattgcctgaataaaaactgtttaccactgtta

SEQ ID NO: 32072 - DNA, 6109 bp, Homo sapiens
  source 1..6109: mol_type = unassigned DNA
atgggaggctcccactctcagaccccgaggggccgggaacccgccggggagaggcacccgagacccacggagaccgcgagtggctgtaaggtgaagaagcatgaaactcagtctctcgccctggatgcatgttctcgggatgaaggggcagtgatctcccagatttcagacatttctaatagggatggccatgctactgatgaggagaaactggcatccacgtcatgtggtcagaaatcagctggtgccgaggtgaaaggtgagccagaggaagacctggagtactttgaatgttccaatgttcctgtgtctaccataaatcatgcgttttcatcctcagaagcaggcatagagaaggagacgtgccagaagatggaagaagacgggtccactgtgcttgggctgctggagtcctctgcagagaaggcccctgtgtcggtgtcctgtggaggtgagagccccctggatgggatctgcctcagcgaatcagacaagacagccgtgctcaccttaataagagaagagataattactaaagagattgaagcaaatgaatggaagaagaaatacgaagagacccggcaagaagttttggagatgaggaaaattgtagctgaatatgaaaagactattgctcaaatgattgaagatgaacaaaggacaagtatgacctctcagaagagcttccagcaactgaccatggagaaggaacaggccctggctgaccttaactctgtggaaaggtccctttctgatctcttcaggagatatgagaacctgaaaggtgttctggaagggttcaagaagaatgaagaagccttgaagaaatgtgctcaggattacttagccagagttaaacaagaggagcagcgataccaggccctgaaaatccacgcagaagagaaactggacaaagccaatgaagagattgctcaggttcgaacaaaagcaaaggctgagagtgcagctctccatgctggactccgcaaagagcagatgaaggtggagtccctggaaagggccctgcagcagaagaaccaagaaattgaagaactgacaaaaatctgtgatgagctgattgcaaagctgggaaagactgactgagacactccccctgttagctcaacagatctgcatttggctgcttctcttgtgaccacaattatcttgccttatccaggaataattgcccctttgcagagaaaaaaaaaaacttaaaaaaagcacatgcctactgctgcctgtcccgctttgctgccaatgcaacagccctggaagaaaccctagagggttgcatagtctagaaaggagtgtgacctgacagtgctggagcctcctagtttccccctatgaaggttcccttaggctgctgagtttgggtttgtgatttatctttagtttgttttaaagtcatctttactttcccaaatgtgttaaatttgtaactcctctttggggtcttctccaccacctgtctgatttttttgtgatctgtttaatcttttaattttttagtatcagtggttttatttaaggagacagtttggcctattgttacttccaatttataatcaagaaggggctctggatccccttttaaattacacacactctcacacacatacatgtatgtttatagatgctgctgctcttttccctgaagcatagtcaagtaagaactgctctacagaaggacatatttccttggatgtgagaccctattttgaaatagagtcctgactcagaacaccaacttaagaatttgggggattaaagatgtgaagaccacagtcttgggttttcatatctggagaagactatttgccatgacgttttgttgccctggtatttggacactcctcagctttaatgggtgtggcccctttagggttagtcctcagactaatgatagtgtctgctttctgcatgaacggcaatatgggactccctccaagctagggtttggcaagtctgccctagagtcatttactctcctctgcctccatttgttaatacagaatcaacatttagtcttcattatctttttttttttttttgagacagagtttcgatctattttaagtatgtgaagaaaatctacttgtaaaaggctcagatcttaattaaaaggtaattgtagcacattaccaattataaggtgaagaaatgtttttttcccaagtgtgatgcattgttcttcagatgttgaaaagaaagcaaaaaataccttctaacttaagacagaatttttaacaaaatgagcagtaaaagtcacatgaaccactccaaaaatcagtgcattttgcatatttttaaacaaagacagcttgttgaatactgagaagaggagtgcaaggagaaggtctgtactaacaaagccaaattcctcaagctcttactggactcagttcagagtggtgggccattaaccccaacatggaatttttccatataaatctcaatgaattccctttcatttgaataggcaaacccaaatccatgcaagtgttttaaagcactgtcctgtcttaatcttacatgctgaaagtcttcatggtgatatgcactatattcagtatacgtatgttttcctacttctcttgtaaaactgttgcatgatccaacttcagcaatgaattgtgcctagtggagaacctctatagatcttaaaaaatgaattattctttagcagtgtattactcacatgggtgcaatctttagccccagggaggtcaataatgtcttttaaagccagaagtcacattttaccaatatgcatttatcataattggtgcttaggctgtatattcaagcctgttgtcttaacattttgtataaaaaagaacaacagaaattatctgtcatttgagaagtggcttgacaatcatttgagctttgaaagcagtcactgtggtgtaatatgaatgctgtcctagtggtcatagtaccaagggcacgtgtctccccttggtataactgatttcctttttagtcctctactgctaaataagttaattttgcattttgcagaaagaaacattgattgctaaatctttttgctgctgtgttttggtgttttcatgtttacttgttttatattgatctgttttaagtatgagaggcttatagtgccctccattgtaaatccatagtcatctttttaagcttattgtgtttaagaaagtagctatgtgttaaacagaggtgatggcagcccttccctagcacactggtggaagagaccccttaagaacctgaccccagtgaatgaagctgatgcacagggagcaccaaaggaccttcgttaagtgataattgtcctggcctctcagccatgaccgttatgaggaaatatcccccattcgaacttaacagatgcctcctctccaaagagaattaaaatcgtagcttgtacagatcaagagaatatactgggcagaatgaagtatgtttgtttatttttctttaaaaataaaggattttggaactctggagagtaagaatatagtatagagtttgcctcaacacatgtgagggccaaataacctgctagctaggcagtaataaactctgttacagaagagaaaaagggccgggcacagtggcttattcctgtaatcccaacactgtggaaggccgaggcaggaggatcacttgagtccaggagtttgaaacctacctaggcaacatggtgaaaccttgtctctaccaaaataaaaattagctgggcatggtggcacgtgcctgtggtcccagctacttgggaggctgaggtgggagcctgggaggtcaaggctgcagtgagccatgatcatgccactgcactccatcctgggtgacagcaagatcttgtctcaaaaaaaaaaaaaaaaaaaaaaaaaccaggagtgaaaaaggaaagtagaaggcagctgctggcctagatgttggtttgggaatattaggtgatcctgttgagattctggatccagagcaatttctttagcttttgactttgccaaagtgtagatagcctttatccagcagtattttaagtggggaatgcaacgtgaggccaactgaacaattccccccgtggctgcccagatagtcacagtcaaggttggagagtctccttccagccagtgacctacccaaaccttttgttctgtaaaactgctctggaaataccgggaagcccagttttctcacgtggtttctagcttcttcagactcagcccaaattaggaagtgcagaagcacatgatggtgaaaaacctaggatttggcagccttccagaatggtatggaatctgagggaagatttatgtttcgttttggaggatagctcaagttgaattttctttccagccagttaccctttcaacctacccatactttgtacaactcttacacaaatacttagatatttattagatagccctgaattcactctaattataaacagggagtgtaaactgcccccagatgttcctgggctgggtaaaagcagctggagtgaagcactcattttccataaaggtaacaaagggcagctcagtggttactcaagctcaaaagggtttttttaagagcaagcattggttaagtctgtgtatactgagttggaagtgatttcagcacattcttttttagtggagtgaaagttctgaagcccccttttaacttcctcttggtttttcattataattggtagccatctcatgaactgtctctgactgttgtctctttgtggtcatgtgattgtgagcttgctttctgacttgcatttctgactttatcctgttgttaggaagatagaaactaggttttgaaagattacatgattcaagcgagggattttaaagtaaagatgtatttattctgaagaatctaaaagataacagattatttgcttatgaaagaacaatatagtctgggaatcccagaatgtcaagccaaaggtctaagaagtcatctccttcaaatactttaataaagaagtatttcgaggagatatctgtccaaaaaggtttgactggcctccagattccagttatttttaaaaagcaacttaccactaaatccttgagtctccatagagtaacagtaaagaaactgatgtaacagactctcctctcaaaggatctcctctggaagagactatcagcggcagcattctccagggaagacccatcccctagtgccagagcttgcatcctggagactaaagattgcacttttttgtagttttttgtccaaatgcaatcccatttctgtgcctcttagcatgcagttagatttggacaaacaagattcctaaggaatgactttattaactataatatggttacagctattatataaatatatattctggttatagttctaatatggagatgttgtgtgcaatgctggcctgtggtggtctgtgtaatgctttaacttgtatggaggaggccaggctcagagctgagatgtggcctgaaccttccctgtatcgatcctttaatttagaactgtcaagatgtcactttctccccctctgccttttagtggtatctgacatatactcaaaacagtaatttcctggtcacatcattaactgctaattctgtatttataaagaattttcagatggacatgtacaaatttgaactcaaaccatccccagtccagatacagggcagcgtgtaggtgaccacaccagagcctcagcctcggtccttctcagccgtcgggataggatccaggcatttcttttaaatctcagaggtagcagtaaacttttcagtattgctgttagcaagtgtgtgtttgccaatagatacccattatactaatgtgccaagtaaatgttcattgcacatctgcttccactgtgttcccacgggtgccatgaagtgtgtgaggagcccctcatctggagggatgagtgctgcgttgactactgctatcaggattgtgttgtgtggaatattcatctacataaattttatatgcacagtaatttccctttttatatgtcaagtaactatttgtaaaagttatactcacaaattattataatgattactaatatattttttccatgtttcattgcctgaataaaaactgtttaccactgtta

SEQ ID NO: 32073 - DNA, 7838 bp, Homo sapiens
  source 1..7838: mol_type = unassigned DNA
agctgatgcgcgccccgccggccgggaggcgggagtccgcgagccgggagcgggagcagcagaggtctagcagccgggcgccgcgggccgggggcctgaggaggccacaggacgggcgtcttcccggctagtggagcccggcgcggggcccgctgcggccgcaccgtgaggggaggaggccgaggaggacgcagcgccggctgccggcgggaggaagcgctccaccagggcccccgacggcactcgtttaaccacatccgcgcctctgctggaaacgcttgctggcgcctgtcaccggttccctccattttgaaagggaaaaaggctctccccacccattcccctgcccctaggagctggagccggaggagccgcgctcatggcgttcagcccgtggcagatcctgtcccccgtgcagtgggcgaaatggacgtggtctgcggtacgcggcggggccgccggcgaggacgaggctggcgggcccgagggcgaccccgaggaggaggattcgcaagccgagaccaaatccttgagtttcagctcggattctgaaggtaattttgagactcctgaagctgaaaccccgatccgatcacctttcaaggagtcctgtgatccatcactcggattggcaggacctggggccaaaagccaagaatcacaagaagctgatgaacagcttgtagcagaagtggttgaaaaatgttcatctaagacttgttctaaaccttcagaaaatgaagtgccacagcaggccattgactctcactcagtcaagaatttcagagaagaacctgaacatgattttagcaaaatttccatcgtgaggccattttcaatagaaacgaaggattccacggatatctcggcagtcctcggaacaaaagcagctcatggctgtgtaactgcagtctcaggcaaggctctgccttccagcccgccagacgccctccaggacgaggcgatgacagaaggcagcatgggggtcaccctcgaggcctccgcagaagctgatctaaaagctggcaactcctgtccagagcttgtgcccagcagaagaagcaagctgagaaagcccaagcctgtccccctgaggaagaaagcaattggaggagagttctcagacaccaacgctgctgtggagggcacacctctccccaaggcatcctatcacttcagtcctgaagagttggatgagaacacaagtcctttgctaggagatgccaggttccagaagtctccccctgaccttaaagaaactcccggcactctcagtagtgacaccaacgactcaggggttgagctgggggaggagtcgaggagctcacctctcaagcttgagtttgatttcacagaagatacaggaaacatagaggccaggaaagcccttccaaggaagcttggcaggaaactgggtagcacactgactcccaagatacaaaaagatggcatcagtaagtcagcaggtttagaacagcctacagacccagtggcacgagacgggcctctctcccaaacatcttccaagccagatcctagtcagtgggaaagccccagcttcaacccctttgggagccactctgttctgcagaactccccacccctctcttctgagggctcctaccactttgacccagataactttgacgaatccatggatccctttaaaccaactacgaccttaacaagcagtgacttttgttctcccactggtaatcacgttaatgaaatcttagaatcacccaagaaggcaaagtcgcgtttaataacgactactgaacaagtgaaatttctctgttttctgttgagtggctgtaaggtgaagaagcatgaaactcagtctctcgccctggatgcatgttctcgggatgaaggggcagtgatctcccagatttcagacatttctaatagggatggccatgctactgatgaggagaaactggcatccacgtcatgtggtcagaaatcagctggtgccgaggtgaaaggtgagccagaggaagacctggagtactttgaatgttccaatgttcctgtgtctaccataaatcatgcgttttcatcctcagaagcaggcatagagaaggagacgtgccagaagatggaagaagacgggtccactgtgcttgggctgctggagtcctctgcagagaaggcccctgtgtcggtgtcctgtggaggtgagagccccctggatgggatctgcctcagcgaatcagacaagacagccgtgctcaccttaataagagaagagataattactaaagagattgaagcaaatgaatggaagaagaaatacgaagagacccggcaagaagttttggagatgaggaaaattgtagctgaatatgaaaagactattgctcaaatgattgaagatgaacaaaggacaagtatgacctctcagaagagcttccagcaactgaccatggagaaggaacaggccctggctgaccttaactctgtggaaaggtccctttctgatctcttcaggagatatgagaacctgaaaggtgttctggaagggttcaagaagaatgaagaagccttgaagaaatgtgctcaggattacttagccagagttaaacaagaggagcagcgataccaggccctgaaaatccacgcagaagagaaactggacaaagccaatgaagagattgctcaggttcgaacaaaagcaaaggctgagagtgcagctctccatgctggactccgcaaagagcagatgaaggtggagtccctggaaagggccctgcagcagaagaaccaagaaattgaagaactgacaaaaatctgtgatgagctgattgcaaagctgggaaagactgactgagacactccccctgttagctcaacagatctgcatttggctgcttctcttgtgaccacaattatcttgccttatccaggaataattgcccctttgcagagaaaaaaaaaaacttaaaaaaagcacatgcctactgctgcctgtcccgctttgctgccaatgcaacagccctggaagaaaccctagagggttgcatagtctagaaaggagtgtgacctgacagtgctggagcctcctagtttccccctatgaaggttcccttaggctgctgagtttgggtttgtgatttatctttagtttgttttaaagtcatctttactttcccaaatgtgttaaatttgtaactcctctttggggtcttctccaccacctgtctgatttttttgtgatctgtttaatcttttaattttttagtatcagtggttttatttaaggagacagtttggcctattgttacttccaatttataatcaagaaggggctctggatccccttttaaattacacacactctcacacacatacatgtatgtttatagatgctgctgctcttttccctgaagcatagtcaagtaagaactgctctacagaaggacatatttccttggatgtgagaccctattttgaaatagagtcctgactcagaacaccaacttaagaatttgggggattaaagatgtgaagaccacagtcttgggttttcatatctggagaagactatttgccatgacgttttgttgccctggtatttggacactcctcagctttaatgggtgtggcccctttagggttagtcctcagactaatgatagtgtctgctttctgcatgaacggcaatatgggactccctccaagctagggtttggcaagtctgccctagagtcatttactctcctctgcctccatttgttaatacagaatcaacatttagtcttcattatctttttttttttttttgagacagagtttcgatctattttaagtatgtgaagaaaatctacttgtaaaaggctcagatcttaattaaaaggtaattgtagcacattaccaattataaggtgaagaaatgtttttttcccaagtgtgatgcattgttcttcagatgttgaaaagaaagcaaaaaataccttctaacttaagacagaatttttaacaaaatgagcagtaaaagtcacatgaaccactccaaaaatcagtgcattttgcatatttttaaacaaagacagcttgttgaatactgagaagaggagtgcaaggagaaggtctgtactaacaaagccaaattcctcaagctcttactggactcagttcagagtggtgggccattaaccccaacatggaatttttccatataaatctcaatgaattccctttcatttgaataggcaaacccaaatccatgcaagtgttttaaagcactgtcctgtcttaatcttacatgctgaaagtcttcatggtgatatgcactatattcagtatacgtatgttttcctacttctcttgtaaaactgttgcatgatccaacttcagcaatgaattgtgcctagtggagaacctctatagatcttaaaaaatgaattattctttagcagtgtattactcacatgggtgcaatctttagccccagggaggtcaataatgtcttttaaagccagaagtcacattttaccaatatgcatttatcataattggtgcttaggctgtatattcaagcctgttgtcttaacattttgtataaaaaagaacaacagaaattatctgtcatttgagaagtggcttgacaatcatttgagctttgaaagcagtcactgtggtgtaatatgaatgctgtcctagtggtcatagtaccaagggcacgtgtctccccttggtataactgatttcctttttagtcctctactgctaaataagttaattttgcattttgcagaaagaaacattgattgctaaatctttttgctgctgtgttttggtgttttcatgtttacttgttttatattgatctgttttaagtatgagaggcttatagtgccctccattgtaaatccatagtcatctttttaagcttattgtgtttaagaaagtagctatgtgttaaacagaggtgatggcagcccttccctagcacactggtggaagagaccccttaagaacctgaccccagtgaatgaagctgatgcacagggagcaccaaaggaccttcgttaagtgataattgtcctggcctctcagccatgaccgttatgaggaaatatcccccattcgaacttaacagatgcctcctctccaaagagaattaaaatcgtagcttgtacagatcaagagaatatactgggcagaatgaagtatgtttgtttatttttctttaaaaataaaggattttggaactctggagagtaagaatatagtatagagtttgcctcaacacatgtgagggccaaataacctgctagctaggcagtaataaactctgttacagaagagaaaaagggccgggcacagtggcttattcctgtaatcccaacactgtggaaggccgaggcaggaggatcacttgagtccaggagtttgaaacctacctaggcaacatggtgaaaccttgtctctaccaaaataaaaattagctgggcatggtggcacgtgcctgtggtcccagctacttgggaggctgaggtgggagcctgggaggtcaaggctgcagtgagccatgatcatgccactgcactccatcctgggtgacagcaagatcttgtctcaaaaaaaaaaaaaaaaaaaaaaaaaccaggagtgaaaaaggaaagtagaaggcagctgctggcctagatgttggtttgggaatattaggtgatcctgttgagattctggatccagagcaatttctttagcttttgactttgccaaagtgtagatagcctttatccagcagtattttaagtggggaatgcaacgtgaggccaactgaacaattccccccgtggctgcccagatagtcacagtcaaggttggagagtctccttccagccagtgacctacccaaaccttttgttctgtaaaactgctctggaaataccgggaagcccagttttctcacgtggtttctagcttcttcagactcagcccaaattaggaagtgcagaagcacatgatggtgaaaaacctaggatttggcagccttccagaatggtatggaatctgagggaagatttatgtttcgttttggaggatagctcaagttgaattttctttccagccagttaccctttcaacctacccatactttgtacaactcttacacaaatacttagatatttattagatagccctgaattcactctaattataaacagggagtgtaaactgcccccagatgttcctgggctgggtaaaagcagctggagtgaagcactcattttccataaaggtaacaaagggcagctcagtggttactcaagctcaaaagggtttttttaagagcaagcattggttaagtctgtgtatactgagttggaagtgatttcagcacattcttttttagtggagtgaaagttctgaagcccccttttaacttcctcttggtttttcattataattggtagccatctcatgaactgtctctgactgttgtctctttgtggtcatgtgattgtgagcttgctttctgacttgcatttctgactttatcctgttgttaggaagatagaaactaggttttgaaagattacatgattcaagcgagggattttaaagtaaagatgtatttattctgaagaatctaaaagataacagattatttgcttatgaaagaacaatatagtctgggaatcccagaatgtcaagccaaaggtctaagaagtcatctccttcaaatactttaataaagaagtatttcgaggagatatctgtccaaaaaggtttgactggcctccagattccagttatttttaaaaagcaacttaccactaaatccttgagtctccatagagtaacagtaaagaaactgatgtaacagactctcctctcaaaggatctcctctggaagagactatcagcggcagcattctccagggaagacccatcccctagtgccagagcttgcatcctggagactaaagattgcacttttttgtagttttttgtccaaatgcaatcccatttctgtgcctcttagcatgcagttagatttggacaaacaagattcctaaggaatgactttattaactataatatggttacagctattatataaatatatattctggttatagttctaatatggagatgttgtgtgcaatgctggcctgtggtggtctgtgtaatgctttaacttgtatggaggaggccaggctcagagctgagatgtggcctgaaccttccctgtatcgatcctttaatttagaactgtcaagatgtcactttctccccctctgccttttagtggtatctgacatatactcaaaacagtaatttcctggtcacatcattaactgctaattctgtatttataaagaattttcagatggacatgtacaaatttgaactcaaaccatccccagtccagatacagggcagcgtgtaggtgaccacaccagagcctcagcctcggtccttctcagccgtcgggataggatccaggcatttcttttaaatctcagaggtagcagtaaacttttcagtattgctgttagcaagtgtgtgtttgccaatagatacccattatactaatgtgccaagtaaatgttcattgcacatctgcttccactgtgttcccacgggtgccatgaagtgtgtgaggagcccctcatctggagggatgagtgctgcgttgactactgctatcaggattgtgttgtgtggaatattcatctacataaattttatatgcacagtaatttccctttttatatgtcaagtaactatttgtaaaagttatactcacaaattattataatgattactaatatattttttccatgtttcattgcctgaataaaaactgtttaccactgtta

SEQ ID NO: 32074 - DNA, 2635 bp, Homo sapiens
  source 1..2635: mol_type = unassigned DNA
agatgcgaaatcagcggtagcaggtggcgcagaagggagaggggagcgaccctggggaccgactctggggaccctcgccgaagagtcccaagggttccaaggccagagagaggtcctggtcttgattgctggcatgtttactcttccaagtacactgagatcaaatgcaaagacaaaccatcaaaggagctggagccggaggagccgcgctcatggcgttcagcccgtggcagatcctgtcccccgtgcagtgggcgaaatggacgtggtctgcggtacgcggcggggccgccggcgaggacgaggctggcgggcccgagggcgaccccgaggaggaggattcgcaagccgagaccaaatccttgagtttcagctcggattctgaaggtaattttgagactcctgaagctgaaaccccgatccgatcacctttcaaggagtcctgtgatccatcactcggattggcaggacctggggccaaaagccaagaatcacaagaagctgatgaacagcttgtagcagaagtggttgaaaaatgttcatctaagacttgttctaaaccttcagaaaatgaagtgccacagcaggccattgactctcactcagtcaagaatttcagagaagaacctgaacatgattttagcaaaatttccatcgtgaggccattttcaatagaaacgaaggattccacggatatctcggcagtcctcggaacaaaagcagctcatggctgtgtaactgcagtctcaggcaaggctctgccttccagcccgccagacgccctccaggacgaggcgatgacagaaggcagcatgggggtcaccctcgaggcctccgcagaagctgatctaaaagctggcaactcctgtccagagcttgtgcccagcagaagaagcaagctgagaaagcccaagcctgtccccctgaggaagaaagcaattggaggagagttctcagacaccaacgctgctgtggagggcacacctctccccaaggcatcctatcacttcagtcctgaagagttggatgagaacacaagtcctttgctaggagatgccaggttccagaagtctccccctgaccttaaagaaactcccggcactctcagtagtgacaccaacgactcaggggttgagctgggggaggagtcgaggagctcacctctcaagcttgagtttgatttcacagaagatacaggaaacatagaggccaggaaagcccttccaaggaagcttggcaggaaactgggtagcacactgactcccaagatacaaaaagatggcatcagtaagtcagcaggtttagaacagcctacagacccagtggcacgagacgggcctctctcccaaacatcttccaagccagatcctagtcagtgggaaagccccagcttcaacccctttgggagccactctgttctgcagaactccccacccctctcttctgagggctcctaccactttgacccagataactttgacgaatccatggatccctttaaaccaactacgaccttaacaagcagtgacttttgttctcccactggtaatcacgttaatgaaatcttagaatcacccaagaaggcaaagtcgcgtttaataacgagtggctgtaaggtgaagaagcatgaaactcagtctctcgccctggatgcatgttctcgggatgaaggggcagtgatctcccagatttcagacatttctaatagggatggccatgctactgatgaggagaaactggcatccacgtcatgtggtcagaaatcagctggtgccgaggtgaaaggcatagagaaggagacgtgccagaagatggaagaagacgggtccactgtgcttgggctgctggagtcctctgcagagaaggcccctgtgtcggtgtcctgtggaggtgagagccccctggatgggatctgcctcagcgaatcagacaagacagccgtgctcaccttaataagagaagagataattactaaagagattgaagcaaatgaatggaagaagaaatacgaagagacccggcaagaagttttggagatgaggaaaattgtagctgaatatgaaaagactattgctcaaatgattgaagatgaacaaaggacaagtatgacctctcagaagagcttccagcaactgaccatggagaaggaacaggccctggctgaccttaactctgtggaaaggtccctttctgatctcttcaggagatatgagaacctgaaaggtgttctggaagggttcaagaagaatgaagaagccttgaagaaatgtgctcaggattacttagccagagttaaacaagaggagcagcgataccaggccctgaaaatccacgcagaagagaaactggacaaagccaatgaagagattgctcaggttcgaacaaaagcaaaggctgagagtgcagctctccatgctggactccgcaaagagcagatgaaggtggagtccctggaaagggccctgcagcagaagaaccaagaaattgaagaactgacaaaaatctgtgatgagctgattgcaaagctgggaaagactgactgagacactccccctgttagctcaacagatctgcatttggctgcttctcttgtgaccacaattatcttgccttatccaggaataattgccccttt

SEQ ID NO: 32075 - DNA, 2428 bp, Homo sapiens
  source 1..2428: mol_type = unassigned DNA
gagagatgcgaaatcagcggtagcaggtggcgcagaagggagaggggagcgaccctggggaccgactctggggaccctcgccgaagagaatcacaagaagctgatgaacagcttgtagcagaagtggttgaaaaatgttcatctaagacttgttctaaaccttcagaaaatgaagtgccacagcaggccattgactctcactcagtcaagaatttcagagaagaacctgaacatgattttagcaaaatttccatcgtgaggccattttcaatagaaacgaaggattccacggatatctcggcagtcctcggaacaaaagcagctcatggctgtgtaactgcagtctcaggcaaggctctgccttccagcccgccagacgccctccaggacgaggcgatgacagaaggcagcatgggggtcaccctcgaggcctccgcagaagctgatctaaaagctggcaactcctgtccagagcttgtgcccagcagaagaagcaagctgagaaagcccaagcctgtccccctgaggaagaaagcaattggaggagagttctcagacaccaacgctgctgtggagggcacacctctccccaaggcatcctatcacttcagtcctgaagagttggatgagaacacaagtcctttgctaggagatgccaggttccagaagtctccccctgaccttaaagaaactcccggcactctcagtagtgacaccaacgactcaggggttgagctgggggaggagtcgaggagctcacctctcaagcttgagtttgatttcacagaagatacaggaaacatagaggccaggaaagcccttccaaggaagcttggcaggaaactgggtagcacactgactcccaagatacaaaaagatggcatcagtaagtcagcaggtttagaacagcctacagacccagtggcacgagacgggcctctctcccaaacatcttccaagccagatcctagtcagtgggaaagccccagcttcaacccctttgggagccactctgttctgcagaactccccacccctctcttctgagggctcctaccactttgacccagataactttgacgaatccatggatccctttaaaccaactacgaccttaacaagcagtgacttttgttctcccactggtaatcacgttaatgaaatcttagaatcacccaagaaggcaaagtcgcgtttaataacgagtggctgtaaggtgaagaagcatgaaactcagtctctcgccctggatgcatgttctcgggatgaaggggcagtgatctcccagatttcagacatttctaatagggatggccatgctactgatgaggagaaactggcatccacgtcatgtggtcagaaatcagctggtgccgaggtgaaaggtgagccagaggaagacctggagtactttgaatgttccaatgttcctgtgtctaccataaatcatgcgttttcatcctcagaagcaggcatagagaaggagacgtgccagaagatggaagaagacgggtccactgtgcttgggctgctggagtcctctgcagagaaggcccctgtgtcggtgtcctgtggaggtgagagccccctggatgggatctgcctcagcgaatcagacaagacagccgtgctcaccttaataagagaagagataattactaaagagattgaagcaaatgaatggaagaagaaatactttaataaagaagtatttcgaggagatatctgtccaaaaaggtttggcctccagattccagttatttttaaaaagcaacttaccactaaatccttgagtctccatagagtaacagtaaagaaactgatgtaacagactctcctctcaaaggatctcctctggaagagactatcagcggcagcattctccagggaagacccatcccctagtgccagagcttgcatcctggagactaaagattgcacttttttgtagttttttgtccaaatgcaatcccatttctgtgcctcttagcatgcagttagatttggacaaacaagattcctaaggaatgactttattaactataatatggttacagctattatataaatatatattctggttatagttctaatatggagatgttgtgtgcaatgctggcctgtggtggtctgtgtaatgctttaacttgtatggaggaggccaggctcagagctgagatgtggcctgaaccttccctgtatcgatcctttaatttagaactgtcaagatgtcactttctccccctctgccttttagtggtatctgacatatactcaaaacagtaatttcctggtcacatcattaactgctaattctgtatttataaagaattttcagatggacatgtacaaatttgaactcaaaccatccccagtccagatacagggcagcgtgtaggtgaccacaccagagcctcagcctcggtcct

SEQ ID NO: 32076 - DNA, 3011 bp, Homo sapiens
  source 1..3011: mol_type = unassigned DNA
ggggaccgactctggggaccctcgccgaagagtcccaagggttccaaggccagagagaggtcctggtcttgattgctggcatgtttactcttccaagtacactgagatcaaatgcaaagacaaaccatcaaagaaaataactctaaaatctggacatgatatacaaagtgactgcctaaaggagctgaagagaggacataagtggatcgcctctgctgttgcatgttggcttggagaacagaagatgaggagccaaataagcaagtccttcagccccaggcttctagcacggggctgcatgtaggctatgcattctggggagtgaggagatcatgaatgctgaaaataaatgaaggaatccagaaaagcaagagtcaaagaaggcatctgcaggccaaatctctgatcaacccctgacccacatacacacaaaatacactcaaagcagctcagctaaagacaaagatctgcactcagagtagagctgcctccccagaaacagagctcgcagttcaggcccagcaagaaaattacctgcaaaacaaaggaaaaacaacactcatcagagaaaaagaacagaatctggaatcttcacaacctagcattcatcatatccaagattgaaacccaaattatgggacatatttaaaaaccaggaaaatggaacgtagtcttaagagaaaagtcaatcaaatctgacctggagatgaataatatattgaaacttaaaagctcggattctgaaggtaattttgagactcctgaagctgaaaccccgatccgatcacctttcaaggagtcctgtgatccatcactcggattggcaggacctggggccaaaagccaagaatcacaagaagctgatgaacagcttgtagcagaagtggttgaaaaatgttcatctaagacttgttctaaaccttcagaaaatgaagtgccacagcaggccattgactctcactcagtcaagaatttcagagaagaacctgaacatgattttagcaaaatttccatcgtgaggccattttcaatagaaacgaaggattccacggatatctcggcagtcctcggaacaaaagcagctcatggctgtgtaactgcagtctcaggcaaggctctgccttccagcccgccagacgccctccaggacgaggcgatgacagaaggcagcatgggggtcaccctcgaggcctccgcagaagctgatctaaaagctggcaactcctgtccagagcttgtgcccagcagaagaagcaagctgagaaagcccaagcctgtccccctgaggaagaaagcaattggaggagagttctcagacaccaacgctgctgtggagggcacacctctccccaaggcatcctatcacttcagtcctgaagagttggatgagaacacaagtcctttgctaggagatgccaggttccagaagtctccccctgaccttaaagaaactcccggcactctcagtagtgacaccaacgactcaggggttgagctgggggaggagtcgaggagctcacctctcaagcttgagtttgatttcacagaagatacaggaaacatagaggccaggaaagcccttccaaggaagcttggcaggaaactgggtagcacactgactcccaagatacaaaaagatggcatcagtaagtcagcaggtttagaacagcctacagacccagtggcacgagacgggcctctctcccaaacatcttccaagccagatcctagtcagtgggaaagccccagcttcaacccctttgggagccactctgttctgcagaactccccacccctctcttctgagggctcctaccactttgacccagataactttgacgaatccatggatccctttaaaccaactacgaccttaacaagcagtgacttttgttctcccactggtaatcacgttaatgaaatcttagaatcacccaagaaggcaaagtcgcgtttaataacgagtggctgtaaggtgaagaagcatgaaactcagtctctcgccctggatgcatgttctcgggatgaaggggcagtgatctcccagatttcagacatttctaatagggatggccatgctactgatgaggagaaactggcatccacgtcatgtggtcagaaatcagctggtgccgaggtgaaaggcatagagaaggagacgtgccagaagatggaagaagacgggtccactgtgcttgggctgctggagtcctctgcagagaaggcccctgtgtcggtgtcctgtggaggtgagagccccctggatgggatctgcctcagcgaatcagacaagacagccgtgctcaccttaataagagaagagataattactaaagagattgaagcaaatgaatggaagaagaaatacgaagagacccggcaagaagttttggagatgaggaaaattgtagctgaatatgaaaagactattgctcaaatgattgaagatgaacaaaggacaagtatgacctctcagaagagcttccagcaactgaccatggagaaggaacaggccctggctgaccttaactctgtggaaaggtccctttctgatctcttcaggagatatgagaacctgaaaggtgttctggaagggttcaagaagaatgaagaagccttgaagaaatgtgctcaggattacttagccagagttaaacaagaggagcagcgataccaggccctgaaaatccacgcagaagagaaactggacaaagccaatgaagagattgctcaggttcgaacaaaagcaaaggctgagagtgcagctctccatgctggactccgcaaagagcagatgaaggtggagtccctggaaagggccctgcagcagaagaaccaagaaattgaagaactgacaaaaatctgtgatgagctgattgcaaagctgggaaagactgactgagacactccccctgttagctcaacagatctgcatttggctgcttctcttgtgaccacaattatcttgccttatccaggaataattgcccctttgcagagaaaaaaaaaaa

SEQ ID NO: 32077 - DNA, 5509 bp, Homo sapiens
  source 1..5509: mol_type = unassigned DNA
acaggatgtttctgagccaagttgaagcaaaagaaactttttccagcatgtcaggaacgaagctgacgttccattaagaaaaaaaaaaaaaaaaaaagaagtgctagaggaaggagtaagaggtgaaaaggcaccagaattcagacggagctttaaattccagacagggccagcgttgggagcacgtaggaggcgcccctcggaaaggagccggagacccagctgacttcgcacttgagctccagccccgtggacatttcctgttctgcctctggaaattcaagctgaaagttacaaaacatccttttccctggaaccaagtgcttggttgggagaccatgccctccccttccttcctcggaactcctccctgatcgccccgtggcttccccaggagagatgcgaaatcagcggtagcaggtggcgcagaagggagaggggagcgaccctggggaccgactctggggaccctcgccgaagagctcggattctgaaggtaattttgagactcctgaagctgaaaccccgatccgatcacctttcaaggagtcctgtgatccatcactcggattggcaggacctggggccaaaagccaagaatcacaagaagctgatgaacagcttgtagcagaagtggttgaaaaatgttcatctaagacttgttctaaaccttcagaaaatgaagtgccacagcaggccattgactctcactcagtcaagaatttcagagaagaacctgaacatgattttagcaaaatttccatcgtgaggccattttcaatagaaacgaaggattccacggatatctcggcagtcctcggaacaaaagcagctcatggctgtgtaactgcagtctcaggcaaggctctgccttccagcccgccagacgccctccaggacgaggcgatgacagaaggcagcatgggggtcaccctcgaggcctccgcagaagctgatctaaaagctggcaactcctgtccagagcttgtgcccagcagaagaagcaagctgagaaagcccaagcctgtccccctgaggaagaaagcaattggaggagagttctcagacaccaacgctgctgtggagggcacacctctccccaaggcatcctatcacttcagtcctgaagagttggatgagaacacaagtcctttgctaggagatgccaggttccagaagtctccccctgaccttaaagaaactcccggcactctcagtagtgacaccaacgactcaggggttgagctgggggaggagtcgaggagctcacctctcaagcttgagtttgatttcacagaagatacaggaaacatagaggccaggaaagcccttccaaggaagcttggcaggaaactgggtagcacactgactcccaagatacaaaaagatggcatcagtaagtcagcaggtttagaacagcctacagacccagtggcacgagacgggcctctctcccaaacatcttccaagccagatcctagtcagtgggaaagccccagcttcaacccctttgggagccactctgttctgcagaactccccacccctctcttctgagggctcctaccactttgacccagataactttgacgaatccatggatccctttaaaccaactacgaccttaacaagcagtgacttttgttctcccactggtaatcacgttaatgaaatcttagaatcacccaagaaggcaaagtcgcgtttaataacgagtggctgtaaggtgaagaagcatgaaactcagtctctcgccctggatgcatgttctcgggatgaaggggcagtgatctcccagatttcagacatttctaatagggatggccatgctactgatgaggagaaactggcatccacgtcatgtggtcagaaatcagctggtgccgaggtgaaaggtgagccagaggaagacctggagtactttgaatgttccaatgttcctgtgtctaccataaatcatgcgttttcatcctcagaagcaggcatagagaaggagacgtgccagaagatggaagaagacgggtccactgtgcttgggctgctggagtcctctgcagagaaggcccctgtgtcggtgtcctgtggaggtgagagccccctggatgggatctgcctcagcgaatcagacaagacagccgtgctcaccttaataagagaagagataattactaaagagattgaagcaaatgaatggaagaagaaatacgaagagacccggcaagaagttttggagatgaggaaaattgtagctgaatatgaaaagactattgctcaaatgattgaagatgaacaaaggacaagtatgacctctcagaagagcttccagcaactgaccatggagaaggaacaggccctggctgaccttaactctgtggaaaggtccctttctgatctcttcaggagatatgagaacctgaaaggtgttctggaagggttcaagaagaatgaagaagccttgaagaaatgtgctcaggattacttagccagagttaaacaagaggagcagcgataccaggccctgaaaatccacgcagaagagaaactggacaaagccaatgaagagattgctcaggttcgaacaaaagcaaaggctgagagtgcagctctccatgctggactccgcaaagagcagatgaaggtggagtccctggaaagggccctgcagcagaagaaccaagaaattgaagaactgacaaaaatctgtgatgagctgattgcaaagctgggaaagactgactgagacactccccctgttagctcaacagatctgcatttggctgcttctcttgtgaccacaattatcttgccttatccaggaataattgcccctttgcagagaaaaaaaaaaacttaaaaaaagcacatgcctactgctgcctgtcccgctttgctgccaatgcaacagccctggaagaaaccctagagggttgcatagtctagaaaggagtgtgacctgacagtgctggagcctcctagtttccccctatgaaggttcccttaggctgctgagtttgggtttgtgatttatctttagtttgttttaaagtcatctttactttcccaaatgtgttaaatttgtaactcctctttggggtcttctccaccacctgtctgatttttttgtgatctgtttaatcttttaattttttagtatcagtggttttatttaaggagacagtttggcctattgttacttccaatttataatcaagaaggggctctggatccccttttaaattacacacactctcacacacatacatgtatgtttatagatgctgctgctcttttccctgaagcatagtcaagtaagaactgctctacagaaggacatatttccttggatgtgagaccctattttgaaatagagtcctgactcagaacaccaacttaagaatttgggggattaaagatgtgaagaccacagtcttgggttttcatatctggagaagactatttgccatgacgttttgttgccctggtatttggacactcctcagctttaatgggtgtggcccctttagggttagtcctcagactaatgatagtgtctgctttctgcatgaacggcaatatgggactccctccaagctagggtttggcaagtctgccctagagtcatttactctcctctgcctccatttgttaatacagaatcaacatttagtcttcattatctttttttttttttttgagacagagtttcgatctattttaagtatgtgaagaaaatctacttgtaaaaggctcagatcttaattaaaaggtaattgtagcacattaccaattataaggtgaagaaatgtttttttcccaagtgtgatgcattgttcttcagatgttgaaaagaaagcaaaaaataccttctaacttaagacagaatttttaacaaaatgagcagtaaaagtcacatgaaccactccaaaaatcagtgcattttgcatatttttaaacaaagacagcttgttgaatactgagaagaggagtgcaaggagaaggtctgtactaacaaagccaaattcctcaagctcttactggactcagttcagagtggtgggccattaaccccaacatggaatttttccatataaatctcaatgaattccctttcatttgaataggcaaacccaaatccatgcaagtgttttaaagcactgtcctgtcttaatcttacatgctgaaagtcttcatggtgatatgcactatattcagtatacgtatgttttcctacttctcttgtaaaactgttgcatgatccaacttcagcaatgaattgtgcctagtggagaacctctatagatcttaaaaaatgaattattctttagcagtgtattactcacatgggtgcaatctttagccccagggaggtcaataatgtcttttaaagccagaagtcacattttaccaatatgcatttatcataattggtgcttaggctgtatattcaagcctgttgtcttaacattttgtataaaaaagaacaacagaaattatctgtcatttgagaagtggcttgacaatcatttgagctttgaaagcagtcactgtggtgtaatatgaatgctgtcctagtggtcatagtaccaagggcacgtgtctccccttggtataactgatttcctttttagtcctctactgctaaataagttaattttgcattttgcagaaagaaacattgattgctaaatctttttgctgctgtgttttggtgttttcatgtttacttgttttatattgatctgttttaagtatgagaggcttatagtgccctccattgtaaatccatagtcatctttttaagcttattgtgtttaagaaagtagctatgtgttaaacagaggtgatggcagcccttccctagcacactggtggaagagaccccttaagaacctgaccccagtgaatgaagctgatgcacagggagcaccaaaggaccttcgttaagtgataattgtcctggcctctcagccatgaccgttatgaggaaatatcccccattcgaacttaacagatgcctcctctccaaagagaattaaaatcgtagcttgtacagatcaagagaatatactgggcagaatgaagtatgtttgtttatttttctttaaaaataaaggattttggaactctggagagtaagaatatagtatagagtttgcctcaacacatgtgagggccaaataacctgctagctaggcagtaataaactctgttacagaagagaaaaagggccgggcacagtggcttattcctgtaatcccaacactgtggaaggccgaggcaggaggatcacttgagtccaggagtttgaaacctacctaggcaacatggtgaaaccttgtctctaccaaaataaaaattagctgggcatggtggcacgtgcctgtggtcccagctacttgggaggctgaggtgggagcctgggaggtcaaggctgcagtgagccatgatcatgccactgcactccatcctgggtgacagcaagatcttgtctcaaaaaaaaaaaaaaaaaa

SEQ ID NO: 32078 - DNA, 2564 bp, Homo sapiens
  source 1..2564: mol_type = unassigned DNA
agtcgctccccggcccttcccggggccctaccgtgtacccaaaacgcagccgcggtgaagaaggtcgcgtgatgacaggcccctggcagctgctgggaaatggtggtctctgccgggctgtcatccgcgtgattgcggaagctcggattctgaaggtaattttgagactcctgaagctgaaaccccgatccgatcacctttcaaggagtcctgtgatccatcactcggattggcaggacctggggccaaaagccaagaatcacaagaagctgatgaacagcttgtagcagaagtggttgaaaaatgttcatctaagacttgttctaaaccttcagaaaatgaagtgccacagcaggccattgactctcactcagtcaagaatttcagagaagaacctgaacatgattttagcaaaatttccatcgtgaggccattttcaatagaaacgaaggattccacggatatctcggcagtcctcggaacaaaagcagctcatggctgtgtaactgcagtctcaggcaaggctctgccttccagcccgccagacgccctccaggacgaggcgatgacagaaggcagcatgggggtcaccctcgaggcctccgcagaagctgatctaaaagctggcaactcctgtccagagcttgtgcccagcagaagaagcaagctgagaaagcccaagcctgtccccctgaggaagaaagcaattggaggagagttctcagacaccaacgctgctgtggagggcacacctctccccaaggcatcctatcacttcagtcctgaagagttggatgagaacacaagtcctttgctaggagatgccaggttccagaagtctccccctgaccttaaagaaactcccggcactctcagtagtgacaccaacgactcaggggttgagctgggggaggagtcgaggagctcacctctcaagcttgagtttgatttcacagaagatacaggaaacatagaggccaggaaagcccttccaaggaagcttggcaggaaactgggtagcacactgactcccaagatacaaaaagatggcatcagtaagtcagcaggtttagaacagcctacagacccagtggcacgagacgggcctctctcccaaacatcttccaagccagatcctagtcagtgggaaagccccagcttcaacccctttgggagccactctgttctgcagaactccccacccctctcttctgagggctcctaccactttgacccagataactttgacgaatccatggatccctttaaaccaactacgaccttaacaagcagtgacttttgttctcccactggtaatcacgttaatgaaatcttagaatcacccaagaaggcaaagtcgcgtttaataacgagtggctgtaaggtgaagaagcatgaaactcagtctctcgccctggatgcatgttctcgggatgaaggggcagtgatctcccagatttcagacatttctaatagggatggccatgctactgatgaggagaaactggcatccacgtcatgtggtcagaaatcagctggtgccgaggtgaaaggcatagagaaggagacgtgccagaagatggaagaagacgggtccactgtgcttgggctgctggagtcctctgcagagaaggcccctgtgtcggtgtcctgtggaggtgagagccccctggatgggatctgcctcagcgaatcagacaagacagccgtgctcaccttaataagagaagagataattactaaagagattgaagcaaatgaatggaagaagaaatacgaagagacccggcaagaagttttggagatgaggaaaattgtagctgaatatgaaaagactattgctcaaatgattgaagatgaacaaaggacaagtatgacctctcagaagagcttccagcaactgaccatggagaaggaacaggccctggctgaccttaactctgtggaaaggtccctttctgatctcttcaggagatatgagaacctgaaaggtgttctggaagggttcaagaagaatgaagaagccttgaagaaatgtgctcaggattacttagccagagttaaacaagaggagcagcgataccaggccctgaaaatccacgcagaagagaaactggacaaagccaatgaagagattgctcaggttcgaacaaaagcaaaggctgagagtgcagctctccatgctggactccgcaaagagcagatgaaggtggagtccctggaaagggccctgcagcagaagaaccaagaaattgaagaactgacaaaaatctgtgatgagctgattgcaaagctgggaaagactgactgagacactccccctgttagctcaacagatctgcatttggctgcttctcttgtgaccacaattatcttgccttatccaggaataattgcccctttgcagagaaaaaaaaaaacttaaaaaaagcacatgcctactgctgcctgtcccgctttgctgccaatgcaacagccctggaagaaaccctagagggttgcatagtctagaaaggagtgtgacctgacagtgctggagcctcctagtttccccctatgaaggt

SEQ ID NO: 32079 - DNA, 660 bp, Homo sapiens
  source 1..660: mol_type = unassigned DNA
agtcgctccccggcccttcccggggccctaccgtgtacccaaaacgcagccgcggtgaagaaggtcgcgtgatgacaggcccctggcagctgctgggaaatggtggtctctgccgggctgtcatccgcgtgattgcggaaggcagctcggattctgaaggtaattttgagactcctgaagctgaaaccccgatccgatcacctttcaaggagtcctgtgatccatcactcggattggcaggacctggggccaaaagccaagaatcacaagaagctgatgaacagcttgtagcagaagtggttgaaaaatgttcatctaagacttgttctaaaccttcagaaaatgaagtgccacagcaggccattgactctcactcagtcaagaatttcagagaagaacctgaacatgattttagcaaaatttccatcgtgaggccattttcaatagaaacgaaggattccacggatatctcggcagtcctcggaacaaaagcagctcatggctgtgtaactgcagtctcaggcaaggctctgccttccagcccgccagacgccctccaggacgaggcgatgacagaaggcagcatgggggtcaccctcgaggcctccgcagaagctgatctaaaagctggcaactcctgtccagagcttgtgcccagca

SEQ ID NO: 32080 - DNA, 967 bp, Homo sapiens
  source 1..967: mol_type = unassigned DNA
aagaaggtcgcgtgatgacaggcccctggcagctgctgggaaatggtggtctctgccgggctgtcatccgcgtgattgcggaaggcaggtgacaccattcttagcctcgggcccagggagttccagcagctcggattctgaaggtaattttgagactcctgaagctgaaaccccgatccgatcacctttcaaggagtcctgtgatccatcactcggattggcaggacctggggccaaaagccaagaatcacaagaagctgatgaacagcttgtagcagaagtggttgaaaaatgttcatctaagacttgttctaaaccttcagaaaatgaagtgccacagcaggccattgactctcactcagtcaagaatttcagagaagaacctgaacatgattttagcaaaatttccatcgtgaggccattttcaatagaaacgaaggattccacggatatctcggcagtcctcggaacaaaagcagctcatggctgtgtaactgcagtctcaggcaaggctctgccttccagcccgccagacgccctccaggacgaggcgatgacagaaggcagcatgggggtcaccctcgaggcctccgcagaagctgatctaaaagctggcaactcctgtccagagcttgtgcccagcagaagaagcaagctgagaaagcccaagcctgtccccctgaggaagaaagcaattggaggagagttctcagacaccaacgctgctgtggagggcacacctctccccaaggcatcctatcacttcagtcctgaagagttggatgagaacacaagtcctttgctaggagatgccaggttccagaagtctccccctgaccttaaagaaactcccggcactctcagtagtgacaccaacgactcaggggttgagctgggggaggagtcgaggagctcacctctcaagcttgagtttgatttcacagaagatacaggaaacatagaggcc

SEQ ID NO: 32081 - DNA, 685 bp, Homo sapiens
  source 1..685: mol_type = unassigned DNA
gtgcaaatgtgttgtgggccttgaggtggcagtcctatgaggcggtggtagggctttcccctgattcagtactcagctggtcccaaggggctttgagtgtggcttttgcctccttaactggatgctgaataggctccttgcacttattttgggactccgttgtgcctgtgcccagcacagggtgtgctgctggtgaatcacaagaagctgatgaacagcttgtagcagaagtggttgaaaaatgttcatctaagacttgttctaaaccttcagaaaatgaagtgccacagcaggccattgactctcactcagtcaagaatttcagagaagaacctgaacatgattttagcaaaatttccatcgtgaggccattttcaatagaaacgaaggattccacggatatctcggcagtcctcggaacaaaagcagctcatggctgtgtaactgcagtctcaggcaaggctctgccttccagcccgccagacgccctccaggacgaggcgatgacagaaggcagcatgggggtcaccctcgaggcctccgcagaagctgatctaaaagctggcaactcctgtccagagcttgtgcccagcagaagaagcaagctgagaaagcccaagcctgtccccctgaggaagaaagcaattggaggagagttctcagacaccaacgctgctgtggaggg

SEQ ID NO: 32082 - DNA, 476 bp, Homo sapiens
  source 1..476: mol_type = unassigned DNA
agaaacagaaccctgtgtcaaatccaggagcctgggggactgtagaacctgaagttttactgggagctggagccggaggagccgcgctcatggcgttcagcccgtggcagatcctgtcccccgtgcagtgggcgaaatggacgtggtctgcggtacgcggcggggccgccggcgaggacgaggctggcgggcccgagggcgaccccgaggaggaggattcgcaagccgagaccaaatccttgagtttcagctcggattctgaaggtaattttgagactcctgaagctgaaaccccgatccgatcacctttcaaggagtcctgtgatccatcactcggattggcaggacctggggccaaaagccaagaatcacaagaagctgatgaacagcttgtagcagaagtggttgaaaaatgttcatctaagacttgttctaaaccttcagaaaatgaagtgccacagcaggccattgactct

SEQ ID NO: 32083 - DNA, 3644 bp, Homo sapiens
  source 1..3644: mol_type = unassigned DNA
cgccccggctcccggctgcaggaatcgcgccaggacgctggccccgctcgcggctagcttgcacgccagggcacagcgaggatgggagggtcgcagtccctgcagccagccccagccagcgacctgaacctggaggcttccgaggcaatgagttccgattctgaagaggcatttgagaccccggagtcaacgacccctgtcaaagctccgccagctccacccccaccaccccccgaagtcatcccagaacccgaggtcagcacacagccacccccggaagaaccaggatgtggttctgagacagtccctgtccctgatggcccacggagcgactcggtggaaggaagtcccttccgtcccccgtcacactccttctctgccgtcttcgatgaagacaagccgatagccagcagtgggacttacaacttggactttgacaacattgagcttgtggatacctttcagaccttggagcctcgtgcctcagacgctaagaatcaggagggcaaagtgaacacacggaggaagtccacggattccgtccccatctctaagtctacactgtcccggtcgctcagcctgcaagccagtgactttgatggtgcttcttcctcaggcaatcccgaggccgtggcccttgccccagatgcatatagcacgggttccagcagtgcttctagtacccttaagcgaactaaaaaaccgaggccgccttccttaaaaaagaaacagaccaccaagaaacccacagagacccccccagtgaaggagacgcaacaggagccagatgaagagagccttgtccccagtggggagaatctagcatctgagacgaaaacggaatctgccaagacggaaggtcctagcccagccttattggaggagacgccccttgagcccgctgtggggcccaaagctgcctgccctctggactcagagagtgcagaaggggttgtccccccggcttctggaggtggcagagtgcagaactcaccccctgtcgggaggaaaacgctgcctcttaccacggccccggaggcaggggaggtaaccccatcggatagcggggggcaagaggactctccagccaaagggctctccgtaaggctggagtttgactattctgaggacaagagtagttgggacaaccagcaggaaaacccccctcctaccaaaaagataggcaaaaagccagttgccaaaatgcccctgaggaggccaaagatgaaaaagacacccgagaaacttgacaacactcctgcctcacctcccagatcccctgctgaacccaatgacatccccattgctaaaggtacttacacctttgatattgacaagtgggatgaccccaattttaaccctttttcttccacctcaaaaatgcaggagtctcccaaactgccccaacaatcatacaactttgacccagacacctgtgatgagtccgttgacccctttaagacatcctctaagacccccagctcaccttctaaatccccagcctcctttgagatcccagccagtgctatggaagccaatggagtggacggggatgggctaaacaagcccgccaagaagaagaagacgcccctaaagactgacacatttagggtgaaaaagtcgccaaaacggtctcctctctctgatccaccttcccaggaccccaccccagctgctacaccagaaacaccaccagtgatctctgcggtggtccacgccacagatgaggaaaagctggcggtcaccaaccagaagtggacgtgcatgacagtggacctagaggctgacaaacaggactacccgcagccctcggacctgtccacctttgtaaacgagaccaaattcagttcacccactgaggagttggattacagaaactcctatgaaattgaatatatggagaaaattggctcctccttacctcaggacgacgatgccccgaagaagcaggccttgtaccttatgtttgacacttctcaggagagccctgtcaagtcatctcccgtccgcatgtcagagtccccgacgccgtgttcagggtcaagttttgaagagactgaagcccttgtgaacactgctgcgaaaaaccagcatcctgtcccacgaggactggcccctaaccaagagtcacacttgcaggtgccagagaaatcctcccagaaggagctggaggccatgggcttgggcaccccttcagaagcgattgaaattacagctcccgagggctcctttgcctctgctgacgccctcctcagcaggctagctcaccccgtctctctctgtggtgcacttgactatctggagcccgacttagcagaaaagaaccccccactattcgctcagaaactccaggaggagttagagtttgccatcatgcggatagaagccctgaagctggccaggcagattgctttggcttcccgcagccaccaggatgccaagagagaggctgctcacccaacagacgtctccatctccaaaacagccttgtactcccgcatcgggaccgctgaggtggagaaacctgcaggccttctgttccagcagcccgacctggactctgccctccagatcgccagagcagagatcataaccaaggagagagaggtctcagaatggaaagataaatatgaagaaagcaggcgggaagtgatggaaatgaggaaaatagtggccgagtatgagaagaccatcgctcagatgatagaggacgaacagagagagaagtcagtctcccaccagacggtgcagcagctggttctggagaaggagcaagccctggccgacctgaactccgtggagaagtctctggccgacctcttcagaagatatgagaagatgaaggaggtcctagaaggcttccgcaagaatgaagaggtgttgaagagatgtgcgcaggagtacctgtcccgggtgaagaaggaggagcagaggtaccaggccctgaaggtgcacgcggaggagaaactggacagggccaatgctgagattgctcaggttcgaggcaaggcccagcaggagcaagccgcccaccaggccagcctgcggaaggagcagctgcgagtggacgccctggaaaggacgctggagcagaagaataaagaaatagaagaactcaccaagatttgtgacgaactgattgccaaaatggggaaaagctaactctgaaccgaatgttttggacttaactgttgcgtgcaatatgaccgtcggcacactgctgttcctccagttccatggacaggttctgttttcactttttcgtatgcactactgtatttcctttctaaataaaattgatttgattgtatgcagtactaaggagactatcagaatttcttgctattggtttgcattttcctagtataattcatagcaagttgacctcagagttcctgtatcagggagattgtctgattctctaataaaagacacattgctgaccttggccttgccctttgtacacaagttcccagggtgagcagcttttggatttaatatgaacatgtacagcgtgcatagggactcttgccttaaggagtgtaaacttgatctgcatttgctgatttgtttttaaaaaaacaagaaatgcatgtttcaaataaaattctctattgtaaataaaattttttctttggatcttg

SEQ ID NO: 32084 - DNA, 9377 bp, Homo sapiens
  source 1..9377: mol_type = unassigned DNA
gtcacctctgacaaaattctggggacgctgggaacactgaatcaacatgggcaatgagaacagcacctcggacaaccagaggactttatcagctcagactccaaggtccgcgcagccacccgggaacagtcagaatataaaaaggaagcagcaggacacgcccggaagccctgaccacagagacgcgtccagcattggcagcgttgggcttggaggcttctgcaccgcttctgagagttctgccagcctggatccatgccttgtgtccccagaggtgactgagccaaggaaggacccacagggagccagggggccagaaggttctttgctgcccagcccaccaccgtcccaggagcgagagcacccctcgtcctccatgccctttgccgagtgtcccccggaaggttgcttggcaagtccagcagcggcacctgaagatggtcctcagactcagtctcccaggagggaacctgccccaaatgccccaggagacatcgcggcggcatttcccgctgagagggacagctctactccataccaagagattgctgccgtccccagtgctggaagagagagacagccgaaggaagaaggacagaagtcctccttctccttctccagtggcatcgaccagtcacctggaatgtcgccagtacccctcagagagccaatgaaggcaccgctgtgtggagagggggaccagcctggtggttttgagtcccaagagaaagaggctgcaggtggctttccccctgcagagtccaggcagggggtggcttctgtgcaagtgacccctgaggcccctgctgcagcccagcagggcacagaaagctcagcggtcttggagaagtcccccctaaaacccatggccccgatcccacaagatccagccccaagagcctcagacagagaaagaggccaaggggaggcgccgcctcagtatttaacagatgacttggaattcctcagggcctgccatctccctaggagcaattcaggggctgccccagaagcagaagtgaatgccgcttcccaggagagctgccagcagccagtgggagcatatctgccgcacgcagagctgccctggggcttgccaagtcctgccctggtgccagaggctgggggctctgggaaggaggctctggacaccattgatgttcagggtcacccacagacagggatgcgaggaaccaagcccaatcaagttgtctgtgtggcagcaggcggccagcccgaagggggtttgcctgtgagccctgaaccttccctgctcactccgactgaggaagcacatccagcttcaagcctcgcttcattcccagctgctcagattcctattgctgtagaagaacctggatcatcatccagggaatcagtttccaaggctgggatgccagtttctgcagatgcagccaaagaggtggtggatgcagggttggtgggactggagaggcaggtgtcagatcttggaagcaagggagagcatccagaaggggaccctggagaggttcctgccccatcaccccaggagaggggagagcacttgaacacggagcaaagccatgaggtccaaccaggagtaccaccccctcctcttcccaaggagcaaagccatgaggtccaaccaggagcaccaccccctcctcttcccaaggcaccaagtgaaagtgccagagggccaccggggccaacggatggagccaaggtccatgaagattccacaagcccagccgtggctaaagaaggaagcagatcacctggtgacagccctggaggaaaggaggaagccccagagccacctgatggtggagacccagggaacctgcaaggagaggactctcaggctttcagcagcaagcgtgatccagaagtaggcaaagatgagctttcaaagccaagcagtgatgcagagagcagagaccatcccagctcacactcagcacagccacccagaaaggggggtgctgggcacacggacgggccccactctcagacagcagaggctgatgcatctggcctaccacacaagctgggtgaggaggaccccgtcctgccccctgtgccagatggagctggtgagcccactgttcccgaaggagccatctgggaggggtcaggattgcagcccaaatgtcctgacacccttcagagcagggaaggattgggaagaatggagtctttcctgactttagaatcagagaaatcagattttccaccaactcctgttgcagaggttgcacccaaagcccaggaaggtgagagcacattggaaataaggaagatgggcagctgtgatggggagggcttgctgacgtccccagatcaaccccgcgggccggcgtgtgatgcgtcgagacaggaatttcatgctggggtgccacatcccccccagggggagaacttggcagcagacctggggctcacggcactcatcctggaccaagatcagcagggaatcccatcctgcccaggggaaggctggataagaggagctgcatccgagtggcccctactatcttctgagaagcatctccagccatcccaggcacaaccagagacatccatctttgacgtgctcaaggagcaggcccagccacctgaaaatgggaaagagacttctccaagccatccaggttttaaggaccagggagcagattcttcccaaatccatgtacctgtggaacctcaggaagataacaacttgcccactcatggaggacaggagcaggctttgggatcagaacttcaaagtcagctccccaaaggcaccctgtctgatactccaacttcatctcccactgacatggtttgggagagttctctgacagaagagtcagaattgtcagcaccaacgagacagaagttgcctgcactaggggagaagcggccagagggagcatgcggtgatggtcagtcctcgagggtctcgcctccagcagcagatgtcttaaaagacttttctcttgcagggaacttcagcagaaaggaaacttgctgcactgggcaggggccaaacaagtctcaacaggcattggctgatgccttggaagaaggcagccagcatgaagaagcatgtcaaaggcatccaggagcttctgaagcagctgatggttgttccccactctggggcttgagtaagagggagatggcaagtggaaacacaggggaggccccaccttgtcagcctgactcagtagctctcctggatgcagttccctgcctgccagccctggcgcccgccagccccggagtcacacccacccaggatgccccagagacagaggcatgtgatgaaacccaggaaggcaggcagcaaccagtgccggccccgcagcagaaaatggagtgctgggccacttcggatgcagagtccccaaagcttcttgcaagtttcccatcagctggggagcaaggtggtgaagccggggctgctgagactggtggcagcgctggtgcaggagacccaggaaagcagcaggctccggagaaacctggagaagctactttgagttgtggcctccttcagactgagcactgccttacctccggggaggaagcttctacctctgccctacgtgagtcctgccaagctgagcaccccatggccagctgccaggatgccttgctgccagccagagagctgggtgggattcccaggagcaccatggatttttctacacaccaggctgtcccagacccaaaggagctcctgctgtctgggccaccagaagtggctgctcctgacaccccttacctgcatgtcgacagtgctgcccagagaggagcagaagacagtggagtgaaagctgtttcctctgcagaccccagagctcctggcgaaagcccctgtcctgtaggggagcccccacttgccttggaaaatgctgcctccttgaagctgtttgctggctccctcgcccccctgttgcaaccaggagctgcaggtggggaaatccctgcagtgcaagccagcagtggtagtcccaaagccagaaccactgagggaccagtggactccatgccatgcctggaccggatgccacttctggccaagggcaagcaggcaacaggggaagagaaagcagcaacagctccaggtgcaggtgccaaggccagtggggagggcatggcaggtgatgcagcaggagagacagagggcagcatggagaggatgggagagccttcccaggacccaaagcagggcacatcaggtggtgtggacacaagctctgagcaaatcgccaccctcactggcttcccagacttcagggagcacatcgccaagatcttcgagaagcctgtgctcggagccctggccacacctggagaaaaggcaggagctgggaggagtgcagtgggtaaagacctcaccaggccattgggcccagagaagcttctagatgggcctccaggagtggatgtcacccttctccctgcacctcctgctcgactccaggtggagaagaagcaacagttggctggagaggctgagatttcccatctggctctgcaagatccagcttcagacaagcttctgggtccagcagggctgacctgggagcggaacttgccaggtgccggtgtggggaaggagatggcaggtgtcccacccacactgagggaagacgagaggccagaggggcctggggcagcctggccaggcctggaaggccaggcttactcacagctggagaggagcaggcaggaattagcttcaggtcttccttcaccagcagctactcaggagctccctgtggagagagctgctgccttccaggtggctccccatagccatggagaagaggccgtggcccaagacagaattccttctggaaagcagcaccaggaaacatctgcctgcgacagtccacatggagaagatggtcccggggactttgctcacacaggggttccaggacatgtgccaaggtccacgtgtgccccttctcctcagagggaggttttgactgtgcctgaggccaacagtgagccctggacccttgacacgcttgggggtgaaaggagacccggagtcactgctggcatcttggaaatgcgaaatgccctgggcaaccagagcacccctgcaccaccaactggagaagtggcagacactcccctggagcctggcaaggtggcaggcgctgctggggaagcagagggtgacatcaccctgagcacagctgagacacaggcatgtgcgtccggtgatctgcctgaagcaggtactacgaggacattctccgttgtggcaggtgacttggtgctgccaggaagctgtcaggacccagcctgctctgacaaggctccggggatggagggtacagctgcccttcatggggacagcccagccaggccccagcaggctaaggagcagccagggcctgagcgccccattccagctggggatgggaaggtgtgcgtctcctcacctccagagcctgacgaaactcacgacccgaagctgcaacatttggctccagaagagctccacactgacagagagagccccaggcctggcccatccatgttaccttcggttcctaagaaggatgctccaagagtcatggataaagtcacttcagatgagaccagaggtgcggaaggaacagaaagttcacctgtggcagatgatatcatccagcccgctgcccccgcagacctggaaagcccaaccttagctgcctcttcctaccacggtgatgttgttggccaggtctctacggatctgatagcccagagcatctccccagctgctgcccatgcgggtcttcctccctcggctgcagaacacatagtttcgccatctgccccagctggtgacagagtagaagcttccactccctcctgcccagatccggccaaggacctcagcaggagttccgattctgaagaggcatttgagaccccggagtcaacgacccctgtcaaagctccgccagctccacccccaccaccccccgaagtcatcccagaacccgaggtcagcacacagccacccccggaagaaccaggatgtggttctgagacagtccctgtccctgatggcccacggagcgactcggtggaaggaagtcccttccgtcccccgtcacactccttctctgccgtcttcgatgaagacaagccgatagccagcagtgggacttacaacttggactttgacaacattgagcttgtggatacctttcagaccttggagcctcgtgcctcagacgctaagaatcaggagggcaaagtgaacacacggaggaagtccacggattccgtccccatctctaagtctacactgtcccggtcgctcagcctgcaagccagtgactttgatggtgcttcttcctcaggcaatcccgaggccgtggcccttgccccagatgcatatagcacgggttccagcagtgcttctagtacccttaagcgaactaaaaaaccgaggccgccttccttaaaaaagaaacagaccaccaagaaacccacagagacccccccagtgaaggagacgcaacaggagccagatgaagagagccttgtccccagtggggagaatctagcatctgagacgaaaacggaatctgccaagacggaaggtcctagcccagccttattggaggagacgccccttgagcccgctgtggggcccaaagctgcctgccctctggactcagagagtgcagaaggggttgtccccccggcttctggaggtggcagagtgcagaactcaccccctgtcgggaggaaaacgctgcctcttaccacggccccggaggcaggggaggtaaccccatcggatagcggggggcaagaggactctccagccaaagggctctccgtaaggctggagtttgactattctgaggacaagagtagttgggacaaccagcaggaaaacccccctcctaccaaaaagataggcaaaaagccagttgccaaaatgcccctgaggaggccaaagatgaaaaagacacccgagaaacttgacaacactcctgcctcacctcccagatcccctgctgaacccaatgacatccccattgctaaaggtacttacacctttgatattgacaagtgggatgaccccaattttaaccctttttcttccacctcaaaaatgcaggagtctcccaaactgccccaacaatcatacaactttgacccagacacctgtgatgagtccgttgacccctttaagacatcctctaagacccccagctcaccttctaaatccccagcctcctttgagatcccagccagtgctatggaagccaatggagtggacggggatgggctaaacaagcccgccaagaagaagaagacgcccctaaagactgacacatttagggtgaaaaagtcgccaaaacggtctcctctctctgatccaccttcccaggaccccaccccagctgctacaccagaaacaccaccagtgatctctgcggtggtccacgccacagatgaggaaaagctggcggtcaccaaccagaagtggacgtgcatgacagtggacctagaggctgacaaacaggactacccgcagccctcggacctgtccacctttgtaaacgagaccaaattcagttcacccactgaggagttggattacagaaactcctatgaaattgaatatatggagaaaattggctcctccttacctcaggacgacgatgccccgaagaagcaggccttgtaccttatgtttgacacttctcaggagagccctgtcaagtcatctcccgtccgcatgtcagagtccccgacgccgtgttcagggtcaagttttgaagagactgaagcccttgtgaacactgctgcgaaaaaccagcatcctgtcccacgaggactggcccctaaccaagagtcacacttgcaggtgccagagaaatcctcccagaaggagctggaggccatgggcttgggcaccccttcagaagcgattgaaattacagctcccgagggctcctttgcctctgctgacgccctcctcagcaggctagctcaccccgtctctctctgtggtgcacttgactatctggagcccgacttagcagaaaagaaccccccactattcgctcagaaactccaggaggagttagagtttgccatcatgcggatagaagccctgaagctggccaggcagattgctttggcttcccgcagccaccaggatgccaagagagaggctgctcacccaacagacgtctccatctccaaaacagccttgtactcccgcatcgggaccgctgaggtggagaaacctgcaggccttctgttccagcagcccgacctggactctgccctccagatcgccagagcagagatcataaccaaggagagagaggtctcagaatggaaagataaatatgaagaaagcaggcgggaagtgatggaaatgaggaaaatagtggccgagtatgagaagaccatcgctcagatgatagaggacgaacagagagagaagtcagtctcccaccagacggtgcagcagctggttctggagaaggagcaagccctggccgacctgaactccgtggagaagtctctggccgacctcttcagaagatatgagaagatgaaggaggtcctagaaggcttccgcaagaatgaagaggtgttgaagagatgtgcgcaggagtacctgtcccgggtgaagaaggaggagcagaggtaccaggccctgaaggtgcacgcggaggagaaactggacagggccaatgctgagattgctcaggttcgaggcaaggcccagcaggagcaagccgcccaccaggccagcctgcggaaggagcagctgcgagtggacgccctggaaaggacgctggagcagaagaataaagaaatagaagaactcaccaagatttgtgacgaactgattgccaaaatggggaaaagctaactctgaaccgaatgttttggacttaactgttgcgtgcaatatgaccgtcggcacactgctgttcctccagttccatggacaggttctgttttcactttttcgtatgcactactgtatttcctttctaaataaaattgatttgattgtatgcagtactaaggagactatcagaatttcttgctattggtttgcattttcctagtataattcatagcaagttgacctcagagttcctgtatcagggagattgtctgattctctaataaaagacacattgctgaccttggccttgccctttgtacacaagttcccagggtgagcagcttttggatttaatatgaacatgtacagcgtgcatagggactcttgccttaaggagtgtaaacttgatctgcatttgctgatttgtttttaaaaaaacaagaaatgcatgtttcaaataaaattctctattgtaaataaaattttttctttggatcttggc

SEQ ID NO: 32085 - DNA, 9070 bp, Homo sapiens
  source 1..9070: mol_type = unassigned DNA
cagaggactttatcagctcagactccaaggtccgcgcagccacccgggaacagtcagaatataaaaaggaagcagcaggacacgcccggaagccctgaccacagagacgcgtccagcattggcagcgttgggcttggaggcttctgcaccgcttctgagagttctgccagcctggatccatgccttgtgtccccagaggtgactgagccaaggaaggacccacagggagccagggggccagaaggttctttgctgcccagcccaccaccgtcccaggagcgagagcacccctcgtcctccatgccctttgccgagtgtcccccggaaggttgcttggcaagtccagcagcggcacctgaagatggtcctcagactcagtctcccaggagggaacctgccccaaatgccccaggagacatcgcggcggcatttcccgctgagagggacagctctactccataccaagagattgctgccgtccccagtgctggaagagagagacagccgaaggaagaaggacagaagtcctccttctccttctccagtggcatcgaccagtcacctggaatgtcgccagtacccctcagagagccaatgaaggcaccgctgtgtggagagggggaccagcctggtggttttgagtcccaagagaaagaggctgcaggtggctttccccctgcagagtccaggcagggggtggcttctgtgcaagtgacccctgaggcccctgctgcagcccagcagggcacagaaagctcagcggtcttggagaagtcccccctaaaacccatggccccgatcccacaagatccagccccaagagcctcagacagagaaagaggccaaggggaggcgccgcctcagtatttaacagatgacttggaattcctcagggcctgccatctccctaggagcaattcaggggctgccccagaagcagaagtgaatgccgcttcccaggagagctgccagcagccagtgggagcatatctgccgcacgcagagctgccctggggcttgccaagtcctgccctggtgccagaggctgggggctctgggaaggaggctctggacaccattgatgttcagggtcacccacagacagggatgcgaggaaccaagcccaatcaagttgtctgtgtggcagcaggcggccagcccgaagggggtttgcctgtgagccctgaaccttccctgctcactccgactgaggaagcacatccagcttcaagcctcgcttcattcccagctgctcagattcctattgctgtagaagaacctggatcatcatccagggaatcagtttccaaggctgggatgccagtttctgcagatgcagccaaagaggtggtggatgcagggttggtgggactggagaggcaggtgtcagatcttggaagcaagggagagcatccagaaggggaccctggagaggttcctgccccatcaccccaggagaggggagagcacttgaacacggagcaaagccatgaggtccaaccaggagtaccaccccctcctcttcccaaggagcaaagccatgaggtccaaccaggagcaccaccccctcctcttcccaaggcaccaagtgaaagtgccagagggccaccggggccaacggatggagccaaggtccatgaagattccacaagcccagccgtggctaaagaaggaagcagatcacctggtgacagccctggaggaaaggaggaagccccagagccacctgatggtggagacccagggaacctgcaaggagaggactctcaggctttcagcagcaagcgtgatccagaagtaggcaaagatgagctttcaaagccaagcagtgatgcagagagcagagaccatcccagctcacactcagcacagccacccagaaaggggggtgctgggcacacggacgggccccactctcagacagcagaggctgatgcatctggcctaccacacaagctgggtgaggaggaccccgtcctgccccctgtgccagatggagctggtgagcccactgttcccgaaggagccatctgggaggggtcaggattgcagcccaaatgtcctgacacccttcagagcagggaaggattgggaagaatggagtctttcctgactttagaatcagagaaatcagattttccaccaactcctgttgcagaggttgcacccaaagcccaggaaggtgagagcacattggaaataaggaagatgggcagctgtgatggggagggcttgctgacgtccccagatcaaccccgcgggccggcgtgtgatgcgtcgagacaggaatttcatgctggggtgccacatcccccccagggggagaacttggcagcagacctggggctcacggcactcatcctggaccaagatcagcagggaatcccatcctgcccaggggaaggctggataagaggagctgcatccgagtggcccctactatcttctgagaagcatctccagccatcccaggcacaaccagagacatccatctttgacgtgctcaaggagcaggcccagccacctgaaaatgggaaagagacttctccaagccatccaggttttaaggaccagggagcagattcttcccaaatccatgtacctgtggaacctcaggaagataacaacttgcccactcatggaggacaggagcaggctttgggatcagaacttcaaagtcagctccccaaaggcaccctgtctgatactccaacttcatctcccactgacatggtttgggagagttctctgacagaagagtcagaattgtcagcaccaacgagacagaagttgcctgcactaggggagaagcggccagagggagcatgcggtgatggtcagtcctcgagggtctcgcctccagcagcagatgtcttaaaagacttttctcttgcagggaacttcagcagaaaggaaacttgctgcactgggcaggggccaaacaagtctcaacaggcattggctgatgccttggaagaaggcagccagcatgaagaagcatgtcaaaggcatccaggagcttctgaagcagctgatggttgttccccactctggggcttgagtaagagggagatggcaagtggaaacacaggggaggccccaccttgtcagcctgactcagtagctctcctggatgcagttccctgcctgccagccctggcgcccgccagccccggagtcacacccacccaggatgccccagagacagaggcatgtgatgaaacccaggaaggcaggcagcaaccagtgccggccccgcagcagaaaatggagtgctgggccacttcggatgcagagtccccaaagcttcttgcaagtttcccatcagctggggagcaaggtggtgaagccggggctgctgagactggtggcagcgctggtgcaggagacccaggaaagcagcaggctccggagaaacctggagaagctactttgagttgtggcctccttcagactgagcactgccttacctccggggaggaagcttctacctctgccctacgtgagtcctgccaagctgagcaccccatggccagctgccaggatgccttgctgccagccagagagctgggtgggattcccaggagcaccatggatttttctacacaccaggctgtcccagacccaaaggagctcctgctgtctgggccaccagaagtggctgctcctgacaccccttacctgcatgtcgacagtgctgcccagagaggagcagaagacagtggagtgaaagctgtttcctctgcagaccccagagctcctggcgaaagcccctgtcctgtaggggagcccccacttgccttggaaaatgctgcctccttgaagctgtttgctggctccctcgcccccctgttgcaaccaggagctgcaggtggggaaatccctgcagtgcaagccagcagtggtagtcccaaagccagaaccactgagggaccagtggactccatgccatgcctggaccggatgccacttctggccaagggcaagcaggcaacaggggaagagaaagcagcaacagctccaggtgcaggtgccaaggccagtggggagggcatggcaggtgatgcagcaggagagacagagggcagcatggagaggatgggagagccttcccaggacccaaagcagggcacatcaggtggtgtggacacaagctctgagcaaatcgccaccctcactggcttcccagacttcagggagcacatcgccaagatcttcgagaagcctgtgctcggagccctggccacacctggagaaaaggcaggagctgggaggagtgcagtgggtaaagacctcaccaggccattgggcccagagaagcttctagatgggcctccaggagtggatgtcacccttctccctgcacctcctgctcgactccaggtggagaagaagcaacagttggctggagaggctgagatttcccatctggctctgcaagatccagcttcagacaagcttctgggtccagcagggctgacctgggagcggaacttgccaggtgccggtgtggggaaggagatggcaggtgtcccacccacactgagggaagacgagaggccagaggggcctggggcagcctggccaggcctggaaggccaggcttactcacagctggagaggagcaggcaggaattagcttcaggtcttccttcaccagcagctactcaggagctccctgtggagagagctgctgccttccaggtggctccccatagccatggagaagaggccgtggcccaagacagaattccttctggaaagcagcaccaggaaacatctgcctgcgacagtccacatggagaagatggtcccggggactttgctcacacaggggttccaggacatgtgccaaggtccacgtgtgccccttctcctcagagggaggttttgactgtgcctgaggccaacagtgagccctggacccttgacacgcttgggggtgaaaggagacccggagtcactgctggcatcttggaaatgcgaaatgccctgggcaaccagagcacccctgcaccaccaactggagaagtggcagacactcccctggagcctggcaaggtggcaggcgctgctggggaagcagagggtgacatcaccctgagcacagctgagacacaggcatgtgcgtccggtgatctgcctgaagcaggtactacgaggacattctccgttgtggcaggtgacttggtgctgccaggaagctgtcaggacccagcctgctctgacaaggctccggggatggagggtacagctgcccttcatggggacagcccagccaggccccagcaggctaaggagcagccagggcctgagcgccccattccagctggggatgggaaggtgtgcgtctcctcacctccagagcctgacgaaactcacgacccgaagctgcaacatttggctccagaagagctccacactgacagagagagccccaggcctggcccatccatgttaccttcggttcctaagaaggatgctccaagagtcatggataaagtcacttcagatgagaccagaggtgcggaaggaacagaaagttcacctgtggcagatgatatcatccagcccgctgcccccgcagacctggaaagcccaaccttagctgcctcttcctaccacggtgatgttgttggccaggtctctacggatctgatagcccagagcatctccccagctgctgcccatgcgggtcttcctccctcggctgcagaacacatagtttcgccatctgccccagctggtgacagagtagaagcttccactccctcctgcccagatccggccaaggacctcagcaggagttccgattctgaagaggcatttgagaccccggagtcaacgacccctgtcaaagctccgccagctccacccccaccaccccccgaagtcatcccagaacccgaggtcagcacacagccacccccggaagaaccaggatgtggttctgagacagtccctgtccctgatggcccacggagcgactcggtggaaggaagtcccttccgtcccccgtcacactccttctctgccgtcttcgatgaagacaagccgatagccagcagtgggacttacaacttggactttgacaacattgagcttgtggatacctttcagaccttggagcctcgtgcctcagacgctaagaatcaggagggcaaagtgaacacacggaggaagtccacggattccgtccccatctctaagtctacactgtcccggtcgctcagcctgcaagccagtgactttgatggtgcttcttcctcaggcaatcccgaggccgtggcccttgccccagatgcatatagcacgggttccagcagtgcttctagtacccttaagcgaactaaaaaaccgaggccgccttccttaaaaaagaaacagaccaccaagaaacccacagagacccccccagtgaaggagacgcaacaggagccagatgaagagagccttgtccccagtggggagaatctagcatctgagacgaaaacggaatctgccaagacggaaggtcctagcccagccttattggaggagacgccccttgagcccgctgtggggcccaaagctgcctgccctctggactcagagagtgcagaaggggttgtccccccggcttctggaggtggcagagtgcagaactcaccccctgtcgggaggaaaacgctgcctcttaccacggccccggaggcaggggaggtaaccccatcggatagcggggggcaagaggactctccagccaaagggctctccgtaaggctggagtttgactattctgaggacaagagtagttgggacaaccagcaggaaaacccccctcctaccaaaaagataggcaaaaagccagttgccaaaatgcccctgaggaggccaaagatgaaaaagacacccgagaaacttgacaacactcctgcctcacctcccagatcccctgctgaacccaatgacatccccattgctaaaggtacttacacctttgatattgacaagtgggatgaccccaattttaaccctttttcttccacctcaaaaatgcaggagtctcccaaactgccccaacaatcatacaactttgacccagacacctgtgatgagtccgttgacccctttaagacatcctctaagacccccagctcaccttctaaatccccagcctcctttgagatcccagccagtgctatggaagccaatggagtggacggggatgggctaaacaagcccgccaagaagaagaagacgcccctaaagactgacacatttagggtgaaaaagtcgccaaaacggtctcctctctctgatccaccttcccaggaccccaccccagctgctacaccagaaacaccaccagtgatctctgcggtggtccacgccacagatgaggaaaagctggcggtcaccaaccagaagtggacgtgcatgacagtggacctagaggctgacaaacaggactacccgcagccctcggacctgtccacctttgtaaacgagaccaaattcagttcacccactgaggagttggattacagaaactcctatgaaattgaatatatggagaaaattggctcctccttacctcaggacgacgatgccccgaagaagcaggccttgtaccttatgtttgacacttctcaggagagccctgtcaagtcatctcccgtccgcatgtcagagtccccgacgccgtgttcagggtcaagttttgaagagactgaagcccttgtgaacactgctgcgaaaaaccagcatcctgtcccacgaggactggcccctaaccaagagtcacacttgcaggtgccagagaaatcctcccagaaggagctggaggccatgggcttgggcaccccttcagaagcgattgaaattagagaggctgctcacccaacagacgtctccatctccaaaacagccttgtactcccgcatcgggaccgctgaggtggagaaacctgcaggccttctgttccagcagcccgacctggactctgccctccagatcgccagagcagagatcataaccaaggagagagaggtctcagaatggaaagataaatatgaagaaagcaggcgggaagtgatggaaatgaggaaaatagtggccgagtatgagaagaccatcgctcagatgatagaggacgaacagagagagaagtcagtctcccaccagacggtgcagcagctggttctggagaaggagcaagccctggccgacctgaactccgtggagaagtctctggccgacctcttcagaagatatgagaagatgaaggaggtcctagaaggcttccgcaagaatgaagaggtgttgaagagatgtgcgcaggagtacctgtcccgggtgaagaaggaggagcagaggtaccaggccctgaaggtgcacgcggaggagaaactggacagggccaatgctgagattgctcaggttcgaggcaaggcccagcaggagcaagccgcccaccaggccagcctgcggaaggagcagctgcgagtggacgccctggaaaggacgctggagcagaagaataaagaaatagaagaactcaccaagatttgtgacgaactgattgccaaaatggggaaaagctaactctgaaccgaatgttttggacttaactgttgcgtgcaatatgaccgtcggcacactgctgttcctccagttccatggacaggttctgttttcactttttcgtatgcactactgtatttcctttctaaataaaattgatttgattgtatgcagtactaaggagactatcagaatttcttgctattggtttgcattttcctagtataattcatagcaagttgacctcagagttcctgtatcagggagattgtctgattctctaataaaagacacattgctgaccttggccttgccctttgtacacaagttcccagggtgagcagcttttggatttaatatgaacatgtacagcgtgcatagggactcttgccttaaggagtgtaaacttgatctgcatttgctgatttgtttttaaaaaaacaagaaatgcatgtttcaaataaaattctctattgtaaataaaattttttctttggatcttggc

SEQ ID NO: 32086 - DNA, 3815 bp, Homo sapiens
  source 1..3815: mol_type = unassigned DNA
gtcacctctgacaaaattctggggacgctgggaacactgaatcaacatgggcaatgagaacagcacctcggacaaccagaggactttatcagctcagactccaaggtccgcgcagccacccgggaacagtcagaatataaaaaggaagcagcaggacacgcccggaagccctgaccacagagacgcgtccagttcacctgtggcagatgatatcatccagcccgctgcccccgcagacctggaaagcccaaccttagctgcctcttcctaccacggtgatgttgttggccaggtctctacggatctgatagcccagaggagttccgattctgaagaggcatttgagaccccggagtcaacgacccctgtcaaagctccgccagctccacccccaccaccccccgaagtcatcccagaacccgaggtcagcacacagccacccccggaagaaccaggatgtggttctgagacagtccctgtccctgatggcccacggagcgactcggtggaaggaagtcccttccgtcccccgtcacactccttctctgccgtcttcgatgaagacaagccgatagccagcagtgggacttacaacttggactttgacaacattgagcttgtggatacctttcagaccttggagcctcgtgcctcagacgctaagaatcaggagggcaaagtgaacacacggaggaagtccacggattccgtccccatctctaagtctacactgtcccggtcgctcagcctgcaagccagtgactttgatggtgcttcttcctcaggcaatcccgaggccgtggcccttgccccagatgcatatagcacgggttccagcagtgcttctagtacccttaagcgaactaaaaaaccgaggccgccttccttaaaaaagaaacagaccaccaagaaacccacagagacccccccagtgaaggagacgcaacaggagccagatgaagagagccttgtccccagtggggagaatctagcatctgagacgaaaacggaatctgccaagacggaaggtcctagcccagccttattggaggagacgccccttgagcccgctgtggggcccaaagctgcctgccctctggactcagagagtgcagaaggggttgtccccccggcttctggaggtggcagagtgcagaactcaccccctgtcgggaggaaaacgctgcctcttaccacggccccggaggcaggggaggtaaccccatcggatagcggggggcaagaggactctccagccaaagggctctccgtaaggctggagtttgactattctgaggacaagagtagttgggacaaccagcaggaaaacccccctcctaccaaaaagataggcaaaaagccagttgccaaaatgcccctgaggaggccaaagatgaaaaagacacccgagaaacttgacaacactcctgcctcacctcccagatcccctgctgaacccaatgacatccccattgctaaaggtacttacacctttgatattgacaagtgggatgaccccaattttaaccctttttcttccacctcaaaaatgcaggagtctcccaaactgccccaacaatcatacaactttgacccagacacctgtgatgagtccgttgacccctttaagacatcctctaagacccccagctcaccttctaaatccccagcctcctttgagatcccagccagtgctatggaagccaatggagtggacggggatgggctaaacaagcccgccaagaagaagaagacgcccctaaagactgacacatttagggtgaaaaagtcgccaaaacggtctcctctctctgatccaccttcccaggaccccaccccagctgctacaccagaaacaccaccagtgatctctgcggtggtccacgccacagatgaggaaaagctggcggtcaccaaccagaagtggacgtgcatgacagtggacctagaggctgacaaacaggactacccgcagccctcggacctgtccacctttgtaaacgagaccaaattcagttcacccactgaggagttggattacagaaactcctatgaaattgaatatatggagaaaattggctcctccttacctcaggacgacgatgccccgaagaagcaggccttgtaccttatgtttgacacttctcaggagagccctgtcaagtcatctcccgtccgcatgtcagagtccccgacgccgtgttcagggtcaagttttgaagagactgaagcccttgtgaacactgctgcgaaaaaccagcatcctgtcccacgaggactggcccctaaccaagagtcacacttgcaggtgccagagaaatcctcccagaaggagctggaggccatgggcttgggcaccccttcagaagcgattgaaattacagctcccgagggctcctttgcctctgctgacgccctcctcagcaggctagctcaccccgtctctctctgtggtgcacttgactatctggagcccgacttagcagaaaagaaccccccactattcgctcagaaactccaggaggagttagagtttgccatcatgcggatagaagccctgaagctggccaggcagattgctttggcttcccgcagccaccaggatgccaagagagaggctgctcacccaacagacgtctccatctccaaaacagccttgtactcccgcatcgggaccgctgaggtggagaaacctgcaggccttctgttccagcagcccgacctggactctgccctccagatcgccagagcagagatcataaccaaggagagagaggtctcagaatggaaagataaatatgaagaaagcaggcgggaagtgatggaaatgaggaaaatagtggccgagtatgagaagaccatcgctcagatgatagaggacgaacagagagagaagtcagtctcccaccagacggtgcagcagctggttctggagaaggagcaagccctggccgacctgaactccgtggagaagtctctggccgacctcttcagaagatatgagaagatgaaggaggtcctagaaggcttccgcaagaatgaagaggtgttgaagagatgtgcgcaggagtacctgtcccgggtgaagaaggaggagcagaggtaccaggccctgaaggtgcacgcggaggagaaactggacagggccaatgctgagattgctcaggttcgaggcaaggcccagcaggagcaagccgcccaccaggccagcctgcggaaggagcagctgcgagtggacgccctggaaaggacgctggagcagaagaataaagaaatagaagaactcaccaagatttgtgacgaactgattgccaaaatggggaaaagctaactctgaaccgaatgttttggacttaactgttgcgtgcaatatgaccgtcggcacactgctgttcctccagttccatggacaggttctgttttcactttttcgtatgcactactgtatttcctttctaaataaaattgatttgattgtatgcagtactaaggagactatcagaatttcttgctattggtttgcattttcctagtataattcatagcaagttgacctcagagttcctgtatcagggagattgtctgattctctaataaaagacacattgctgaccttggccttgccctttgtacacaagttcccagggtgagcagcttttggatttaatatgaacatgtacagcgtgcatagggactcttgccttaaggagtgtaaacttgatctgcatttgctgatttgtttttaaaaaaacaagaaatgcatgtttcaaataaaattctctattgtaaataaaattttttctttggatcttggc

SEQ ID NO: 32087 - DNA, 3979 bp, Homo sapiens
  source 1..3979: mol_type = unassigned DNA
gcgggcggtcccggcgaggcgggaggggccggggcagagggagggtcttcgcctccccacccccagccccgtttccggagcccgcgatggagctttgtgaagatgcaggcgttggggctgctcggcgatgatgacatcatcgtgtcacacacaggagccggctgccggggggtttaagagaagagcctttcggaccacaccggcgctcacgctcatacccgcacgccccgggcagagccgcgcacgccggccacactcgggcgcgcgccggccacactcgcgcgcacacatacgcggcgctcgccccccggcccccggctcgggccgcgagtcgcagctccctgccgccgctcccgccgccacggatgcccgcagctgctcccctctgcagtgcagcaaccccggccgccggccggctcgccccggctcccggctgcaggaatcgcgccaggacgctggccccgctcgcggctagcttgcacgccagggcacagcgaggatgggagggtcgcagtccctgcagccagccccagccagcgacctgaacctggaggcttccgaggcaatgagttccgattctgaagaggcatttgagaccccggagtcaacgacccctgtcaaagctccgccagctccacccccaccaccccccgaagtcatcccagaacccgaggtcagcacacagccacccccggaagaaccaggatgtggttctgagacagtccctgtccctgatggcccacggagcgactcggtggaaggaagtcccttccgtcccccgtcacactccttctctgccgtcttcgatgaagacaagccgatagccagcagtgggacttacaacttggactttgacaacattgagcttgtggatacctttcagaccttggagcctcgtgcctcagacgctaagaatcaggagggcaaagtgaacacacggaggaagtccacggattccgtccccatctctaagtctacactgtcccggtcgctcagcctgcaagccagtgactttgatggtgcttcttcctcaggcaatcccgaggccgtggcccttgccccagatgcatatagcacgggttccagcagtgcttctagtacccttaagcgaactaaaaaaccgaggccgccttccttaaaaaagaaacagaccaccaagaaacccacagagacccccccagtgaaggagacgcaacaggagccagatgaagagagccttgtccccagtggggagaatctagcatctgagacgaaaacggaatctgccaagacggaaggtcctagcccagccttattggaggagacgccccttgagcccgctgtggggcccaaagctgcctgccctctggactcagagagtgcagaaggggttgtccccccggcttctggaggtggcagagtgcagaactcaccccctgtcgggaggaaaacgctgcctcttaccacggccccggaggcaggggaggtaaccccatcggatagcggggggcaagaggactctccagccaaagggctctccgtaaggctggagtttgactattctgaggacaagagtagttgggacaaccagcaggaaaacccccctcctaccaaaaagataggcaaaaagccagttgccaaaatgcccctgaggaggccaaagatgaaaaagacacccgagaaacttgacaacactcctgcctcacctcccagatcccctgctgaacccaatgacatccccattgctaaaggtacttacacctttgatattgacaagtgggatgaccccaattttaaccctttttcttccacctcaaaaatgcaggagtctcccaaactgccccaacaatcatacaactttgacccagacacctgtgatgagtccgttgacccctttaagacatcctctaagacccccagctcaccttctaaatccccagcctcctttgagatcccagccagtgctatggaagccaatggagtggacggggatgggctaaacaagcccgccaagaagaagaagacgcccctaaagactgacacatttagggtgaaaaagtcgccaaaacggtctcctctctctgatccaccttcccaggaccccaccccagctgctacaccagaaacaccaccagtgatctctgcggtggtccacgccacagatgaggaaaagctggcggtcaccaaccagaagtggacgtgcatgacagtggacctagaggctgacaaacaggactacccgcagccctcggacctgtccacctttgtaaacgagaccaaattcagttcacccactgaggagttggattacagaaactcctatgaaattgaatatatggagaaaattggctcctccttacctcaggacgacgatgccccgaagaagcaggccttgtaccttatgtttgacacttctcaggagagccctgtcaagtcatctcccgtccgcatgtcagagtccccgacgccgtgttcagggtcaagttttgaagagactgaagcccttgtgaacactgctgcgaaaaaccagcatcctgtcccacgaggactggcccctaaccaagagtcacacttgcaggtgccagagaaatcctcccagaaggagctggaggccatgggcttgggcaccccttcagaagcgattgaaattacagctcccgagggctcctttgcctctgctgacgccctcctcagcaggctagctcaccccgtctctctctgtggtgcacttgactatctggagcccgacttagcagaaaagaaccccccactattcgctcagaaactccagagagaggctgctcacccaacagacgtctccatctccaaaacagccttgtactcccgcatcgggaccgctgaggtggagaaacctgcaggccttctgttccagcagcccgacctggactctgccctccagatcgccagagcagagatcataaccaaggagagagaggtctcagaatggaaagataaatatgaagaaagcaggcgggaagtgatggaaatgaggaaaatagtggccgagtatgagaagaccatcgctcagatgatagaggacgaacagagagagaagtcagtctcccaccagacggtgcagcagctggttctggagaaggagcaagccctggccgacctgaactccgtggagaagtctctggccgacctcttcagaagatatgagaagatgaaggaggtcctagaaggcttccgcaagaatgaagaggtgttgaagagatgtgcgcaggagtacctgtcccgggtgaagaaggaggagcagaggtaccaggccctgaaggtgcacgcggaggagaaactggacagggccaatgctgagattgctcaggttcgaggcaaggcccagcaggagcaagccgcccaccaggccagcctgcggaaggagcagctgcgagtggacgccctggaaaggacgctggagcagaagaataaagaaatagaagaactcaccaagatttgtgacgaactgattgccaaaatggggaaaagctaactctgaaccgaatgttttggacttaactgttgcgtgcaatatgaccgtcggcacactgctgttcctccagttccatggacaggttctgttttcactttttcgtatgcactactgtatttcctttctaaataaaattgatttgattgtatgcagtactaaggagactatcagaatttcttgctattggtttgcattttcctagtataattcatagcaagttgacctcagagttcctgtatcagggagattgtctgattctctaataaaagacacattgctgaccttggccttgccctttgtacacaagttcccagggtgagcagcttttggatttaatatgaacatgtacagcgtgcatagggactcttgccttaaggagtgtaaacttgatctgcatttgctgatttgtttttaaaaaaacaagaaatgcatgtttcaaataaaattctctattgtaaataaaattttttctttggatcttggcaataa

SEQ ID NO: 32088 - DNA, 3813 bp, Homo sapiens
  source 1..3813: mol_type = unassigned DNA
ggaaagccctttgcacacatcggcctattgaagcactttgcttgattcagctattctcctctcaggacctgcctggatcatcccagcctgtagaatcctgggtttctgtggcagtttgttcttctggtatcacctgctatgctctgaatgtttgtatccctctcagccccgaaattcctgtgttgaaatcctaacccctaaggtgatggtatgaggaggtggggccttcgggaggtgattaggccataagggtggagcctttgtgaatgggattagtgcccttataaaaagaggccccacagcactgccttgcctcttctgccacgtgaagatgcagtgagaaggagctgtctgtgaactaggaaggggtcctcatgagacactgaacctgctggtgccttgatcttggacttcccagcctccagaactttcacctgtggcagatgatatcatccagcccgctgcccccgcagacctggaaagcccaaccttagctgcctcttcctaccacggtgatgttgttggccaggtctctacggatctgatagcccagaggagttccgattctgaagaggcatttgagaccccggagtcaacgacccctgtcaaagctccgccagctccacccccaccaccccccgaagtcatcccagaacccgaggtcagcacacagccacccccggaagaaccaggatgtggttctgagacagtccctgtccctgatggcccacggagcgactcggtggaaggaagtcccttccgtcccccgtcacactccttctctgccgtcttcgatgaagacaagccgatagccagcagtgggacttacaacttggactttgacaacattgagcttgtggatacctttcagaccttggagcctcgtgcctcagacgctaagaatcaggagggcaaagtgaacacacggaggaagtccacggattccgtccccatctctaagtctacactgtcccggtcgctcagcctgcaagccagtgactttgatggtgcttcttcctcaggcaatcccgaggccgtggcccttgccccagatgcatatagcacgggttccagcagtgcttctagtacccttaagcgaactaaaaaaccgaggccgccttccttaaaaaagaaacagaccaccaagaaacccacagagacccccccagtgaaggagacgcaacaggagccagatgaagagagccttgtccccagtggggagaatctagcatctgagacgaaaacggaatctgccaagacggaaggtcctagcccagccttattggaggagacgccccttgagcccgctgtggggcccaaagctgcctgccctctggactcagagagtgcagaaggggttgtccccccggcttctggaggtggcagagtgcagaactcaccccctgtcgggaggaaaacgctgcctcttaccacggccccggaggcaggggaggtaaccccatcggatagcggggggcaagaggactctccagccaaagggctctccgtaaggctggagtttgactattctgaggacaagagtagttgggacaaccagcaggaaaacccccctcctaccaaaaagataggcaaaaagccagttgccaaaatgcccctgaggaggccaaagatgaaaaagacacccgagaaacttgacaacactcctgcctcacctcccagatcccctgctgaacccaatgacatccccattgctaaaggtacttacacctttgatattgacaagtgggatgaccccaattttaaccctttttcttccacctcaaaaatgcaggagtctcccaaactgccccaacaatcatacaactttgacccagacacctgtgatgagtccgttgacccctttaagacatcctctaagacccccagctcaccttctaaatccccagcctcctttgagatcccagccagtgctatggaagccaatggagtggacggggatgggctaaacaagcccgccaagaagaagaagacgcccctaaagacggtgaaaaagtcgccaaaacggtctcctctctctgatccaccttcccaggaccccaccccagctgctacaccagaaacaccaccagtgatctctgcggtggtccacgccacagatgaggaaaagctggcggtcaccaaccagaagtggacgtgcatgacagtggacctagaggctgacaaacaggactacccgcagccctcggacctgtccacctttgtaaacgagaccaaattcagttcacccactgaggagttggattacagaaactcctatgaaattgaatatatggagaaaattggctcctccttacctcaggacgacgatgccccgaagaagcaggccttgtaccttatgtttgacacttctcaggagagccctgtcaagtcatctcccgtccgcatgtcagagtccccgacgccgtgttcagggtcaagttttgaagagactgaagcccttgtgaacactgctgcgaaaaaccagcatcctgtcccacgaggactggcccctaaccaagagtcacacttgcaggtgccagagaaatcctcccagaaggagctggaggccatgggcttgggcaccccttcagaagcgattgaaattagagaggctgctcacccaacagacgtctccatctccaaaacagccttgtactcccgcatcgggaccgctgaggtggagaaacctgcaggccttctgttccagcagcccgacctggactctgccctccagatcgccagagcagagatcataaccaaggagagagaggtctcagaatggaaagataaatatgaagaaagcaggcgggaagtgatggaaatgaggaaaatagtggccgagtatgagaagaccatcgctcagatgatagaggacgaacagagagagaagtcagtctcccaccagacggtgcagcagctggttctggagaaggagcaagccctggccgacctgaactccgtggagaagtctctggccgacctcttcagaagatatgagaagatgaaggaggtcctagaaggcttccgcaagaatgaagaggtgttgaagagatgtgcgcaggagtacctgtcccgggtgaagaaggaggagcagaggtaccaggccctgaaggtgcacgcggaggagaaactggacagggccaatgctgagattgctcaggttcgaggcaaggcccagcaggagcaagccgcccaccaggccagcctgcggaaggagcagctgcgagtggacgccctggaaaggacgctggagcagaagaataaagaaatagaagaactcaccaagatttgtgacgaactgattgccaaaatggggaaaagctaactctgaaccgaatgttttggacttaactgttgcgtgcaatatgaccgtcggcacactgctgttcctccagttccatggacaggttctgttttcactttttcgtatgcactactgtatttcctttctaaataaaattgatttgattgtatgcagtactaaggagactatcagaatttcttgctattggtttgcattttcctagtataattcatagcaagttgacctcagagttcctgtatcagggagattgtctgattctctaataaaagacacattgctgaccttggccttgccctttgtacacaagttcccagggtgagcagcttttggatttaatatgaacatgtacagcgtgcatagggactcttgccttaaggagtgtaaacttgatctgcatttgctgatttgtttttaaaaaaacaagaaatgcatgtttcaaataaaattctctattgtaaataaaattttttctttggatcttggcaata

SEQ ID NO: 32089 - DNA, 9673 bp, Homo sapiens
  source 1..9673: mol_type = unassigned DNA
caggagagaagaaacgcaaatcccagaaccgtgccaacatataaaaccccacattaagggttgtacagtgcactgggatttctcaagtcacccgcttggtcctcttccaagtatactttacttcctttcattcctctctaaaacttttttaaaaactttcactcctgctctaaaagttatcttggtttcttactctaccttatgccccttgggcgaattttttcctctgaggagggaagaatagagttgctgctgcagacacatcagattccctactggtaacagctggagtgcgtcacctctgacaaaattctggggacgctgggaacactgaatcaacatgggcaatgagaacagcacctcggacaaccagaggactttatcagctcagactccaaggtccgcgcagccacccgggaacagtcagaatataaaaaggaagcagcaggacacgcccggaagccctgaccacagagacgcgtccagcattggcagcgttgggcttggaggcttctgcaccgcttctgagagttctgccagcctggatccatgccttgtgtccccagaggtgactgagccaaggaaggacccacagggagccagggggccagaaggttctttgctgcccagcccaccaccgtcccaggagcgagagcacccctcgtcctccatgccctttgccgagtgtcccccggaaggttgcttggcaagtccagcagcggcacctgaagatggtcctcagactcagtctcccaggagggaacctgccccaaatgccccaggagacatcgcggcggcatttcccgctgagagggacagctctactccataccaagagattgctgccgtccccagtgctggaagagagagacagccgaaggaagaaggacagaagtcctccttctccttctccagtggcatcgaccagtcacctggaatgtcgccagtacccctcagagagccaatgaaggcaccgctgtgtggagagggggaccagcctggtggttttgagtcccaagagaaagaggctgcaggtggctttccccctgcagagtccaggcagggggtggcttctgtgcaagtgacccctgaggcccctgctgcagcccagcagggcacagaaagctcagcggtcttggagaagtcccccctaaaacccatggccccgatcccacaagatccagccccaagagcctcagacagagaaagaggccaaggggaggcgccgcctcagtatttaacagatgacttggaattcctcagggcctgccatctccctaggagcaattcaggggctgccccagaagcagaagtgaatgccgcttcccaggagagctgccagcagccagtgggagcatatctgccgcacgcagagctgccctggggcttgccaagtcctgccctggtgccagaggctgggggctctgggaaggaggctctggacaccattgatgttcagggtcacccacagacagggatgcgaggaaccaagcccaatcaagttgtctgtgtggcagcaggcggccagcccgaagggggtttgcctgtgagccctgaaccttccctgctcactccgactgaggaagcacatccagcttcaagcctcgcttcattcccagctgctcagattcctattgctgtagaagaacctggatcatcatccagggaatcagtttccaaggctgggatgccagtttctgcagatgcagccaaagaggtggtggatgcagggttggtgggactggagaggcaggtgtcagatcttggaagcaagggagagcatccagaaggggaccctggagaggttcctgccccatcaccccaggagaggggagagcacttgaacacggagcaaagccatgaggtccaaccaggagtaccaccccctcctcttcccaaggagcaaagccatgaggtccaaccaggagcaccaccccctcctcttcccaaggcaccaagtgaaagtgccagagggccaccggggccaacggatggagccaaggtccatgaagattccacaagcccagccgtggctaaagaaggaagcagatcacctggtgacagccctggaggaaaggaggaagccccagagccacctgatggtggagacccagggaacctgcaaggagaggactctcaggctttcagcagcaagcgtgatccagaagtaggcaaagatgagctttcaaagccaagcagtgatgcagagagcagagaccatcccagctcacactcagcacagccacccagaaaggggggtgctgggcacacggacgggccccactctcagacagcagaggctgatgcatctggcctaccacacaagctgggtgaggaggaccccgtcctgccccctgtgccagatggagctggtgagcccactgttcccgaaggagccatctgggaggggtcaggattgcagcccaaatgtcctgacacccttcagagcagggaaggattgggaagaatggagtctttcctgactttagaatcagagaaatcagattttccaccaactcctgttgcagaggttgcacccaaagcccaggaaggtgagagcacattggaaataaggaagatgggcagctgtgatggggagggcttgctgacgtccccagatcaaccccgcgggccggcgtgtgatgcgtcgagacaggaatttcatgctggggtgccacatcccccccagggggagaacttggcagcagacctggggctcacggcactcatcctggaccaagatcagcagggaatcccatcctgcccaggggaaggctggataagaggagctgcatccgagtggcccctactatcttctgagaagcatctccagccatcccaggcacaaccagagacatccatctttgacgtgctcaaggagcaggcccagccacctgaaaatgggaaagagacttctccaagccatccaggttttaaggaccagggagcagattcttcccaaatccatgtacctgtggaacctcaggaagataacaacttgcccactcatggaggacaggagcaggctttgggatcagaacttcaaagtcagctccccaaaggcaccctgtctgatactccaacttcatctcccactgacatggtttgggagagttctctgacagaagagtcagaattgtcagcaccaacgagacagaagttgcctgcactaggggagaagcggccagagggagcatgcggtgatggtcagtcctcgagggtctcgcctccagcagcagatgtcttaaaagacttttctcttgcagggaacttcagcagaaaggaaacttgctgcactgggcaggggccaaacaagtctcaacaggcattggctgatgccttggaagaaggcagccagcatgaagaagcatgtcaaaggcatccaggagcttctgaagcagctgatggttgttccccactctggggcttgagtaagagggagatggcaagtggaaacacaggggaggccccaccttgtcagcctgactcagtagctctcctggatgcagttccctgcctgccagccctggcgcccgccagccccggagtcacacccacccaggatgccccagagacagaggcatgtgatgaaacccaggaaggcaggcagcaaccagtgccggccccgcagcagaaaatggagtgctgggccacttcggatgcagagtccccaaagcttcttgcaagtttcccatcagctggggagcaaggtggtgaagccggggctgctgagactggtggcagcgctggtgcaggagacccaggaaagcagcaggctccggagaaacctggagaagctactttgagttgtggcctccttcagactgagcactgccttacctccggggaggaagcttctacctctgccctacgtgagtcctgccaagctgagcaccccatggccagctgccaggatgccttgctgccagccagagagctgggtgggattcccaggagcaccatggatttttctacacaccaggctgtcccagacccaaaggagctcctgctgtctgggccaccagaagtggctgctcctgacaccccttacctgcatgtcgacagtgctgcccagagaggagcagaagacagtggagtgaaagctgtttcctctgcagaccccagagctcctggcgaaagcccctgtcctgtaggggagcccccacttgccttggaaaatgctgcctccttgaagctgtttgctggctccctcgcccccctgttgcaaccaggagctgcaggtggggaaatccctgcagtgcaagccagcagtggtagtcccaaagccagaaccactgagggaccagtggactccatgccatgcctggaccggatgccacttctggccaagggcaagcaggcaacaggggaagagaaagcagcaacagctccaggtgcaggtgccaaggccagtggggagggcatggcaggtgatgcagcaggagagacagagggcagcatggagaggatgggagagccttcccaggacccaaagcagggcacatcaggtggtgtggacacaagctctgagcaaatcgccaccctcactggcttcccagacttcagggagcacatcgccaagatcttcgagaagcctgtgctcggagccctggccacacctggagaaaaggcaggagctgggaggagtgcagtgggtaaagacctcaccaggccattgggcccagagaagcttctagatgggcctccaggagtggatgtcacccttctccctgcacctcctgctcgactccaggtggagaagaagcaacagttggctggagaggctgagatttcccatctggctctgcaagatccagcttcagacaagcttctgggtccagcagggctgacctgggagcggaacttgccaggtgccggtgtggggaaggagatggcaggtgtcccacccacactgagggaagacgagaggccagaggggcctggggcagcctggccaggcctggaaggccaggcttactcacagctggagaggagcaggcaggaattagcttcaggtcttccttcaccagcagctactcaggagctccctgtggagagagctgctgccttccaggtggctccccatagccatggagaagaggccgtggcccaagacagaattccttctggaaagcagcaccaggaaacatctgcctgcgacagtccacatggagaagatggtcccggggactttgctcacacaggggttccaggacatgtgccaaggtccacgtgtgccccttctcctcagagggaggttttgactgtgcctgaggccaacagtgagccctggacccttgacacgcttgggggtgaaaggagacccggagtcactgctggcatcttggaaatgcgaaatgccctgggcaaccagagcacccctgcaccaccaactggagaagtggcagacactcccctggagcctggcaaggtggcaggcgctgctggggaagcagagggtgacatcaccctgagcacagctgagacacaggcatgtgcgtccggtgatctgcctgaagcaggtactacgaggacattctccgttgtggcaggtgacttggtgctgccaggaagctgtcaggacccagcctgctctgacaaggctccggggatggagggtacagctgcccttcatggggacagcccagccaggccccagcaggctaaggagcagccagggcctgagcgccccattccagctggggatgggaaggtgtgcgtctcctcacctccagagcctgacgaaactcacgacccgaagctgcaacatttggctccagaagagctccacactgacagagagagccccaggcctggcccatccatgttaccttcggttcctaagaaggatgctccaagagtcatggataaagtcacttcagatgagaccagaggtgcggaaggaacagaaagttcacctgtggcagatgatatcatccagcccgctgcccccgcagacctggaaagcccaaccttagctgcctcttcctaccacggtgatgttgttggccaggtctctacggatctgatagcccagagcatctccccagctgctgcccatgcgggtcttcctccctcggctgcagaacacatagtttcgccatctgccccagctggtgacagagtagaagcttccactccctcctgcccagatccggccaaggacctcagcaggagttccgattctgaagaggcatttgagaccccggagtcaacgacccctgtcaaagctccgccagctccacccccaccaccccccgaagtcatcccagaacccgaggtcagcacacagccacccccggaagaaccaggatgtggttctgagacagtccctgtccctgatggcccacggagcgactcggtggaaggaagtcccttccgtcccccgtcacactccttctctgccgtcttcgatgaagacaagccgatagccagcagtgggacttacaacttggactttgacaacattgagcttgtggatacctttcagaccttggagcctcgtgcctcagacgctaagaatcaggagggcaaagtgaacacacggaggaagtccacggattccgtccccatctctaagtctacactgtcccggtcgctcagcctgcaagccagtgactttgatggtgcttcttcctcaggcaatcccgaggccgtggcccttgccccagatgcatatagcacgggttccagcagtgcttctagtacccttaagcgaactaaaaaaccgaggccgccttccttaaaaaagaaacagaccaccaagaaacccacagagacccccccagtgaaggagacgcaacaggagccagatgaagagagccttgtccccagtggggagaatctagcatctgagacgaaaacggaatctgccaagacggaaggtcctagcccagccttattggaggagacgccccttgagcccgctgtggggcccaaagctgcctgccctctggactcagagagtgcagaaggggttgtccccccggcttctggaggtggcagagtgcagaactcaccccctgtcgggaggaaaacgctgcctcttaccacggccccggaggcaggggaggtaaccccatcggatagcggggggcaagaggactctccagccaaagggctctccgtaaggctggagtttgactattctgaggacaagagtagttgggacaaccagcaggaaaacccccctcctaccaaaaagataggcaaaaagccagttgccaaaatgcccctgaggaggccaaagatgaaaaagacacccgagaaacttgacaacactcctgcctcacctcccagatcccctgctgaacccaatgacatccccattgctaaaggtacttacacctttgatattgacaagtgggatgaccccaattttaaccctttttcttccacctcaaaaatgcaggagtctcccaaactgccccaacaatcatacaactttgacccagacacctgtgatgagtccgttgacccctttaagacatcctctaagacccccagctcaccttctaaatccccagcctcctttgagatcccagccagtgctatggaagccaatggagtggacggggatgggctaaacaagcccgccaagaagaagaagacgcccctaaagactgacacatttagggtgaaaaagtcgccaaaacggtctcctctctctgatccaccttcccaggaccccaccccagctgctacaccagaaacaccaccagtgatctctgcggtggtccacgccacagatgaggaaaagctggcggtcaccaaccagaagtggacgtgcatgacagtggacctagaggctgacaaacaggactacccgcagccctcggacctgtccacctttgtaaacgagaccaaattcagttcacccactgaggagttggattacagaaactcctatgaaattgaatatatggagaaaattggctcctccttacctcaggacgacgatgccccgaagaagcaggccttgtaccttatgtttgacacttctcaggagagccctgtcaagtcatctcccgtccgcatgtcagagtccccgacgccgtgttcagggtcaagttttgaagagactgaagcccttgtgaacactgctgcgaaaaaccagcatcctgtcccacgaggactggcccctaaccaagagtcacacttgcaggtgccagagaaatcctcccagaaggagctggaggccatgggcttgggcaccccttcagaagcgattgaaattacagctcccgagggctcctttgcctctgctgacgccctcctcagcaggctagctcaccccgtctctctctgtggtgcacttgactatctggagcccgacttagcagaaaagaaccccccactattcgctcagaaactccaggaggagttagagtttgccatcatgcggatagaagccctgaagctggccaggcagattgctttggcttcccgcagccaccaggatgccaagagagaggctgctcacccaacagacgtctccatctccaaaacagccttgtactcccgcatcgggaccgctgaggtggagaaacctgcaggccttctgttccagcagcccgacctggactctgccctccagatcgccagagcagagatcataaccaaggagagagaggtctcagaatggaaagataaatatgaagaaagcaggcgggaagtgatggaaatgaggaaaatagtggccgagtatgagaagaccatcgctcagatgatagaggacgaacagagagagaagtcagtctcccaccagacggtgcagcagctggttctggagaaggagcaagccctggccgacctgaactccgtggagaagtctctggccgacctcttcagaagatatgagaagatgaaggaggtcctagaaggcttccgcaagaatgaagaggtgttgaagagatgtgcgcaggagtacctgtcccgggtgaagaaggaggagcagaggtaccaggccctgaaggtgcacgcggaggagaaactggacagggccaatgctgagattgctcaggttcgaggcaaggcccagcaggagcaagccgcccaccaggccagcctgcggaaggagcagctgcgagtggacgccctggaaaggacgctggagcagaagaataaagaaatagaagaactcaccaagatttgtgacgaactgattgccaaaatggggaaaagctaactctgaaccgaatgttttggacttaactgttgcgtgcaatatgaccgtcggcacactgctgttcctccagttccatggacaggttctgttttcactttttcgtatgcactactgtatttcctttctaaataaaattgatttgattgtatgcagtactaaggagactatcagaatttcttgctattggtttgcattttcctagtataattcatagcaagttgacctcagagttcctgtatcagggagattgtctgattctctaataaaagacacattgctgaccttggccttgccctttgtacacaagttcccagggtgagcagcttttggatttaatatgaacatgtacagcgtgcatagggactcttgccttaaggagtgtaaacttgatctgcatttgctgatttgtttttaaaaaaacaagaaatgcatgtttcaaataaaattctctattgtaaataaaattttttctttggatcttggcaa

SEQ ID NO: 32090 - DNA, 8963 bp, Homo sapiens
  source 1..8963: mol_type = unassigned DNA
gtcacctctgacaaaattctggggacgctgggaacactgaatcaacatgggcaatgagaacagcacctcggacaaccagaggactttatcagctcagactccaaggtccgcgcagccacccgggaacagtcagaatataaaaaggaagcagcaggacacgcccggaagccctgaccacagagacgcgtccagcattggcagcgttgggcttggaggcttctgcaccgcttctgagagttctgccagcctggatccatgccttgtgtccccagaggtgactgagccaaggaaggacccacagggagccagggggccagaaggttctttgctgcccagcccaccaccgtcccaggagcgagagcacccctcgtcctccatgccctttgccgagtgtcccccggaaggttgcttggcaagtccagcagcggcacctgaagatggtcctcagactcagtctcccaggagggaacctgccccaaatgccccaggagacatcgcggcggcatttcccgctgagagggacagctctactccataccaagagattgctgccgtccccagtgctggaagagagagacagccgaaggaagaaggacagaagtcctccttctccttctccagtggcatcgaccagtcacctggaatgtcgccagtacccctcagagagccaatgaaggcaccgctgtgtggagagggggaccagcctggtggttttgagtcccaagagaaagaggctgcaggtggctttccccctgcagagtccaggcagggggtggcttctgtgcaagtgacccctgaggcccctgctgcagcccagcagggcacagaaagctcagcggtcttggagaagtcccccctaaaacccatggccccgatcccacaagatccagccccaagagcctcagacagagaaagaggccaaggggaggcgccgcctcagtatttaacagatgacttggaattcctcagggcctgccatctccctaggagcaattcaggggctgccccagaagcagaagtgaatgccgcttcccaggagagctgccagcagccagtgggagcatatctgccgcacgcagagctgccctggggcttgccaagtcctgccctggtgccagaggctgggggctctgggaaggaggctctggacaccattgatgttcagggtcacccacagacagggatgcgaggaaccaagcccaatcaagttgtctgtgtggcagcaggcggccagcccgaagggggtttgcctgtgagccctgaaccttccctgctcactccgactgaggaagcacatccagcttcaagcctcgcttcattcccagctgctcagattcctattgctgtagaagaacctggatcatcatccagggaatcagtttccaaggctgggatgccagtttctgcagatgcagccaaagaggtggtggatgcagggttggtgggactggagaggcaggtgtcagatcttggaagcaagggagagcatccagaaggggaccctggagaggttcctgccccatcaccccaggagaggggagagcacttgaacacggagcaaagccatgaggtccaaccaggagtaccaccccctcctcttcccaaggagcaaagccatgaggtccaaccaggagcaccaccccctcctcttcccaaggcaccaagtgaaagtgccagagggccaccggggccaacggatggagccaaggtccatgaagattccacaagcccagccgtggctaaagaaggaagcagatcacctggtgacagccctggaggaaaggaggaagccccagagccacctgatggtggagacccagggaacctgcaaggagaggactctcaggctttcagcagcaagcgtgatccagaagtaggcaaagatgagctttcaaagccaagcagtgatgcagagagcagagaccatcccagctcacactcagcacagccacccagaaaggggggtgctgggcacacggacgggccccactctcagacagcagaggctgatgcatctggcctaccacacaagctgggtgaggaggaccccgtcctgccccctgtgccagatggagctggtgagcccactgttcccgaaggagccatctgggaggggtcaggattgcagcccaaatgtcctgacacccttcagagcagggaaggattgggaagaatggagtctttcctgactttagaatcagagaaatcagattttccaccaactcctgttgcagaggttgcacccaaagcccaggaaggtgagagcacattggaaataaggaagatgggcagctgtgatggggagggcttgctgacgtccccagatcaaccccgcgggccggcgtgtgatgcgtcgagacaggaatttcatgctggggtgccacatcccccccagggggagaacttggcagcagacctggggctcacggcactcatcctggaccaagatcagcagggaatcccatcctgcccaggggaaggctggataagaggagctgcatccgagtggcccctactatcttctgagaagcatctccagccatcccaggcacaaccagagacatccatctttgacgtgctcaaggagcaggcccagccacctgaaaatgggaaagagacttctccaagccatccaggttttaaggaccagggagcagattcttcccaaatccatgtacctgtggaacctcaggaagataacaacttgcccactcatggaggacaggagcaggctttgggatcagaacttcaaagtcagctccccaaaggcaccctgtctgatactccaacttcatctcccactgacatggtttgggagagttctctgacagaagagtcagaattgtcagcaccaacgagacagaagttgcctgcactaggggagaagcggccagagggagcatgcggtgatggtcagtcctcgagggtctcgcctccagcagcagatgtcttaaaagacttttctcttgcagggaacttcagcagaaaggaaacttgctgcactgggcaggggccaaacaagtctcaacaggcattggctgatgccttggaagaaggcagccagcatgaagaagcatgtcaaaggcatccaggagcttctgaagcagctgatggttgttccccactctggggcttgagtaagagggagatggcaagtggaaacacaggggaggccccaccttgtcagcctgactcagtagctctcctggatgcagttccctgcctgccagccctggcgcccgccagccccggagtcacacccacccaggatgccccagagacagaggcatgtgatgaaacccaggaaggcaggcagcaaccagtgccggccccgcagcagaaaatggagtgctgggccacttcggatgcagagtccccaaagcttcttgcaagtttcccatcagctggggagcaaggtggtgaagccggggctgctgagactggtggcagcgctggtgcaggagacccaggaaagcagcaggctccggagaaacctggagaagctactttgagttgtggcctccttcagactgagcactgccttacctccggggaggaagcttctacctctgccctacgtgagtcctgccaagctgagcaccccatggccagctgccaggatgccttgctgccagccagagagctgggtgggattcccaggagcaccatggatttttctacacaccaggctgtcccagacccaaaggagctcctgctgtctgggccaccagaagtggctgctcctgacaccccttacctgcatgtcgacagtgctgcccagagaggagcagaagacagtggagtgaaagctgtttcctctgcagaccccagagctcctggcgaaagcccctgtcctgtaggggagcccccacttgccttggaaaatgctgcctccttgaagctgtttgctggctccctcgcccccctgttgcaaccaggagctgcaggtggggaaatccctgcagtgcaagccagcagtggtagtcccaaagccagaaccactgagggaccagtggactccatgccatgcctggaccggatgccacttctggccaagggcaagcaggcaacaggggaagagaaagcagcaacagctccaggtgcaggtgccaaggccagtggggagggcatggcaggtgatgcagcaggagagacagagggcagcatggagaggatgggagagccttcccaggacccaaagcagggcacatcaggtggtgtggacacaagctctgagcaaatcgccaccctcactggcttcccagacttcagggagcacatcgccaagatcttcgagaagcctgtgctcggagccctggccacacctggagaaaaggcaggagctgggaggagtgcagtgggtaaagacctcaccaggccattgggcccagagaagcttctagatgggcctccaggagtggatgtcacccttctccctgcacctcctgctcgactccaggtggagaagaagcaacagttggctggagaggctgagatttcccatctggctctgcaagatccagcttcagacaagcttctgggtccagcagggctgacctgggagcggaacttgccaggtgccggtgtggggaaggagatggcaggtgtcccacccacactgagggaagacgagaggccagaggggcctggggcagcctggccaggcctggaaggccaggcttactcacagctggagaggagcaggcaggaattagcttcaggtcttccttcaccagcagctactcaggagctccctgtggagagagctgctgccttccaggtggctccccatagccatggagaagaggccgtggcccaagacagaattccttctggaaagcagcaccaggaaacatctgcctgcgacagtccacatggagaagatggtcccggggactttgctcacacaggggttccaggacatgtgccaaggtccacgtgtgccccttctcctcagagggaggttttgactgtgcctgaggccaacagtgagccctggacccttgacacgcttgggggtgaaaggagacccggagtcactgctggcatcttggaaatgcgaaatgccctgggcaaccagagcacccctgcaccaccaactggagaagtggcagacactcccctggagcctggcaaggtggcaggcgctgctggggaagcagagggtgacatcaccctgagcacagctgagacacaggcatgtgcgtccggtgatctgcctgaagcaggtactacgaggacattctccgttgtggcaggtgacttggtgctgccaggaagctgtcaggacccagcctgctctgacaaggctccggggatggagggtacagctgcccttcatggggacagcccagccaggccccagcaggctaaggagcagccagggcctgagcgccccattccagctggggatgggaaggtgtgcgtctcctcacctccagagcctgacgaaactcacgacccgaagctgcaacatttggctccagaagagctccacactgacagagagagccccaggcctggcccatccatgttaccttcggttcctaagaaggatgctccaagagtcatggataaagtcacttcagatgagaccagaggtgcggaaggaacagaaaggtcagcgaaagatattggtctttggaaggccatgatgccttccttagatacagacacactggatgttttggaaaggagagtagtccttatacagcatgagttcctacataagaaagaagcaaatggccattcccgttttatgtacagttcacctgtggcagatgatatcatccagcccgctgcccccgcagacctggaaagcccaaccttagctgcctcttcctaccacggtgatgttgttggccaggtctctacggatctgatagcccagaggagttccgattctgaagaggcatttgagaccccggagtcaacgacccctgtcaaagctccgccagctccacccccaccaccccccgaagtcatcccagaacccgaggtcagcacacagccacccccggaagaaccaggatgtggttctgagacagtccctgtccctgatggcccacggagcgactcggtggaaggaagtcccttccgtcccccgtcacactccttctctgccgtcttcgatgaagacaagccgatagccagcagtgggacttacaacttggactttgacaacattgagcttgtggatacctttcagaccttggagcctcgtgcctcagacgctaagaatcaggagggcaaagtgaacacacggaggaagtccacggattccgtccccatctctaagtctacactgtcccggtcgctcagcctgcaagccagtgactttgatggtgcttcttcctcaggcaatcccgaggccgtggcccttgccccagatgcatatagcacgggttccagcagtgcttctagtacccttaagcgaactaaaaaaccgaggccgccttccttaaaaaagaaacagaccaccaagaaacccacagagacccccccagtgaaggagacgcaacaggagccagatgaagagagccttgtccccagtggggagaatctagcatctgagacgaaaacggaatctgccaagacggaaggtcctagcccagccttattggaggagacgccccttgagcccgctgtggggcccaaagctgcctgccctctggactcagagagtgcagaaggggttgtccccccggcttctggaggtggcagagtgcagaactcaccccctgtcgggaggaaaacgctgcctcttaccacggccccggaggcaggggaggtaaccccatcggatagcggggggcaagaggactctccagccaaagggctctccgtaaggctggagtttgactattctgaggacaagagtagttgggacaaccagcaggaaaacccccctcctaccaaaaagataggcaaaaagccagttgccaaaatgcccctgaggaggccaaagatgaaaaagacacccgagaaacttgacaacactcctgcctcacctcccagatcccctgctgaacccaatgacatccccattgctaaaggtacttacacctttgatattgacaagtgggatgaccccaattttaaccctttttcttccacctcaaaaatgcaggagtctcccaaactgccccaacaatcatacaactttgacccagacacctgtgatgagtccgttgacccctttaagacatcctctaagacccccagctcaccttctaaatccccagcctcctttgagatcccagccagtgctatggaagccaatggagtggacggggatgggctaaacaagcccgccaagaagaagaagacgcccctaaagactgacacatttagggtgaaaaagtcgccaaaacggtctcctctctctgatccaccttcccaggaccccaccccagctgctacaccagaaacaccaccagtgatctctgcggtggtccacgccacagatgaggaaaagctggcggtcaccaaccagaagtggacgtgcatgacagtggacctagaggctgacaaacaggactacccgcagccctcggacctgtccacctttgtaaacgagaccaaattcagttcacccactgaggagttggattacagaaactcctatgaaattgaatatatggagaaaattggctcctccttacctcaggacgacgatgccccgaagaagcaggccttgtaccttatgtttgacacttctcaggagagccctgtcaagtcatctcccgtccgcatgtcagagtccccgacgccgtgttcagggtcaagttttgaagagactgaagcccttgtgaacactgctgcgaaaaaccagcatcctgtcccacgaggactggcccctaaccaagagtcacacttgcaggtgccagagaaatcctcccagaaggagctggaggccatgggcttgggcaccccttcagaagcgattgaaattagagaggctgctcacccaacagacgtctccatctccaaaacagccttgtactcccgcatcgggaccgctgaggtggagaaacctgcaggccttctgttccagcagcccgacctggactctgccctccagatcgccagagcagagatcataaccaaggagagagaggtctcagaatggaaagataaatatgaagaaagcaggcgggaagtgatggaaatgaggaaaatagtggccgagtatgagaagaccatcgctcagatgatagaggacgaacagagagagaagtcagtctcccaccagacggtgcagcagctggttctggagaaggagcaagccctggccgacctgaactccgtggagaagtctctggccgacctcttcagaagatatgagaagatgaaggaggtcctagaaggcttccgcaagaatgaagaggtgttgaagagatgtgcgcaggagtacctgtcccgggtgaagaaggaggagcagaggtaccaggccctgaaggtgcacgcggaggagaaactggacagggccaatgctgagattgctcaggttcgaggcaaggcccagcaggagcaagccgcccaccaggccagcctgcggaaggagcagctgcgagtggacgccctggaaaggacgctggagcagaagaataaagaaatagaagaactcaccaagatttgtgacgaactgattgccaaaatggggaaaagctaactctgaaccgaatgttttggacttaactgttgcgtgcaatatgaccgtcggcacactgctgttcctccagttccatggacaggttctgttttcactttttcgtatgcactactgtatttcctttctaaataaaattgatttgattgtatgcagtactaaggagactatcagaatttcttgctattggtttgcattttcctagtataattcatagcaagttgacctcagagttcctgtatcagggagattgtctgattctctaataaaagacacattgctgaccttggcc

SEQ ID NO: 32091 - DNA, 4114 bp, Homo sapiens
  source 1..4114: mol_type = unassigned DNA
caggagagaagaaacgcaaatcccagaaccgtgccaacatataaaaccccacattaagggttgtacagtgcactgggatttctcaagtcacccgcttggtcctcttccaagtatactttacttcctttcattcctctctaaaacttttttaaaaactttcactcctgctctaaaagttatcttggtttcttactctaccttatgccccttgggcgaattttttcctctgaggagggaagaatagagttgctgctgcagacacatcagattccctactggtaacagctggagtgcgtcacctctgacaaaattctggggacgctgggaacactgaatcaacatgggcaatgagaacagcacctcggacaaccagaggactttatcagctcagactccaaggtccgcgcagccacccgggaacagtcagaatataaaaaggaagcagcaggacacgcccggaagccctgaccacagagacgcgtccagttcacctgtggcagatgatatcatccagcccgctgcccccgcagacctggaaagcccaaccttagctgcctcttcctaccacggtgatgttgttggccaggtctctacggatctgatagcccagaggagttccgattctgaagaggcatttgagaccccggagtcaacgacccctgtcaaagctccgccagctccacccccaccaccccccgaagtcatcccagaacccgaggtcagcacacagccacccccggaagaaccaggatgtggttctgagacagtccctgtccctgatggcccacggagcgactcggtggaaggaagtcccttccgtcccccgtcacactccttctctgccgtcttcgatgaagacaagccgatagccagcagtgggacttacaacttggactttgacaacattgagcttgtggatacctttcagaccttggagcctcgtgcctcagacgctaagaatcaggagggcaaagtgaacacacggaggaagtccacggattccgtccccatctctaagtctacactgtcccggtcgctcagcctgcaagccagtgactttgatggtgcttcttcctcaggcaatcccgaggccgtggcccttgccccagatgcatatagcacgggttccagcagtgcttctagtacccttaagcgaactaaaaaaccgaggccgccttccttaaaaaagaaacagaccaccaagaaacccacagagacccccccagtgaaggagacgcaacaggagccagatgaagagagccttgtccccagtggggagaatctagcatctgagacgaaaacggaatctgccaagacggaaggtcctagcccagccttattggaggagacgccccttgagcccgctgtggggcccaaagctgcctgccctctggactcagagagtgcagaaggggttgtccccccggcttctggaggtggcagagtgcagaactcaccccctgtcgggaggaaaacgctgcctcttaccacggccccggaggcaggggaggtaaccccatcggatagcggggggcaagaggactctccagccaaagggctctccgtaaggctggagtttgactattctgaggacaagagtagttgggacaaccagcaggaaaacccccctcctaccaaaaagataggcaaaaagccagttgccaaaatgcccctgaggaggccaaagatgaaaaagacacccgagaaacttgacaacactcctgcctcacctcccagatcccctgctgaacccaatgacatccccattgctaaaggtacttacacctttgatattgacaagtgggatgaccccaattttaaccctttttcttccacctcaaaaatgcaggagtctcccaaactgccccaacaatcatacaactttgacccagacacctgtgatgagtccgttgacccctttaagacatcctctaagacccccagctcaccttctaaatccccagcctcctttgagatcccagccagtgctatggaagccaatggagtggacggggatgggctaaacaagcccgccaagaagaagaagacgcccctaaagactgacacatttagggtgaaaaagtcgccaaaacggtctcctctctctgatccaccttcccaggaccccaccccagctgctacaccagaaacaccaccagtgatctctgcggtggtccacgccacagatgaggaaaagctggcggtcaccaaccagaagtggacgtgcatgacagtggacctagaggctgacaaacaggactacccgcagccctcggacctgtccacctttgtaaacgagaccaaattcagttcacccactgaggagttggattacagaaactcctatgaaattgaatatatggagaaaattggctcctccttacctcaggacgacgatgccccgaagaagcaggccttgtaccttatgtttgacacttctcaggagagccctgtcaagtcatctcccgtccgcatgtcagagtccccgacgccgtgttcagggtcaagttttgaagagactgaagcccttgtgaacactgctgcgaaaaaccagcatcctgtcccacgaggactggcccctaaccaagagtcacacttgcaggtgccagagaaatcctcccagaaggagctggaggccatgggcttgggcaccccttcagaagcgattgaaattacagctcccgagggctcctttgcctctgctgacgccctcctcagcaggctagctcaccccgtctctctctgtggtgcacttgactatctggagcccgacttagcagaaaagaaccccccactattcgctcagaaactccaggaggagttagagtttgccatcatgcggatagaagccctgaagctggccaggcagattgctttggcttcccgcagccaccaggatgccaagagagaggctgctcacccaacagacgtctccatctccaaaacagccttgtactcccgcatcgggaccgctgaggtggagaaacctgcaggccttctgttccagcagcccgacctggactctgccctccagatcgccagagcagagatcataaccaaggagagagaggtctcagaatggaaagataaatatgaagaaagcaggcgggaagtgatggaaatgaggaaaatagtggccgagtatgagaagaccatcgctcagatgatagaggacgaacagagagagaagtcagtctcccaccagacggtgcagcagctggttctggagaaggagcaagccctggccgacctgaactccgtggagaagtctctggccgacctcttcagaagatatgagaagatgaaggaggtcctagaaggcttccgcaagaatgaagaggtgttgaagagatgtgcgcaggagtacctgtcccgggtgaagaaggaggagcagaggtaccaggccctgaaggtgcacgcggaggagaaactggacagggccaatgctgagattgctcaggttcgaggcaaggcccagcaggagcaagccgcccaccaggccagcctgcggaaggagcagctgcgagtggacgccctggaaaggacgctggagcagaagaataaagaaatagaagaactcaccaagatttgtgacgaactgattgccaaaatggggaaaagctaactctgaaccgaatgttttggacttaactgttgcgtgcaatatgaccgtcggcacactgctgttcctccagttccatggacaggttctgttttcactttttcgtatgcactactgtatttcctttctaaataaaattgatttgattgtatgcagtactaaggagactatcagaatttcttgctattggtttgcattttcctagtataattcatagcaagttgacctcagagttcctgtatcagggagattgtctgattctctaataaaagacacattgctgaccttggccttgccctttgtacacaagttcccagggtgagcagcttttggatttaatatgaacatgtacagcgtgcatagggactcttgccttaaggagtgtaaacttgatctgcatttgctgatttgtttttaaaaaaacaagaaatgcatgtttcaaataaaattctctattgtaaataaaattttttctttggatcttggcaataa

SEQ ID NO: 32092 - DNA, 2781 bp, Homo sapiens
  source 1..2781: mol_type = unassigned DNA
cggcggtagcagctaggcttggcccccggcgtggagcagacgcggacccctccttcctggcggcggcggcgcgggctcagagcccggcaacgggcgggcgggcagaatgagtctgcaggtcttaaacgacaaaaatgtcagcaatgaaaaaaatacagaaaattgcgacttcctgttttcgccaccagaagttaccggaagatcgtctgttcttcgtgtgtcacagaaagaaaatgtgccacccaagaacctggccaaagctatgaaggtgacttttcagacacctctgcgggatccacagacgcacaggattctaagtcctagcatggccagcaaacttgaggctcctttcactcaggatgacacccttggactggaaaactcacacccggtctggacacagaaagagaaccaacagctcatcaaggaagtggatgccaaaactactcatggaattctacagaaaccagtggaggctgacaccgacctcctgggggatgcaagcccagcctttgggagtggcagctccagcgagtctggcccaggtgccctggctgacctggactgctcaagctcttcccagagcccaggaagttctgagaaccaaatggtgtctccaggaaaagtgtctggcagccctgagcaagccgtggaggaaaaccttagttcctattccttagacagaagagtgacacccgcctctgagaccctagaagacccttgcaggacagagtcccagcacaaagcggagactccgcacggagccgaggaagaatgcaaagcggagactccgcacggagccgaggaggaatgccggcacggtggggtctgtgctcccgcagcagtggccacttcgcctcctggtgcaatccctaaggaagcctgcggaggagcacccctgcagggtctgcctggcgaagccctgggctgccctgcgggtgtgggcacccccgtgccagcagatggcactcagacccttacctgtgcacacacctctgctcctgagagcacagccccaaccaaccacctggtggctggcagggccatgaccctgagtcctcaggaagaagtggctgcaggccaaatggccagctcctcgaggagcggacctgtaaaactagaatttgatgtatctgatggcgccaccagcaaaagggcacccccaccaaggagactgggagagaggtccggcctcaagcctcccttgaggaaagcagcagtgaggcagcaaaaggccccgcaggaggtggaggaggacgacggtaggagcggagcaggagaggacccccccatgccagcttctcggggctcttaccacctcgactgggacaaaatggatgacccaaacttcatcccgttcggaggtgacaccaagtctggttgcagtgaggcccagcccccagaaagccctgagaccaggctgggccagccagcggctgaacagttgcatgctgggcctgccacggaggagccaggtccctgtctgagccagcagctgcattcagcctcagcggaggacacgcctgtggtgcagttggcagccgagaccccaacagcagagagcaaggagagagccttgaactctgccagcacctcgcttcccacaagctgtccaggcagtgagccagtgcccacccatcagcaggggcagcctgccttggagctgaaagaggagagcttcagagaccccgctgaggttctaggcacgggcgcggaggtggattacctggagcagtttggaacttcctcgtttaaggagtcggccttgaggaagcagtccttatacctcaagttcgaccccctcctgagggacagtcctggtagaccagtgcccgtggccaccgagaccagcagcatgcacggtgcaaatgagactccctcaggacgtccgcgggaagccaagcttgtggagttcgatttcttgggagcactggacattcctgtgccaggcccacccccaggtgttcccgcgcctgggggcccacccctgtccaccggacctatagtggacctgctccagtacagccagaaggacctggatgcagtggtaaaggcgacacaggaggagaaccgggagctgaggagcaggtgtgaggagctccacgggaagaacctggaactggggaagatcatggacaggttcgaagaggttgtgtaccaggccatggaggaagttcagaagcagaaggaactttccaaagctgaaatccagaaagttctaaaagaaaaagaccaacttaccacagatctgaactccatggagaagtccttctccgacctcttcaagcgttttgagaaacagaaagaggtgatcgagggctaccgcaagaacgaagagtcactgaagaagtgcgtggaggattacctggcaaggatcacccaggagggccagaggtaccaagccctgaaggcccacgcggaggagaagctgcagctggcaaacgaggagatcgcccaggtccggagcaaggcccaggcggaagcgttggccctccaggccagcctgaggaaggagcagatgcgcatccagtcgctggagaagacagtggagcagaagactaaagagaacgaggagctgaccaggatctgcgacgacctcatctccaagatggagaagatctgacctccacggagccgctgtccccgcccccctgctcccgtctgtctgtcctgtctgattctcttaggtgtcatgttcttttttctgtcttgtcttcaacttttttaaaaactagattgctttgaaaacatgactcaataaaagtttcctttcaatttaaa

SEQ ID NO: 32093 - DNA, 1693 bp, Homo sapiens
  source 1..1693: mol_type = unassigned DNA
tagcagctaggcttggcccccggcgtggagcagacgcggacccctccttcctggcggcggcggcgcgggctcagagcccggcaacgggcgggcgggcagaatgagtctgcaggtcttaaacgacaaaaatgtcagcaatgaaaaaaatacagaaaattgcgacttcctgttttcgccaccagaagttaccggaagatcgtctgttcttcgtgtgtcacagaaagaaaatgtgccacccaagaacctggccaaagctatgaaggtgacttttcagacacctctgcgggatccacagacgcacaggattctaagtcctagcatggccagcaaacttgaggctcctttcactcaggatgacacccttggactggaaaactcacacccggtctggacacagaaagagaaggcagctgcattcagcctcagcggaggacacgcctgtggtgcagttggcagccgagaccccaacagcagagagcaaggagagagccttgaactctgccagcacctcgcttcccacaagctgtccaggcagtgagccagtgcccacccatcagcaggggcagcctgccttggagctgaaagaggagagcttcagagaccccgctgaggttctaggcacgggcgcggaggtggattacctggagcagtttggaacttcctcgtttaaggagtcggccttgaggaagcagtccttatacctcaagttcgaccccctcctgagggacagtcctggtagaccagtgcccgtggccaccgagaccagcagcatgcacggtgcaaatgagactccctcaggacgtccgcgggaagccaagcttgtggagttcgatttcttgggagcactggacattcctgtgccaggcccacccccaggtgttcccgcgcctgggggcccacccctgtccaccggacctatagtggacctgctccagtacagccagaaggacctggatgcagtggtaaaggcgacacaggaggagaaccgggagctgaggagcaggtgtgaggagctccacgggaagaacctggaactggggaagatcatggacaggttcgaagaggttgtgtaccaggccatggaggaagttcagaagcagaaggaactttccaaagctgaaatccagaaagttctaaaagaaaaagaccaacttaccacagatctgaactccatggagaagtccttctccgacctcttcaagcgttttgagaaacagaaagaggtgatcgagggctaccgcaagaacgaagagtcactgaagaagtgcgtggaggattacctggcaaggatcacccaggagggccagaggtaccaagccctgaaggcccacgcggaggagaagctgcagctggcaaacgaggagatcgcccaggtccggagcaaggcccaggcggaagcgttggccctccaggccagcctgaggaaggagcagatgcgcatccagtcgctggagaagacagtggagcagaagactaaagagaacgaggagctgaccaggatctgcgacgacctcatctccaagatggagaagatctgacctccacggagccgctgtccccgcccccctgctcccgtctgtctgtcctgtctgattctcttaggtgtcatgttcttttttctgtcttgtcttcaacttttttaaaaactagattgctttgaaaacatgactcaataaaagtttcctttcaattt

SEQ ID NO: 32094 - DNA, 778 bp, Homo sapiens
  source 1..778: mol_type = unassigned DNA
agagattatgcaggcttgggttttctttctcaccatctcagcctgaaggccctttagctcttggtcccaggaagcagcagtgctgcccatggctccccctgccaggctggagaaatgagtctgcaggtcttaaacgacaaaaatgtcagcaatgaaaaaaatacagaaaattgcgacttcctgttttcgccaccagaagttaccggaagatcgtctgttcttcgtgtgtcacagaaagaaaatgtgccacccaagaacctggccaaagctatgaaggtgacttttcagacacctctgcgggatccacagacgcacaggattctaagtcctagcatggccagcaaacttgaggctcctttcactcaggatgacacccttggactggaaaactcacacccggtctggacacagaaagagaaccaacagctcatcaaggaagtggatgccaaaactactcatggaattctacagaaaccagtggaggctgacaccgacctcctgggggatgcaagcccagcctttgggagtggcagctccagcgagtctggcccaggtgccctggctgacctggactgctcaagctcttcccagagcccaggaagttctgagaaccaaatggtgtctccaggaaaagtgtctggcagccctgagcaagccgtggaggaaaaccttagttcctattccttagacagaagagtgacacccgcctctgagaccctagaagacccttgcaggacagagtcccagcacaaagcggagactccgcacggagccgagg

SEQ ID NO: 32095 - DNA, 825 bp, Homo sapiens
  source 1..825: mol_type = unassigned DNA
ccgccgccagaacctgtaccgcgccctgtcatgggacccggccctagaccgaccgccgggctgggccccctggatggtggccaggggcggctagagctgggccaagaccgacggcggagcgggcgccccgagaatgagtctgcaggtcttaaacgacaaaaatgtcagcaatgaaaaaaatacagaaaattgcgacttcctgttttcgccaccagaagttaccggaagatcgtctgttcttcgtgtgtcacagaaagaaaatgtgccacccaagaacctggccaaagctatgaaggtgacttttcagacacctctgcgggatccacagacgcacaggattctaagtcctagcatggccagcaaacttgaggctcctttcactcaggatgacacccttggactggaaaactcacacccggtctggacacagaaagagaaccaacagctcatcaaggaagtggatgccaaaactactcatggaattctacagaaaccagtggaggctgacaccgacctcctgggggatgcaagcccagcctttgggagtggcagctccagcgagtctggcccaggtgccctggctgacctggactgctcaagctcttcccagagcccaggaagttctgagaaccaaatggtgtctccaggaaaagtgtctggcagccctgagcaagccgtggaggaaaaccttagttcctattccttagacagaagagtgacacccgcctctgagaccctagaagacccttgcaggacagagtcccagcacaaagcggagactccgcacggagccgaggaagaatgcaaagcggagactccgcacgg

SEQ ID NO: 32096 - DNA, 1477 bp, Homo sapiens
  source 1..1477: mol_type = unassigned DNA
caagtcttcactccttcctgcgagccctgaggaagccttgtgagtgcattggctggggcttggagggaagttgggctggagctggacaggagcagtgggtgcatttcaggcaggctctcctgaggtcccaggcgccagctccagctccctggctagggaaacccaccctctcagtcagcatgggggcccaagctccaggcagggtgggctggatcactagcgtcctggatctctctcagactgggcagccccgggctcattgaaatgccccggatgacttggctagtgcagaggaattgatggaaaccaccggggtgagagggaggctccccatctcagccagccacatccacaaggtgtgtgtaagggtgcaggcgccggccggttaggccaaggctctactgtctgttgcccctccaggagaacttccaaggagctttccccagacatggccaacaagggtccttcctatggcatgagccgcgaagtgcagtccaaaatcgagaagaagtatgacgaggagctggaggagcggctggtggagtggatcatagtgcagtgtggccctgatgtgggccgcccagaccgtgggcgcttgggcttccaggtctggctgaagaatggcgtgattctgagcaagctggtgaacagcctgtaccctgatggctccaagccggtgaaggtgcccgagaacccaccctccatggtcttcaagcagatggagcaggtggctcagttcctgaaggcggctgaggactatggggtcatcaagactgacatgttccagactgttgacctctttgaaggcaaagacatggcagcagtgcagaggaccctgatggctttgggcagcttggcagtgaccaagaatgatgggcactaccgtggagatcccaactggtttatgaagaaagcgcaggagcataagagggaattcacagagagccagctgcaggagggaaagcatgtcattggccttcagatgggcagcaacagaggggcctcccaggccggcatgacaggctacggacgacctcggcagatcatcagttagagcggagagggctagccctgagcccggccctcccccagctccttggctgcagccatcccgcttagcctgcctcacccacacccgtgtggtaccttcagccctggccaagctttgaggctctgtcactgagcaatggtaactgcacctgggcagctcctccctgtgcccccagcctcagcccaacttcttacccgaaagcatcactgccttggcccctccctcccggctgcccccatcacctctactgtctcctccctgggctaagcaggggagaagcgggctgggggtagcctggatgtgggccaagtccactgtcctccttggcggcaaaagcccattgaagaagaaccagcccagcctgccccctatcttgtcctggaatatttttggggttggaactcaaaaaaaaaaaaaaaaaatcaa

SEQ ID NO: 32097 - DNA, 491 bp, Homo sapiens
  source 1..491: mol_type = unassigned DNA
gtctgtccgaacccagacacaagtcttcactccttcctgcgagccctgaggaagccttctttccccagacatggccaacaagggtccttcctatggcatgagccgcgaagtgcagccatcccgcttagcctgcctcacccacacccgtgtggtaccttcagccctggccaagctttgaggctctgtcactgagcaatggtaactgcacctgggcagctcctccctgtgcccccagcctcagcccaacttcttacccgaaagcatcactgccttggcccctccctcccggctgcccccatcacctctactgtctcctccctgggctaagcaggggagaagcgggctgggggtagcctggatgtgggccaagtccactgtcctccttggcggcaaaagcccattgaagaagaaccagcccagcctgccccctatcttgtcctggaatatttttggggttggaactcaaaaaaaaaaaaaaaaaatcaatcttt

SEQ ID NO: 32098 - DNA, 928 bp, Homo sapiens
  source 1..928: mol_type = unassigned DNA
acatcaccacggcggcagccctttaaacccctcacccagccagcgccccatcctgtctgtccgaacccagacacaagtcttcactccttcctgcgagccctgaggaagccttctttccccagacatggccaacaagggtccttcctatggcatgagccgcgaagtgcagtccaaaatcgagaagaagtatgacgaggagctggaggagcggctggtggagtggatcatagtgcagtgtggccctgatgtgggccgcccagaccgtgggcgcttgggcttccaggtctggctgaagaatggcgtgattctgagcaagctggtgaacagcctgtaccctgatggctccaagccggtgaaggtgcccgagaacccaccctccatggtcttcaagcagatggagcaggtggctcagttcctgaaggcggctgaggactatggggtcatcaagactgacatgttccagactgttgacctctttgaaggcaaagacatggcagcagtgcagaggaccctgatggctttgggcagcttggcagtgaccaagaatgatgggcactaccgtggagatcccaactggtttatgaagaaagcgcaggagcataagagggaattcacagagagccagctgcaggagggaaagcatgtcattggccttcagatgggcagcaacagaggggcctcccaggccggcatgacaggctacggacgacctcggcagatcatcagttagagcggagagggctagccctgagcccggccctcccccagctccttggctgcagccatcccgcttagcctgcctcacccacacccgtgtggtaccttcagccctggccaagctttgaggctctgtcactgagcaatggtaactgcacctgggcagctcctccctgtgcccccagcctcagcccaacttcttacccgaaag

SEQ ID NO: 32099 - DNA, 1048 bp, Homo sapiens
  source 1..1048: mol_type = unassigned DNA
cgaacccagacacaagtcttcactccttcctgcgagccctgaggaagccttactgggcagccccgggctcattgaaatgccccggatgacttggctagtgcagaggaattgatggaaaccaccggggtgagagggaggctccccatctcagccagccacatccacaaggtgtgtgtaagggtgcaggcgccggccggttaggccaaggctctactgtctgttgcccctccaggagaacttccaaggagctttccccagacatggccaacaagggtccttcctatggcatgagccgcgaagtgcagtccaaaatcgagaagaagtatgacgaggagctggaggagcggctggtggagtggatcatagtgcagtgtggccctgatgtgggccgcccagaccgtgggcgcttgggcttccaggtctggctgaagaatggcgtgattctgagcaagctggtgaacagcctgtaccctgatggctccaagccggtgaaggtgcccgagaacccaccctccatggtcttcaagcagatggagcaggtggctcagttcctgaaggcggctgaggactatggggtcatcaagactgacatgttccagactgttgacctctttgaaggcaaagacatggcagcagtgcagaggaccctgatggctttgggcagcttggcagtgaccaagaatgatgggcactaccgtggagatcccaactggtttatgaagaaagcgcaggagcataagagggaattcacagagagccagctgcaggagggaaagcatgtcattggccttcagatgggcagcaacagaggggcctcccaggccggcatgacaggctacggacgacctcggcagatcatcagttagagcggagagggctagccctgagcccggccctcccccagctccttggctgcagccatcccgcttagcctgcctcacccacacccgtgtggtaccttcagccctggccaagctttgaggctctgtcactgagcaatggtaactgcacctgggcagctcctccctgtgcccccagcctcagccca

SEQ ID NO: 32100 - DNA, 375 bp, Homo sapiens
  source 1..375: mol_type = unassigned DNA
gtgtgctcactcctatttgggaagagagaaggggcacagcagccctgcaggggcccctggctctgctcgtgtttctgggcttctgctgctttccccagacatggccaacaagggtccttcctatggcatgagccgcgaagtgcagtccaaaatcgagaagaagtatgacgaggagctggaggagcggctggtggagtggatcatagtgcagtgtggccctgatgtgggccgcccagaccgtgggcgcttgggcttccaggtctggctgaagaatggcgtgattctgagcaagctggtgaacagcctgtaccctgatggctccaagccggtgaaggtgcccgagaacccaccctccatggtcttcaagcagatgga

SEQ ID NO: 32101 - DNA, 1227 bp, Homo sapiens
  source 1..1227: mol_type = unassigned DNA
aggggtctcaccagagagggagccgggggagtgcgctcctgcgtccatcctcagaccagcgtgtccctcccaacctctgacccctctgaggccaggggatgggttcggcttcctttggtacctcttttggaagtctcttcagacaaacactggagagaaggcacagcaccctagggtgacatcagtggacagctttccccagacatggccaacaagggtccttcctatggcatgagccgcgaagtgcagtccaaaatcgagaagaagtatgacgaggagctggaggagcggctggtggagtggatcatagtgcagtgtggccctgatgtgggccgcccagaccgtgggcgcttgggcttccaggtctggctgaagaatggcgtgattctgagcaagctggtgaacagcctgtaccctgatggctccaagccggtgaaggtgcccgagaacccaccctccatggtcttcaagcagatggagcaggtggctcagttcctgaaggcggctgaggactatggggtcatcaagactgacatgttccagactgttgacctctttgaaggcaaagacatggcagcagtgcagaggaccctgatggctttgggcagcttggcagtgaccaagaatgatgggcactaccgtggagatcccaactggtttatgaagaaagcgcaggagcataagagggaattcacagagagccagctgcaggagggaaagcatgtcattggccttcagatgggcagcaacagaggggcctcccaggccggcatgacaggctacggacgacctcggcagatcatcagttagagcggagagggctagccctgagcccggccctcccccagctccttggctgcagccatcccgcttagcctgcctcacccacacccgtgtggtaccttcagccctggccaagctttgaggctctgtcactgagcaatggtaactgcacctgggcagctcctccctgtgcccccagcctcagcccaacttcttacccgaaagcatcactgccttggcccctccctcccggctgcccccatcacctctactgtctcctccctgggctaagcaggggagaagcgggctgggggtagcctggatgtgggccaagtccactgtcctccttggcggcaaaagcccattgaagaagaaccagcccagcctgccccctatcttgtcctggaatatttttggggttggaactcaaaaaaaaaaaaaaaa

SEQ ID NO: 32102 - DNA, 2166 bp, Homo sapiens
  source 1..2166: mol_type = unassigned DNA
cttttggaagtctcttcagacaaacactggagagaaggcacagcaccctagggtgacatcagtggacaggtcagtttcctgttcctgttcccagccacccctgtctgtctgcccagggacctacctgcctggcccactcctgctgccacccctctccatgagtgggactcctgagcagtgccaggcccaggccctcagggtggcagttgctggatggggccaggcttcccattccctggcaggcagactcttggctctggaagatccctgggggactctgacttcttggttactcaggctactccgtaagggtagccttacgagagcgtaagggcatgaggggaagtcgatgggtagaccaggtgtctctgatttctctgaggaaatgcagcttctttgccaagaactcttgggctttggtggcttcgtcgcccttgcctggggtgggcgagttttagtctcttcagctgcagaccagaagctgagctgacctgaaaagagctggagttctggagttcgggcttccaggccagggcctgcttctgggtgagagtgggaggtaatggttgcttgaggcagaggcagtaaaccctcacacccgcagctggacaaaggcaccagctggctgtattctgtgggggcaatgtggcttctggaaggtctctccagtggctctgtagctggtcttggcaaagaatgttctagaccaagggttgtcaaactacagctcatgggccaaatccagcctgctgtctgcttttgtaagtaaagttttattggaacaaagccatgttcatttgttacatattgtctatggctgctttcacactgcaacagcagagaccatgtgtcctgcaaagcctaaaatatgttctgtcttatcctttacaaaaacagtttactgacccctgctctagacctccaaagacctggtatcctctttcctggtgttcaagttcagagaggtgtctggagtaggggctgagcctggcctggatgggcagtgctgtgacaagtgtctaggatggccgggtatcctgcacagagctagaaggctgcctggcacgggtgaaagcagagctgctccctgaccctctgcccctccctcctccaccctggcctgctttagctttccccagacatggccaacaagggtccttcctatggcatgagccgcgaagtgcagtccaaaatcgagaagaagtatgacgaggagctggaggagcggctggtggagtggatcatagtgcagtgtggccctgatgtgggccgcccagaccgtgggcgcttgggcttccaggtctggctgaagaatggcgtgattctgagcaagctggtgaacagcctgtaccctgatggctccaagccggtgaaggtgcccgagaacccaccctccatggtcttcaagcagatggagcaggtggctcagttcctgaaggcggctgaggactatggggtcatcaagactgacatgttccagactgttgacctctttgaaggcaaagacatggcagcagtgcagaggaccctgatggctttgggcagcttggcagtgaccaagaatgatgggcactaccgtggagatcccaactggtttatgaagaaagcgcaggagcataagagggaattcacagagagccagctgcaggagggaaagcatgtcattggccttcagatgggcagcaacagaggggcctcccaggccggcatgacaggctacggacgacctcggcagatcatcagttagagcggagagggctagccctgagcccggccctcccccagctccttggctgcagccatcccgcttagcctgcctcacccacacccgtgtggtaccttcagccctggccaagctttgaggctctgtcactgagcaatggtaactgcacctgggcagctcctccctgtgcccccagcctcagcccaacttcttacccgaaagcatcactgccttggcccctccctcccggctgcccccatcacctctactgtctcctccctgggctaagcaggggagaagcgggctgggggtagcctggatgtgggccaagtccactgtcctccttggcggcaaaagcccattgaagaagaaccagcccagcctgccccctatcttgtcctggaatatttttggggttggaactcaaaaaaaaaaaaaaaaaa

SEQ ID NO: 32103 - DNA, 709 bp, Homo sapiens
  source 1..709: mol_type = unassigned DNA
cctccccccgcgccctgtgcctcctggggctacctgaagccggtgtcctgggagatctctccccgcagccaccgccacccattggaatggccaacaggggacctgcatatggcctgagccgggaggtgcagcagaagattgagaaacaatatgatgcagatctggagcagatcctgatccagtggatcaccacccagtgccgaaaggatgtgggccggccccagcctggacgcgagaacttccagaactggctcaaggatggcacggtgctatgtgagctcattaatgcactgtaccccgaggggcaggccccagtaaagaagatccaggcctccaccatggccttcaagcagatggagcagatctctcagttcctgcaagcagctgagcgctatggcattaacaccactgacatcttccaaactgtggacctctgggaaggaaagaacatggcctgtgtgcagcggacgctgatgaatctgggtgggctggcagtagcccgagatgatgggctcttctctggggatcccaactggttccctaagaaatccaaggagaatcctcggaacttctcggataaccagctgcaagagggcaagaacgtgatcgggttacagatgggcaccaaccgcggggcgtctcaggcaggcatgactggctacgggatgccacgccagatcctctgatcccaccccaggccttgcccctg

SEQ ID NO: 32104 - DNA, 1603 bp, Homo sapiens
  source 1..1603: mol_type = unassigned DNA
cggtggtgaggggctgccctacggtggttcccttaattgtgggccgccccccatccttgctgctggctgtggcacctcgctctgtgggctggtgccctcactgtgctgctctttgagaacactccctgtcccaaatctgagttgggaagttctcctgtgttccatctgcacggtggatggagagtccctttgtcttcccaattaaacaccctagccaagaaccctgaagtcctccctgcccccacccatgtccgccttttctttggctttggctttggtgagctccccgcagccaccgccacccattggaatggccaacaggggacctgcatatggcctgagccgggaggtgcagcagaagattgagaaacaatatgatgcagatctggagcagatcctgatccagtggatcaccacccagtgccgaaaggatgtgggccggccccagcctggacgcgagaacttccagaactggctcaaggatggcacggtgctatgtgagctcattaatgcactgtaccccgaggggcaggccccagtaaagaagatccaggcctccaccatggccttcaagcagatggagcagatctctcagttcctgcaagcagctgagcgctatggcattaacaccactgacatcttccaaactgtggacctctgggaaggaaagaacatggcctgtgtgcagcggacgctgatgaatctgggtgggctggcagtagcccgagatgatgggctcttctctggggatcccaactggttccctaagaaatccaaggagaatcctcggaacttctcggataaccagctgcaagagggcaagaacgtgatcgggttacagatgggcaccaaccgcggggcgtctcaggcaggcatgactggctacgggatgccacgccagatcctctgatcccaccccaggccttgcccctgccctcccacgaatggttaatatatatgtagatatatattttagcagtgacattcccagagagccccagagctctcaagctcctttctgtcagggtggggggttcagcctgtcctgtcacctctgaggtgcctgctggcatcctctcccccatgcttactaatacattcccttccccatagccatcaaaactggaccaactggcctcttcctttcccctgggaccaaaatttaggggcctcagtccctcaccgccatgccctggcctattctgtctctccttcttccccctggcctgttctgtctctgagctctgtgtcctccgttcattccatggctgggagtcactgatgctgcctctgccttctgatgctggactggccttgcttctacaagtatgcttctcccacagctgtggctgcaggaacttaatttatagggaggagcctgtggcagctgctgccccagccacagctgcactgactgtgctcaccacacatctggggcagccttccctggcaggggccctcgtggcttctcattttccattcccttcactgtggctaaggggtggggtgaggggatggagagggagggctgcctaccatggtctggggcttgaggaagatgagtttgttgatttaaataaagaatttgtcatttttgaatgga

SEQ ID NO: 32105 - DNA, 1604 bp, Homo sapiens
  source 1..1604: mol_type = unassigned DNA
tggaggctgaggtactcacgggtggagaccactgcagccgcctttgtagattcagactccccgaacctttaacccttgctctggtctactgtccctctgtctcaagcagtcctccctccttctgcgctgcggcgcctttaaaccttcttggcccttgccccgccccgggtccgccccgtctgaggcgggaccctcctgaaaatccccggctgggcagggcgcaccacttgcagctgcagcccttgccttgagtcagtgcgccgctctccagcccgcttgaacgctccccgcagccaccgccacccattggaatggccaacaggggacctgcatatggcctgagccgggaggtgcagcagaagattgagaaacaatatgatgcagatctggagcagatcctgatccagtggatcaccacccagtgccgaaaggatgtgggccggccccagcctggacgcgagaacttccagaactggctcaaggatggcacggtgctatgtgagctcattaatgcactgtaccccgaggggcaggccccagtaaagaagatccaggcctccaccatggccttcaagcagatggagcagatctctcagttcctgcaagcagctgagcgctatggcattaacaccactgacatcttccaaactgtggacctctgggaaggaaagaacatggcctgtgtgcagcggacgctgatgaatctgggtgggctggcagtagcccgagatgatgggctcttctctggggatcccaactggttccctaagaaatccaaggagaatcctcggaacttctcggataaccagctgcaagagggcaagaacgtgatcgggttacagatgggcaccaaccgcggggcgtctcaggcaggcatgactggctacgggatgccacgccagatcctctgatcccaccccaggccttgcccctgccctcccacgaatggttaatatatatgtagatatatattttagcagtgacattcccagagagccccagagctctcaagctcctttctgtcagggtggggggttcagcctgtcctgtcacctctgaggtgcctgctggcatcctctcccccatgcttactaatacattcccttccccatagccatcaaaactggaccaactggcctcttcctttcccctgggaccaaaatttaggggcctcagtccctcaccgccatgccctggcctattctgtctctccttcttccccctggcctgttctgtctctgagctctgtgtcctccgttcattccatggctgggagtcactgatgctgcctctgccttctgatgctggactggccttgcttctacaagtatgcttctcccacagctgtggctgcaggaacttaatttatagggaggagcctgtggcagctgctgccccagccacagctgcactgactgtgctcaccacacatctggggcagccttccctggcaggggccctcgtggcttctcattttccattcccttcactgtggctaaggggtggggtgaggggatggagagggagggctgcctaccatggtctggggcttgaggaagatgagtttgttgatttaaataaagaatttgtcatttttgaatgga

SEQ ID NO: 32106 - DNA, 801 bp, Homo sapiens
  source 1..801: mol_type = unassigned DNA
agacagggcgtccgtctggagcagggactcagggactgagccccacccgcgggctccatcgctgagtcctcactggggcgaggggaaaaaagggcgtcggactttagctggctggccccgagtgaccccgggtcgtggcgccggccctgggccagctcgtgctcctgggctttcccgcgcgacccttcacttcctggttccaggagcacgtctccccgcagccaccgccacccattggaatggccaacaggggacctgcatatggcctgagccgggaggtgcagcagaagattgagaaacaatatgatgcagatctggagcagatcctgatccagtggatcaccacccagtgccgaaaggatgtgggccggccccagcctggacgcgagaacttccagaactggctcaaggatggcacggtgctatgtgagctcattaatgcactgtaccccgaggggcaggccccagtaaagaagatccaggcctccaccatggccttcaagcagatggagcagatctctcagttcctgcaagcagctgagcgctatggcattaacaccactgacatcttccaaactgtggacctctgggaaggaaagaacatggcctgtgtgcagcggacgctgatgaatctgggtgggctggcagtagcccgagatgatgggctcttctctggggatcccaactggttccctaagaaatccaaggagaatcctcggaacttctcggataaccagctgcaagagggcaagaacgtgatcgggttacagatgggcaccaaccgcggggcgtctcaggcag

SEQ ID NO: 32107 - DNA, 2777 bp, Homo sapiens
  source 1..2777: mol_type = unassigned DNA
acataagtcacttaccaggtctgtccctgcggcatccagtctgtgggtcctgtcccatccatcctgacctgttccatctcagccccaggactcagtactgcggttgccaacactgctgccaggcatgatggatgggccacgttccgatgtgggccgttggggtggcaaccccttgcagccccctaccacgccatctccagagccagagccagagccagacggacgctctcgcagaggaggaggccgttccttctgggctcgctgctgtggctgctgttcatgccgaaatgcggcagatgacgactggggacctgaaccctctgactccaggggtcgagggtccagctctggcactcgaagacctggctcccggggctcagactcccgccggcctgtatcccggggcagcggtgtcaatgcagctggagatggcaccatccgagagggcatgctagtagtgaacggtgtggacttgctgagctcgcgctcggaccagaaccgccgagagcaccacacagacgagtatgagtacgacgagctgatagtgcgccgcgggcagcctttccatatgctcctcctcctgtcccggacctatgaatcctctgatcgcatcacccttgagttactcatcggaaacaaccccgaggtgggcaagggcacgcacgtgatcatcccagtgggcaaggggggcagtggaggctggaaagcccaggtggtcaaggccagtgggcagaatctgaacctgcgggtccacacttcccccaacgccatcatcggcaagtttcagttcacagtccgcacacaatcagacgctggggagttccagttgccctttgacccccgcaatgagatctacatcctcttcaacccctggtgcccagaggacattgtgtacgtggaccatgaggattggcggcaggagtatgttcttaatgagtctgggagaatttactacgggaccgaagcacagattggtgagcggacctggaactacggccagtttgaccacggggtgctggatgcctgcttatacatcctggaccggcgggggatgccatatggaggccgtggagacccagtcaatgtctcccgggtcatctctgccatggtgaactccctggatgacaatggagtcctgattgggaactggtctggtgattactcccgaggcaccaacccatcagcgtgggtgggcagcgtggagatcctgcttagctacctacgcacgggatattccgtcccctatggccagtgctgggtctttgctggcgtgaccaccacagtgctgcgctgcctgggtctggccacccgtactgtcaccaacttcaactccgcccacgacacagacacatcccttaccatggacatctacttcgacgagaacatgaagcccctggagcacctgaaccatgattctgtctggaacttccatgtgtggaacgactgctggatgaagaggccggatctgccctcgggctttgatgggtggcaggtggtggatgccacaccccaagagactagcagtggcatcttctgctgcggcccctgctctgtggagtccatcaagaatggcctggtctacatgaagtacgacacgcctttcatttttgctgaggtgaatagtgacaaggtgtactggcagcggcaggatgatggcagcttcaagattgtttatgtggaggagaaggccatcggcacactcattgtcacaaaggccatcagctccaacatgcgggaggacatcacctacctctataagcacccagaaggctcagacgcagagcggaaggcagtagagacagcagcagcccacggcagcaaacccaatgtgtatgccaaccggggctcagcggaggatgtggccatgcaggtggaggcacaggacgcggtgatggggcaggatctgatggtctctgtgatgctgatcaatcacagcagcagccgccgcacagtgaaactgcacctctacctctcagtcactttctatactggtgtcagtggtaccatcttcaaggagaccaagaaggaagtggagctggcaccaggggcctcggaccgtgtgaccatgccagtggcctacaaggaataccggccccatcttgtggaccagggggccatgctgctcaatgtctcaggccacgtcaaggagagcgggcaggtgctggccaagcagcacaccttccgtctgcgcaccccagacctctccctcacgttactgggagcagcagtggttggccaggagtgtgaagtacagattgtcttcaagaacccccttcccgtcaccctcaccaatgtcgtcttccggctcgaaggctctgggttacagaggcccaagatcctcaacgttggggacattggaggcaatgaaacagtgacactgcgccagtcgtttgtgcctgtgcgaccaggcccccgccagctcattgccagcttggacagcccacagctctcccaggtgcacggtgtcatccaggtggatgtggccccagcccctggggatgggggcttcttctcagacgctggaggtgacagtcacttaggagagaccatccctatggcatctcgaggtggagcttagccccgtgccaggagcaatgggactggagtcagatgagcaaggacattgccccaagataggggcacactacagagcagctccccaggagctcaggtggggagtccagggctcccggagggggagtccagggctcccggagagggagtcagtcttcacttgcactgggggaacagatgctaataaactgttttttaatgaa

SEQ ID NO: 32108 - DNA, 1581 bp, Homo sapiens
  source 1..1581: mol_type = unassigned DNA
ggcatccagtctgtgggtcctgtcccatccatcctgacctgttccatctcagccccaggactcagtactgcggttgccaacactgctgccaggcatgatggatgggccacgttccgatgtgggccgttggggtggcaaccccttgcagccccctaccacgccatctccagagccagagccagagccagacggacgctctcgcagaggaggaggccgttccttctgggctcgctgctgtggctgctgttcatgccgaaatgcggcagatgacgactggggacctgaaccctctgactccaggggtcgagggtccagctctggaacttccatgtgtggaacgactgctggatgaagaggccggatctgccctcgggctttgatgggtggcaggtggtggatgccacaccccaagagactagcagtggcatcttctgctgcggcccctgctctgtggagtccatcaagaatggcctggtctacatgaagtacgacacgcctttcatttttgctgaggtgaatagtgacaaggtgtactggcagcggcaggatgatggcagcttcaagattgtttatgtggaggagaaggccatcggcacactcattgtcacaaaggccatcagctccaacatgcgggaggacatcacctacctctataagcacccagaaggctcagacgcagagcggaaggcagtagagacagcagcagcccacggcagcaaacccaatgtgtatgccaaccggggctcagcggaggatgtggccatgcaggtggaggcacaggacgcggtgatggggcaggatctgatggtctctgtgatgctgatcaatcacagcagcagccgccgcacagtgaaactgcacctctacctctcagtcactttctatactggtgtcagtggtaccatcttcaaggagaccaagaaggaagtggagctggcaccaggggcctcggaccgtgtgaccatgccagtggcctacaaggaataccggccccatcttgtggaccagggggccatgctgctcaatgtctcaggccacgtcaaggagagcgggcaggtgctggccaagcagcacaccttccgtctgcgcaccccagacctctccctcacgttactgggagcagcagtggttggccaggagtgtgaagtacagattgtcttcaagaacccccttcccgtcaccctcaccaatgtcgtcttccggctcgaaggctctgggttacagaggcccaagatcctcaacgttggggacattggaggcaatgaaacagtgacactgcgccagtcgtttgtgcctgtgcgaccaggcccccgccagctcattgccagcttggacagcccacagctctcccaggtgcacggtgtcatccaggtggatgtggccccagcccctggggatgggggcttcttctcagacgctggaggtgacagtcacttaggagagaccatccctatggcatctcgaggtggagcttagccccgtgccaggagcaatgggactggagtcagatgagcaaggacattgccccaagataggggcacactacagagcagctccccaggagctcaggtggggagtcca

SEQ ID NO: 32109 - DNA, 555 bp, Homo sapiens
  source 1..555: mol_type = unassigned DNA
agaactcggcagcaggagcctgtgagagcagagtcacttaccaggtctgtccctgcggcatccagtctgtgggtcctgtcccatccatcctgacctgttccatctcagccccaggactcagtactgcggttgccaacactgctgccaggcatgatggatgggccacgttccgatgtgggccgttggggtggcaaccccttgcagccccctaccacgccatctccagagccagagccagagccagacggacgctctcgcagaggaggaggccgttccttctgggctcgctgctgtggctgctgttcatgccgaaatgcggcagatgacgactggggacctgaaccctctgactccaggggtcgagggtccagctctggcactcgaagacctggctcccggggctcagactcccgccggcctgtatcccggggcagcggtgtcaatgcagctggagatggcaccatccgagagggcatgctagtagtgaacggtgtggacttgctgagctcgcgctcggaccagaaccgccgagagcaccacacagacgagtatgag

SEQ ID NO: 32110 - DNA, 580 bp, Homo sapiens
  source 1..580: mol_type = unassigned DNA
acagaactcggcagcaggagcctgtgagagcagaggtaggcagcctaagcttgggaccagaaggtcggccagacagggctgtgggtggaagggcctgcctgccccactgcccttgcagcttcttcatccgggagaaggggctcctcacatgcccagtctggtaggaatcagcctggtgccaggggccatcacagcggtggctcccaccaaagcccagcctaagcccccagacctcacccctgctccctccctagcatcttctccccatttcccgcccagaggcctggcctcttctctccgccccctacagcagtttggcccctccctcccacataagtcacttaccaggtctgtccctgcggcatccagtctgtgggtcctgtcccatccatcctgacctgttccatctcagccccaggactcagtactgcggttgccaacactgctgccaggcatgatggatgggccacgttccgatgtgggccgttggggtggcaaccccttgcagccccctaccacgccatctccagagccagagccagagccagacggacgctctcgcagaggaggaggccgttcc

SEQ ID NO: 32111 - DNA, 527 bp, Homo sapiens
  source 1..527: mol_type = unassigned DNA
gtcggcctgtttttactgtcttctgctaggcggcccatgggcagagctgggacactagtgggaaggaaggaaagaaggaagaaggccctggctgacgggcctgaggacaagacccaaggagagcctccctgaagatgcctagcctcctcctctctaccttgggatcgccttggtgccatcctcagtgtttccccagtgacggggtggagtaaggatgcacacagcacaggtgcctgagccggttggtctggattcccaggaagaattccaggttggagaaaagggaatcctctagtccaactgagcagagactcctctcagtgagagaaaggcatgatggatgggccacgttccgatgtgggccgttggggtggcaaccccttgcagccccctaccacgccatctccagagccagagccagagccagacggacgctctcgcagaggaggaggccgttccttctgggctcgctgctgtggctgctgttcatgccgaaatgcggcagatgacgactggggacctgaacc

SEQ ID NO: 32112 - DNA, 562 bp, Homo sapiens
  source 1..562: mol_type = unassigned DNA
taggcggcccatgggcagagctgggacactagtgggaaggaaggaaagaaggaagaaggccctggctgacgggcctgaggacaagacccaaggagagcctccctgaagatgcctagcctcctcctctctaccttgggatcgccttggtgccatcctcagtgtttccccagtgacggggtggagtaaggatgcacacagcacaggtgcctgagccggttggtctggattcccaggaagaattccaggttggagaaaagggaatcctctagtccaactgagcagagactcctctcagtgagagaaaggtctgtccctgcggcatccagtctgtgggtcctgtcccatccatcctgacctgttccatctcagccccaggactcagtactgcggttgccaacactgctgccaggcatgatggatgggccacgttccgatgtgggccgttggggtggcaaccccttgcagccccctaccacgccatctccagagccagagccagagccagacggacgctctcgcagaggaggaggccgttccttctgggctcgctgctgtggctgct

SEQ ID NO: 32113 - DNA, 469 bp, Homo sapiens
  source 1..469: mol_type = unassigned DNA
acccccgggcaggttctggtgcttggagctggacaagaaaaggcagtgtgggtgtggagggctccctgccagttcctggggcctctctgtccccactccccacggcacctccctgcctgatgcatcaccaaacagcccctcctggattctgtttccttgtgtcttcttgtcggcctgtttttactgtcttctgctaggcggcccatgggcagagctgggacactagtgggaaggaaggaaagaaggaagaaggccctggctgacgggcctgaggacaagacccaaggagagcctccctgaagatgcctagcctcctcctctctaccttgggatcgccttggtgccatcctcagtgtttccccagtgacggggtggagtaaggatgcacacagcacaggtgcctgagccggttggtctggattcccaggaagaattccaggcatgatggatgggccacgttccgatgtgg

SEQ ID NO: 32114 - DNA, 3996 bp, Homo sapiens
  source 1..3996: mol_type = unassigned DNA
actgggcaatgggtggcctcccaggtcgccgccttcccgcggggccccgcccccggcccgccccaaagcgggctataagttagcgccgctctccgcctcggcagtgccagccgccagtggtcgcacttggagggtctcgccgccagtggaaggagccaccgcccccgcccgaccatggccgaggagctggtcttagagaggtgtgatctggagctggagaccaatggccgagaccaccacacggccgacctgtgccgggagaagctggtggtgcgacggggccagcccttctggctgaccctgcactttgagggccgcaactacgaggccagtgtagacagtctcaccttcagtgtcgtgaccggcccagcccctagccaggaggccgggaccaaggcccgttttccactaagagatgctgtggaggagggtgactggacagccaccgtggtggaccagcaagactgcaccctctcgctgcagctcaccaccccggccaacgcccccatcggcctgtatcgcctcagcctggaggcctccactggctaccagggatccagctttgtgctgggccacttcattttgctcttcaacgcctggtgcccagcggatgctgtgtacctggactcggaagaggagcggcaggagtatgtcctcacccagcagggctttatctaccagggctcggccaagttcatcaagaacataccttggaattttgggcagtttgaagatgggatcctagacatctgcctgatccttctagatgtcaaccccaagttcctgaagaacgccggccgtgactgctcccgccgcagcagccccgtctacgtgggccgggtggtgagtggcatggtcaactgcaacgatgaccagggtgtgctgctgggacgctgggacaacaactacggggacggcgtcagccccatgtcctggatcggcagcgtggacatcctgcggcgctggaagaaccacggctgccagcgcgtcaagtatggccagtgctgggtcttcgccgccgtggcctgcacagtgctgaggtgcctgggcatccctacccgcgtcgtgaccaactacaactcggcccatgaccagaacagcaaccttctcatcgagtacttccgcaatgagtttggggagatccagggtgacaagagcgagatgatctggaacttccactgctgggtggagtcgtggatgaccaggccggacctgcagccggggtacgagggctggcaggccctggacccaacgccccaggagaagagcgaagggacgtactgctgtggcccagttccagttcgtgccatcaaggagggcgacctgagcaccaagtacgatgcgccctttgtctttgcggaggtcaatgccgacgtggtagactggatccagcaggacgatgggtctgtgcacaaatccatcaaccgttccctgatcgttgggctgaagatcagcactaagagcgtgggccgagacgagcgggaggatatcacccacacctacaaatacccagaggggtcctcagaggagagggaggccttcacaagggcgaaccacctgaacaaactggccgagaaggaggagacagggatggccatgcggatccgtgtgggccagagcatgaacatgggcagtgactttgacgtctttgcccacatcaccaacaacaccgctgaggagtacgtctgccgcctcctgctctgtgcccgcaccgtcagctacaatgggatcttggggcccgagtgtggcaccaagtacctgctcaacctcaacctggagcctttctctgagaagagcgttcctctttgcatcctctatgagaaataccgtgactgccttacggagtccaacctcatcaaggtgcgggccctcctcgtggagccagttatcaacagctacctgctggctgagagggacctctacctggagaatccagaaatcaagatccggatccttggggagcccaagcagaaacgcaagctggtggctgaggtgtccctgcagaacccgctccctgtggccctggaaggctgcaccttcactgtggagggggccggcctgactgaggagcagaagacggtggagatcccagaccccgtggaggcaggggaggaagttaaggtgagaatggacctgctgccgctccacatgggcctccacaagctggtggtgaacttcgagagcgacaagctgaaggctgtgaagggcttccggaatgtcatcattggccccgcctaagggacccctgctcccagcctgctgagagcccccaccttgatcccaatccttatcccaagctagtgagcaaaatatgccccttcttgggccccagaccccagggcagggtgggcagcctatgggggctctcggaaatggaatgtgcccctggcccatctcagcctcctgagcctgtgggtccccactcaccccctttgctgtgaggaatgctctgtgccagaaacagtgggagccctgaccttggctgactggggctggggtgagagaggaaagacctacattccctctcctgcccagatgccctttggaaagccattgaccacccaccatattgtttgatctacttcatagctccttggagcaggcaaaaaagggacagcatgccccttggctggatcagggaatccagctccctagactgcatcccgtacctcttcccatgactgcacccagctccaggggcccttgggacagccagagctgggtggggacagtgataggcccaaggtcccctccacatcccagcagcccaagcttaatagccctccccctcaacctcaccattgtgaagcacctactatgtgctgggtgcctcccacacttgctggggctcacggggcctccaacccatttaatcaccatgggaaactgttgtgggcgctgcttccaggataaggagactgaggcttagagagaggaggcagccccctccacaccagtggcctcgtggttattagcaaggctgggtaatgtgaaggcccaagagcagagtctgggcctctgactctgagtccactgctccatttataaccccagcctgacctgagactgtcggagaggctgtctggggcctttatcaaaaaaagactcagccaagacaaggaggtagagaggggactgggggactgggagtcagagccctggctgggttcaggtcccacgtctggccaggcactgccttctcctctctgggcctttgtttccttgttggtcagaggagtgattgaaccagctcatctccaaggatcctctccactccatgtttgcaatgcttttatatggcccagccttgtaaataaccacaaggtccactccctgctccacgaagccttaagccataggcccaggatatttctgagagtgaaaccatgactgtgaccaccttctgtccccagccctgtcctggttccttcctatgcccaggtaccacccttcagaccccagttctaggggagaagagccctggacacccctgctctacccatgagcctgcccgctgcaatgcctagacttcccaacagccttagctgccagtgctggtcactaaccaacaaggttggcaccccagctaccccttctttgcagggctaaggcccccaaacatagcccctgccccggaggaagcttggggaacccatgagttgtcagctttgactttatctcctgctctttctacatgactgggcctcccttgggctggaagaattggggattctctattggaggtgagatcacagcctccagggccccccaaatcccagggaaggacttggagagaatcatgctgttgcatttagaactttctgctttgcacaggaaagagtcacacaattaatcaacatgtatattttctctatacatagagctctatttctctacggttttataaaagccttgggttccaaccaggcagtagatgtgcttctgaaccgcaaggagcaaacactgaaataaaatagtttatttttcacactcaaa

SEQ ID NO: 32115 - DNA, 1018 bp, Homo sapiens
  source 1..1018: mol_type = unassigned DNA
acagtggatccggaagcacaggagaccaagagaccagagataccaggatgagagataggacccctggttgccaggttcgagaagtcctaggctgagtccctggaaatgccagccgccagtggtcgcacttggagggtctcgccgccagtggaaggagccaccgcccccgcccgaccatggccgaggagctggtcttagagaggtgtgatctggagctggagaccaatggccgagaccaccacacggccgacctgtgccgggagaagctggtggtgcgacggggccagcccttctggctgaccctgcactttgagggccgcaactacgaggccagtgtagacagtctcaccttcagtgtcgtgaccggcccagcccctagccaggaggccgggaccaaggcccgttttccactaagagatgctgtggaggagggtgactggacagccaccgtggtggaccagcaagactgcaccctctcgctgcagctcaccaccccggccaacgcccccatcggcctgtatcgcctcagcctggaggcctccactggctaccagggatccagctttgtgctgggccacttcattttgctcttcaacgcctggtgcccagcggatgctgtgtacctggactcggaagaggagcggcaggagtatgtcctcacccagcagggctttatctaccagggctcggccaagttcatcaagaacataccttggaattttgggcagtttgaagatgggatcctagacatctgcctgatccttctagatgtcaaccccaagttcctgaagaacgccggccgtgactgctcccgccgcagcagccccgtctacgtgggccgggtggtgagtggcatggtcaactgcaacgatgaccagggtgtgctgctgggacgctgggacaacaactacggggacggcgtcagccccatgtcctggatcggcagcgtggacatcctgcggcgctggaagaaccacggctgccagcgcgtcaagtatggccagtgctgggtcttcgc

SEQ ID NO: 32116 - DNA, 693 bp, Homo sapiens
  source 1..693: mol_type = unassigned DNA
gttttggaaaaagtgccagggaagccccgtgggcctctgtctctccgggaacccttcccgctcagggctcacagtggatccggaagcacaggagaccaagagaccagagataccaggatgagagataggacccctggttgccagtgccagccgccagtggtcgcacttggagggtctcgccgccagtggaaggagccaccgcccccgcccgaccatggccgaggagctggtcttagagaggtgtgatctggagctggagaccaatggccgagaccaccacacggccgacctgtgccgggagaagctggtggtgcgacggggccagcccttctggctgaccctgcactttgagggccgcaactacgaggccagtgtagacagtctcaccttcagtgtcgtgaccggcccagcccctagccaggaggccgggaccaaggcccgttttccactaagagatgctgtggaggagggtgactggacagccaccgtggtggaccagcaagactgcaccctctcgctgcagctcaccaccccggccaacgcccccatcggcctgtatcgcctcagcctggaggcctccactggctaccagggatccagctttgtgctgggccacttcattttgctcttcaacgcctggtgcccagcggatgctgtgtacctggactcggaagaggagcggcaggagtatgt

SEQ ID NO: 32117 - DNA, 2157 bp, Homo sapiens
  source 1..2157: mol_type = unassigned DNA
agtgccagccgccagtggtcgcacttggagggtctcgccgccagtggaaggagccaccgcccccgcccgaccatggccgaggagctggtcttagagaggtgtgatctggagctggagaccaatggccgagaccaccacacggccgacctgtgccgggagaagctggtggtgcgacggggccagcccttctggctgaccctgcactttgagggccgcaactacgaggccagtgtagacagtctcaccttcagtgtcgtgaccgcggatgctgtgtacctggactcggaagaggagcggcaggagtatgtcctcacccagcagggctttatctaccagggctcggccaagttcatcaagaacataccttggaattttgggcagtttgaagatgggatcctagacatctgcctgatccttctagatgtcaaccccaagttcctgaagaacgccggccgtgactgctcccgccgcagcagccccgtctacgtgggccgggtggtgagtggcatggtcaactgcaacgatgaccagggtgtgctgctgggacgctgggacaacaactacggggacggcgtcagccccatgtcctggatcggcagcgtggacatcctgcggcgctggaagaaccacggctgccagcgcgtcaagtatggccagtgctgggtcttcgccgccgtggcctgcacagtgctgaggtgcctgggcatccctacccgcgtcgtgaccaactacaactcggcccatgaccagaacagcaaccttctcatcgagtacttccgcaatgagtttggggagatccagggtgacaagagcgagatgatctggaacttccactgctgggtggagtcgtggatgaccaggccggacctgcagccggggtacgagggctggcaggccctggacccaacgccccaggagaagagcgaagggacgtactgctgtggcccagttccagttcgtgccatcaaggagggcgacctgagcaccaagtacgatgcgccctttgtctttgcggaggtcaatgccgacgtggtagactggatccagcaggacgatgggtctgtgcacaaatccatcaaccgttccctgatcgttgggctgaagatcagcactaagagcgtgggccgagacgagcgggaggatatcacccacacctacaaatacccagaggggtcctcagaggagagggaggccttcacaagggcgaaccacctgaacaaactggccgagaaggaggagacagggatggccatgcggatccgtgtgggccagagcatgaacatgggcagtgactttgacgtctttgcccacatcaccaacaacaccgctgaggagtacgtctgccgcctcctgctctgtgcccgcaccgtcagctacaatgggatcttggggcccgagtgtggcaccaagtacctgctcaacctcaacctggagcctttctctgagaagagcgttcctctttgcatcctctatgagaaataccgtgactgccttacggagtccaacctcatcaaggtgcgggccctcctcgtggagccagttatcaacagctacctgctggctgagagggacctctacctggagaatccagaaatcaagatccggatccttggggagcccaagcagaaacgcaagctggtggctgaggtgtccctgcagaacccgctccctgtggccctggaaggctgcaccttcactgtggagggggccggcctgactgaggagcagaagacggtggagatcccagaccccgtggaggcaggggaggaagttaaggtgagaatggacctgctgccgctccacatgggcctccacaagctggtggtgaacttcgagagcgacaagctgaaggctgtgaagggcttccggaatgtcatcattggccccgcctaagggacccctgctcccagcctgctgagagcccccaccttgatcccaatccttatcccaagctagtgagcaaaatatgccccttcttgggccccagaccccagggcagggtgggcagcctatgggggctctcggaaatggaatgtgcccctggcccatctcagcctcctgagcctgtgggtccccactcaccccctttgctgtgaggaatgctctgtgccagaaacagtgggagccctgaccttggctgactggggctggggtgag

SEQ ID NO: 32118 - DNA, 2041 bp, Homo sapiens
  source 1..2041: mol_type = unassigned DNA
agtgccagccgccagtggtcgcacttggagggtctcgccgccagtggaaggagccaccgcccccgcccgaccatggccgagggcccagcccctagccaggaggccgggaccaaggcccgttttccactaagagatgctgtggaggagggtgactggacagccaccgtggtggaccagcaagactgcaccctctcgctgcagctcaccaccccggccaacgcccccatcggcctgtatcgcctcagcctggaggcctccactggctaccagggatccagctttgtgctgggccacttcattttgctcttcaacgcctggtgcccagcggatgctgtgtacctggactcggaagaggagcggcaggagtatgtcctcacccagcagggctttatctaccagggctcggccaagttcatcaagaacataccttggaattttgggcagtttgaagatgggatcctagacatctgcctgatccttctagatgtcaaccccaagttcctgaagaacgccggccgtgactgctcccgccgcagcagccccgtctacgtgggccgggtggtgagtggcatggtcaactgcaacgatgaccagggtgtgctgctgggacgctgggacaacaactacggggacggcgtcagccccatgtcctggatcggcagcgtggacatcctgcggcgctggaagaaccacggctgccagcgcgtcaagtatggccagtgctgggtcttcgccgccgtggcctgcacagtgctgaggtgcctgggcatccctacccgcgtcgtgaccaactacaactcggcccatgaccagaacagcaaccttctcatcgagtacttccgcaatgagtttggggagatccagggtgacaagagcgagatgatctggaacttccactgctgggtggagtcgtggatgaccaggccggacctgcagccggggtacgagggctggcaggccctggacccaacgccccaggagaagagcgaagggacgtactgctgtggcccagttccagttcgtgccatcaaggagggcgacctgagcaccaagtacgatgcgccctttgtctttgcggaggtcaatgccgacgtggtagactggatccagcaggacgatgggtctgtgcacaaatccatcaaccgttccctgatcgttgggctgaagatcagcactaagagcgtgggccgagacgagcgggaggatatcacccacacctacaaatacccagaggggtcctcagaggagagggaggccttcacaagggcgaaccacctgaacaaactggccgagaaggaggagacagggatggccatgcggatccgtgtgggccagagcatgaacatgggcagtgactttgacgtctttgcccacatcaccaacaacaccgctgaggagtacgtctgccgcctcctgctctgtgcccgcaccgtcagctacaatgggatcttggggcccgagtgtggcaccaagtacctgctcaacctcaacctggagcctttctctgagaagagcgttcctctttgcatcctctatgagaaataccgtgactgccttacggagtccaacctcatcaaggtgcgggccctcctcgtggagccagttatcaacagctacctgctggctgagagggacctctacctggagaatccagaaatcaagatccggatccttggggagcccaagcagaaacgcaagctggtggctgaggtgtccctgcagaacccgctccctgtggccctggaaggctgcaccttcactgtggagggggccggcctgactgaggagcagaagacggtggagatcccagaccccgtggaggcaggggaggaagttaaggtgagaatggacctgctgccgctccacatgggcctccacaagctggtggtgaacttcgagagcgacaagctgaaggctgtgaagggcttccggaatgtcatcattggccccgcctaagggacccctgctcccagcctgctgagagcccccaccttgatcccaatccttatcccaagctagtgagcaaaatatgccccttctt

SEQ ID NO: 32119 - DNA, 2642 bp, Homo sapiens
  source 1..2642: mol_type = unassigned DNA
gtctgtcagcactgtccgtgccattcccagaggagcctgagaagaggcagaggaaggcgaaacatggctgctctaggagtccagagtatcaactggcagacggccttcaaccgacaagcgcatcacacagacaagttctccagccaggagctcatcttgcggagaggccaaaacttccaggtcttaatgatcatgaacaaaggccttggctctaacgaaagactggagttcattgtctccacagggccttacccctcagagtcggccatgacgaaggctgtgtttccactctccaatggcagtagtggtggctggagtgcggtgcttcaggccagcaatggcaatactctgactatcagcatctccagtcctgccagcgcacccataggacggtacacaatggccctccagatcttctcccagggcggcatctcctctgtgaaacttgggacgttcatactgctttttaacccctggctgaatgtggatagcgtctttatgggtaaccacgctgagagagaagagtatgttcaggaagatgccggcatcatctttgtgggaagcacaaaccgaattggcatgattggctggaactttggacagtttgaagaagacattctcagcatctgcctctcaatcttggataggagtctgaatttccgccgtgacgctgctactgatgtggccagcagaaatgaccccaaatacgttggccgggtgctgagtgccatgatcaatagcaatgatgacaatggtgtgcttgctgggaattggagcggcacttacaccggtggccgggacccaaggagctggaacggcagcgtggagatcctcaaaaattggaaaaaatctggcttcagcccagtccgatatggccagtgctgggtctttgctgggaccctcaacacagcgctgcggtctttggggattccttcccgggtgatcaccaacttcaactcagctcatgacacagaccgaaatctcagtgtggatgtgtactacgaccccatgggaaaccccctggacaagggtagtgatagcgtatggaatttccatgtctggaatgaaggctggtttgtgaggtctgacctgggcccctcgtacggtggatggcaggtgttggatgctaccccgcaggaaagaagccaaggggtgttccagtgcggccccgcttcggtcattggtgttcgagagggtgatgtgcagctgaacttcgacatgccctttatcttcgcggaggttaatgccgaccgcatcacctggctgtacgacaacaccactggcaaacagtggaagaattccgtgaacagtcacaccattggcaggtacatcagcaccaaggcggtgggcagcaatgctcgcatggacgtcacggacaagtacaagtacccagaaggctctgaccaggaaagacaagtgttccaaaaggctttggggaaacttaaacccaacacgccatttgccgcgacgtcttcaatgggtttggaaacagaggaacaggagcccagcatcatcgggaagctgaaggtcgctggcatgctggcagtaggcaaagaagtcaacctggtcctactgctcaaaaacctgagcagggatacgaagacagtgacagtgaacatgacagcctggaccatcatctacaacggcacgcttgtacatgaagtgtggaaggactctgccacaatgtccctggaccctgaggaagaggcagaacatcccataaagatctcgtacgctcagtatgagaagtacctgaagtcagacaacatgatccggatcacagcggtgtgcaaggtcccagatgagtctgaggtggtggtggagcgggacatcatcctggacaaccccaccttgaccctggaggtgctgaacgaggctcgtgtgcggaagcctgtgaacgtgcagatgctcttctccaatccactggatgagccggtgagggactgcgtgctgatggtggagggaagcggcctgctgttgggtaacctgaagatcgacgtgccgaccctagggcccaaggaggggtcccgggtccgttttgatatcctgccctcccggagtggcaccaagcaactgctcgccgacttctcctgcaacaagttccctgcaatcaaggccatgttgtccatcgatgtagccgaatgaagggcgctggtggcctcccgtacaaacttggacaacacggagcagggagagctcaccatggaatgaaccccccgcccatgctgtccggcctgggaaaccctctccatctcccaaggctgccagacatggacctccaggctccagcacatccccctctcctctcccccaggttggggctgggtccaccctgtcctatgacttgatcacttttgcacattccctggccgcttctccccagagctgcctgctctgtgagccccacagccctgctcattcctcacgcccttcaatgctgcaggatggactggcccctgacccagggactctccaaacgggatacaggagagaagctggtctagactgtttgctgatccccaacctgcacggggcattcctgcttctctctcaggccaccacagagggcaggggatggttagtcacctgccccagcactcacaccctaactcaaaataaatgttaaataagtgcgatcacac

SEQ ID NO: 32120 - DNA, 1796 bp, Homo sapiens
  source 1..1796: mol_type = unassigned DNA
gtctgtcagcactgtccgtgccattcccagaggagcctgagaagaggcagaggaaggcgaaacatggctgctctaggagtccagagtatcaactggcagacggccttcaaccgacaagcgcatcacacagacaagttctccagccaggagctcatcttgcggagaggccaaaacttccaggtcttaatgatcatgaacaaaggccttggctctaacgaaagactggagttcattgtctccacagggccttacccctcagagtcggccatgacgaaggctgtgtttccactctccaatggcagtagtggtggctggagtgcggtgcttcaggccagcaatggcaatactctgactatcagcatctccagtcctgccagcgcacccataggacggtacacaatggccctccagatcttctcccagggcggcatctcctctgtgaaacttgggacgttcatactgctttttaacccctggctgaatgtggatagcgtctttatgggtaaccacgctgagagagaagagtatgttcaggaagatgccggcatcatctttgtgggaagcacaaaccgaattggcatgattggctggaactttggacagtttgaagaagacattctcagcatctgcctctcaatcttggataggagtctgaatttccgccgtgacgctgctactgatgtggccagcagaaatgaccccaaatacgttggccgggtgctgagtgccatgatcaatagcaatgatgacaatggtgtgcttgctgggaattggagcggcacttacaccggtggccgggacccaaggagctggaacggcagcgtggagatcctcaaaaattggaaaaaatctggcttcagcccagtccgatatggccagtgctgggtctttgctgggaccctcaacacagcgctgcggtctttggggattccttcccgggtgatcaccaacttcaactcagctcatgacacagaccgaaatctcagtgtggatgtgtactacgaccccatgggaaaccccctggacaagggtagtgatagcgtatggaatttccatgtctggaatgaaggctggtttgtgaggtctgacctgggcccctcgtacggtggatggcaggtgttggatgctaccccgcaggaaagaagccaaggggtgttccagtgcggccccgcttcggtcattggtgttcgagagggtgatgtgcagctgaacttcgacatgccctttatcttcgcggaggttaatgccgaccgcatcacctggctgtacgacaacaccactggcaaacagtggaagaattccgtgaacagtcacaccattggcaggtacatcagcaccaaggcggtgggcagcaatgctcgcatggacgtcacggacaagtacaagtacccagaaggctctgaccaggaaagacaagtgttccaaaaggctttggggaaacttaaacccaacacgccatttgccgcgacgtcttcaatgggtttggaaacagaggaacaggagcccagcatcatcgggaagctgaaggtcgctggcatgctggcagtaggcaaagaagtcaacctggtcctactgctcattcctcacgcccttcaatgctgcaggatggactggcccctgacccagggactctccaaacgggatacaggagagaagctggtctagactgtttgctgatccccaacctgcacggggcattcctgcttctctctcaggccaccacagagggcaggggatggttagtcacctgccccagcactcacaccctaactcaaaataaatgttaaataagtgcg

SEQ ID NO: 32121 - DNA, 3388 bp, Homo sapiens
  source 1..3388: mol_type = unassigned DNA
gactgtgtggaagcaccaggcatcagagatagagtcttccctggcattgcaggagagaatctgaagggatgatggatgcatcaaaagagctgcaagttctccacattgacttcttgaatcaggacaacgccgtttctcaccacacatgggagttccaaacgagcagtcctgtgttccggcgaggacaggtgtttcacctgcggctggtgctgaaccagcccctacaatcctaccaccaactgaaactggaattcagcacagggccgaatcctagcatcgccaaacacaccctggtggtgctcgacccgaggacgccctcagaccactacaactggcaggcaacccttcaaaatgagtctggcaaagaggtcacagtggctgtcaccagttcccccaatgccatcctgggcaagtaccaactaaacgtgaaaactggaaaccacatccttaagtctgaagaaaacatcctataccttctcttcaacccatggtgtaaagaggacatggttttcatgcctgatgaggacgagcgcaaagagtacatcctcaatgacacgggctgccattacgtgggggctgccagaagtatcaaatgcaaaccctggaactttggtcagtttgagaaaaatgtcctggactgctgcatttccctgctgactgagagctccctcaagcccacagataggagggaccccgtgctggtgtgcagggccatgtgtgctatgatgagctttgagaaaggccagggcgtgctcattgggaattggactggggactacgaaggtggcacagccccatacaagtggacaggcagtgccccgatcctgcagcagtactacaacacgaagcaggctgtgtgctttggccagtgctgggtgtttgctgggatcctgactacagtgctgagagcgttgggcatcccagcacgcagtgtgacaggcttcgattcagctcacgacacagaaaggaacctcacggtggacacctatgtgaatgagaatggcgagaaaatcaccagtatgacccacgactctgtctggaatttccatgtgtggacggatgcctggatgaagcgaccggatctgcccaagggctacgacggctggcaggctgtggacgcaacgccgcaggagcgaagccagggtgtcttctgctgtgggccatcaccactgaccgccatccgcaaaggtgacatctttattgtctatgacaccagattcgtcttctcagaagtgaatggtgacaggctcatctggttggtgaagatggtgaatgggcaggaggagttacacgtaatttcaatggagaccacaagcatcgggaaaaacatcagcaccaaggcagtgggccaagacaggcggagagatatcacctatgagtacaagtatccagaaggctcctctgaggagaggcaggtcatggatcatgccttcctccttctcagttctgagagggagcacagacgacctgtaaaagagaactttcttcacatgtcggtacaatcagatgatgtgctgctgggaaactctgttaatttcaccgtgattcttaaaaggaagaccgctgccctacagaatgtcaacatcttgggctcctttgaactacagttgtacactggcaagaagatggcaaaactgtgtgacctcaataagacctcgcagatccaaggtcaagtatcagaagtgactctgaccttggactccaagacctacatcaacagcctggctatattagatgatgagccagttatcagaggtttcatcattgcggaaattgtggagtctaaggaaatcatggcctctgaagtattcacgtctttccagtaccctgagttctctatagagttgcctaacacaggcagaattggccagctacttgtctgcaattgtatcttcaagaataccctggccatccctttgactgacgtcaagttctctttggaaagcctgggcatctcctcactacagacctctgaccatgggacggtgcagcctggtgagaccatccaatcccaaataaaatgcaccccaataaaaactggacccaagaaatttatcgtcaagttaagttccaaacaagtgaaagagattaatgctcagaagattgttctcatcaccaagtagccttgtctgatgctgtggagccttagttgagatttcagcatttcctaccttgtgcttagctttcagattatggatgattaaatttgatgacttatatgagggcagattcaagagccagcaggtcaaaaaggccaacacaaccataagcagccagacccacaaggccaggtcctgtgctatcacagggtcacctcttttacagttagaaacaccagccgaggccacagaatcccatccctttcctgagtcatggcctcaaaaatcagggccaccattgtctcaattcaaatccatagatttcgaagccacagagtctctccctggagcagcagactatgggcagcccagtgctgccacctgctgacgacccttgagaagctgccatatcttcaggccatgggttcaccagccctgaaggcacctgtcaactggagtgctctctcagcactgggatgggcctgatagaagtgcattctcctcctattgcctccattctcctctctctatccctgaaatccaggaagtccctctcctggtgctccaagcagtttgaagcccaatctgcaaggacatttctcaagggccatgtggttttgcagacaaccctgtcctcaggcctgaactcaccatagagacccatgtcagcaaacggtgaccagcaaatcctcttcccttattctaaagctgccccttgggagactccagggagaaggcattgcttcctccctggtgtgaactctttctttggtattccatccactatcctggcaactcaaggctgcttctgttaactgaagcctgctccttcttgttctgccctccagagatttgctcaaatgatcaataagctttaaattaaactctacttcaagaaaactctgtggtccctgagtccttttttctttatgccaataagcttcttaaatgtgctggcggtttatgcagtcacttggggagccatggaatcctttgatctccccaggcaaggtgctctgaggagttggcttctttattgtctgttcagtacatccaacccctctctcaaaggctgtcaccccaactggatacacaccctggcaaaggcacgtagcttgaatgagggttattttgtgtctaattcacaggagagtcatgggtgggatacctgtcatcctctgcctttccagctgtccaagtgaaaaaaacctcaatcctggtcacccttgcccaagttgcccacatccctggcatacagtaggtgttcaataaatgtttattgaaggaaa

SEQ ID NO: 32122 - DNA, 2767 bp, Homo sapiens
  source 1..2767: mol_type = unassigned DNA
cagctaccatggcccaagggctagaagtggccctcacagacctccagagctccagaaataatgtgcggcaccacacggaggagatcactgtggaccacctgcttgttcgccggggccaggccttcaacctcaccctgtacttcaggaaccggagcttccagccaggcctggacaacatcatcttcgtggttgaaactggaccgctgccagacctggccttggggactcgggctgtgttcagcctggcacgccatcacagccccagcccctggattgcctggctggagaccaatggggccacctccacagaggtgagcttgtgcgctcctcccacggcggccgtgggtcggtacctcttgaaaatccacatcgactccttccaggggtctgtgacggcctaccagctaggggagttcatcctgcttttcaatccctggtgcccagaggatgctgtctacttggacagtgaaccccagaggcaggagtatgtcatgaatgattatggcttcatctaccaaggcagcaagaactggatccgcccatgtccctggaactatggacagtttgaagacaaaatcatagacatctgcctgaagctgctagacaagagcctgcacttccagactgacccagccacagactgtgctctgcggggaagccccgtctacgtcagcagagtggtgtgtgccatgatcaacagcaatgatgataatggggtgctcaatggaaactggagtgagaattacacagacggcgccaaccctgcggagtggacgggcagcgtggccatcctgaagcagtggaacgccacaggctgccagcccgtgcgctacgggcaatgctgggtctttgctgccgtcatgtgcacagtgatgaggtgtctggggatccctacccgtgtgatcaccaacttcgactctggccacgatacagatggaaacctgatcatagatgagtattatgacaacacaggcaggattttggggaataagaagaaggatactatctggaacttccatgtctggaatgagtgctggatggcccggaaggatctgccccctgcatatggaggctggcaggtgctggacgccacacctcaggagatgagcaacggcgtctactgctgtggccctgcctctgtcagagccatcaaagaaggagaagtggacctgaactatgacacgccctttgtgttttcgatggtgaatgctgactgcatgtcctggctcgtccagggagggaaggagcagaagcttcaccaggacacgagttctgttggcaattttatcagcacaaagagcatccagagtgacgagcgggatgacatcacagagaactacaagtatgaagaaggatccctccaggagaggcaggtgtttctgaaggctctgcagaagctgaaggctagaagcttccatggctcccaaagaggagcagagttgcaaccttccaggcccacatcactgagccaggacagccctcggagcctgcatacaccttcccttcgacccagtgatgtggtgcaagtctccctgaaattcaagctgctcgacccgcccaacatgggccaggatatatgctttgtcctgctggccctcaacatgtcctcccagttcaaggacctcaaagtgaacctgagtgcccagtctctgctgcacgatggcagccccctgtccccattctggcaggacacagcgttcatcacactctctcctaaagaagcaaagacctacccctgcaaaatctcctattcccagtacagccagtacctgtcaacagacaagctgatccgcatcagtgccctgggtgaagagaaaagcagtcctgagaaaatcctggtgaacaagatcatcaccttatcttatccaagcatcacgattaatgttctaggagcagccgttgtgaaccagccactctccatacaggtgatattttcaaaccccctctcggagcaggttgaggactgtgtgctgactgtggaaggaagtggcctcttcaagaaacagcagaaagtcttccttggagtcctcaaaccccaacaccaagcaagcatcattctggagaccgtccccttcaagagtggacaaaggcagatccaagctaatatgagaagcaacaagtttaaggacattaagggttacaggaatgtttatgtagactttgcattataaattctggaacaacgcgccagacgtgtgaatttcaagcttcaggaaaaggagcaagttcaaatgcaagctgcgccattccccaccacaacagaggcttcacagggctccagcaagagccacagaggggatgacgtgttcattttctgtctctcctgactccactagaaatttaagctccatgagggcaaagactttgctttgtttactacccctatactcagaaccatttctggcatatgctaggcactcaacaaatattttttgaatgaatgaataggagactccagcatccagagaacaggtaggaaatgtctatggatggatatttccctggaccatttgcacagctcccctggactcttttcagggcccagggattccactgtgtcccatccagagattccaggattccagtctcctatccagaagcgtgatttggcacagaggtcagaggatactggtaggacttggccatgacttaactgccccctgccccagatatccaggaaagaaaaagacaggctgaacagctcactgttgttttgttgttgcgaaagctaattccctagtatgaataaacttcagaccttgctctc

SEQ ID NO: 32123 - DNA, 2521 bp, Homo sapiens
  source 1..2521: mol_type = unassigned DNA
cagctaccatggcccaagggctagaagtggccctcacagacctccagagctccagaaataatgtgcggcaccacacggaggagatcactgtggaccacctgcttgttcgccggggccaggccttcaacctcaccctgtacttcaggaaccggagcttccagccaggcctggacaacatcatcttcgtggttgaaactgaggatgctgtctacttggacagtgaaccccagaggcaggagtatgtcatgaatgattatggcttcatctaccaaggcagcaagaactggatccgcccatgtccctggaactatggacagtttgaagacaaaatcatagacatctgcctgaagctgctagacaagagcctgcacttccagactgacccagccacagactgtgctctgcggggaagccccgtctacgtcagcagagtggtgtgtgccatgatcaacagcaatgatgataatggggtgctcaatggaaactggagtgagaattacacagacggcgccaaccctgcggagtggacgggcagcgtggccatcctgaagcagtggaacgccacaggctgccagcccgtgcgctacgggcaatgctgggtctttgctgccgtcatgtgcacagtgatgaggtgtctggggatccctacccgtgtgatcaccaacttcgactctggccacgatacagatggaaacctgatcatagatgagtattatgacaacacaggcaggattttggggaataagaagaaggatactatctggaacttccatgtctggaatgagtgctggatggcccggaaggatctgccccctgcatatggaggctggcaggtgctggacgccacacctcaggagatgagcaacggcgtctactgctgtggccctgcctctgtcagagccatcaaagaaggagaagtggacctgaactatgacacgccctttgtgttttcgatggtgaatgctgactgcatgtcctggctcgtccagggagggaaggagcagaagcttcaccaggacacgagttctgttggcaattttatcagcacaaagagcatccagagtgacgagcgggatgacatcacagagaactacaagtatgaagaaggatccctccaggagaggcaggtgtttctgaaggctctgcagaagctgaaggctagaagcttccatggctcccaaagaggagcagagttgcaaccttccaggcccacatcactgagccaggacagccctcggagcctgcatacaccttcccttcgacccagtgatgtggtgcaagtctccctgaaattcaagctgctcgacccgcccaacatgggccaggatatatgctttgtcctgctggccctcaacatgtcctcccagttcaaggacctcaaagtgaacctgagtgcccagtctctgctgcacgatggcagccccctgtccccattctggcaggacacagcgttcatcacactctctcctaaagaagcaaagacctacccctgcaaaatctcctattcccagtacagccagtacctgtcaacagacaagctgatccgcatcagtgccctgggtgaagagaaaagcagtcctgagaaaatcctggtgaacaagatcatcaccttatcttatccaagcatcacgattaatgttctaggagcagccgttgtgaaccagccactctccatacaggtgatattttcaaaccccctctcggagcaggttgaggactgtgtgctgactgtggaaggaagtggcctcttcaagaaacagcagaaagtcttccttggagtcctcaaaccccaacaccaagcaagcatcattctggagaccgtccccttcaagagtggacaaaggcagatccaagctaatatgagaagcaacaagtttaaggacattaagggttacaggaatgtttatgtagactttgcattataaattctggaacaacgcgccagacgtgtgaatttcaagcttcaggaaaaggagcaagttcaaatgcaagctgcgccattccccaccacaacagaggcttcacagggctccagcaagagccacagaggggatgacgtgttcattttctgtctctcctgactccactagaaatttaagctccatgagggcaaagactttgctttgtttactacccctatactcagaaccatttctggcatatgctaggcactcaacaaatattttttgaatgaatgaataggagactccagcatccagagaacaggtaggaaatgtctatggatggatatttccctggaccatttgcacagctcccctggactcttttcagggcccagggattccactgtgtcccatccagagattccaggattccagtctcctatccagaagcgtgatttggcacagaggtcagaggatactggtaggacttggccatgacttaactgccccctgccccagatatccaggaaagaaaaagacaggctgaacagctcactgttgttttgttgttgcgaaagctaattccctagtatgaataaacttcagaccttgctctc

SEQ ID NO: 32124 - DNA, 2756 bp, Homo sapiens
  source 1..2756: mol_type = unassigned DNA
gctcaagggctagaagtggccctcacagacctccagagctccagaaataatgtgcggcaccacacggaggagatcactgtggaccacctgcttgttcgccggggccaggccttcaacctcaccctgtacttcaggaaccggagcttccagccaggcctggacaacatcatcttcgtggttgaaactggaccgctgccagacctggccttggggactcgggctgtgttcagcctggcacgccatcacagccccagcccctggattgcctggctggagaccaatggggccacctccacagaggtgagcttgtgcgctcctcccacggcggccgtgggtcggtacctcttgaaaatccacatcgactccttccaggggtctgtgacggcctaccagctaggggagttcatcctgcttttcaatccctggtgcccagaggatgctgtctacttggacagtgaaccccagaggcaggagtatgtcatgaatgattatggcttcatctaccaaggcagcaagaactggatccgcccatgtccctggaactatggacagtttgaagacaaaatcatagacatctgcctgaagctgctagacaagagcctgcacttccagactgacccagccacagactgtgctctgcggggaagccccgtctacgtcagcagagtggtgtgtgccatgatcaacagcaatgatgataatggggtgctcaatggaaactggagtgagaattacacagacggcgccaaccctgcggagtggacgggcagcgtggccatcctgaagcagtggaacgccacaggctgccagcccgtgcgctacgggcaatgctgggtctttgctgccgtcatgtgcacagtgatgaggtgtctggggatccctacccgtgtgatcaccaacttcgactctggccacgatacagatggaaacctgatcatagatgagtattatgacaacacaggcaggattttggggaataagaagaaggatactatctggaacttccatgtctggaatgagtgctggatggcccggaaggatctgccccctgcatatggaggctggcaggtgctggacgccacacctcaggagatgagcaacggcgtctactgctgtggccctgcctctgtcagagccatcaaagaaggagaagtggacctgaactatgacacgccctttgtgttttcgatggtgaatgctgactgcatgtcctggctcgtccagggagggaaggagcagaagcttcaccaggacacgagttctgttggcaattttatcagcacaaagagcatccagagtgacgagcgggatgacatcacagagaactacaagtatgaagaaggatccctccaggagaggcaggtgtttctgaaggctctgcagaagctgaaggctagaagcttccatggctcccaaagaggagcagagttgcaaccttccaggcccacatcactgagccaggacagccctcggagcctgcatacaccttcccttcgacccagtgatgtggtgcaagtctccctgaaattcaagctgctcgacccgcccaacatgggccaggatatatgctttgtcctgctggccctcaacatgtcctcccagttcaaggacctcaaagtgaacctgagtgcccagtctctgctgcacgatggcagccccctgtccccattctggcaggacacagcgttcatcacactctctcctaaagaagcaaagacctacccctgcaaaatctcctattcccagtacagccagtacctgtcaacagacaagctgatccgcatcagtgccctgggtgaagagaaaagcagtcctgagaaaatcctggtgaacaagatcatcaccttatcttatccaagcatcacgattaatgttctaggagcagccgttgtgaaccagccactctccatacaggtgatattttcaaaccccctctcggagcaggttgaggactgtgtgctgactgtggaaggaagtggcctcttcaagaaacagcagaaagtcttccttggagtcctcaaaccccaacaccaagcaagcatcattctggagaccgtccccttcaagagtggacaaaggcagatccaagctaatatgagaagcaacaagtttaaggacattaagggttacaggaatgtttatgtagactttgcattataaattctggaacaacgcgccagacgtgtgaatttcaagcttcaggaaaaggagcaagttcaaatgcaagctgcgccattccccaccacaacagaggcttcacagggctccagcaagagccacagaggggatgacgtgttcattttctgtctctcctgactccactagaaatttaagctccatgagggcaaagactttgctttgtttactacccctatactcagaaccatttctggcatatgctaggcactcaacaaatattttttgaatgaatgaataggagactccagcatccagagaacaggtaggaaatgtctatggatggatatttccctggaccatttgcacagctcccctggactcttttcagggcccagggattccactgtgtcccatccagagattccaggattccagtctcctatccagaagcgtgatttggcacagaggtcagaggatactggtaggacttggccatgacttaactgccccctgccccagatatccaggaaagaaaaagacaggctgaacagctcactgttgttttgttgttgcgaaagctaattccctagtatgaataaacttcagaccttgctctc

SEQ ID NO: 32125 - DNA, 2292 bp, Homo sapiens
  source 1..2292: mol_type = unassigned DNA
actgtcctgacggtgcacacactgctgtgtggaggaacagaggagtccagctggccttcacatggcagggatcagagtcaccaaggtggactggcagcggtcgaggaatggcgctgcccaccacacccaggagtacccctgccctgagctggtggttcgcaggggccagtcgttcagcctcacgctggagctgagcagagccctggactgtgaggagatcctcatcttcacgatggagacaggaccccgggcttctgaggccctccacaccaaagctgtgttccagacatcggagctggagcggggtgagggctggacagcagcaagggaggctcagatggagaaaactctgaccgtcagtctcgccagccctcccagtgctgtcattggccgctacctgctgagcatcaggctttcctctcaccgcaaacacagcaaccggaggctgggcgagtttgttctccttttcaacccatggtgtgcagaggacgatgtgtttctggcctcagaggaggagagacaggagtacgtgctcagcgacagcggcatcatcttccgaggcgtggagaagcacatacgagcccagggctggaactacgggcagtttgaggaggacatcctgaacatctgcctctccatcctggatcgaagccccggtcaccaaaacaacccagccaccgacgtgtcctgccgccacaaccccatctacgtcaccagggtcatcagtgccatggtgaacagcaacaacgaccgaggtgtggtgcaaggacagtggcagggcaagtacggcggcggcaccagcccgctgcactggcgcggcagcgtggccattctgcagaagtggctcaagggcaggtacaagccagtcaagtacggccagtgctgggtcttcgccggagtcctgtgcacagtcctcaggtgcttggggatagccacacgggtcgtgtccaacttcaactcagcccacgacacagaccagaacctgagtgtggacaaatacgtggactccttcgggcggaccctggaggacctgacagaagacagcatgtggaatttccatgtctggaatgagagctggtttgcccggcaggacctaggcccctcttacaatggctggcaggttctggatgccaccccccaggaggagagtgaaggtgtgttccggtgcggcccagcctcagtcaccgccatccgcgagggtgatgtgcacctggctcacgatggccccttcgtgtttgcggaggtcaacgccgactacatcacctggctgtggcacgaggatgagagccgggagcgtgtatactcaaacacgaagaagattgggagatgcatcagcaccaaggcggtgggcagtgactcccgcgtggacatcactgacctctacaagtatccggaagggtcccggaaagagaggcaggtgtacagcaaggcggtgaacaggctgttcggcgtggaagcctctggaaggagaatctggatccgcagggctgggggtcgctgtctctggcgtgacgacctcctggagcctgccaccaagcccagcatcgctggcaagttcaaggtgctagagcctcccatgctgggccacgacctgagactggccctgtgcttggccaacctcacctcccgggcccagcgggtgagggtcaacctgagcggtgccaccatcctctatacccgcaagccagtggcagagatcctgcatgaatcccacgccgtgaggctggggccgcaagaagagaagagaatcccaattacaatatcttactctaagtataaagaagacctgacagaggacaagaagatcctgttggctgccatgtgccttgtcaccaaaggagagaagcttctggtggagaaggacattactctagaggacttcatcaccatcaaggttctgggcccagccatggtgggagtggcagttacagtggaagtgacagtagtcaaccccctcatagagagagtgaaggactgtgcgctgatggtggagggcagcggccttctccaggaacagctcagcatcgacgtgcctaccctggagcctcaggagagggcctcagtccagtttgacatcaccccctccaaaagtggcccaaggcagctgcaggtggaccttgtaagccctcacttcccggacatcaagggctttgtgatcgtccatgtggccactgccaagtgatggatcatgagggactgagaggggtggatttggcccctgtcctcctcctgcccattctttgtctcttccacatgggagccaggaggcctcagttaatcctgcctcaacct

SEQ ID NO: 32126 - DNA, 2158 bp, Homo sapiens
  source 1..2158: mol_type = unassigned DNA
actgtcctgacggtgcacacactgctgtgtggaggaacagaggagtccagctggccttcacatggcagggatcagagtcaccaaggtggactggcagcggtcgaggaatggcgctgcccaccacacccaggagtacccctgccctgagctggtggttcgcaggggccagtcgttcagcctcacgctggagctgagcagagccctggactgtgaggagatcctcatcttcacgatggagacaggaccccgggcttctgaggccctccacaccaaagctgtgttccagacatcggagctggagcggggtgagggctggacagcagcaagggaggctcagatggagaaaactctgaccgtcagtctcgccagccctcccagtgctgtcattggccgctacctgctgagcatcaggctttcctctcaccgcaaacacagcaaccggaggctgggcgagtttgttctccttttcaacccatggtgtgcagaggacgatgtgtttctggcctcagaggaggagagacaggagtacgtgctcagcgacagcggcatcatcttccgaggcgtggagaagcacatacgagcccagggctggaactacgggcagtttgaggaggacatcctgaacatctgcctctccatcctggatcgaagccccggtcaccaaaacaacccagccaccgacgtgtcctgccgccacaaccccatctacgtcaccagggtcatcagtgccatggtgaacagcaacaacgaccgaggtgtggtgcaaggacagtggcagggcaagtacggcggcggcaccagcccgctgcactggcgcggcagcgtggccattctgcagaagtggctcaagggcaggtacaagccagtcaagtacggccagtgctgggtcttcgccggagtcctgtgcacagtcctcaggtgcttggggatagccacacgggtcgtgtccaacttcaactcagcccacgacacagaccagaacctgagtgtggacaaatacgtggactccttcgggcggaccctggaggacctgacagaagacagcatgtggaatttccatgtctggaatgagagctggtttgcccggcaggacctaggcccctcttacaatggctggcaggttctggatgccaccccccaggaggagagtgaaggtgtgttccggtgcggcccagcctcagtcaccgccatccgcgagggtgatgtgcacctggctcacgatggccccttcgtgtttgcggaggtcaacgccgactacatcacctggctgtggcacgaggatgagagccgggagcgtgtatactcaaacacgaagaagattgggagatgcatcagcaccaaggcggtgggcagtgactcccgcgtggacatcactgacctctacaagtatccggaagggtcccggaaagagaggcaggtgtacagcaaggcggtgaacaggctgttcggcgtggaagcctctggaaggagaatctggatccgcagggctgggggtcgctgtctctggcgtgacgacctcctggagcctgccaccaagcccagcatcgctggcaagttcaaggtgctagagcctcccatgctgggccacgacctgagactggccctgtgcttggccaacctcacctcccgggcccagcgggtgagggtcaacctgagcggtgccaccatcctctatacccgcaagccagtggcagagatcctgcatgaatcccacgccgtgaggctggggccgcaagaagagaagagaatcccaattacaatatcttactctaagtataaagaagacctgacagaggacaagaagatcctgttggctgccatgtgccttgtcaccaaaggagagaagcttctggtggagaaggacattactctagaggacttcatcaccatcaagcgtgcctaccctggagcctcaggagagggcctcagtccagtttgacatcaccccctccaaaagtggcccaaggcagctgcaggtggaccttgtaagccctcacttcccggacatcaagggctttgtgatcgtccatgtggccactgccaagtgatggatcatgagggactgagaggggtggatttggcccctgtcctcctcctgcccattctttgtctcttccacatgggagccaggaggcctcagttaatcctgcctcaacct

SEQ ID NO: 32127 - DNA, 2312 bp, Homo sapiens
  source 1..2312: mol_type = unassigned DNA
gggagatggatcaggtggcaaccttgcggcttgagtctgtcgacctgcagagctccaggaacaacaaggagcaccacacgcaggagatgggcgtcaagcggctcactgtgcgccgcggccagcccttctacctccggctgagcttcagccgacccttccagtcccagaacgaccacatcacctttgtggctgagaccggacccaagccgtcagagctgctggggacccgagccacattcttcctcacccgggtccagcccgggaatgtctggagcgcttctgatttcaccattgactccaactctctccaagtttcccttttcacaccagccaatgcagttattggccattacactctgaaaatagagatctctcagggccaaggtcacagtgtgacttacccgctgggaactttcatcctactttttaacccttggagtccagaggacgacgtctacctgccaagtgaaatactgctgcaggagtatatcatgcgagattatggctttgtttacaagggtcatgaaagattcatcacctcctggccctggaactacgggcagtttgaagaggacatcatagacatctgctttgagatcctgaacaagagcctgtatcacttaaagaacccggccaaagactgttcccagcggaacgacgtggtgtatgtgtgcagggtggtgagtgccatgatcaacagcaacgatgacaatggcgtgctgcaggggaactggggcgaggactactccaaaggggtcagtcctctggagtggaagggcagtgtggccatcctacagcagtggtcagccaggggcgggcagcctgtgaagtacggacagtgctgggtcttcgcctctgttatgtgcaccgtaatgagatgcttaggtgttccaacccgtgttgtttccaatttccgttccgcgcacaacgtggataggaacttgaccatcgatacgtactatgaccgaaatgccgagatgctgtcaactcagaaacgagacaaaatatggaacttccacgtctggaatgagtgctggatgatccggaaagatctcccaccaggatacaacgggtggcaggttctggaccccactccccagcagaccagcagtgggctgttctgctgtggccctgcctctgtgaaggccatcagggaaggggatgtccacctggcctatgacaccccttttgtgtatgccgaggtgaacgccgatgaagtcatttggctccttggggatggccaggcccaggaaatcctggcccacaacaccagttccatcgggaaggagatcagcactaagatggtggggtcagaccagcgccagagcatcaccagctcctacaagtacccagaaggatcccctgaggagagagctgtcttcatgaaggcttctcggaaaatgctgggcccccaaagagcttctttgcccttcctggatctcctggagtctgggggtcttagggatcagccagcgcagctgcagcttcacctggccaggatacccgagtggggccaggacctgcagctgctgctgcgtatccagagggtgccagacagcacccaccctcgggggcccatcggactggtggtgcgcttctgtgcacaggccctgctgcatgggggtggtacccagaagcccttctggaggcacacagtgcggatgaacctggactttgggaaggagacacagtggccgctcctcctgccctacagcaattacagaaacaagctaacggacgaaaagctcatccgcgtgtctggcatcgcggaggttgaagagacagggaggtccatgctggtcctaaaagatatctgtctggagcctccccacttgtctattgaggtgtctgagagggctgaggtgggcaaggcgctgagagtccatgtcaccctcaccaacaccttaatggtggctctgagcagctgcacgatggtgctggaaggaagcggcctcatcaatgggcagatagcaaaggaccttgggactctggtggccggacacaccctccaaattcaactggacctctacccgaccaaagctggaccccgccagctccaggttctcatcagcagcaacgaggtcaaggagatcaaaggctacaaggacatcttcgtcactgtggctggggctccctgagacccgccctccagctgccctccctggcacccctgccccacctggctcctttctactcctggctatgtcgtcttggctccacctctgtcctctctctagcctgcctgggaatgaatgaagctctgttagaaacaccgtgtgctttgggaagagacaataaagatgtctttattt

SEQ ID NO: 32128 - DNA, 5847 bp, Homo sapiens
  source 1..5847: mol_type = unassigned DNA
gtaaggtctcggaagtacgaggcggaggggacgaaaaacggggggccagactgttgtggctgtggtggagacgagaaaccaggaagaagaggctcgcctcccactcggcgacagtaagcgaagcagccgaaggcgagcgccgacatcagcagctgccccctaaatcccgcccttcgtcttggcggcagcgggagactgagagacgcgcgcagcaggggcgggactggagaggggccccgcgcgcggatctcgcgagagcattagagggcggaagcgctatccgagcaggatgcggttcgtggttgccttggtcctcctgaacgtcgcagcggcgggagccgtgccgctcttggccaccgaaagcgtcaagcaagaagaagctggagtacggccttctgcaggaaacgtctccacccaccccagcttgagccaacggcctggaggctctaccaagtcgcatccggagccgcagactccaaaagacagccctagcaagtcgagttcggaggcgcagaccacaaaagatgtccctaataagtcgggtgcggacggccagaccccaaaagacggctccagcaagtcgggtgcggaggatcagaccccaaaagacgtccctaacaagtcgggtgcggagaagcagactccaaaagacggctctaacaagtccggtgcagaggagcagggcccaatagacgggcccagcaagtcgggtgcggaggagcagacctcaaaagacagccctaacaaggaggaagttaagtcttcagagcctactgaggatgtggagcccaaagaggctgaagatgatgatacaggacccgaggagggctcaccgcccaaagaagagaaagaaaagatgtccggttctgcctccagtgagaaccgtgaagggacactttcggattccacgggtagcgagaaggatgacctttatccgaacggttctggaaatggcagcgcggagagcagccacttctttgcatatctggtgactgcagccattcttgtggctgtcctctatatcgctcatcacaacaagcggaagatcattgcttttgtcctggaaggaaaaagatctaaagtcacccggcggccaaaggccagtgactaccaacgtttggaccagaagtcctaacagaatggtatattcctctggaaaaagatgaacgtcaccaatggattgtgctgctctcgtttcagctttgatttttttgtccttgagaaccttgtcctccctgctgatttgtttctaaatcaaaagaaatgaagaaaaaagtactgtgacctgagagacaccctcctctagaatttagtggcgggtctgggctggcagaggtagggggctgctttgggctttgcacctgcactttggtgacattgttcttctgtgttccctttatttatgctggtggcttccatccgttcctcctctgagggtgagtggaggggtatatggaaacacggctatgaccaaagggagatcccagcctgggcaggctgcgctgctgaccaccctccctggggcccgggctctgtaggaaagttggtccttgactgtggcattgcactctgcactgtttctctctgcagacctaggggaaaactgcaggtggaagtgcttttctactaaggcctcttactttgggggggatgtgccctacagaagacatagaagatggggaaatgccaatgggcaaagagctactttgaatacataattctcttcaaagacttcagcagcaaaccaaaacagcaggttaaaaaaaaagatgcttttttgggtgcaagtctaacctgtctagcatgagatcttcttgattttctgattattttatgtagcttgagacaaagtgaatcaacttccacttagttgtaccgagcataaaacagaacttgggcttcctggcagtgaggccactgtcccatcacagatttttaaaataaatatgatttgaagtagtgtgatctttcacacaatcatactcagtaggaactttttgaaatagggcaagtttatgtttcatgcgagaaaacatgaaggagggttttggttttggtctgcagtttttccaaagggcttttatgagatacatttcccacaaagtccattttgcctttgttgcctaaaacagacaaaatagacttagatttattaatagaaactatactctctgccaattttacctcagtgtatttaatggtcctttaatctgatataagatgccaagggtatttgataaaaattcttcttccatgccatgtcaggagttaatacaaatgaagaaattccgtgggttcccctgggataagtgagggtagtgtcttggacaacactattgtttgaaggtttatcttttctaatcatgctctaccgcattgtagagagcctaaagagagttgtttctgagctgatctcagggaaatacaaataacttgggagatgagggaaataagatgaattctgtgctgtcaaggcagtaagtctgaagaaaggaccatgcttcttatattatcttccaccttgcttaaaacagcccatagctttgagttgacattttcattcttggcggatagcctactttatgaaggtaaggaatgaactcctacccttcttgggtcattctctgtactgatgcgttagtcttataatactttgcaccaacctgaggaatcttctaggcttctctagcatcccctaagactgtggctatttcacgtctctctccctgcctgccttccttttcccttcctttcccctcctcatgttttctggttgtgcccatctgtaccagctcctttccatccaccttcgtatgcacccagatttttctgttcccatctgtcctatttgttattcatcccgctgctcaacttctccagtatgttgcttcccttaagttgccattcattctcttcatgacttttactaactcacttcggtctctgtctgtcaactaaacttttctaaaggttaccagttatccaatcaccaaatccatggctttttctcaaagcttagtcttgtccttggcagaactggacactattgaccatccaaatggaaattcccctttcttggtgtctctgacaaatggtcctttgccttatcttgtgctggtggtgaagaggccctcaaagccaggcctctctattcctttgactgtctcctcagccattaacccattcttcatcctcggagtgagtgattcccaagtctttgtcttggcttaatccctaaagaacccagttctgctggtatcgaatagttcagcttggttgtcattgaaaggaatttctctcttctgtccatcagcctgtccctcccaactgtctaggacagtcttcggtcacctaaattcctaactgcagacttttgccctttttctctctcatcaccaaagtcccatccatttttttttaataaaagatcctcagctacagtctttccattttccttgcttctcttattgcacacccccagcccattttgcttctctcttggattttgttttttcagatccacatttattgggtttcctgtccagcttcttggaaaggagctcactcttggaaagactgatctttccaaaatattttccctggtctgaagctttggtgtgaacttctcaaggcttagagaatccagttacagaccttttggggttcaggatgctatagattgacaccctcctgcctgtttttctctgcatcccaacctggccaaggcccctcctgtggggtgcccatctgtgcctttattccggctgtgccctcgactttccagcttcccatgtttctttggttaggtttctctcccttccttctttctccttccccaatccgcctgtttcgtcagggcccagtttgtttcctcatacaccttcctcactaccccaccccacatggttgactctttccctcagctccaccagctcttcatcatgccactcatttcagaacttgagcaaaacagggcagtcaggatctgatgtctttctggtctccctaagaaaactaagctcttgagggacagcccttggcaatgctttcctatctgctgatcatggtgaccttccttaggacttccagagttcagttccttctggcagagaggttttctttctccatgccatatggatgtgactcaaatgaggggtcccacagcttttcctggctaccacttgctgtgaccttatacatgttggggtttgctcttaaagaggagagcaggaagaaaggttggtttcagaaaccaagagggtcggcagtggacgcgtacattttgtcacggagtccacagagctgagcttttgagcagactctgagaagtatcattgcttgtgttgaaagaatacaacaggatttaagtttctctttagaaattgcactgaagaaaggccgggcgcggtggctccccctgtaatcccagcgctttgggaggccgaggcggggggatcacgaggtcaagagatcgagaccatcctggccaacatggtgaaaccccgtctctaataaaaatacaaaaattagccgggcatggtgacgtgcacctgtagtcccagctactagataggctgaggcaggagaattgcttgaatccgggaggcggaggttgcagtgagccgagatcgtgccactgaactccaacctgccaatagagcgagactccgtctcaaaaaaaaaaaaaaaaaagaaagaaatagcattgaagaaaataccgcacatcagaggaaagcttattttctgcatggtgtcttttcaaagatagaatatttgaagcatgttttctagcgattgtgtggatgagggtgagctggctgaggcatcgctcaagctggggggtggtgtgtaagaagcacgtggagccacaagaggcacctcctatagtcagctaagggcttccctttctgcgcccagcttttgggtgaagggtgatttctattagacacatctgtgcttcagtcatagatgttaatagaggaagcagttttcctgctgcagattcctgaatagagttgctgaaagagtctacttctggactcaggggaagttgaaggccagtctgtgtagaaaggctgaggcaacggggaaagacctgacagctagttacatacgctctgacatagtactcccatgatggcttccagtgacacatgtgctgatagaattctaaacctctggaatttccctgctggcgacttctatggccgttgactgtacagggtaacctgatgccagatgctatgggcgtgatgagaactagagcattgcagcatggaggaaactgtgaggcaccagatcctgtgcttctgcaggccattttctgaaaacccctgttaggaaggttggatttggcgtgacttgcttgagcaagagtcctggggagagattttgaggtttaatttaacggtatatccagagctaacagtgactcaactcgtctagttctgcaagtcagatgtacacttagagtctctctgtgaagggtttgggtctgagctgtatagtatgtcaaactgccagtaagccagcccctcaccctctgatagatattcctttaatgcaccagacttcatgtttgataaatgattaatggttgaaattgtttctcttcttttgtgttttcccagttaatagatggtcactgtttccacaatgttttatactttcagctttttgtaacttaactataattacttaattttatttttttaaagcttgttgtggtctaatgagaagtatttttcagtgcataatgtttttctgagcttctgtaaatgccatcccaatgtggtttggttttgttgaacagaaaccaaaataaatttcaaaatgttaaagcaatgg

SEQ ID NO: 32129 - DNA, 6489 bp, Homo sapiens
  source 1..6489: mol_type = unassigned DNA
ttcccacatgggagagaccagagcacagcacgtttgtgtacggccaggagggaaccacgaaaaaagcagaggatagaaacgcaagcacacgatggtggtggccaagaggagcctgcccctagtgacctcacttccgcggccagtgcgagaggcgagggagctccagctctgcctgtaaggtctcggaagtacgaggcggaggggacgaaaaacggggggccagactgttgtggctgtggtggagacgagaaaccaggaagaagaggctcgcctcccactcggcgacagtaagcgaagcagccgaaggcgagcgccgacatcagcagctgccccctaaatcccgcccttcgtcttggcggcagcgggagactgagagacgcgcgcagcaggggcgggactggagaggggccccgcgcgcggatctcgcgagagcattagagggcggaagcgctatccgagcaggatgcggttcgtggttgccttggtcctcctgaacgtcgcagcggcgggagccgtgccgctcttggccaccgaaagcgtcaagcaagaagaagctggagtacggccttctgcaggaaacgtctccacccaccccagcttgagccaacggcctggaggctctaccaagtcgcatccggagccgcagactccaaaagacagccctagcaagtcgagtgcggaggcgcagaccccagaagacacccccaacaagtcgggtgcggaggcaaagacccaaaaagacagctccaacaagtcgggtgcggaggcaaagacccaaaaaggcagcactagcaagtcgggttcggaggcgcagaccacaaaagacagcactagtaagtcgcatccggagctgcagactccaaaagacagcactggcaaatcgggtgcggaggcgcagaccccagaagacagccccaacaggtcgggtgcggaggcaaagacccaaaaagacagccctagcaagtcaggttcggaggcgcagaccacaaaagatgtccctaataagtcgggtgcggacggccagaccccaaaagacggctccagcaagtcgggtgcggaggatcagaccccaaaagacgtccctaacaagtcgggtgcggagaagcagactccaaaagacggctctaacaagtccggtgcagaggagcagggcccaatagacgggcccagcaagtcgggtgcggaggagcagacctcaaaagacagccctaacaaggtggttccagagcagccttcccggaaagaccattccaagcccatctccaacccttctgataacaaggagctccccaaggctgacacaaaccagcttgctgacaaagggaagctttctcctcatgctttcaaaaccgaatctggggaggaaactgacctcatttctcccccgcaggaggaagttaagtcttcagagcctactgaggatgtggagcccaaagaggctgaagatgatgatacaggacccgaggagggctcaccgcccaaagaagagaaagaaaagatgtccggttctgcctccagtgagaaccgtgaagggacactttcggattccacgggtagcgagaaggatgacctttatccgaacggttctggaaatggcagcgcggagagcagccacttctttgcatatctggtgactgcagccattcttgtggctgtcctctatatcgctcatcacaacaagcggaagatcattgcttttgtcctggaaggaaaaagatctaaagtcacccggcggccaaaggccagtgactaccaacgtttggaccagaagtcctaacagaatggtatattcctctggaaaaagatgaacgtcaccaatggattgtgctgctctcgtttcagctttgatttttttgtccttgagaaccttgtcctccctgctgatttgtttctaaatcaaaagaaatgaagaaaaaagtactgtgacctgagagacaccctcctctagaatttagtggcgggtctgggctggcagaggtagggggctgctttgggctttgcacctgcactttggtgacattgttcttctgtgttccctttatttatgctggtggcttccatccgttcctcctctgagggtgagtggaggggtatatggaaacacggctatgaccaaagggagatcccagcctgggcaggctgcgctgctgaccaccctccctggggcccgggctctgtaggaaagttggtccttgactgtggcattgcactctgcactgtttctctctgcagacctaggggaaaactgcaggtggaagtgcttttctactaaggcctcttactttgggggggatgtgccctacagaagacatagaagatggggaaatgccaatgggcaaagagctactttgaatacataattctcttcaaagacttcagcagcaaaccaaaacagcaggttaaaaaaaaagatgcttttttgggtgcaagtctaacctgtctagcatgagatcttcttgattttctgattattttatgtagcttgagacaaagtgaatcaacttccacttagttgtaccgagcataaaacagaacttgggcttcctggcagtgaggccactgtcccatcacagatttttaaaataaatatgatttgaagtagtgtgatctttcacacaatcatactcagtaggaactttttgaaatagggcaagtttatgtttcatgcgagaaaacatgaaggagggttttggttttggtctgcagtttttccaaagggcttttatgagatacatttcccacaaagtccattttgcctttgttgcctaaaacagacaaaatagacttagatttattaatagaaactatactctctgccaattttacctcagtgtatttaatggtcctttaatctgatataagatgccaagggtatttgataaaaattcttcttccatgccatgtcaggagttaatacaaatgaagaaattccgtgggttcccctgggataagtgagggtagtgtcttggacaacactattgtttgaaggtttatcttttctaatcatgctctaccgcattgtagagagcctaaagagagttgtttctgagctgatctcagggaaatacaaataacttgggagatgagggaaataagatgaattctgtgctgtcaaggcagtaagtctgaagaaaggaccatgcttcttatattatcttccaccttgcttaaaacagcccatagctttgagttgacattttcattcttggcggatagcctactttatgaaggtaaggaatgaactcctacccttcttgggtcattctctgtactgatgcgttagtcttataatactttgcaccaacctgaggaatcttctaggcttctctagcatcccctaagactgtggctatttcacgtctctctccctgcctgccttccttttcccttcctttcccctcctcatgttttctggttgtgcccatctgtaccagctcctttccatccaccttcgtatgcacccagatttttctgttcccatctgtcctatttgttattcatcccgctgctcaacttctccagtatgttgcttcccttaagttgccattcattctcttcatgacttttactaactcacttcggtctctgtctgtcaactaaacttttctaaaggttaccagttatccaatcaccaaatccatggctttttctcaaagcttagtcttgtccttggcagaactggacactattgaccatccaaatggaaattcccctttcttggtgtctctgacaaatggtcctttgccttatcttgtgctggtggtgaagaggccctcaaagccaggcctctctattcctttgactgtctcctcagccattaacccattcttcatcctcggagtgagtgattcccaagtctttgtcttggcttaatccctaaagaacccagttctgctggtatcgaatagttcagcttggttgtcattgaaaggaatttctctcttctgtccatcagcctgtccctcccaactgtctaggacagtcttcggtcacctaaattcctaactgcagacttttgccctttttctctctcatcaccaaagtcccatccatttttttttaataaaagatcctcagctacagtctttccattttccttgcttctcttattgcacacccccagcccattttgcttctctcttggattttgttttttcagatccacatttattgggtttcctgtccagcttcttggaaaggagctcactcttggaaagactgatctttccaaaatattttccctggtctgaagctttggtgtgaacttctcaaggcttagagaatccagttacagaccttttggggttcaggatgctatagattgacaccctcctgcctgtttttctctgcatcccaacctggccaaggcccctcctgtggggtgcccatctgtgcctttattccggctgtgccctcgactttccagcttcccatgtttctttggttaggtttctctcccttccttctttctccttccccaatccgcctgtttcgtcagggcccagtttgtttcctcatacaccttcctcactaccccaccccacatggttgactctttccctcagctccaccagctcttcatcatgccactcatttcagaacttgagcaaaacagggcagtcaggatctgatgtctttctggtctccctaagaaaactaagctcttgagggacagcccttggcaatgctttcctatctgctgatcatggtgaccttccttaggacttccagagttcagttccttctggcagagaggttttctttctccatgccatatggatgtgactcaaatgaggggtcccacagcttttcctggctaccacttgctgtgaccttatacatgttggggtttgctcttaaagaggagagcaggaagaaaggttggtttcagaaaccaagagggtcggcagtggacgcgtacattttgtcacggagtccacagagctgagcttttgagcagactctgagaagtatcattgcttgtgttgaaagaatacaacaggatttaagtttctctttagaaattgcactgaagaaaggccgggcgcggtggctccccctgtaatcccagcgctttgggaggccgaggcggggggatcacgaggtcaagagatcgagaccatcctggccaacatggtgaaaccccgtctctaataaaaatacaaaaattagccgggcatggtgacgtgcacctgtagtcccagctactagataggctgaggcaggagaattgcttgaatccgggaggcggaggttgcagtgagccgagatcgtgccactgaactccaacctgccaatagagcgagactccgtctcaaaaaaaaaaaaaaaaaagaaagaaatagcattgaagaaaataccgcacatcagaggaaagcttattttctgcatggtgtcttttcaaagatagaatatttgaagcatgttttctagcgattgtgtggatgagggtgagctggctgaggcatcgctcaagctggggggtggtgtgtaagaagcacgtggagccacaagaggcacctcctatagtcagctaagggcttccctttctgcgcccagcttttgggtgaagggtgatttctattagacacatctgtgcttcagtcatagatgttaatagaggaagcagttttcctgctgcagattcctgaatagagttgctgaaagagtctacttctggactcaggggaagttgaaggccagtctgtgtagaaaggctgaggcaacggggaaagacctgacagctagttacatacgctctgacatagtactcccatgatggcttccagtgacacatgtgctgatagaattctaaacctctggaatttccctgctggcgacttctatggccgttgactgtacagggtaacctgatgccagatgctatgggcgtgatgagaactagagcattgcagcatggaggaaactgtgaggcaccagatcctgtgcttctgcaggccattttctgaaaacccctgttaggaaggttggatttggcgtgacttgcttgagcaagagtcctggggagagattttgaggtttaatttaacggtatatccagagctaacagtgactcaactcgtctagttctgcaagtcagatgtacacttagagtctctctgtgaagggtttgggtctgagctgtatagtatgtcaaactgccagtaagccagcccctcaccctctgatagatattcctttaatgcaccagacttcatgtttgataaatgattaatggttgaaattgtttctcttcttttgtgttttcccagttaatagatggtcactgtttccacaatgttttatactttcagctttttgtaacttaactataattacttaattttatttttttaaagcttgttgtggtctaatgagaagtatttttcagtgcataatgtttttctgagcttctgtaaatgccatcccaatgtggtttggttttgttgaacagaaaccaaaataaatttcaaaatgttaaagcaatgg

SEQ ID NO: 32130 - DNA, 6138 bp, Homo sapiens
  source 1..6138: mol_type = unassigned DNA
gtaaggtctcggaagtacgaggcggaggggacgaaaaacggggggccagactgttgtggctgtggtggagacgagaaaccaggaagaagaggctcgcctcccactcggcgacagtaagcgaagcagccgaaggcgagcgccgacatcagcagctgccccctaaatcccgcccttcgtcttggcggcagcgggagactgagagacgcgcgcagcaggggcgggactggagaggggccccgcgcgcggatctcgcgagagcattagagggcggaagcgctatccgagcaggatgcggttcgtggttgccttggtcctcctgaacgtcgcagcggcgggagccgtgccgctcttggccaccgaaagcgtcaagcaagaagaagctggagtacggccttctgcaggaaacgtctccacccaccccagcttgagccaacggcctggaggctctaccaagtcgcatccggagccgcagactccaaaagacagccctagcaagtcgagtgcggaggcgcagaccccagaagacacccccaacaagtcgggtgcggaggcaaagacccaaaaagacagctccaacaagtcgggtgcggaggcaaagacccaaaaaggcagcactagcaagtcgggttcggaggcgcagaccacaaaagacagcactagtaagtcgcatccggagctgcagactccaaaagacagcactggcaaatcgggtgcggaggcgcagaccccagaagacagccccaacaggtcgggtgcggaggcaaagacccaaaaagacagccctagcaagtcaggttcggaggcgcagaccacaaaagatgtccctaataagtcgggtgcggacggccagaccccaaaagacggctccagcaagtcgggtgcggaggatcagaccccaaaagacgtccctaacaagtcgggtgcggagaagcagactccaaaagacggctctaacaagtccggtgcagaggagcagggcccaatagacgggcccagcaagtcgggtgcggaggagcagacctcaaaagacagccctaacaaggaggaagttaagtcttcagagcctactgaggatgtggagcccaaagaggctgaagatgatgatacaggacccgaggagggctcaccgcccaaagaagagaaagaaaagatgtccggttctgcctccagtgagaaccgtgaagggacactttcggattccacgggtagcgagaaggatgacctttatccgaacggttctggaaatggcagcgcggagagcagccacttctttgcatatctggtgactgcagccattcttgtggctgtcctctatatcgctcatcacaacaagcggaagatcattgcttttgtcctggaaggaaaaagatctaaagtcacccggcggccaaaggccagtgactaccaacgtttggaccagaagtcctaacagaatggtatattcctctggaaaaagatgaacgtcaccaatggattgtgctgctctcgtttcagctttgatttttttgtccttgagaaccttgtcctccctgctgatttgtttctaaatcaaaagaaatgaagaaaaaagtactgtgacctgagagacaccctcctctagaatttagtggcgggtctgggctggcagaggtagggggctgctttgggctttgcacctgcactttggtgacattgttcttctgtgttccctttatttatgctggtggcttccatccgttcctcctctgagggtgagtggaggggtatatggaaacacggctatgaccaaagggagatcccagcctgggcaggctgcgctgctgaccaccctccctggggcccgggctctgtaggaaagttggtccttgactgtggcattgcactctgcactgtttctctctgcagacctaggggaaaactgcaggtggaagtgcttttctactaaggcctcttactttgggggggatgtgccctacagaagacatagaagatggggaaatgccaatgggcaaagagctactttgaatacataattctcttcaaagacttcagcagcaaaccaaaacagcaggttaaaaaaaaagatgcttttttgggtgcaagtctaacctgtctagcatgagatcttcttgattttctgattattttatgtagcttgagacaaagtgaatcaacttccacttagttgtaccgagcataaaacagaacttgggcttcctggcagtgaggccactgtcccatcacagatttttaaaataaatatgatttgaagtagtgtgatctttcacacaatcatactcagtaggaactttttgaaatagggcaagtttatgtttcatgcgagaaaacatgaaggagggttttggttttggtctgcagtttttccaaagggcttttatgagatacatttcccacaaagtccattttgcctttgttgcctaaaacagacaaaatagacttagatttattaatagaaactatactctctgccaattttacctcagtgtatttaatggtcctttaatctgatataagatgccaagggtatttgataaaaattcttcttccatgccatgtcaggagttaatacaaatgaagaaattccgtgggttcccctgggataagtgagggtagtgtcttggacaacactattgtttgaaggtttatcttttctaatcatgctctaccgcattgtagagagcctaaagagagttgtttctgagctgatctcagggaaatacaaataacttgggagatgagggaaataagatgaattctgtgctgtcaaggcagtaagtctgaagaaaggaccatgcttcttatattatcttccaccttgcttaaaacagcccatagctttgagttgacattttcattcttggcggatagcctactttatgaaggtaaggaatgaactcctacccttcttgggtcattctctgtactgatgcgttagtcttataatactttgcaccaacctgaggaatcttctaggcttctctagcatcccctaagactgtggctatttcacgtctctctccctgcctgccttccttttcccttcctttcccctcctcatgttttctggttgtgcccatctgtaccagctcctttccatccaccttcgtatgcacccagatttttctgttcccatctgtcctatttgttattcatcccgctgctcaacttctccagtatgttgcttcccttaagttgccattcattctcttcatgacttttactaactcacttcggtctctgtctgtcaactaaacttttctaaaggttaccagttatccaatcaccaaatccatggctttttctcaaagcttagtcttgtccttggcagaactggacactattgaccatccaaatggaaattcccctttcttggtgtctctgacaaatggtcctttgccttatcttgtgctggtggtgaagaggccctcaaagccaggcctctctattcctttgactgtctcctcagccattaacccattcttcatcctcggagtgagtgattcccaagtctttgtcttggcttaatccctaaagaacccagttctgctggtatcgaatagttcagcttggttgtcattgaaaggaatttctctcttctgtccatcagcctgtccctcccaactgtctaggacagtcttcggtcacctaaattcctaactgcagacttttgccctttttctctctcatcaccaaagtcccatccatttttttttaataaaagatcctcagctacagtctttccattttccttgcttctcttattgcacacccccagcccattttgcttctctcttggattttgttttttcagatccacatttattgggtttcctgtccagcttcttggaaaggagctcactcttggaaagactgatctttccaaaatattttccctggtctgaagctttggtgtgaacttctcaaggcttagagaatccagttacagaccttttggggttcaggatgctatagattgacaccctcctgcctgtttttctctgcatcccaacctggccaaggcccctcctgtggggtgcccatctgtgcctttattccggctgtgccctcgactttccagcttcccatgtttctttggttaggtttctctcccttccttctttctccttccccaatccgcctgtttcgtcagggcccagtttgtttcctcatacaccttcctcactaccccaccccacatggttgactctttccctcagctccaccagctcttcatcatgccactcatttcagaacttgagcaaaacagggcagtcaggatctgatgtctttctggtctccctaagaaaactaagctcttgagggacagcccttggcaatgctttcctatctgctgatcatggtgaccttccttaggacttccagagttcagttccttctggcagagaggttttctttctccatgccatatggatgtgactcaaatgaggggtcccacagcttttcctggctaccacttgctgtgaccttatacatgttggggtttgctcttaaagaggagagcaggaagaaaggttggtttcagaaaccaagagggtcggcagtggacgcgtacattttgtcacggagtccacagagctgagcttttgagcagactctgagaagtatcattgcttgtgttgaaagaatacaacaggatttaagtttctctttagaaattgcactgaagaaaggccgggcgcggtggctccccctgtaatcccagcgctttgggaggccgaggcggggggatcacgaggtcaagagatcgagaccatcctggccaacatggtgaaaccccgtctctaataaaaatacaaaaattagccgggcatggtgacgtgcacctgtagtcccagctactagataggctgaggcaggagaattgcttgaatccgggaggcggaggttgcagtgagccgagatcgtgccactgaactccaacctgccaatagagcgagactccgtctcaaaaaaaaaaaaaaaaaagaaagaaatagcattgaagaaaataccgcacatcagaggaaagcttattttctgcatggtgtcttttcaaagatagaatatttgaagcatgttttctagcgattgtgtggatgagggtgagctggctgaggcatcgctcaagctggggggtggtgtgtaagaagcacgtggagccacaagaggcacctcctatagtcagctaagggcttccctttctgcgcccagcttttgggtgaagggtgatttctattagacacatctgtgcttcagtcatagatgttaatagaggaagcagttttcctgctgcagattcctgaatagagttgctgaaagagtctacttctggactcaggggaagttgaaggccagtctgtgtagaaaggctgaggcaacggggaaagacctgacagctagttacatacgctctgacatagtactcccatgatggcttccagtgacacatgtgctgatagaattctaaacctctggaatttccctgctggcgacttctatggccgttgactgtacagggtaacctgatgccagatgctatgggcgtgatgagaactagagcattgcagcatggaggaaactgtgaggcaccagatcctgtgcttctgcaggccattttctgaaaacccctgttaggaaggttggatttggcgtgacttgcttgagcaagagtcctggggagagattttgaggtttaatttaacggtatatccagagctaacagtgactcaactcgtctagttctgcaagtcagatgtacacttagagtctctctgtgaagggtttgggtctgagctgtatagtatgtcaaactgccagtaagccagcccctcaccctctgatagatattcctttaatgcaccagacttcatgtttgataaatgattaatggttgaaattgtttctcttcttttgtgttttcccagttaatagatggtcactgtttccacaatgttttatactttcagctttttgtaacttaactataattacttaattttatttttttaaagcttgttgtggtctaatgagaagtatttttcagtgcataatgtttttctgagcttctgtaaatgccatcccaatgtggtttggttttgttgaacagaaaccaaaataaatttcaaaatgttaaagcaa

SEQ ID NO: 32131 - DNA, 2235 bp, Homo sapiens
  source 1..2235: mol_type = unassigned DNA
agaggggccccgcgcgcggatctcgcgagagcattagagggcggaagcgctatccgagcaggatgcggttcgtggttgccttggtcctcctgaacgtcgcagcggcgggagccgtgccgctcttggccaccgaaagcgtcaagcaagaagaagctggagtacggccttctgcaggaaacgtctccacccaccccagcttgagccaacggcctggaggctctaccaagtcgcatccggagccgcagactccaaaagacagccctagcaagtcgagtgcggaggcgcagaccccagaagacacccccaacaagtcgggtgcggaggcaaagacccaaaaagacagctccaacaagtcgggtgcggaggcaaagacccaaaaaggcagcactagcaagtcgggttcggaggcgcagaccacaaaagacagcactagtaagtcgcatccggagctgcagactccaaaagacagcactggcaaatcgggtgcggaggcgcagaccccagaagacagccccaacaggtcgggtgcggaggcaaagacccaaaaagacagccctagcaagtcaggttcggaggcgcagaccacaaaagatgtccctaataagtcgggtgcggacggccagaccccaaaagacggctccagcaagtcgggtgcggaggatcagaccccaaaagacgtccctaacaagtcgggtgcggagaagcagactccaaaagacggctctaacaagtccggtgcagaggagcagggcccaatagacgggcccagcaagtcgggtgcggaggagcagacctcaaaagacagccctaacaaggtggttccagagcagccttcccggaaagaccattccaagcccatctccaacccttctgataacaaggagctccccaaggctgacacaaaccagcttgctgacaaagggaagctttctcctcatgctttcaaaaccgaatctggggaggaaactgacctcatttctcccccgcaggaggaagttaagtcttcagagcctactgaggatgtggagcccaaagaggctgaagatgatgatacaggacccgaggagggctcaccgcccaaagaagagaaagaaaagatgtccggttctgcctccagtgagaaccgtgaagggacactttcggattccacgggtagcgagaaggatgacctttatccgaacggttctggaaatggcagcgcggagagcagccacttctttgcatatctggtgactgcagccattcttgtggctgtcctctatatcgctcatcacaacaagcggaagatcattgcttttgtcctggaaggaaaaagatctaaagtcacccggcggccaaaggccagtgactaccaacgtttggaccagaagatcttttttcccctaagtcctaacagaatggtatattcctctggaaaaagatgaacgtcaccaatggattgtgctgctctcgtttcagctttgatttttttgtccttgagaaccttgtcctccctgctgatttgtttctaaatcaaaagaaatgaagaaaaaagtactgtgacctgagagacaccctcctctagaatttagtggcgggtctgggctggcagaggtagggggctgctttgggctttgcacctgcactttggtgacattgttcttctgtgttccctttatttatgctggtggcttccatccgttcctcctctgagggtgagtggaggggtatatggaaacacggctatgaccaaagggagatcccagcctgggcaggctgcgctgctgaccaccctccctggggcccgggctctgtaggaaagttggtccttgactgtggcattgcactctgcactgtttctctctgcagacctaggggaaaactgcaggtggaagtgcttttctactaaggcctcttactttgggggggatgtgccctacagaagacatagaagatggggaaatgccaatgggcaaagagctactttgaatacataattctcttcaaagacttcagcagcaaaccaaaacagcaggttaaaaaaaaagatgcttttttgggtgcaagtctaacctgtctagcatgagatcttcttgattttctgattattttatgtagcttgagacaaagtgaatcaacttccacttagttgtaccgagcataaaacagaacttgggcttcctggcagtgaggccactgtcccatcacagatttttaaaataaatatgatttgaagtagtgtgatctttcacacaa

SEQ ID NO: 32132 - DNA, 1263 bp, Homo sapiens
  source 1..1263: mol_type = unassigned DNA
tgctccggggactgcttttgccagtacccagaatcagtgctcaggctcagaaatcctggatagaaagagcattttataaaagagaatgtgtccacatcatacccagcaccaaagacccccataggtgttgctgtgggcgtctgataggccagcatgttggcctcacccccagtatctccgtgcttcagaatgagaaaaatgaaagtcgcctctcccgaaatgacatccagtctgaaaagtggtccatcagcaaacacactcaactcagccctacggatgcttttgggaccattgagttccaaggaggtggccattccaacaaagccatgtatgtgcgagtatcttttgatacaaaacctgatctcctcttacacctgatgaccaaggaatggcagttggagcttcccaagcttctcatctctgtccatgggggcctgcagaactttgaactccagccaaaactcaagcaagtctttgggaaagggctcatcaaagcagcaatgacaactggagcgtggatattcactggaggggttaacacaggtgttattcgtcatgttggcgatgccttgaaggatcatgcctctaagtctcgaggaaagatatgcaccataggtattgccccctggggaattgtggaaaaccaggaggacctcattggaagagatgttgtccggccataccagaccatgtccaatcccatgagcaagctcactgttctcaacagcatgcattcccacttcattctggctgacaacgggaccactggaaaatatggagcagaggtgaaacttcgaagacaactggaaaagcatatttcactccagaagataaacacaagaatcggtcaaggtgttcctgtggtggcactcatagtggaaggaggacccaatgtgatctcgattgttttggagtaccttcgagacacccctcccgtgccagtggttgtctgtgatgggagtggacgggcatcggacatcctggcctttgggcataaatactcagaagaaggcgggtaggtaactttccaggccccatggaagaaccctaaagcctgtttggaaacgagggtatgagtggattatgttttcagtagctcaaccaagacctcaaatcaaaacaagctatgaacaaattgtctaaaaaatgtctgtcatgggagggctgtggtgaagaacagagaaacatattctaaatgtcctgtgaagtgggaaattctatgaaagctacacggataataaaaagggtgaggaaaagagagga

SEQ ID NO: 32133 - DNA, 4105 bp, Homo sapiens
  source 1..4105: mol_type = unassigned DNA
ccgaagggcgtccacagcgactcctgctagtgcagggcagctgctgccagggccgggcccgggaccccacggaggcggggagaccactcttctcccacacgagcccagctctcccttcgagtagcaaccgccttcaagctcacaagcacccgtgggcctggggtgtgcctgcgtctagctggttgcacactgggccacagaggatccagcaaggatgaagaaatggagcagcacagacttgggggcagctgcggacccactccaaaaggacacctgcccagaccccctggatggagaccctaactccaggccacctccagccaagccccagctctccacggccaagagccgcacccggctctttgggaagggtgactcggaggaggctttcccggtggattgccctcacgaggaaggtgagctggactcctgcccgaccatcacagtcagccctgttatcaccatccagaggccaggagacggccccaccggtgccaggctgctgtcccaggactctgtcgccgccagcaccgagaagaccctcaggctctatgatcgcaggagtatctttgaagccgttgctcagaataactgccaggatctggagagcctgctgctcttcctgcagaagagcaagaagcacctcacagacaacgagttcaaagaccctgagacagggaagacctgtctgctgaaagccatgctcaacctgcacgacggacagaacaccaccatccccctgctcctggagatcgcgcggcaaacggacagcctgaaggagcttgtcaacgccagctacacggacagctactacaagggccagacagcactgcacatcgccatcgagagacgcaacatggccctggtgaccctcctggtggagaacggagcagacgtccaggctgcggcccatggggacttctttaagaaaaccaaagggcggcctggattctacttcggtgaactgcccctgtccctggccgcgtgcaccaaccagctgggcatcgtgaagttcctgctgcagaactcctggcagacggccgacatcagcgccagggactcggtgggcaacacggtgctgcacgccctggtggaggtggccgacaacacggccgacaacacgaagtttgtgacgagcatgtacaatgagattctgatgctgggggccaaactgcacccgacgctgaagctggaggagctcaccaacaagaagggaatgacgccgctggctctggcagctgggaccgggaagatcggggtcttggcctatattctccagcgggagatccaggagcccgagtgcaggcacctgtccaggaagttcaccgagtgggcctacgggcccgtgcactcctcgctgtacgacctgtcctgcatcgacacctgcgagaagaactcggtgctggaggtgatcgcctacagcagcagcgagacccctaatcgccacgacatgctcttggtggagccgctgaaccgactcctgcaggacaagtgggacagattcgtcaagcgcatcttctacttcaacttcctggtctactgcctgtacatgatcatcttcaccatggctgcctactacaggcccgtggatggcttgcctccctttaagatggaaaaaactggagactatttccgagttactggagagatcctgtctgtgttaggaggagtctacttctttttccgagggattcagtatttcctgcagaggcggccgtcgatgaagaccctgtttgtggacagctacagtgagatgcttttctttctgcagtcactgttcatgctggccaccgtggtgctgtacttcagccacctcaaggagtatgtggcttccatggtattctccctggccttgggctggaccaacatgctctactacacccgcggtttccagcagatgggcatctatgccgtcatgatagagaagatgatcctgagagacctgtgccgtttcatgtttgtctacatcgtcttcttgttcgggttttccacagcggtggtgacgctgattgaagacgggaagaatgactccctgccgtctgagtccacgtcgcacaggtggcgggggcctgcctgcaggccccccgatagctcctacaacagcctgtactccacctgcctggagctgttcaagttcaccatcggcatgggcgacctggagttcactgagaactatgacttcaaggctgtcttcatcatcctgctgctggcctatgtaattctcacctacatcctcctgctcaacatgctcatcgccctcatgggtgagactgtcaacaagatcgcacaggagagcaagaacatctggaagctgcagagagccatcaccatcctggacacggagaagagcttccttaagtgcatgaggaaggccttccgctcaggcaagctgctgcaggtggggtacacacctgatggcaaggacgactaccggtggtgcttcagggtggacgaggtgaactggaccacctggaacaccaacgtgggcatcatcaacgaagacccgggcaactgtgagggcgtcaagcgcaccctgagcttctccctgcggtcaagcagagtttcaggcagacactggaagaactttgccctggtcccccttttaagagaggcaagtgctcgagataggcagtctgctcagcccgaggaagtttatctgcgacagttttcagggtctctgaagccagaggacgctgaggtcttcaagagtcctgccgcttccggggagaagtgaggacgtcacgcagacagcactgtcaacactgggccttaggagaccccgttgccacggggggctgctgagggaacaccagtgctctgtcagcagcctggcctggtctgtgcctgcccagcatgttcccaaatctgtgctggacaagctgtgggaagcgttcttggaagcatggggagtgatgtacatccaaccgtcactgtccccaagtgaatctcctaacagactttcaggtttttactcactttactaaacagtttggatggtcagtctctactgggacatgttaggcccttgttttctttgattttattcttttttttgagacagaatttcactcttctcacccaggctggaatgcagtggcacaattttggctccctgcaacctccgcctcctggattccagcaattctcctgcctcggcttcccaagtagctgggattacaggcacgtgccaccatgtctggctaattttttgtatttttttaatagatatggggtttcgccatgttggccaggctggtctcgaactcctgacctcaggtgatccgcccacctcggcctcccaaagtgctgggattacaggtgtgagcctccacacctggctgttttctttgattttattctttttttttttttctgtgagacagagtttcactcttgttgcccaggctggagtgcagtggtgtgatcttggctcactgcaacttctgcctcccgggttcaagcgattcttctgcttcagtctcccaagtagcttggattacaggtgagcactaccacgcccggctaatttttgtatttttaatagagacggggtttcaccatgttggccaggctggtctcgaactcttgacctcaggtgatctgcccgccttggcctcccaaagtgctgggattacaggtgtgagccgctgcgctcggccttctttgattttatattattaggagcaaaagtaaatgaagcccaggaaaacacctttgggaacaaactcttcctttgatggaaaatgcagaggcccttcctctctgtgccgtgcttgctcctcttacctgcccgggtggtttgggggtgttggtgtttcctccctggagaagatgggggaggctgtcccactcccagctctggcagaatcaagctgttgcagcagtgccttcttcatccttccttacgatcaatcacagtctccagaagatcagctcaattgctgtgcaggttaaaactacagaaccacatcccaaaggtacctggtaagaatgtttgaaagatcttccatttctaggaaccccagtcctgcttctccgcaatggcacatgcttccactccatccatactggcatcctcaaataaacagatatgtatacatatata

SEQ ID NO: 32134 - DNA, 2766 bp, Homo sapiens
  source 1..2766: mol_type = unassigned DNA
ccacaacttcgatcttggcacctgcggcctcccctgccttttctccggtggggatgaggctgctgtgtgggtgtgggggtgactcacacgggccacgtgggtgggcgggtgctgcagctgtggctggtgggcgtggcctgcctggcgccgagggcaggtggctcagccagttctgcctctgacgcctcattccagccatccctctgcctgcaatgagagcttcccgccgcctcagccacagtcccacccgggggccttgggccccagacatgcggtgatctcagggcaagggttgccacgaccacccagaacctcaccagccatgaaagcccaccccaaggagatggtgcctctcatgggcaagagagttgctgcccccagtgggaaccctgccatcctgccagagaagaggccggcggagatcacccccacaaagaagagtgcacacttcttcctggagatagaagggtttgaacccaaccccacagttgccaagacctctcctcctgtcttctccaagcccatggattccaacatccggcagtgcatctctggtaactgtgatgacatggactccccccagtctcctcaggatgatgtgacagagaccccatccaatcccaacagccccagtgcacagctggccaaggaagagcagaggaggaaaaagaggcggctgaagaagcgcatctttgcagccgtgtctgagggctgcgtggaggagttggtagagttgctggtggagctgcaggagctttgcaggcggcgccatgatgaggatgtgcctgacttcctcatgcacaagctgacggcctccgacacggggaagacctgcctgatgaaggccttgttaaacatcaaccccaacaccaaggagatagtgcggatcctgcttgcctttgctgaagagaacgacatcctgggcaggttcatcaacgccgagtacacagaggaggcctatgaagggcagacggcgctgaacatcgccatcgagcggcggcagggggacatcgcagccctgctcatcgccgccggcgccgacgtcaacgcgcacgccaagggggccttcttcaaccccaagtaccaacacgaaggcttctacttcggtgagacgcccctggccctggcagcatgcaccaaccagcccgagattgtgcagctgctgatggagcacgagcagacggacatcacctcgcgggactcacgaggcaacaacatccttcacgccctggtgaccgtggccgaggacttcaagacgcagaatgactttgtgaagcgcatgtacgacatgatcctactgcggagtggcaactgggagctggagaccactcgcaacaacgatggcctcacgccgctgcagctggccgccaagatgggcaaggcggagatcctgaagtacatcctcagtcgtgagatcaaggagaagcggctccggagcctgtccaggaagttcaccgactgggcgtacggacccgtgtcatcctccctctacgacctcaccaacgtggacaccaccacggacaactcagtgctggaaatcactgtctacaacaccaacatcgacaaccggcatgagatgctgaccctggagccgctgcacacgctgctgcatatgaagtggaagaagtttgccaagcacatgttctttctgtccttctgcttttatttcttctacaacatcaccctgaccctcgtctcgtactaccgcccccgggaggaggaggccatcccgcaccccttggccctgacgcacaagatggggtggctgcagctcctagggaggatgtttgtgctcatctgggccatgtgcatctctgtgaaagagggcattgccatcttcctgctgagaccctcggatctgcagtccatcctctcggatgcctggttccactttgtcttttttatccaagctgtgcttgtgatactgtctgtcttcttgtacttgtttgcctacaaagagtacctcgcctgcctcgtgctggccatggccctgggctgggcgaacatgctctactatacgcggggtttccagtccatgggcatgtacagcgtcatgatccagaaggtcattttgcatgatgttctgaagttcttgtttgtatatatcgtgtttttgcttggatttggagtagccttggcctcgctgatcgagaagtgtcccaaagacaacaaggactgcagctcctacggcagcttcagcgacgcagtgctggaactcttcaagctcaccataggcctgggtgacctgaacatccagcagaactccaagtatcccattctctttctgttcctgctcatcacctatgtcatcctcacctttgttctcctcctcaacatgctcattgctctgatgggcgagactgtggagaacgtctccaaggagagcgaacgcatctggcgcctgcagagagccaggaccatcttggagtttgagaaaatgttaccagaatggctgaggagcagattccggatgggagagctgtgcaaagtggccgaggatgatttccgactgtgtttgcggatcaatgaggtgaagtggactgaatggaagacgcacgtctccttccttaacgaagacccggggcctgtaagacgaacagatttcaacaaaatccaagattcttccaggaacaacagcaaaaccactctcaatgcatttgaagaagtcgaggaattcccggaaacctcggtgtagaagcggaacccagagctggtgtgcgcgtgcgctgtctggcgctgcaggcggagtcaccgactctgtgcaga

SEQ ID NO: 32135 - DNA, 5223 bp, Homo sapiens
  source 1..5223: mol_type = unassigned DNA
actacaaaagtagcgcgggcctgagaactccttccagaagttctccagggcttccgcagagcgactttttcgctgcctgtgagctgcagcgcgggagagctcgggctcgcgcggaccccagcgcctggcaggctgacagcgctctctcgccccaggtgcccgcgcgcgtggtgagcagctgcaccaggtggcgtccggggtggggtcaatgaagcgcagcctgaggaagatgtggcgccctggagaaaagaaggagccccagggcgttgtctatgaggatgtgccggacgacacggaggatttcaaggaatcgcttaaggtggtttttgaaggaagtgcatatggattacaaaactttaataagcaaaagaaattaaaaagatgtgacgatatggacaccttcttcttgcattatgctgcagcagaaggccaaattgagctaatggagaagatcaccagagattcctctttggaagtgctgcatgaaatggatgattatggaaatacccctctgcattgtgctgtagaaaaaaaccaaattgaaagcgttaagtttcttctcagcagaggagcaaacccaaatctccgaaacttcaacatgatggctcctctccacatagctgtgcagggcatgaataatgaggtgatgaaggtcttgcttgagcatagaactattgatgttaatttggaaggagaaaatggaaacacagctgtgatcattgcgtgcaccacaaataatagcgaagcattgcagattttgcttaaaaaaggagctaagccatgtaaatcaaataaatggggatgtttccctattcaccaagctgcattttcaggttccaaagaatgcatggaaataatactaaggtttggtgaagagcatgggtacagtagacagttgcacattaactttatgaataatgggaaagccacccctctccacctggctgtgcaaaatggtgacttggaaatgatcaaaatgtgcctggacaatggtgcacaaatagacccagtggagaagggaaggtgcacagccattcattttgctgccacccagggagccactgagattgttaaactgatgatatcgtcctattctggtagcgtggatattgttaacacaaccgatggatgtcatgagaccatgcttcacagagcttcattgtttgatcaccatgagctagcagactatttaatttcagtgggagcagatattaataagatcgattctgaaggacgctctccacttatattagcaactgcttctgcatcttggaatattgtaaatttgctactctctaaaggtgcccaagtagacataaaagataattttggacgtaattttctgcatttaactgtacagcaaccttatggattaaaaaatctgcgacctgaatttatgcagatgcaacagatcaaagagctggtaatggatgaagacaacgatgggtgtactcctctacattatgcatgtagacaggggggccctggttctgtaaataacctacttggctttaatgtgtccattcattccaaaagcaaagataagaaatcacctctgcattttgcagccagttatgggcgtatcaatacctgtcagaggctcctacaagacataagtgatacgaggcttctgaatgaaggtgaccttcatggaatgactcctctccatctggcagcaaagaatggacatgataaagtagttcagcttcttctgaaaaaaggtgcattgtttctcagtgaccacaatggctggacagctttgcatcatgcgtccatgggcgggtacactcagaccatgaaggtcattcttgatactaatttgaagtgcacagatcgcctggatgaagacgggaacactgcacttcactttgctgcaagggaaggccacgccaaagccgttgcgcttcttctgagccacaatgctgacatagtcctgaacaagcagcaggcctcctttttgcaccttgcacttcacaataagaggaaggaggttgttcttacgatcatcaggagcaaaagatgggatgaatgtcttaagattttcagtcataattctccaggcaataaatgtccaattacagaaatgatagaatacctccctgaatgcatgaaggtacttttagatttctgcatgttgcattccacagaagacaagtcctgccgagactattatatcgagtataatttcaaatatcttcaatgtccattagaattcaccaaaaaaacacctacacaggatgttatatatgaaccgcttacagccctcaacgcaatggtacaaaataaccgcatagagcttctcaatcatcctgtgtgtaaagaatatttactcatgaaatggttggcttatggatttagagctcatatgatgaatttaggatcttactgtcttggtctcatacctatgaccattctcgttgtcaatataaaaccaggaatggctttcaactcaactggcatcatcaatgaaactagtgatcattcagaaatactagataccacgaattcatatctaataaaaacttgtatgattttagtgtttttatcaagtatatttgggtattgcaaagaagcggggcaaattttccaacagaaaaggaattattttatggatataagcaatgttcttgaatggattatctacacgacgggcatcatttttgtgctgcccttgtttgttgaaataccagctcatctgcagtggcaatgtggagcaattgctgtttacttctattggatgaatttcttattgtatcttcaaagatttgaaaattgtggaatttttattgttatgttggaggtaattttgaaaactttgttgaggtctacagttgtatttatcttccttcttctggcttttggactcagcttttacatcctcctgaatttacaggatcccttcagctctccattgctttctataatccagaccttcagcatgatgctaggagatatcaattatcgagagtccttcctagaaccatatctgagaaatgaattggcacatccagttctgtcctttgcacaacttgtttccttcacaatatttgtcccaattgtcctcatgaatttacttattggtttggcagttggcgacattgctgaggtccagaaacatgcatcattgaagaggatagctatgcaggtggaacttcataccagcttagagaagaagctgccactttggtttctacgcaaagtggatcagaaatccaccatcgtgtatcccaacaaacccagatctggtgggatgttattccatatattctgttttttattttgcactggggaaataagacaagaaataccaaatgctgataaatctttagaaatggaaatattaaagcagaaataccggctgaaggatcttacttttctcctggaaaaacagcatgagctcattaaactgatcattcagaagatggagatcatctctgagacagaggatgatgatagccattgttcttttcaagacaggtttaagaaagagcagatggaacaaaggaatagcagatggaatactgtgttgagagcagtcaaggcaaaaacacaccatcttgagccttagctcctcagaccttcagtgaggcttctaatggggggtgcatgacttgctggttctaactttcaatttaaaaagagtgaggaagaagcagaatgattcattttgctgcgtgtgaaatcatggttcctgcatgctgtataaaagtaaaccatcttttatcctctattcatattttctaccaatcactatgtattggggatatctttgcagatatgttcaaattggactggactttgatgagatataatctcattatttgaatgggtagaaaatgaatttgctagaacacacatttttaatgaaaagaagtaataaatgtaactattaagctaaaatgcaaatgtcagtactgaattcctgcttgttaattacataatatgtgatgctctagaaaatagtcacaagtattaataatgccttagatgatagtcttaaatattaggttgaggtctacctaacctaagctgcttcctggaaagcttcatgttgaaagaacctatgggtggcaccatgtggacttttctgtccctactgtgatgaatagccccacccttcttgctgtccccaacacacctgatgtcactttgagccatatagttgaagtacaaattaataggccttatgatatgcacgaattttactatagataatatatgttgtttctggttttgtttgccaatgagcataataaatgtaaaacctatatagtatccctgtgattattgtatgagcctttgtttgagatttgaaaacaacatggctccatcacatattcccttttttcttttgatgtctactcaaatcatgaattaatcacatacctcatcattaatcttttcaaggtccttctattgttttgtctgattttctccatcatcctgattagcatgtttattccctcactacccccaggagatattcactgtaatgaatatgtctttggctatgtatgtgtccttgtgttatgttgtacagtgttgttttgagtctgttattatttacacagatgttattatgctatagcttctatttctgtttttgcttcttatttctcttataattctcacttatttcctattttttctactcatttctatttgttactcctttttactggacatgatgtttacaagatacaactgtgttactgtattccatctagtacggggcctttggtgtggcttactatttcattgtgtgcacccacccacccaccacactggacttttctagagatggacagcttggttacctccaccttcctgcactcattctcaaacatactgatgttcatacaaaccagcagagtgctgagggacgatatgtactattacaaaaccagacacttttacattcatggtccaacagatcacatggcctagaggcaatgttgcatataccttaatctttgatatgaataatatctttgttctttatatttcttaaaacagaaagggtggaaaatcactatacagaagcaatatccaaagatctcctgatcataaagacaaggggtcttttcagtcttccctctcctcaaaccttgtgtagcattgcacaatatagatctcagtcaacattcactgagtgccaagaatgtgagaaacactgtaccatgcctgtcatgcgaaatatttaaataaacagattgtcttaca

SEQ ID NO: 32136 - DNA, 4324 bp, Homo sapiens
  source 1..4324: mol_type = unassigned DNA
atctctcgtcctcttcctgggctaggccgccccaggcgcggcccctgcgactcctggcacggccccgtgctcggctgccgccctggcgcgcgccacactgtcgtccccggacgggcgcggaccggctcggccggggcgccggcggctggggaggggtcgctggccccggggccgcgcatgcgccgccaccaacttggggctgtcagtggagggcgagtgctggttctcaggggaggcgacgcccttcggggccaacgggcctcgagccgaggcagcagtgggaacgactcatcctttttccagccctggggcgtggctggggtcggggtcggggtcggggccggtgggggccccgcccccgtctcctggcctgcccccttcatgggccgcgatgatggcggccctgtacccgagcacggacctctcgggcgcctcctcctcctccctgccttcctctccatcctcttcctcgccgaacgaggtgatggcgctgaaggatgtgcgggaggtgaaggaggagaatacgctgaatgagaagcttttcttgctggcgtgcgacaagggtgactattatatggttaaaaagattttggaggaaaacagttcaggtgacttgaacataaattgcgtagatgtgcttgggagaaatgctgttaccataactattgaaaacgaaaacttggatatactgcagcttcttttggactacggttgtcagaaactaatggaacgaattcagaatcctgagtattcaacaactatggatgttgcacctgtcattttagctgctcatcgtaacaactatgaaattcttacaatgctcttaaaacaggatgtatctctacccaagccccatgcagttggctgtgaatgcacattgtgttctgcaaaaaacaaaaaggatagcctccggcattccaggtttcgtcttgatatatatcgatgtttggccagtccagctctaataatgttaacagaggaggatccaattctgagagcatttgaacttagtgctgatttaaaagaactaagtcttgtggaggtggaattcaggaatgattatgaggaactagcccggcaatgtaaaatgtttgctaaggatttacttgcacaagcccggaattctcgtgaattggaagttattctaaaccatacgtctagtgacgagcctcttgacaaacggggattattagaagaaagaatgaatttaagtcgtctaaaacttgctatcaaatataaccagaaagagtttgtctcccagtctaactgccagcagttcctgaacactgtttggtttggacagatgtcgggttaccgacgcaagcccacctgtaagaagataatgactgttttgacagtaggcatcttttggccagttttgtcactttgttatttgatagctcccaaatctcagtttggcagaatcattcacacaccttttatgaaatttatcattcatggagcatcatatttcacatttctgctgttgcttaatctatactctcttgtctacaatgaggataagaaaaacacaatggggccagcccttgaaagaatagactatcttcttattctgtggattattgggatgatttggtcagacattaaaagactctggtatgaagggttggaagactttttagaagaatctcgtaatcaactcagttttgtcatgaattctctttatttggcaacctttgccctcaaagtggttgctcacaacaagtttcatgattttgctgatcggaaggattgggatgcattccatcctacactggtggcagaagggctttttgcatttgcaaatgttctaagttatcttcgtctcttttttatgtatacaaccagctctatcttgggtccattacagatttcaatgggacagatgttacaagattttggaaaatttcttgggatgtttcttcttgttttgttttctttcacaattggactgacacaactgtatgataaaggatatacttcaaaggagcagaaggactgtgtaggcatcttctgtgaacagcaaagcaatgataccttccattcgttcattggcacctgctttgctttgttctggtatattttctccttagcgcatgtggcaatctttgtcacaagatttagctatggagaagaactgcagtcctttgtgggagctgtcattgttggtacatacaatgtcgtggttgtgattgtgcttaccaaactgctggtggcaatgcttcataaaagctttcagttgatagcaaatcatgaagacaaagaatggaagtttgctcgagcaaaattatggcttagctactttgatgacaaatgtacgttacctccacctttcaacatcattccctcaccaaagactatctgctatatgattagtagcctcagtaagtggatttgctctcatacatcaaaaggcaaggtcaaacggcaaaacagtttaaaggaatggaggaatttgaaacagaagagagatgaaaactatcaaaaagtgatgtgctgcctagtgcatcgttacttgacttccatgagacagaagatgcaaagtacagatcaggcaactgtggaaaatctaaacgaactgcgccaagatctgtcaaaattccgaaatgaaataagggatttacttggctttcggacttctaaatatgctatgttttatccaagaaattaaccattttctaaatcatggagcgaataattttcaataacagatccaaaagactatattgcataacttgcaatgaaattaatgagatatatattgaaataaagaattatgtaaaagccattctttaaaatatttatagcataaatatatgttatgtaaagtgtgtatatagaattagttttttaaaccttctgttagtggctttttgcagaagcaaaacagattaagtagatagattttgttagcatgctgcttggttttcttacttagtgctttaaaatgtttttttttatgtttaagaggggcagttataaatggacacattgcccagaatgttttgtaaaatgaagaccagcaaatgtaggctgatctccttcacaggatacacttgaaatatagaagttatgttttaaatatctctgttttaggagttcacatatagttcagcatttattgtttaggagtataattttattttatctaaaataatagtctattttttcttttgtattttgttataatcttaagcaacaaagaaaaaaccctaatatttgaatctatttatgtctttcaatttaaattcacttcagtttttgttattgtaatatatttacttttacatggttataatcactttatatttttaatgtttttttcacttaatattttatatatacatttccatgtattgatgtagttagtccacatttaaatttttatagaattatatagtttttgaaaaatacagtcagtagatgttttattttttagctattcagttatgtttataagtttgcatagctacttctcgacatttggtttgttttaatttttttgtatcataatagtcctatttttttttcaagttggagtgaatgtttttagttttaagatagataggagacacttttttatcacatgtagtcacaacctgttttgtttttgtaaaacataggaagtctctttaatgcaatgatttgttttatatttggactaaggttcttgagcttatctcccaaggtactttccataatttaacacagcttctataaaagtgacttcatgcttacttgtggatcattcttgctgcttaagatgaaaagcattggttttttaaaattagagaataaaatatgtatttaaatttttggtgtgttcacataaagggatgtagctaaaatgttttcataggctattatatattctcgcagcatttccagttaagaggatattaggtatataattctcttcttaaccgaatgtcagatggtcttacgccacagggtgcaggtaacccttggtctgtaagcaccaccgatccagggatcattgtctaaataggttactattgtttgtttcatcttgcttttgcatttttattttttaatttccaaattttaagtgttccctctttggggcaaattcttataaaaatgtttattgtaaagttatatattttgtctacgatgggattatgcacttcccaattgggattttacatctggatttttagtcattctaaaaaacacctaattattaaaacatttatagagtgcctactgtatgcatgagttgagttgcttctgaggtacattttgaatgacagcatattgtaagaaaaaaaaaggtgaataaaatttgacattagattataaa

SEQ ID NO: 32137 - DNA, 2136 bp, Homo sapiens
  source 1..2136: mol_type = unassigned DNA
atgatggcggccctgtacccgagcacggacctctcgggcgcctcctcctcctccctgccttcctctccatcctcttcctcgccgaacgaggtgatggcgctgaaggatgtgcgggaggtgaaggaggagaatacgctgaatgagaagcttttcttgctggcgtgcgacaagggtgactattatatggttaaaaagattttggaggaaaacagttcaggtgacttgaacataaattgcgtagatgtgcttgggagaaatgctgttaccataactattgaaaacgaaaacttggatatactgcagcttcttttggactacggttgtcagaaactaatggaacgaattcagaatcctgagtattcaacaactatggatgttgcacctgtcattttagctgctcatcgtaacaactatgaaattcttacaatgctcttaaaacaggatgtatctctacccaagccccatgcagttggctgtgaatgcacattgtgttctgcaaaaaacaaaaaggatagcctccggcattccaggtttcgtcttgatatatatcgatgtttggccagtccagctctaataatgttaacagaggaggatccaattctgagagcatttgaacttagtgctgatttaaaagaactaagtcttgtggaggtggaattcaggaatgattatgaggaactagcccggcaatgtaaaatgtttgctaaggatttacttgcacaagcccggaattctcgtgaattggaagttattctaaaccatacgtctagtgacgagcctcttgacaaacggggattattagaagaaagaatgaatttaagtcgtctaaaacttgctatcaaatataaccagaaagagtttgtctcccagtctaactgccagcagttcctgaacactgtttggtttggacagatgtcgggttaccgacgcaagcccacctgtaagaagataatgactgttttgacagtaggcatcttttggccagttttgtcactttgttatttgatagctcccaaatctcagtttggcagaatcattcacacaccttttatgaaatttatcattcatggagcatcatatttcacatttctgctgttgcttaatctatactctcttgtctacaatgaggataagaaaaacacaatggggccagcccttgaaagaatagactatcttcttattctgtggattattgggatgatttggtcagacattaaaagactctggtatgaagggttggaagactttttagaagaatctcgtaatcaactcagttttgtcatgaattctctttatttggcaacctttgccctcaaagtggttgctcacaacaagatttcaatgggacagatgttacaagattttggaaaatttcttgggatgtttcttcttgttttgttttctttcacaattggactgacacaactgtatgataaaggatatacttcaaaggagcagaaggactgtgtaggcatcttctgtgaacagcaaagcaatgataccttccattcgttcattggcacctgctttgctttgttctggtatattttctccttagcgcatgtggcaatctttgtcacaagatttagctatggagaagaactgcagtcctttgtgggagctgtcattgttggtacatacaatgtcgtggttgtgattgtgcttaccaaactgctggtggcaatgcttcataaaagctttcagttgatagcaaatcatgaagacaaagaatggaagtttgctcgagcaaaattatggcttagctactttgatgacaaatgtacgttacctccacctttcaacatcattccctcaccaaagactatctgctatatgattagtagcctcagtaagtggatttgctctcatacatcaaaaggcaaggtcaaacggcaaaacagtttaaaggaatggaggaatttgaaacagaagagagatgaaaactatcaaaaagtgatgtgctgcctagtgcatcgttacttgacttccatgagacagaagatgcaaagtacagatcaggcaactgtggaaaatctaaacgaactgcgccaagatctgtcaaaattccgaaatgaaataagggatttacttggctttcggacttctaaatatgctatgttttatccaagaaattaa

SEQ ID NO: 32138 - DNA, 3061 bp, Homo sapiens
  source 1..3061: mol_type = unassigned DNA
gcgaacatctcctcggagcgcagctgggccagcggttcccacagccctggagcccaacgtgcgcagaagcgcctcttggagctcctctcccacagatctctcgtcctcttcctgggctaggccgccccaggcgcggcccctgcgactcctggcacggccccgtgctcggctgccgccctggcgcgcgccacactgtcgtccccggacgggcgcggaccggctcggccggggcgccggcggctggggaggggtcgctggccccggggccgcgcatgcgccgccaccaacttggggctgtcagtggagggcgagtgctggttctcaggggaggcgacgcccttcggggccaacgggcctcgagccgaggcagcagtgggaacgactcatcctttttccagccctggggcgtggctggggtcggggtcggggtcggggccggtgggggccccgcccccgtctcctggcctgcccccttcatgggccgcgatgatggcggccctgtacccgagcacggacctctcgggcgcctcctcctcctccctgccttcctctccatcctcttcctcgccgaacgaggtgatggcgctgaaggatgtgcgggaggtgaaggaggagaatacgctgaatgagaagcttttcttgctggcgtgcgacaagggtgactattatatggttaaaaagattttggaggaaaacagttcaggtgacttgaacataaattgcgtagatgtgcttgggagaaatgctgttaccataactattgaaaacgaaaacttggatatactgcagcttcttttggactacggttgtcagtctgcagatgcacttttggtggcaatcgactctgaagtagtgggagctgttgatatactacttaatcatcgaccaaaacgatcatcaagaccaactatagtaaaactaatggaacgaattcagaatcctgagtattcaacaactatggatgttgcacctgtcattttagctgctcatcgtaacaactatgaaattcttacaatgctcttaaaacaggatgtatctctacccaagccccatgcagttggctgtgaatgcacattgtgttctgcaaaaaacaaaaaggatagcctccggcattccaggtttcgtcttgatatatatcgatgtttggccagtccagctctaataatgttaacagaggaggatccaattctgagagcatttgaacttagtgctgatttaaaagaactaagtcttgtggaggtggaattcaggaatgattatgaggaactagcccggcaatgtaaaatgtttgctaaggatttacttgcacaagcccggaattctcgtgaattggaagttattctaaaccatacgtctagtgacgagcctcttgacaaacggggattattagaagaaagaatgaatttaagtcgtctaaaacttgctatcaaatataaccagaaagagtttgtctcccagtctaactgccagcagttcctgaacactgtttggtttggacagatgtcgggttaccgacgcaagcccacctgtaagaagataatgactgttttgacagtaggcatcttttggccagttttgtcactttgttatttgatagctcccaaatctcagtttggcagaatcattcacacaccttttatgaaatttatcattcatggagcatcatatttcacatttctgctgttgcttaatctatactctcttgtctacaatgaggataagaaaaacacaatggggccagcccttgaaagaatagactatcttcttattctgtggattattgggatgatttggtcagacattaaaagactctggtatgaagggttggaagactttttagaagaatctcgtaatcaactcagttttgtcatgaattctctttatttggcaacctttgccctcaaagtggttgctcacaacaagtttcatgattttgctgatcggaaggattgggatgcattccatcctacactggtggcagaagggctttttgcatttgcaaatgttctaagttatcttcgtctcttttttatgtatacaaccagctctatcttgggtccattacagatttcaatgggacagatgttacaagattttggaaaatttcttgggatgtttcttcttgttttgttttctttcacaattggactgacacaactgtatgataaaggatatacttcaaaggagcagaaggactgtgtaggcatcttctgtgaacagcaaagcaatgataccttccattcgttcattggcacctgctttgctttgttctggtatattttctccttagcgcatgtggcaatctttgtcacaagatttagctatggagaagaactgcagtcctttgtgggagctgtcattgttggtacatacaatgtcgtggttgtgattgtgcttaccaaactgctggtggcaatgcttcataaaagctttcagttgatagcaaatcatgaagacaaagaatggaagtttgctcgagcaaaattatggcttagctactttgatgacaaatgtacgttacctccacctttcaacatcattccctcaccaaagactatctgctatatgattagtagcctcagtaagtggatttgctctcatacatcaaaaggcaaggtcaaacggcaaaacagtttaaaggaatggaggaatttgaaacagaagagagatgaaaactatcaaaaagtgatgtgctgcctagtgcatcgttacttgacttccatgagacagaagatgcaaagtacagatcaggcaactgtggaaaatctaaacgaactgcgccaagatctgtcaaaattccgaaatgaaataagggatttacttggctttcggacttctaaatatgctatgttttatccaagaaattaaccattttctaaatcatggagcgaataattttcaataacagatccaaaagactatattgcataacttgcaatgaaattaatgagatatatattgaaataaagaattatgtaaaagccattctttaaaatatttatagcataaatatatgttatgtaaagtgtgtatatagaattagttttttaaaccttctgtt

SEQ ID NO: 32139 - DNA, 2912 bp, Homo sapiens
  source 1..2912: mol_type = unassigned DNA
cttcgctttcagagcatcctcactccgcccagttcggtgccagctgcgtgggctccagcttcgatcgttttccttggaatgctccaaaactcagcagcgactaagggaattccattggaatttgccgggcgtgctctcaccccgcacggcacccgcgccgtcagtcctcggatcccatcacttcagcccgaagattgcaactttgcagagacgaagaaatagcatggcatgaaacatggctcagttctattacaaaagaaatgttaatgctccctatagagaccgcatccctctaaggatagtaagagcagaatcagaactctcgccatcagaaaaagcctacttgaatgctgtggaaaagggagattatgccagtgtcaagaaatccctagaggaagctgaaatttattttaaaatcaatattaattgcattgatcctctcggaagaactgctctcctcattgcaattgaaaatgagaacttggagctcatcgaactactcttaagctttaatgtctatgttggagatgctctattacatgctatcagaaaagaagtcgtcggagctgttgagctgttattgaaccacaaaaaacctagtggagaaaaacagtttgttgcccagcccaattgtcaacagctgctggcatctcgctggtacgatgagtttccaggctggaggagaagacactgggcagtgaagatggtgacatgtttcataataggacttctttttcctgtcttctctgtgtgctacctgatagctcccaaaagcccacttggactgttcatcaggaagccatttatcaagtttatctgccacacagcctcctatttgacttttttgttcctgctgctgcttgcctctcagcacatcgacaggtcagacttgaacaggcaaggtccaccaccaaccatcgtcgagtggatgatattaccgtgggtcctgggcttcatatggggagaaattaaacagatgtgggatggcggacttcaggactacatccatgattggtggaatctaatggactttgtaatgaactccttatatttagcaacaatctccttgaaaattgttgcatttgtaaagtacagtgcccttaatccacgagaatcatgggacatgtggcatcccactctggtggcagaggctttatttgctattgcaaacatcttcagttctctgcgtctgatctcactgtttactgcaaattctcacctgggacctctgcaaatatctctgggaagaatgctcctggacattttgaagtttctattcatatactgccttgtgttgctagcatttgcaaatggcctaaatcaattgtacttctattatgaagaaacgaaagggttaacctgcaaaggcataagatgtgaaaagcagaataatgcattttcaacgttatttgagacactgcagtccctgttttggtcaatatttgggctcatcaatttatatgtgaccaatgtcaaagcacagcatgaatttactgagtttgttggtgccaccatgtttgggacatacaatgtcatctctctggttgttctactcaacatgttaatagctatgatgaataattcttaccaactgattgctgaccatgcagatatagaatggaaatttgcacgaacaaagctttggatgagttattttgaagaaggaggtactctgcctactcccttcaatgtcatcccgagccccaagtctctctggtacctgatcaaatggatctggacacacttgtgcaagaaaaagatgagaagaaagccagaaagttttggaacaatagggaggcgagctgctgataacttgagaagacatcaccaataccaagaagttatgaggaacctggtgaagcgatacgttgctgcaatgattagagatgctaaaactgaagaaggcctgaccgaagagaactttaaggaactaaagcaagacatttctagtttccgctttgaagtcctgggattactaagaggaagcaaactttccacaatacaatctgcgaatgcctcgaaggagtcttcaaattcggcagactcagatgaaaagagtgatagcgaaggtaatagcaaggacaagaaaaagaatttcagcctttttgatttaaccaccctgattcatccgagatcagcagcaattgcctctgaaagacataacataagcaatggctctgccctggtggttcaggagccgcccagggagaagcagagaaaagtgaattttgtgaccgatatcaaaaactttgggttatttcatagacgatcaaaacaaaatgctgctgagcaaaatgcaaaccaaatcttctctgtttcagaagaagttgctcgtcaacaggctgcaggaccacttgagagaaatattcaactggaatctcgaggattagcttcacggggtgacctgagcattcccggtctcagtgaacaatgtgtgttagtagaccatagagaaaggaatacggacacactggggttacaggtaggaaagagagtgtgtccattcaagtcagagaaggtggtggtggaggacacggttcctataataccaaaggagaaacatgcaaaagaagaggactctagtatagactatgatctaaacctcccagacacagtcacccacgaagattacgtgaccacaagattgtgatacttgaaggaggaagcgtttaccatacacatacgtattttccgtagtgctctgggtgggggaaaatgtttaaattgtattagcaaatgctaacttacactttatagcgtttatcagctgtggcatattacctgtaacatgtttaaataaggcaaaggcaatcaaaaacctttttgttttgtagcctgcttttgctttcacaatttgtcttacaattgtttttgttaataaataaatgcaccttgtattcttgtactgttgc

SEQ ID NO: 32140 - DNA, 2784 bp, Homo sapiens
  source 1..2784: mol_type = unassigned DNA
cttcgctttcagagcatcctcactccgcccagttcggtgccagctgcgtgggctccagcttcgatcgttttccttggaatgctccaaaactcagcagcgactaagggaattccattggaatttgccgggcgtgctctcaccccgcacggcacccgcgccgtcagtcctcggatcccatcacttcagcccgaagattgcaactttgcagagacgaagaaatagcatggcatgaaacatggctcagttctattacaaaagaaatgttaatgctccctatagagaccgcatccctctaaggatagtaagagcagaatcagaactctcgccatcagaaaaagcctacttgaatgctgtggaaaagggagattatgccagtgtcaagaaatccctagaggaagctgaaatttattttaaaatcaatattaattgcattgatcctctcggaagaactgctctcctcattgcaattgaaaatgagaacttggagctcatcgaactactcttaagctttaatgtctatgttggagatgctctattacatgctatcagaaaagaagtcgtcggagctgttgagctgttattgaaccacaaaaaacctagtggagaaaaacaggtgcctcctatactccttgataagcagttctctgaattcactccagacattacaccaatcattttggcagcccatacaaataattatgagataataaaactcttggttcagaaaggagtctcagtgcctcgaccccacgaggtccgctgtaactgtgtggaatgcgtgtccagttcagatgtggacagcctccgtcactcacgctccagactcaacatctacaaggccttggccagtccctctctcattgcactgtcaagcgaagatccttttctcacagcctttcagttaagttgggaacttcaggaactgagcaaggtggaaaatgaattcaagtcggagtatgaagagctgtcacggcagtgcaaacaatttgctaaggacctactggatcagacgagaagttccagagaactggaaatcattcttaattaccgagatgacaatagtctcatagaagaacaaagtggaaatgatcttgcaagactaaaattggccattaagtaccgtcaaaaagagtttgttgcccagcccaattgtcaacagctgctggcatctcgctggtacgatgagtttccaggctggaggagaagacactgggcagtgaagatggtgacatgtttcataataggacttctttttcctgtcttctctgtgtgctacctgatagctcccaaaagcccacttggactgttcatcaggaagccatttatcaagtttatctgccacacagcctcctatttgacttttttgttcctgctgctgcttgcctctcagcacatcgacaggtcagacttgaacaggcaaggtccaccaccaaccatcgtcgagtggatgatattaccgtgggtcctgggcttcatatggggagaaattaaacagatgtgggatggcggacttcaggactacatccatgattggtggaatctaatggactttgtaatgaactccttatatttagcaacaatctccttgaaaattgttgcatttgtaaagtacagtgcccttaatccacgagaatcatgggacatgtggcatcccactctggtggcagaggctttatttgctattgcaaacatcttcagttctctgcgtctgatctcactgtttactgcaaattctcacctgggacctctgcaaatatctctgggaagaatgctcctggacattttgaagtttctattcatatactgccttgtgttgctagcatttgcaaatggcctaaatcaattgtacttctattatgaagaaacgaaagggttaacctgcaaaggcataagatgtgaaaagcagaataatgcattttcaacgttatttgagacactgcagtccctgttttggtcaatatttgggctcatcaatttatatgtgaccaatgtcaaagcacagcatgaatttactgagtttgttggtgccaccatgtttgggacatacaatgtcatctctctggttgttctactcaacatgttaatagctatgatgaataattcttaccaactgattgctgaccatgcagatatagaatggaaatttgcacgaacaaagctttggatgagttattttgaagaaggaggtactctgcctactcccttcaatgtcatcccgagccccaagtctctctggtacctgatcaaatggatctggacacacttgtgcaagaaaaagatgagaagaaagccagaaagttttggaacaatagggaggcgagctgctgataacttgagaagacatcaccaataccaagaagttatgaggaacctggtgaagcgatacgttgctgcaatgattagagatgctaaaactgaagaagttgctcgtcaacaggctgcaggaccacttgagagaaatattcaactggaatctcgaggattagcttcacggggtgacctgagcattcccggtctcagtgaacaatgtgtgttagtagaccatagagaaaggaatacggacacactggggttacaggtaggaaagagagtgtgtccattcaagtcagagaaggtggtggtggaggacacggttcctataataccaaaggagaaacatgcaaaagaagaggactctagtatagactatgatctaaacctcccagacacagtcacccacgaagattacgtgaccacaagattgtgatacttgaaggaggaagcgtttaccatacacatacgtat

SEQ ID NO: 32141 - DNA, 2955 bp, Homo sapiens
  source 1..2955: mol_type = unassigned DNA
cttcgctttcagagcatcctcactccgcccagttcggtgccagctgcgtgggctccagcttcgatcgttttccttggaatgctccaaaactcagcagcgactaagggaattccattggaatttgccgggcgtgctctcaccccgcacggcacccgcgccgtcagtcctcggatcccatcacttcagcccgaagattgcaactttgcagagacgaagaaatagcatggcatgaaacatggctcagttctattacaaaagaaatgttaatgctccctatagagaccgcatccctctaaggatagtaagagcagaatcagaactctcgccatcagaaaaagcctacttgaatgctgtggaaaagggagattatgccagtgtcaagaaatccctagaggaagctgaaatttattttaaaatcaatattaattgcattgatcctctcggaagaactgctctcctcattgcaattgaaaatgagaacttggagctcatcgaactactcttaagctttaatgtctatgttggagatgctctattacatgctatcagaaaagaagtcgtcggagctgttgagctgttattgaaccacaaaaaacctagtggagaaaaacaggtgcctcctatactccttgataagcagttctctgaattcactccagacattacaccaatcattttggcagcccatacaaataattatgagataataaaactcttggttcagaaaggagtctcagtgcctcgaccccacgaggtccgctgtaactgtgtggaatgcgtgtccagttcagatgtggacagcctccgtcactcacgctccagactcaacatctacaaggccttggccagtccctctctcattgcactgtcaagcgaagatccttttctcacagcctttcagttaagttgggaacttcaggaactgagcaaggtggaaaatgaattcaagtcggagtatgaagagctgtcacggcagtgcaaacaatttgctaaggacctactggatcagacgagaagttccagagaactggaaatcattcttaattaccgagatgacaatagtctcatagaagaacaaagtggaaatgatcttgcaagactaaaattggccattaagtaccgtcaaaaagagtttgttgcccagcccaattgtcaacagctgctggcatctcgctggtacgatgagtttccaggctggaggagaagacactgggcagtgaagatggtgacatgtttcataataggacttctttttcctgtcttctctgtgtgctacctgatagctcccaaaagcccacttggactgttcatcaggaagccatttatcaagtttatctgccacacagcctcctatttgacttttttgttcctgctgctgcttgcctctcagcacatcgacaggtcagacttgaacaggcaaggtccaccaccaaccatcgtcgagtggatgatattaccgtgggtcctgggcttcatatggggagaaattaaacagatgtgggatggcggacttcaggactacatccatgattggtggaatctaatggactttgtaatgaactccttatatttagcaacaatctccttgaaaattgttgcatttgtaaagtacagtgcccttaatccacgagaatcatgggacatgtggcatcccactctggtggcagaggctttatttgctattgcaaacatcttcagttctctgcgtctgatctcactgtttactgcaaattctcacctgggacctctgcaaatatctctgggaagaatgctcctggacattttgaagtttctattcatatactgccttgtgttgctagcatttgcaaatggcctaaatcaattgtacttctattatgaagaaacgaaagggttaacctgcaaaggcataagatgtgaaaagcagaataatgcattttcaacgttatttgagacactgcagtccctgttttggtcaatatttgggctcatcaatttatatgtgaccaatgtcaaagcacagcatgaatttactgagtttgttggtgccaccatgtttgggacatacaatgtcatctctctggttgttctactcaacatgttaatagctatgatgaataattcttaccaactgattgctgaccatgcagatatagaatggaaatttgcacgaacaaagctttggatgagttattttgaagaaggaggtactctgcctactcccttcaatgtcatcccgagccccaagtctctctggtacctgatcaaatggatctggacacacttgtgcaagaaaaagatgagaagaaagccagaaagttttggaacaatagggaggcgagctgctgataacttgagaagacatcaccaataccaagaagttatgaggaacctggtgaagcgatacgttgctgcaatgattagagatgctaaaactgaagaaggcctgaccgaagagaactttaaggaactaaagcaagacatttctagtttccgctttgaagtcctgggattactaagaggaagcaaactttccacaatacaatctgcgaatgcctcgaaggagtcttcaaattcggcagactcagatgaaaagagtgatagcgaagaagaagttgctcgtcaacaggctgcaggaccacttgagagaaatattcaactggaatctcgaggattagcttcacggggtgacctgagcattcccggtctcagtgaacaatgtgtgttagtagaccatagagaaaggaatacggacacactggggttacaggtaggaaagagagtgtgtccattcaagtcagagaaggtggtggtggaggacacggttcctataataccaaaggagaaacatgcaaaagaagaggactctagtatagactatgatctaaacctcccagacacagtcacccacgaagattacgtgaccacaagattgtgatacttgaaggaggaagcgtttaccatacacatacgtat

SEQ ID NO: 32142 - DNA, 2760 bp, Homo sapiens
  source 1..2760: mol_type = unassigned DNA
cttcgctttcagagcatcctcactccgcccagttcggtgccagctgcgtgggctccagcttcgatcgttttccttggaatgctccaaaactcagcagcgactaagggaattccattggaatttgccgggcgtgctctcaccccgcacggcacccgcgccgtcagtcctcggatcccatcacttcagcccgaagattgcaactttgcagagacgaagaaatagcatggcatgaaacatggctcagttctattacaaaagaaatgttaatgctccctatagagaccgcatccctctaaggatagtaagagcagaatcagaactctcgccatcagaaaaagcctacttgaatgctgtggaaaagggagattatgccagtgtcaagaaatccctagaggaagctgaaatttattttaaaatcaatattaattgcattgatcctctcggaagaactgctctcctcattgcaattgaaaatgagaacttggagctcatcgaactactcttaagctttaatgtctatgttggagatgctctattacatgctatcagaaaagaagtcgtcggagctgttgagctgttattgaaccacaaaaaacctagtggagaaaaacaggtgcctcctatactccttgataagcagttctctgaattcactccagacattacaccaatcattttggcagcccatacaaataattatgagataataaaactcttggttcagaaaggagtctcagtgcctcgaccccacgaggtccgctgtaactgtgtggaatgcgtgtccagttcagatgtggacagcctccgtcactcacgctccagactcaacatctacaaggccttggccagtccctctctcattgcactgtcaagcgaagatccttttctcacagcctttcagttaagttgggaacttcaggaactgagcaaggtggaaaatgaattcaagtcggagtatgaagagctgtcacggcagtgcaaacaatttgctaaggacctactggatcagacgagaagttccagagaactggaaatcattcttaattaccgagatgacaatagtctcatagaagaacaaagtggaaatgatcttgcaagactaaaattggccattaagtaccgtcaaaaagagtttgttgcccagcccaattgtcaacagctgctggcatctcgctggtacgatgagtttccaggctggaggagaagacactgggcagtgaagatggtgacatgtttcataataggacttctttttcctgtcttctctgtgtgctacctgatagctcccaaaagcccacttggactgttcatcaggaagccatttatcaagtttatctgccacacagcctcctatttgacttttttgttcctgctgctgcttgcctctcagcacatcgacaggtcagacttgaacaggcaaggtccaccaccaaccatcgtcgagtggatgatattaccgtgggtcctgggcttcatatggggagaaattaaacagatgtgggatggcggacttcaggactacatccatgattggtggaatctaatggactttgtaatgaactccttatatttagcaacaatctccttgaaaattgttgcatttgtaaagtacagtgcccttaatccacgagaatcatgggacatgtggcatcccactctggtggcagaggctttatttgctattgcaaacatcttcagttctctgcgtctgatctcactgtttactgcaaattctcacctgggacctctgcaaatatctctgggaagaatgctcctggacattttgaagtttctattcatatactgccttgtgttgctagcatttgcaaatggcctaaatcaattgtacttctattatgaagaaacgaaagggttaacctgcaaaggcataagatgtgaaaagcagaataatgcattttcaacgttatttgagacactgcagtccctgttttggtcaatatttgggctcatcaatttatatgtgaccaatgtcaaagcacagcatgaatttactgagtttgttggtgccaccatgtttgggacatacaatgtcatctctctggttgttctactcaacatgttaatagctatgatgaataattcttaccaactgattgctaggcgagctgctgataacttgagaagacatcaccaataccaagaagttatgaggaacctggtgaagcgatacgttgctgcaatgattagagatgctaaaactgaagaaggcctgaccgaagagaactttaaggaactaaagcaagacatttctagtttccgctttgaagtcctgggattactaagaggaagcaaactttccacaatacaatctgcgaatgcctcgaaggagtcttcaaattcggcagactcagatgaaaagagtgatagcgaagaagaagttgctcgtcaacaggctgcaggaccacttgagagaaatattcaactggaatctcgaggattagcttcacggggtgacctgagcattcccggtctcagtgaacaatgtgtgttagtagaccatagagaaaggaatacggacacactggggttacaggtaggaaagagagtgtgtccattcaagtcagagaaggtggtggtggaggacacggttcctataataccaaaggagaaacatgcaaaagaagaggactctagtatagactatgatctaaacctcccagacacagtcacccacgaagattacgtgaccacaagattgtgatacttgaaggaggaagcgtttaccatacacatacgtat

SEQ ID NO: 32143 - DNA, 2475 bp, Homo sapiens
  source 1..2475: mol_type = unassigned DNA
atggctcagttctattacaaaagaaatgttaatgctccctatagagaccgcatccctctaaggatagtaagagcagaatcagaactctcgccatcagaaaaagcctacttgaatgctgtggaaaagggagattatgccagtgtcaagaaatccctagaggaagctgaaatttattttaaaatcaatattaattgcattgatcctctcggaagaactgctctcctcattgcaattgaaaatgagaacttggagctcatcgaactactcttaagctttaatgtctatgttggagatgctctattacatgctatcagaaaagaagtcgtcggagctgttgagctgttattgaaccacaaaaaacctagtggagaaaaacagtttgttgcccagcccaattgtcaacagctgctggcatctcgctggtacgatgagtttccaggctggaggagaagacactgggcagtgaagatggtgacatgtttcataataggacttctttttcctgtcttctctgtgtgctacctgatagctcccaaaagcccacttggactgttcatcaggaagccatttatcaagtttatctgccacacagcctcctatttgacttttttgttcctgctgctgcttgcctctcagcacatcgacaggtcagacttgaacaggcaaggtccaccaccaaccatcgtcgagtggatgatattaccgtgggtcctgggcttcatatggggagaaattaaacagatgtgggatggcggacttcaggactacatccatgattggtggaatctaatggactttgtaatgaactccttatatttagcaacaatctccttgaaaattgttgcatttgtaaagtacagtgcccttaatccacgagaatcatgggacatgtggcatcccactctggtggcagaggctttatttgctattgcaaacatcttcagttctctgcgtctgatctcactgtttactgcaaattctcacctgggacctctgcaaatatctctgggaagaatgctcctggacattttgaagtttctattcatatactgccttgtgttgctagcatttgcaaatggcctaaatcaattgtacttctattatgaagaaacgaaagggttaacctgcaaaggcataagatgtgaaaagcagaataatgcattttcaacgttatttgagacactgcagtccctgttttggtcaatatttgggctcatcaatttatatgtgaccaatgtcaaagcacagcatgaatttactgagtttgttggtgccaccatgtttgggacatacaatgtcatctctctggttgttctactcaacatgttaatagctatgatgaataattcttaccaactgattgctgaccatgcagatatagaatggaaatttgcacgaacaaagctttggatgagttattttgaagaaggaggtactctgcctactcccttcaatgtcatcccgagccccaagtctctctggtacctgatcaaatggatctggacacacttgtgcaagaaaaagatgagaagaaagccagaaagttttggaacaatagggaggcgagctgctgataacttgagaagacatcaccaataccaagaagttatgaggaacctggtgaagcgatacgttgctgcaatgattagagatgctaaaactgaagaaggcctgaccgaagagaactttaaggaactaaagcaagacatttctagtttccgctttgaagtcctgggattactaagaggaagcaaactttccacaatacaatctgcgaatgcctcgaaggagtcttcaaattcggcagactcagatgaaaagagtgatagcgaaggtaatagcaaggacaagaaaaagaatttcagcctttttgatttaaccaccctgattcatccgagatcagcagcaattgcctctgaaagacataacataagcaatggctctgccctggtggttcaggagccgcccagggagaagcagagaaaagtgaattttgtgaccgatatcaaaaactttgggttatttcatagacgatcaaaacaaaatgctgctgagcaaaatgcaaaccaaatcttctctgtttcagaagaagttgctcgtcaacaggctgcaggaccacttgagagaaatattcaactggaatctcgaggattagcttcacggggtgacctgagcattcccggtctcagtgaacaatgtgtgttagtagaccatagagaaaggaatacggacacactggggttacaggtaggaaagagagtgtgtccattcaagtcagagaaggtggtggtggaggacacggttcctataataccaaaggagaaacatgcaaaagaagaggactctagtatagactatgatctaaacctcccagacacagtcacccacgaagattacgtgaccacaagattgtgatacttgaaggaggaagcgtttaccatacacatacgtattttccgtagtgctctgggtggg

SEQ ID NO: 32144 - DNA, 3446 bp, Homo sapiens
  source 1..3446: mol_type = unassigned DNA
cttcgctttcagagcatcctcactccgcccagttcggtgccagctgcgtgggctccagcttcgatcgttttccttggaatgctccaaaactcagcagcgactaagggaattccattggaatttgccgggcgtgctctcaccccgcacggcacccgcgccgtcagtcctcggatcccatcacttcagcccgaagattgcaactttgcagagacgaagaaatagcatggcatgaaacatggctcagttctattacaaaagaaatgttaatgctccctatagagaccgcatccctctaaggatagtaagagcagaatcagaactctcgccatcagaaaaagcctacttgaatgctgtggaaaagggagattatgccagtgtcaagaaatccctagaggaagctgaaatttattttaaaatcaatattaattgcattgatcctctcggaagaactgctctcctcattgcaattgaaaatgagaacttggagctcatcgaactactcttaagctttaatgtctatgttggagatgctctattacatgctatcagaaaagaagtcgtcggagctgttgagctgttattgaaccacaaaaaacctagtggagaaaaacaggtgcctcctatactccttgataagcagttctctgaattcactccagacattacaccaatcattttggcagcccatacaaataattatgagataataaaactcttggttcagaaaggagtctcagtgcctcgaccccacgaggtccgctgtaactgtgtggaatgcgtgtccagttcagatgtggacagcctccgtcactcacgctccagactcaacatctacaaggccttggccagtccctctctcattgcactgtcaagcgaagatccttttctcacagcctttcagttaagttgggaacttcaggaactgagcaaggtggaaaatgaattcaagtcggagtatgaagagctgtcacggcagtgcaaacaatttgctaaggacctactggatcagacgagaagttccagagaactggaaatcattcttaattaccgagatgacaatagtctcatagaagaacaaagtggaaatgatcttgcaagactaaaattggccattaagtaccgtcaaaaagagtttgttgcccagcccaattgtcaacagctgctggcatctcgctggtacgatgagtttccaggctggaggagaagacactgggcagtgaagatggtgacatgtttcataataggacttctttttcctgtcttctctgtgtgctacctgatagctcccaaaagcccacttggactgttcatcaggaagccatttatcaagtttatctgccacacagcctcctatttgacttttttgttcctgctgctgcttgcctctcagcacatcgacaggtcagacttgaacaggcaaggtccaccaccaaccatcgtcgagtggatgatattaccgtgggtcctgggcttcatatggggagaaattaaacagatgtgggatggcggacttcaggactacatccatgattggtggaatctaatggactttgtaatgaactccttatatttagcaacaatctccttgaaaattgttgcatttgtaaagtacagtgcccttaatccacgagaatcatgggacatgtggcatcccactctggtggcagaggctttatttgctattgcaaacatcttcagttctctgcgtctgatctcactgtttactgcaaattctcacctgggacctctgcaaatatctctgggaagaatgctcctggacattttgaagtttctattcatatactgccttgtgttgctagcatttgcaaatggcctaaatcaattgtacttctattatgaagaaacgaaagggttaacctgcaaaggcataagatgtgaaaagcagaataatgcattttcaacgttatttgagacactgcagtccctgttttggtcaatatttgggctcatcaatttatatgtgaccaatgtcaaagcacagcatgaatttactgagtttgttggtgccaccatgtttgggacatacaatgtcatctctctggttgttctactcaacatgttaatagctatgatgaataattcttaccaactgattgctgaccatgcagatatagaatggaaatttgcacgaacaaagctttggatgagttattttgaagaaggaggtactctgcctactcccttcaatgtcatcccgagccccaagtctctctggtacctgatcaaatggatctggacacacttgtgcaagaaaaagatgagaagaaagccagaaagttttggaacaataggggtaagaacacagcataggcgagctgctgataacttgagaagacatcaccaataccaagaagttatgaggaacctggtgaagcgatacgttgctgcaatgattagagatgctaaaactgaagaaggcctgaccgaagagaactttaaggaactaaagcaagacatttctagtttccgctttgaagtcctgggattactaagaggaagcaaactttccacaatacaatctgcgaatgcctcgaaggagtcttcaaattcggcagactcagatgaaaagagtgatagcgaaggtaatagcaaggacaagaaaaagaatttcagcctttttgatttaaccaccctgattcatccgagatcagcagcaattgcctctgaaagacataacataagcaatggctctgccctggtggttcaggagccgcccagggagaagcagagaaaagtgaattttgtgaccgatatcaaaaactttgggttatttcatagacgatcaaaacaaaatgctgctgagcaaaatgcaaaccaaatcttctctgtttcagaagaagttgctcgtcaacaggctgcaggaccacttgagagaaatattcaactggaatctcgaggattagcttcacggggtgacctgagcattcccggtctcagtgaacaatgtgtgttagtagaccatagagaaaggaatacggacacactggggttacaggtaggaaagagagtgtgtccattcaagtcagagaaggtggtggtggaggacacggttcctataataccaaaggagaaacatgcaaaagaagaggactctagtatagactatgatctaaacctcccagacacagtcacccacgaagattacgtgaccacaagattgtgatacttgaaggaggaagcgtttaccatacacatacgtattttccgtagtgctctgggtgggggaaaatgtttaaattgtattagcaaatgctaacttacactttatagcgtttatcagctgtggcatattacctgtaacatgtttaaataaggcaaaggcaatcaaaaacctttttgttttgtagcctgcttttgctttcacaatttgtcttacaattgtttttgttaataaataaatgcaccttgtattcttgtactgttgc

SEQ ID NO: 32145 - DNA, 4059 bp, Homo sapiens
  source 1..4059: mol_type = unassigned DNA
agtcgcccagagaagcgggagtgggagaagctttgagagttgcaggggactacttttttccggtcgggcggcgggcctcatgggtgcttgtttaccgggctgggagcagggcattcaaaagctgggtgtcggagcgcactgaagtccaacacgcctgcagagaccgccctaagcctggaggtgtgtctggcttgcatccagaaccacagggtggattctcgccaccgacttggctggatgacggctggctggtggtgagctcccctgcccactggctgacctcaagcagttggccccggtaggtggaggctattcgagggggacaagctggggacgcagcgtcagctcctgccagcgcgcgggtctcctccacctccaagcagtgtggtgcgtgggacgcgcatcttcccggactatccctttccagcgcggtctgtgcggaccccgagcccggcagccaccagggacggagggcggggtgcctttctctgggctcatccgctgtcagccgtgggaactcttaactttatccagagggatctgtgcaggcgggggtgggagaggttctcctcccctggcggttacctccccctcccgggccgcccctcccccgcctcccatggcttcgctttcagagcatcctcactccgcccagttcggtgccagctgcgtgggctccagcttcgatcgttttccttggaatgctccaaaactcagcagcgactaagggaattccattggaatttgccgggcgtgctctcaccccgcacggcacccgcgccgtcagtcctcggatcccatcacttcagcccgaagattgcaactttgcagagacgaagaaatagcatggcatgaaacatggctcagttctattacaaaagaaatgttaatgctccctatagagaccgcatccctctaaggatagtaagagcagaatcagaactctcgccatcagaaaaagcctacttgaatgctgtggaaaagggagattatgccagtgtcaagaaatccctagaggaagctgaaatttattttaaaatcaatattaattgcattgatcctctcggaagaactgctctcctcattgcaattgaaaatgagaacttggagctcatcgaactactcttaagctttaatgtctatgttggagatgctctattacatgctatcagaaaagaagtcgtcggagctgttgagctgttattgaaccacaaaaaacctagtggagaaaaacaggtgcctcctatactccttgataagcagttctctgaattcactccagacattacaccaatcattttggcagcccatacaaataattatgagataataaaactcttggttcagaaaggagtctcagtgcctcgaccccacgaggtccgctgtaactgtgtggaatgcgtgtccagttcagatgtggacagcctccgtcactcacgctccagactcaacatctacaaggccttggccagtccctctctcattgcactgtcaagcgaagatccttttctcacagcctttcagttaagttgggaacttcaggaactgagcaaggtggaaaatgaattcaagtcggagtatgaagagctgtcacggcagtgcaaacaatttgctaaggacctactggatcagacgagaagttccagagaactggaaatcattcttaattaccgagatgacaatagtctcatagaagaacaaagtggaaatgatcttgcaagactaaaattggccattaagtaccgtcaaaaagagtttgttgcccagcccaattgtcaacagctgctggcatctcgctggtacgatgagtttccaggctggaggagaagacactgggcagtgaagatggtgacatgtttcataataggacttctttttcctgtcttctctgtgtgctacctgatagctcccaaaagcccacttggactgttcatcaggaagccatttatcaagtttatctgccacacagcctcctatttgacttttttgttcctgctgctgcttgcctctcagcacatcgacaggtcagacttgaacaggcaaggtccaccaccaaccatcgtcgagtggatgatattaccgtgggtcctgggcttcatatggggagaaattaaacagatgtgggatggcggacttcaggactacatccatgattggtggaatctaatggactttgtaatgaactccttatatttagcaacaatctccttgaaaattgttgcatttgtaaagtacagtgcccttaatccacgagaatcatgggacatgtggcatcccactctggtggcagaggctttatttgctattgcaaacatcttcagttctctgcgtctgatctcactgtttactgcaaattctcacctgggacctctgcaaatatctctgggaagaatgctcctggacattttgaagtttctattcatatactgccttgtgttgctagcatttgcaaatggcctaaatcaattgtacttctattatgaagaaacgaaagggttaacctgcaaaggcataagatgtgaaaagcagaataatgcattttcaacgttatttgagacactgcagtccctgttttggtcaatatttgggctcatcaatttatatgtgaccaatgtcaaagcacagcatgaatttactgagtttgttggtgccaccatgtttgggacatacaatgtcatctctctggttgttctactcaacatgttaatagctatgatgaataattcttaccaactgattgctgaccatgcagatatagaatggaaatttgcacgaacaaagctttggatgagttattttgaagaaggaggtactctgcctactcccttcaatgtcatcccgagccccaagtctctctggtacctgatcaaatggatctggacacacttgtgcaagaaaaagatgagaagaaagccagaaagttttggaacaatagggaggcgagctgctgataacttgagaagacatcaccaataccaagaagttatgaggaacctggtgaagcgatacgttgctgcaatgattagagatgctaaaactgaagaaggcctgaccgaagagaactttaaggaactaaagcaagacatttctagtttccgctttgaagtcctgggattactaagaggaagcaaactttccacaatacaatctgcgaatgcctcgaaggagtcttcaaattcggcagactcagatgaaaagagtgatagcgaaggtaatagcaaggacaagaaaaagaatttcagcctttttgatttaaccaccctgattcatccgagatcagcagcaattgcctctgaaagacataacataagcaatggctctgccctggtggttcaggagccgcccagggagaagcagagaaaagtgaattttgtgaccgatatcaaaaactttgggttatttcatagacgatcaaaacaaaatgctgctgagcaaaatgcaaaccaaatcttctctgtttcagaagaagttgctcgtcaacaggctgcaggaccacttgagagaaatattcaactggaatctcgaggattagcttcacggggtgacctgagcattcccggtctcagtgaacaatgtgtgttagtagaccatagagaaaggaatacggacacactggggttacaggtaggaaagagagtgtgtccattcaagtcagagaaggtggtggtggaggacacggttcctataataccaaaggagaaacatgcaaaagaagaggactctagtatagactatgatctaaacctcccagacacagtcacccacgaagattacgtgaccacaagattgtgatacttgaaggaggaagcgtttaccatacacatacgtattttccgtagtgctctgggtgggggaaaatgtttaaattgtattagcaaatgctaacttacactttatagcgtttatcagctgtggcatattacctgtaacatgtttaaataaggcaaaggcaatcaaaaacctttttgttttgtagcctgcttttgctttcacaatttgtcttacaattgtttttgttaataaataaatgcaccttgtattcttgtactgttgcaataa

SEQ ID NO: 32146 - DNA, 2709 bp, Homo sapiens
  source 1..2709: mol_type = unassigned DNA
tgctccaaaactcagcagcgactaagggaattccattggaatttgccgggcgtgctctcaccccgcacggcacccgcgccgtcagtcctcggatcccatcacttcagcccgaagattgcaactttgcagagacgaagaaatagcatggcatgaaacatggctcagttctattacaaaagaaatgttaatgctccctatagagaccgcatccctctaaggatagtaagagcagaatcagaactctcgccatcagaaaaagcctacttgaatgctgtggaaaagggagattatgccagtgtcaagaaatccctagaggaagctgaaatttattttaaaatcaatattaattgcattgatcctctcggaagaactgctctcctcattgcaattgaaaatgagaacttggagctcatcgaactactcttaagctttaatgtctatgttggagatgctctattacatgctatcagaaaagaagtcgtcggagctgttgagctgttattgaaccacaaaaaacctagtggagaaaaacaggtgcctcctatactccttgataagcagttctctgaattcactccagacattacaccaatcattttggcagcccatacaaataattatgagataataaaactcttggttcagaaaggagtctcagtgcctcgaccccacgaggtccgctgtaactgtgtggaatgcgtgtccagttcagatgtggacagcctccgtcactcacgctccagactcaacatctacaaggccttggccagtccctctctcattgcactgtcaagcgaagatccttttctcacagcctttcagttaagttgggaacttcaggaactgagcaaggtggaaaatgaattcaagtcggagtatgaagagctgtcacggcagtgcaaacaatttgctaaggacctactggatcagacgagaagttccagagaactggaaatcattcttaattaccgagatgacaatagtctcatagaagaacaaagtggaaatgatcttgcaagactaaaattggccattaagtaccgtcaaaaagagtttgttgcccagcccaattgtcaacagctgctggcatctcgctggtacgatgagtttccaggctggaggagaagacactgggcagtgaagatggtgacatgtttcataataggacttctttttcctgtcttctctgtgtgctacctgatagctcccaaaagcccacttggactgttcatcaggaagccatttatcaagtttatctgccacacagcctcctatttgacttttttgttcctgctgctgcttgcctctcagcacatcgacaggtcagacttgaacaggcaaggtccaccaccaaccatcgtcgagtggatgatattaccgtgggtcctgggcttcatatggggagaaattaaacagatgtgggatggcggacttcaggactacatccatgattggtggaatctaatggactttgtaatgaactccttatatttagcaacaatctccttgaaaattgttgcatttgtaaaggttatttgagacactgcagtccctgttttggtcaatatttgggctcatcaatttatatgtgaccaatgtcaaagcacagcatgaatttactgagtttgttggtgccaccatgtttgggacatacaatgtcatctctctggttgttctactcaacatgttaatagctatgatgaataattcttaccaactgattgctgaccatgcagatatagaatggaaatttgcacgaacaaagctttggatgagttattttgaagaaggaggtactctgcctactcccttcaatgtcatcccgagccccaagtctctctggtacctgatcaaatggatctggacacacttgtgcaagaaaaagatgagaagaaagccagaaagttttggaacaatagggaggcgagctgctgataacttgagaagacatcaccaataccaagtaagttgtccttgtactatgtcttgaaattttcactaaaataaaatgcagtccccccttcagaactgactcaggaggaaatttatttactcattgagtatcaatactcttgttctaaaatgcctcaggaagttatgaggaacctggtgaagcgatacgttgctgcaatgattagagatgctaaaactgaagaaggcctgaccgaagagaactttaaggaactaaagcaagacatttctagtttccgctttgaagtcctgggattactaagaggaagcaaactttccacaatacaatctgcgaatgcctcgaaggagtcttcaaattcggcagactcagatgaaaagagtgatagcgaagaagttgctcgtcaacaggctgcaggaccacttgagagaaatattcaactggaatctcgaggattagcttcacggggtgacctgagcattcccggtctcagtgaacaatgtgtgttagtagaccatagagaaaggaatacggacacactggggttacaggtaggaaagagagtgtgtccattcaagtcagagaaggtggtggtggaggacacggttcctataataccaaaggagaaacatgcaaaagaagaggactctagtatagactatgatctaaacctcccagacacagtcacccacgaagattacgtgaccacaagattgtgatacttgaaggaggaagcgtttaccatacacatacgtattttccgtagtgctctgggtggg

SEQ ID NO: 32147 - DNA, 3369 bp, Homo sapiens
  source 1..3369: mol_type = unassigned DNA
agtcgcccagagaagcgggagtgggagaagctttgagagttgcaggggactacttttttccggtcgggcggcgggcctcatgggtgcttgtttaccgggctgggagcagggcattcaaaagctgggtgtcggagcgcactgaagtccaacacgcctgcagagaccgccctaagcctggaggtgtgtctggcttgcatccagaaccacagggtggattctcgccaccgacttggctggatgacggctggctggtggtgagctcccctgcccactggctgacctcaagcagttggccccggtaggtggaggctattcgagggggacaagctggggacgcagcgtcagctcctgccagcgcgcgggtctcctccacctccaagcagtgtggtgcgtgggacgcgcatcttcccggactatccctttccagcgcggtctgtgcggaccccgagcccggcagccaccagggacggagggcggggtgcctttctctgggctcatccgctgtcagccgtgggaactcttaactttatccagagggatctgtgcaggcgggggtgggagaggttctcctcccctggcggttacctccccctcccgggccgcccctcccccgcctcccatggcttcgctttcagagcatcctcactccgcccagttcggtgccagctgcgtgggctccagcttcgatcgttttccttggaatgctccaaaactcagcagcgactaagggaattccattggaatttgccgggcgtgctctcaccccgcacggcacccgcgccgtcagtcctcggatcccatcacttcagcccgaagattgcaactttgcagagacgaagaaatagcatggcatgaaacatggctcagttctattacaaaagaaatgttaatgctccctatagagaccgcatccctctaaggatagtaagagcagaatcagaactctcgccatcagaaaaagcctacttgaatgctgtggaaaagggagattatgccagtgtcaagaaatccctagaggaagctgaaatttattttaaaatcaatattaattgcattgatcctctcggaagaactgctctcctcattgcaattgaaaatgagaacttggagctcatcgaactactcttaagctttaatgtctatgttggagatgctctattacatgctatcagaaaagaagtcgtcggagctgttgagctgttattgaaccacaaaaaacctagtggagaaaaacaggtgcctcctatactccttgataagcagttctctgaattcactccagacattacaccaatcattttggcagcccatacaaataattatgagataataaaactcttggttcagaaaggagtctcagtgcctcgaccccacgaggtccgctgtaactgtgtggaatgcgtgtccagttcagatgtggacagcctccgtcactcacgctccagactcaacatctacaaggccttggccagtccctctctcattgcactgtcaagcgaagatccttttctcacagcctttcagttaagttgggaacttcaggaactgagcaaggtggaaaatgaattcaagtcggagtatgaagagctgtcacggcagtgcaaacaatttgctaaggacctactggatcagacgagaagttccagagaactggaaatcattcttaattaccgagatgacaatagtctcatagaagaacaaagtggaaatgatcttgcaagactaaaattggccattaagtaccgtcaaaaagagtttgttgcccagcccaattgtcaacagctgctggcatctcgctggtacgatgagtttccaggctggaggagaagacactgggcagtgaagatggtgacatgtttcataataggacttctttttcctgtcttctctgtgtgctacctgatagctcccaaaagcccacttggactgttcatcaggaagccatttatcaagtttatctgccacacagcctcctatttgacttttttgttcctgctgctgcttgcctctcagcacatcgacaggtcagacttgaacaggcaaggtccaccaccaaccatcgtcgagtggatgatattaccgtgggtcctgggcttcatatggggagaaattaaacagatgtgggatggcggacttcaggactacatccatgattggtggaatctaatggactttgtaatgaactccttatatttagcaacaatctccttgaaaattgttgcatttgtaaagtacagtgcccttaatccacgagaatcatgggacatgtggcatcccactctggtggcagaggctttatttgctattgcaaacatcttcagttctctgcgtctgatctcactgtttactgcaaattctcacctgggacctctgcaaatatctctgggaagaatgctcctggacattttgaagtttctattcatatactgccttgtgttgctagcatttgcaaatggcctaaatcaattgtacttctattatgaagaaacgaaagggttaacctgcaaaggcataagatgtgaaaagcagaataatgcattttcaacgttatttgagacactgcagtccctgttttggtcaatatttgggctcatcaatttatatgtgaccaatgtcaaagcacagcatgaatttactgagtttgttggtgccaccatgtttgggacatacaatgtcatctctctggttgttctactcaacatgttaatagctatgatgaataattcttaccaactgattgctgaccatgcagatatagaatggaaatttgcacgaacaaagctttggatgagttattttgaagaaggaggtactctgcctactcccttcaatgtcatcccgagccccaagtctctctggtacctgatcaaatggatctggacacacttgtgcaagaaaaagatgagaagaaagccagaaagttttggaacaatagggaggcgagctgctgataacttgagaagacatcaccaataccaagaagttatgaggaacctggtgaagcgatacgttgctgcaatgattagagatgctaaaactgaagaagttgctcgtcaacaggctgcaggaccacttgagagaaatattcaactggaatctcgaggattagcttcacggggtgacctgagcattcccggtctcagtgaacaatgtgtgttagtagaccatagagaaaggaatacggacacactggggttacaggtaggaaagagagtgtgtccattcaagtcagagaaggtggtggtggaggacacggttcctataataccaaaggagaaacatgcaaaagaagaggactctagtatagactatgatctaaacctcccagacacagtcacccacgaagattacgtgaccacaagattgtga

SEQ ID NO: 32148 - DNA, 3226 bp, Homo sapiens
  source 1..3226: mol_type = unassigned DNA
actgggggcgctgcggcgacccctccgccgccccgtagaaatctccgcggccccgaggccgcttgcttcctgtttgtccgacgaggagacatggcggcggcgccggtagcggctgggtctggagccggccgagggagacggtcggcagccacagtggcggcttggggcggatggggcggccggccgcggcctggtaacattctgctgcagctgcggcagggccagctgaccggccggggcctggtccgggcggtgcagttcactgagacttttttgacggagagggacaaacaatccaagtggagtggaattcctcagctgctcctcaagctgcacaccaccagccacctccacagtgactttgttgagtgtcaaaacatcctcaaggaaatttctcctcttctctccatggaggctatggcatttgttactgaagagaggaaacttacccaagaaaccacttatccaaatacttacatttttgacttgtttggaggtgttgatcttcttgtagaaattcttatgaggcctacgatctctatccggggacagaaactgaaaataagtgatgaaatgtccaaggactgcttgagtatcctgtataatacctgtgtctgtacagagggagttacaaagcgtttggcagaaaagaatgactttgtgatcttcctgtttacattgatgacaagtaagaagacattcttacaaacagcaaccctcattgaagatattttgggtgttaaaaaggaaatgatccgactagatgaagtccccaatctgagttccttagtatccaatttcgatcagcagcagctcgctaatttctgccggattctggctgtcaccatttcagagatggatacagggaatgatgacaagcacacgcttcttgccaaaaatgctcaacagaagaagagcttgagtttggggccttctgcagctgaaatcaatcaagcggcccttctcagcattcctggctttgttgagcggctttgcaaactggcgactcgaaaggtgtcagagtcaacgggcacagccagcttccttcaggagttggaagagtggtacacatggctagacaatgctttggtgctagatgccctgatgcgagtggccaatgaggagtcagagcacaatcaagcctccattgtgttccctcctccaggggcttctgaggagaatggcctgcctcacacgtcagccagaacccagctgccccagtcaatgaagattatgcatgagatcatgtacaaactggaagtgctctatgtcctctgcgtgctgctgatggggcgtcagcgaaaccaggttcacagaatgattgcagagttcaagctgatccctggacttaataatttgtttgacaaactgatttggaggaagcattcagcatctgcccttgtcctccatggtcacaaccagaactgtgactgtagcccggacatcaccttgaagatacagtttttgaggcttcttcagagcttcagtgaccaccacgagaacaagtacttgttactcaacaaccaggagctgaatgaactcagtgccatctctctcaaggccaacatccctgaggtggaagctgtcctcaacaccgacaggagtttggtgtgtgatgggaagaggggcttattaactcgtctgctgcaggtcatgaagaaggagccagcagagtcgtctttcaggttttggcaagctcgggctgtggagagtttcctccgagggaccacctcctatgcagaccagatgttcctgctgaagcgaggcctcttggagcacatcctttactgcattgtggacagcgagtgtaagtcaagggatgtgctccagagttactttgacctcctgggggagctgatgaagttcaacgttgatgcattcaagagattcaataaatatatcaacaccgatgcaaagttccaggtattcctgaagcagatcaacagctccctggtggactccaacatgctggtgcgctgtgtcactctgtccctggaccgatttgaaaaccaggtggatatgaaagttgccgaggtactgtctgaatgccgcctgctcgcctacatatcccaggtgcccacgcagatgtccttcctcttccgcctcatcaacatcatccacgtgcagacgctgacccaggagaacgtcagctgcctcaacaccagcctggtgatcctgatgctggcccgacggaaagagcggctgcccctgtacctgcggctgctgcagcggatggagcacagcaagaagtaccccggcttcctgctcaacaacttccacaacctgctgcgcttctggcagcagcactacctgcacaaggacaaggacagcacctgcctagagaacagctcctgcatcagcttctcatactggaaggagacagtgtccatcctgttgaacccggaccggcagtcaccctctgctctcgttagctacattgaggagccctacatggacatagacagggacttcactgaggagtgaccttgggccaggcctcgggaggctgctgggccagtgtgggtgagcgtgggtacgatgccacacgccctgccctgttcccgttcctccctgctgctctctgcctgccccaggtctttgggtacaggcttggtgggagggaagtcctagaagcccttggtccccctgggtctgagggccctaggtcatggagagcctcagtccccataatgaggacagggtaccatgcccacctttccttcagaaccctggggcccagggccacccagaggtaagaggacatttagcattagctctgtgtgagctcctgccggtttcttggctgtcagtcagtcccagagtggggaggaagatatgggtgacccccaccccccatctgtgagccaagcctcccttgtccctggcctttggacccaggcaaaggcttctgagccctgggcaggggtggtgggtaccagagaatgctgccttcccccaagcctgcccctctgcctcattttcctgtagctcctctggttctgtttgctcattggccgctgtgttcatccaagggggttctcccagaagtgaggggcctttccctccatcccttggggcacggggcagctgtgcctgccctgcctctgcctgaggcagccgctcctgcctgagcctggacatggggcccttccttgtgttgccaatttattaacagcaaataaaccaattaaatggagactattaaataactttattttaaaaatga

SEQ ID NO: 32149 - DNA, 2489 bp, Homo sapiens
  source 1..2489: mol_type = unassigned DNA
gcttcctgtttgtccgacgaggagacatggcggcggcgccggtagcggctgggtctggagccggccgagggagacggtcggcagccacagtggcggcttggggcggatggggcggccggccgcggcctggtaacattctgctgcagctgcggcagggccagctgaccggccggggcctggtccgggcggtgcagttcactgagacttttttgacggagagggacaaacaatccaagtggagtggaattcctcagctgctcctcaagctgcacaccaccagccacctccacagtgactttgttgagtgtcaaaacatcctcaagcttcttgtagaaattcttatgaggcctacgatctctatccggggacagaaactgaaaataagtgatgaaatgtccaaggactgcttgagtatcctgtataatacctgtgtctgtacagagggagttacaaagcgtttggcagaaaagaatgactttgtgatcttcctgtttacattgatgacaagtaagaagacattcttacaaacagcaaccctcattgaagatattttgggtgttaaaaaggaaatgatccgactagatgaagtccccaatctgagttccttagtatccaatttcgatcagcagcagctcgctaatttctgccggattctggctgtcaccatttcagagatggatacagggaatgatgacaagcacacgcttcttgccaaaaatgctcaacagaagaagagcttgagtttggggccttctgcagctgaaatcaatcaagcggcccttctcagcattcctggctttgttgagcggctttgcaaactggcgactcgaaaggtgtcagagtcaacgggcacagccagcttccttcaggagttggaagagtggtacacatggctagacaatgctttggtgctagatgccctgatgcgagtggccaatgaggagtcagagcacaatcaagcctccattgtgttccctcctccaggggcttctgaggagaatggcctgcctcacacgtcagccagaacccagctgccccagtcaatgaagattatgcatgagatcatgtacaaactggaagtgctctatgtcctctgcgtgctgctgatggggcgtcagcgaaaccaggttcacagaatgattgcagagttcaagctgatccctggacttaataatttgtttgacaaactgatttggaggaagcattcagcatctgcccttgtcctccatggtcacaaccagaactgtgactgtagcccggacatcaccttgaagatacagtttttgaggcttcttcagagcttcagtgaccaccacgagaacaagtacttgttactcaacaaccaggagctgaatgaactcagtgccatctctctcaaggccaacatccctgaggtggaagctgtcctcaacaccgacaggagtttggtgtgtgatgggaagaggggcttattaactcgtctgctgcaggtcatgaagaaggagccagcagagtcgtctttcaggttttggcaagctcgggctgtggagagtttcctccgagggaccacctcctatgcagaccagatgttcctgctgaagcgaggcctcttggagcacatcctttactgcattgtggacagcgagtgtaagtcaagggatgtgctccagagttactttgacctcctgggggagctgatgaagttcaacgttgatgcattcaagagattcaataaatatatcaacaccgatgcaaagttccaggtattcctgaagcagatcaacagctccctggtggactccaacatgctggtgcgctgtgtcactctgtccctggaccgatttgaaaaccaggtggatatgaaagttgccgaggtactgtctgaatgccgcctgctcgcctacatatcccaggtgcccacgcagatgtccttcctcttccgcctcatcaacatcatccacgtgcagacgctgacccaggagaacgtcagctgcctcaacaccagcctggtgatcctgatgctggcccgacggaaagagcggctgcccctgtacctgcggctgctgcagcggatggagcacagcaagaagtaccccggcttcctgctcaacaacttccacaacctgctgcgcttctggcagcagcactacctgcacaaggacaaggacagcacctgcctagagaacagctcctgcatcagcttctcatactggaaggagacagtgtccatcctgttgaacccggaccggcagtcaccctctgctctcgttagctacattgaggagccctacatggacatagacagggacttcactgaggagtgaccttgggccaggcctcgggaggctgctgggccagtgtgggtgagcgtgggtacgatgccacacgccctgccctgttcccgttcctccctgctgctctctgcctgccccaggtctttgggtacaggcttggtgggagggaagtcctagaagcccttggtccccctgggtctgagggccctaggtcat

SEQ ID NO: 32150 - DNA, 3138 bp, Homo sapiens
  source 1..3138: mol_type = unassigned DNA
ggccgcttgcttcctgtttgtccgacgaggagacatggcggcggcgccggtagcggctgggtctggagccggccgagggagacggtcggcagccacagtggcggcttggggcggatggggcggccggccgcggcctggtaacattctgctgcagctgcggcagggccagctgaccggccggggcctggtccgggcggtgcagttcactgagacttttttgacggagagggacaaacaatccaagtggagtggaattcctcagctgctcctcaagctgcacaccaccagccacctccacagtgactttgttgagtgtcaaaacatcctcaaggaaatttctcctcttctctccatggaggctatggcatttgttactgaagagaggaaacttacccaagaaaccacttatccaaatacttacatttttgacttgtttggaggtgttgatcttcttgtagaaattcttatgaggcctacgatctctatccggggacagaaactgaaaataagtgatgaaatgtccaaggactgcttgagtatcctgtataatacctgtgtctgtacagagggagttacaaagcgtttggcagaaaagaatgactttgtgatcttcctgtttacattgatgacaagtaagaagacattcttacaaacagcaaccctcattgaagatattttgggtgttaaaaaggaaatgatccgactagatgaagtccccaatctgagttccttagtatccaatttcgatcagcagcagctcgctaatttctgccggattctggctgtcaccatttcagagatggatacagggaatgatgacaagcacacgcttcttgccaaaaatgctcaacagaagaagagcttgagtttggggccttctgcagctgaaatcaatcaagcggcccttctcagcattcctggctttgttgagcggctttgcaaactggcgactcgaaaggtgtcagagtcaacgggcacagccagcttccttcaggagttggaagagtggtacacatggctagacaatgctttggtgctagatgccctgatgcgagtggccaatgaggagtcagagcacaatcaaggggcttctgaggagaatggcctgcctcacacgtcagccagaacccagctgccccagtcaatgaagattatgcatgagatcatgtacaaactggaagtgctctatgtcctctgcgtgctgctgatggggcgtcagcgaaaccaggttcacagaatgattgcagagttcaagctgatccctggacttaataatttgtttgacaaactgatttggaggaagcattcagcatctgcccttgtcctccatggtcacaaccagaactgtgactgtagcccggacatcaccttgaagatacagtttttgaggcttcttcagagcttcagtgaccaccacgagaacaagtacttgttactcaacaaccaggagctgaatgaactcagtgccatctctctcaaggccaacatccctgaggtggaagctgtcctcaacaccgacaggagtttggtgtgtgatgggaagaggggcttattaactcgtctgctgcaggtcatgaagaaggagccagcagagtcgtctttcaggttttggcaagctcgggctgtggagagtttcctccgagggaccacctcctatgcagaccagatgttcctgctgaagcgaggcctcttggagcacatcctttactgcattgtggacagcgagtgtaagtcaagggatgtgctccagagttactttgacctcctgggggagctgatgaagttcaacgttgatgcattcaagagattcaataaatatatcaacaccgatgcaaagttccaggtattcctgaagcagatcaacagctccctggtggactccaacatgctggtgcgctgtgtcactctgtccctggaccgatttgaaaaccaggtggatatgaaagttgccgaggtactgtctgaatgccgcctgctcgcctacatatcccaggtgcccacgcagatgtccttcctcttccgcctcatcaacatcatccacgtgcagacgctgacccaggagaacgtcagctgcctcaacaccagcctggtgatcctgatgctggcccgacggaaagagcggctgcccctgtacctgcggctgctgcagcggatggagcacagcaagaagtaccccggcttcctgctcaacaacttccacaacctgctgcgcttctggcagcagcactacctgcacaaggacaaggacagcacctgcctagagaacagctcctgcatcagcttctcatactggaaggagacagtgtccatcctgttgaacccggaccggcagtcaccctctgctctcgttagctacattgaggagccctacatggacatagacagggacttcactgaggagtgaccttgggccaggcctcgggaggctgctgggccagtgtgggtgagcgtgggtacgatgccacacgccctgccctgttcccgttcctccctgctgctctctgcctgccccaggtctttgggtacaggcttggtgggagggaagtcctagaagcccttggtccccctgggtctgagggccctaggtcatggagagcctcagtccccataatgaggacagggtaccatgcccacctttccttcagaaccctggggcccagggccacccagaggtaagaggacatttagcattagctctgtgtgagctcctgccggtttcttggctgtcagtcagtcccagagtggggaggaagatatgggtgacccccaccccccatctgtgagccaagcctcccttgtccctggcctttggacccaggcaaaggcttctgagccctgggcaggggtggtgggtaccagagaatgctgccttcccccaagcctgcccctctgcctcattttcctgtagctcctctggttctgtttgctcattggccgctgtgttcatccaagggggttctcccagaagtgaggggcctttccctccatcccttggggcacggggcagctgtgcctgccctgcctctgcctgaggcagccgctcctgcctgagcctggacatggggcccttccttgtgttgccaatttattaacagcaaataaaccaattaaatggagactattaaataactttatttt

SEQ ID NO: 32151 - DNA, 1746 bp, Homo sapiens
  source 1..1746: mol_type = unassigned DNA
cctggctttgttgagcggctttgcaaactggcgactcgaaaggtgtcagagtcaacgggcacagccagcttccttcaggagttggaagagtggtacacatggctagacaatgctttggtgctagatgccctgatgcgagtggccaatgaggagtcagagcacaatcaaggttcacagaatgattgcagagttcaagctgatccctggacttaataatttgtttgacaaactgatttggaggaagcattcagcatctgcccttgtcctccatggtcacaaccagaactgtgactgtagcccggacatcaccttgaagatacagtttttgaggcttcttcagagcttcagtgaccaccacgagaacaagtacttgttactcaacaaccaggagctgaatgaactcagtgccatctctctcaaggccaacatccctgaggtggaagctgtcctcaacaccgacaggagtttggtgtgtgatgggaagaggggcttattaactcgtctgctgcaggtcatgaagaaggagccagcagagtcgtctttcaggttttggcaagctcgggctgtggagagtttcctccgagggaccacctcctatgcagaccagatgttcctgctgaagcgaggcctcttggagcacatcctttactgcattgtggacagcgagtgtaagtcaagggatgtgctccagagttactttgacctcctgggggagctgatgaagttcaacgttgatgcattcaagagattcaataaatatatcaacaccgatgcaaagttccaggtattcctgaagcagatcaacagctccctggtggactccaacatgctggtgcgctgtgtcactctgtccctggaccgatttgaaaaccaggtggatatgaaagttgccgaggtactgtctgaatgccgcctgctcgcctacatatcccaggtgcccacgcagatgtccttcctcttccgcctcatcaacatcatccacgtgcagacgctgacccaggagaacgtcagctgcctcaacaccagcctggtgatcctgatgctggcccgacggaaagagcggctgcccctgtacctgcggctgctgcagcggatggagcacagcaagaagtaccccggcttcctgctcaacaacttccacaacctgctgcgcttctggcagcagcactacctgcacaaggacaaggacagcacctgcctagagaacagctcctgcatcagcttctcatactggaaggagacagtgtccatcctgttgaacccggaccggcagtcaccctctgctctcgttagctacattgaggagccctacatggacatagacagggacttcactgaggagtgaccttgggccaggcctcgggaggctgctgggccagtgtgggtgagcgtgggtacgatgccacacgccctgccctgttcccgttcctccctgctgctctctgcctgccccaggtctttgggtacaggcttggtgggagggaagtcctagaagcccttggtccccctgggtctgagggccctaggtcatggagagcctcagtccccataatgaggacagggtaccatgcccacctttccttcagaaccctggggcccagggccacccagaggtaagaggacatttagcattagctctgtgtgagctcctgccggtttcttggctgtcagtcagtcccagagtggggaggaagatatgggtgacccccaccccccatctgtgagccaagcctcccttgtccctgg

SEQ ID NO: 32152 - DNA, 2504 bp, Homo sapiens
  source 1..2504: mol_type = unassigned DNA
gcttcctgtttgtccgacgaggagacatggcggcggcgccggtagcggctgggtctggagccggccgagggagacggtcggcagccacagtggcggcttggggcggatggggccagctgaccggccggggcctggtccgggcggtgcagttcactgagacttttttgacggagagggacaaacaatccaagtggagtggaattcctcagctgctcctcaagctgcacaccaccagccacctccacagtgactttgttgagtgtcaaaacatcctcaaggaaatttctcctcttctctccatggaggctatggcatttgttactgaagagaggaaacttacccaagaaaccacttatccaaatacttacatttttgacttgtttggaggtgttgatcttcttgtagaaattcttatgaggcctacgatctctatccggggacagaaactgaaaataagtgatgaaatgtccaaggactgcttgagtatcctgtataatacctgtgtctgtacagagggagttacaaagcgtttggcagaaaagaatgactttgtgatcttcctgtttacattgatgacaagtaagaagacattcttacaaacagcaaccctcattgaagatattttgggtgttaaaaaggaaatgatccgactagatgaagtccccaatctgagttccttagtatccaatttcgatcagcagcagctcgctaatttctgccggattctggctgtcaccatttcagagatggatacagggaatgatgacaagcacacgcttcttgccaaaaatgctcaacagaagaagagcttgagtttggggccttctgcagctgaaatcaatcaagcggcccttctcagcattcctggctttgttgagcggctttgcaaactggcgactcgaaaggtgtcagagtcaacgggcacagccagcttccttcaggagttggaagagtggtacacatggctagacaatgctttggtgctagatgccctgatgcgagtggccaatgaggagtcagagcacaatcaagcctccattgtgttccctcctccaggggcttctgaggagaatggcctgcctcacacgtcagccagaacccagctgccccagtcaatgaagattatgcatgagatcatgtacaaactggaagtgctctatgtcctctgcgtgctgctgatggggcgtcagcgaaaccaggttcacagaatgattgcagagttcaagctgatccctggacttaataatttgtttgacaaactgatttggaggaagcattcagcatctgcccttgtcctccatggtcacaaccagaactgtgactgtagcccggacatcaccttgaagatacagtttttgaggcttcttcagagcttcagtgaccaccacgagaacaagtacttgttactcaacaaccaggagctgaatgaactcagtgccatctctctcaaggccaacatccctgaggtggaagctgtcctcaacaccgacaggagtttggtgtgtgatgggaagaggggcttattaactcgtctgctgcaggtcatgaagaaggagccagcagagtcgtctttcaggttttggcaagctcgggctgtggagagtttcctccgagggaccacctcctatgcagaccagatgttcctgctgaagcgaggcctcttggagcacatcctttactgcattgtggacagcgagtgtaagtcaagggatgtgctccagagttactttgacctcctgggggagctgatgaagttcaacgttgatgcattcaagagattcaataaatatatcaacaccgatgcaaagttccaggtattcctgaagcagatcaacagctccctggtggactccaacatgctggtgcgctgtgtcactctgtccctggaccgatttgaaaaccaggtggatatgaaagttgccgaggtactgtctgaatgccgcctgctcgcctacatatcccaggtgcccacgcagatgtccttcctcttccgcctcatcaacatcatccacgtgcagacgctgacccaggagaacgtcagctgcctcaacaccagcctggtgatcctgatgctggcccgacggaaagagcggctgcccctgtacctgcggctgctgcagcggatggagcacagcaagaagtaccccggcttcctgctcaacaacttccacaacctgctgcgcttctggcagcagcactacctgcacaaggacaaggacagcacctgcctagagaacagctcctgcatcagcttctcatactggaaggagacagtgtccatcctgttgaacccggaccggcagtcaccctctgctctcgttagctacattgaggagccctacatggacatagacagggacttcactgaggagtgaccttgggccaggcctcgggaggctgctgggccagtgtgggtgagcgtgggtacgatgccacacgccctgccctgttcccgttcctccctgctgctctctgcctgccccaggtctttgggtacaggcttg

SEQ ID NO: 32153 - DNA, 5839 bp, Homo sapiens
  source 1..5839: mol_type = unassigned DNA
accccacatcacaaccacgacgggttgtccgcagctcgcagccaccccaaagggaggaataaagaacaggagcagagggaagccgggcgcagaaagaagggaaaaggaagagctcagggttggacatttttggagacaggggtggggaggataaagggagcgtgcctccttgattttcccctccccacccctctttgcttttctctccccttctctgtatagcatattccagaaacggcagcagaaggggacagaaacctctagtgtagaaaagggttttggaggggtagccagcgctcccgccagccgctacctaacagctggagcttgagtgtgcgtgtaagagtgtgaatgcggctctctctctttttttctctctctctcccctctctctccatcccttccttcctccctccttctccctctccttcacactacagtgtcagctacccctgtcagtttccccgtgtcagtttcttccctagctcttattgtgtgtgactggctgcgtgaagggagtgggtgcgcttgaaggggctcaggttgggttagagagctgggagaacagggtagggacattggtagagcaaagagtttcagggcactggcgaaggtgaaaggtgaggagggccgatctgttacaggcaagtttggcaataactgagcatccaaaggggaagccaaggtaggagccagtacttgcgctcgtctttacaccccgcccctttccctgtgctcatccgcccacccacccatcagcctagaggccccgggctgtcccagtcggctgctgtttcgcgccgcaaaagaggagtccggcaaggcgccgcaccacgcatcctggccggtggacatccagacgacacagattttatccgaaaaaaccacttggctcaggatttctgcattgctatgaaccatggcccaactgtactacaaaaaggtcaactactcaccgtacagagaccgcatccccctgcaaattgtgagggctgagacagagctctctgcagaggagaaggccttcctcaatgctgtggagaagggggactatgccactgtgaagcaggcccttcaggaggctgagatctactataatgttaacatcaactgcatggaccccttgggccggagtgccctgctcattgccattgagaacgagaacctggagatcatggagctactgctgaaccacagcgtgtatgtgggtgatgcattgctctatgccatacgcaaggaagtggtgggcgctgtggagcttctgctcagctacaggcggcccagcggagagaagcaggtccccactctgatgatggacacgcagttctctgaattcacaccggacatcactcccatcatgctggctgcccacaccaacaactacgaaatcatcaaattgcttgtccaaaaacgggtcactatcccacggccccaccagatccgctgcaactgtgtggagtgtgtgtctagttcagaggtagacagcctgcgccactctcgctcccgactgaacatctataaggctctggcaagcccctcactcattgccttatcaagtgaggaccccatcctaactgccttccgtctgggctgggagctcaaggagctcagcaaggtggagaatgagttcaaggccgagtatgaggagctctctcagcagtgcaagctctttgccaaagacctgctggaccaagctcggagctccagggaactggagatcatcctcaaccatcgagatgaccacagtgaagagcttgaccctcagaagtaccatgacctggccaagttgaaggtggcaatcaaataccaccagaaagagtttgttgctcagcccaactgccaacagttgcttgccaccctgtggtatgatggcttccctggatggcggcggaaacactgggtagtcaagcttctaacctgcatgaccattgggttcctgtttcccatgctgtctatagcctacctgatctcacccaggagcaaccttgggctgttcatcaagaaaccctttatcaagtttatctgccacacagcatcctatttgaccttcctctttatgcttctcctggcttctcagcacattgtcaggacagaccttcatgtacaggggcctcccccaactgtcgtggaatggatgatattgccttgggttctaggtttcatttggggtgagattaaggaaatgtgggatggtggatttactgaatacatccatgactggtggaacctgatggattttgcaatgaactccctctacctggcaactatttccctgaagattgtggcctatgtcaagtataatggttctcgtccaagggaggaatgggaaatgtggcacccgactctgattgcggaagcactcttcgcaatatccaacattttaagttcgttgcgtctcatatccctgttcacagccaactcccacttaggacctctgcagatctctttgggacgcatgctgcttgatatcctcaaattcctctttatctactgcctggtactactagcttttgccaatggactgaaccagctttacttctattatgaaaccagagctatcgatgagcctaacaactgcaaggggatccgatgtgagaaacagaacaatgccttctccacgctctttgagactcttcagtcactcttctggtctgtatttggccttttaaatctatatgtcaccaatgtgaaagccagacacgaattcaccgagtttgtaggagctaccatgtttggaacatacaatgtcatctccctggtagtgctgctgaacatgctgattgctatgatgaacaactcctatcagcttattgccgatcatgctgatatcgagtggaagtttgcaaggacgaagctctggatgagttactttgatgaaggtggcaccttgccacctcctttcaacatcatccccagccccaagtcatttctataccttggtaactggttcaacaacaccttctgccccaaaagagaccctgacggtagacggagaaggcgcaacttgagaagtttcacagaacgcaatgctgacagcctgatacaaaatcaacattatcaggaagttatcaggaatttagtcaaaagatatgtggctgctatgataagaaattccaaaacacatgagggacttacagaagaaaattttaaggaattaaagcaagacatctccagctttcggtatgaagtgcttgacctcttgggaaatagaaaacatccaaggagcttttccactagcagcactgaactgtctcagagagacgataataatgatggcagtggtggggctcgggccaaatccaagagtgtctcttttaatttaggctgcaagaaaaagacttgccatgggccacctctcatcagaaccatgccaaggtccagtggtgcccaaggaaagtcaaaagctgagtcatcaagcaaacgctccttcatgggtccttctctcaagaaactgggtctcctattctccaaatttaatggtcatatgtctgaacccagttcagagccaatgtacacaatttctgatggaattgttcagcagcactgtatgtggcaggacatcagatattctcagatggagaaagggaaagcagaggcctgttctcaaagtgaaattaacctcagtgaggtagaattaggtgaagtccagggcgctgctcagagcagtgaatgccctctagcctgttccagctctcttcactgtgcatccagcatctgctcctcaaattctaaacttttagactcctcagaggatgtatttgaaacttggggagaggcttgtgacttgctcatgcacaaatggggtgatggacaggaagaacaagttacaactcgcctctaagtcaagccctaatcatctgttctggaactcaacagaaatctgtaatttccttgctctcagaggtgacacagaatatgattccctcactgcccctgccccccagaaaggagagtgaaactcttatttgcaccatcttttatagccacattctccatttttgttcttgttttattattactttcattattatttgcctttttaatacctatacacactaagtccatcttacaaccgactgaaggggtgttgcacctaatcatcagaggtgcagttgggtgcttaacctttttgctttgcttttctcacccatgcttccttgaagccccaggtgccactttgctggtcttgttgccgcacagattcctgaccatcctcagaatctcatgccattttcccgcagagctgagggatgtggtcagcagtccccaccagctatcagataaggcaaactaccctgcccatctttgttgccattcagtgctacgcgctgcccatgctgggtcaatgaacagcatcaaagggaggctgaagagatttcaaagaattgtcagcttgtggtttctgggtataagtggcttgtttcgttcttaaatactacaacttcttattgtgggggctattgagttttcttgtttcttaaagatgtgttagtttcctaatgtgtgccaatgaaatatttaccccatagtatatgtcatatctaataagttaggcgaattatttttctgtttgtgtgtttcagttaacttactacatttgaaaatttgatagtatcaaaattagtatttagaatttgtgctattttttaaaaacatctactacactctaaccaatagtcactacatctcatacattggcaagataaatagttgtcatatttgttgggtcctattctactgttgatagttttaattatcattgctatcaaataatttctaagataaaagcctgaatttgaaatatttttatcagaaaaatggcatattgctgaagtgtcaaaatatgagaaaagagcatcttcattttaattaactgctttataaaaatggcaactttaggtatagataacctaattcaggttgcagttttaatattcattgggggcagtggaattgcatgtgtaaattatgttagatatatatcataacaaccctagtggattcatggaattataaacgtgatccaaattctactgtcttccaagaaagctacatttatacatccaaacaaattcttttccacagcttaagagtacctcatcagaatacagtggttcaagttaaaaaataaagtccataatgcatatggtcatcattctagacctgataaccactgagaacctgctgagcaaggacggcttttaccaacattagcacaaaggtttcctcagtttagactctaacatatgacctgaaacaactctaggtctgagtcctagagattacataaatagtgtgtagcccagaaaagtaaaataggtgtcacgctgttttttttaatgtcaacaccaataggaatccatttagattaatgtatgtaatttctgataaaagtaagagaaatgaggaactttcgaactgcaaatatgcctccaaactagcttttgataagtgtggtttctgttatttgaatggattcccatctttgtctctagcctggagaagagcaaaatggagggggaggggccagaaataggaggaggttttgaagaataaagcctcatatccaggaaaaagtgatcaagtgaaaaagctgcatcaagacccatttggcaagaggttgtccgaaaataattccttgatcatatctgaagtggttatttactcaaatcaatttctcccctgcttcgctaagactgtcataaaatggccttgacatttaatcacaggttactttccagaaaggtttctaaagttacagattcagcttttcaaattgtcaaattcactttgaataataatagaacctgggctacattcctaactcatattaacagca

SEQ ID NO: 32154 - DNA, 4612 bp, Homo sapiens
  source 1..4612: mol_type = unassigned DNA
gggatcttgacggagagtgcgggggatgaaggcgggagctgagggctggagagtctctgttgacatagtaactcttcagctccgtctcccttgctctccgctcttacgcttcgctaccaccagcggccccgcctgtgccctctctgcccgggcgccccagacgcatcctcgcggggtctcctcggcctgacctgctcaggtcaagatcctctttgcacccccttaagtggtgacttttccccgggccagtgggcgagccacttgcggcgggcgtctgcaccccctgcttcaccgtcgtcccctgggcaccggtctgcccaggtccagttcggccgctgacgcgaaccctccgcaccgggtccccgctggaactgcccactcggctcccccgggagcggggcccaggccagtcgggcgttcccgccatgagccagagcccggcgttcgggccccggaggggcagttctccccggggcgctgccggagccgctgcgcggcgcaacgagagccaggactatctgctcatggactcggagctgggagaagacggctgcccgcaagccccgctgccttgctacggctactacccctgcttccggggatctgacaacagactggctcaccggcggcagacagttctccgtgagaaggggagaaggttagctaatcgaggaccagcatacatgtttagtgatcgctccacaagcctatctatagaggaggaacgctttttggatgcagctgaatatggtaacatcccagtggtgcggaagatgttagaagaatgccactcactcaacgttaactgtgtggattacatgggccagaatgccctacagttggcagtggccaatgagcatctggaaattacagaacttcttctcaagaaagaaaacctctctcgagttggggatgctttgcttctagctattagtaaaggttatgttcggattgtggaagcaattctcagtcatccggcttttgctgaaggcaagaggttagcaaccagccctagccagtctgaactccagcaagatgatttttatgcctatgatgaagatgggacacggttctcccatgatgtgactccaatcattctggctgcccactgccaggaatatgaaattgtgcataccctcctgcggaagggtgctaggattgaacggcctcatgattatttctgcaagtgcaatgactgcaaccagaaacagaagcatgactcgtttagccactccagatctaggattaatgcctataaaggcctggcaagtccggcttacctgtcattgtctagtgaagatccagtcatgacggctttagaacttagcaatgaactggcagttctggccaatattgagaaagagttcaagaatgactacaaaaaactgtcaatgcagtgcaaagactttgttgttggactccttgatctgtgcagaaacactgaagaagtcgaggccattctgaatggggatgttgaaacgctccagagtggtgatcacggtcgcccaaatctcagccgtttaaaacttgccattaaatatgaagtaaaaaaatttgtagctcatccaaactgccaacagcaacttctctccatttggtatgagaatctttctggtttacgacagcagacaatggcggtcaagttccttgtggtccttgctgttgccattggactgcccttcctggctctcatttactggtttgctccatgcagcaagatggggaagataatgcgtggaccattcatgaagtttgtagcacacgcagcctccttcaccatttttctgggactgctagtcatgaatgcagctgacagatttgaaggcacaaaactccttcctaatgaaaccagcacagataatgcaaaacagctgttcaggatgaaaacatcctgcttctcatggatggagatgctcattatatcctgggtaataggcatgatatgggctgaatgtaaagaaatctggactcagggccccaaggaatatttgtttgagttgtggaacatgcttgattttggtatgttagcaattttcgcagcatcattcattgcgagattcatggcattttggcatgcttccaaagcccagagcatcattgacgcaaatgatactttgaaggacttgacgaaagtaacattgggagacaatgtgaaatactacaatttggccaggataaagtgggacccctctgatcctcaaataatatctgaaggtctttatgcaattgctgtagttttaagtttctctaggatagcttatattttaccagcaaatgaaagctttggacctctgcagatatcacttggaagaacagtcaaagacatcttcaagttcatggtcatattcattatggtgtttgtggcctttatgattggaatgttcaatctctactcctactacattggtgcaaaacaaaatgaagccttcacaacagttgaagagagttttaagacactgttctgggctatatttggactttctgaagtgaaatcagtggtcatcaactataaccacaaattcattgaaaacattggttacgttctttatggagtctataatgttacgatggtcattgttttgctaaatatgttaattgccatgatcaacagttcattccaggaaattgaggatgacgctgatgtggagtggaaatttgcaagggccaaactctggttttcctactttgaggagggcagaacacttcctgtacccttcaatctggtgccgagtccaaagtccctgttttatctcttactgaagcttaaaaaatggatttctgagctgttccagggccataaaaaaggtttccaggaagatgcagagatgaacaagataaatgaagaaaagaaacttggaattttaggaagtcatgaagacctttcaaaattatcacttgacaaaaaacaggttgggcacaataaacaaccaagtataaggagctcagaagatttccatctaaatagtttcaataatcctccaagacaatatcagaaaataatgaaaaggctcattaaaagatatgtactgcaggcccagatagataaggagagtgatgaagtgaacgaaggggaactgaaggaaattaagcaggacatctcaagtctccgctatgaactccttgaagaaaaatctcagaatacagaagacctagcagaacttattagagaacttggagagaaattatccatggaaccaaatcaagaggaaaccaatagataatgcgaagacttccttagaaattcatatttatttgtccacttgaagccatattattttctgatttattttcttaagtgccaatgggcccaccttttaaacaagaaaacgttaaataacttgggccatcctatcatctggagccctagtatctaatttttttggtgattaaactccattgttcagggtaaaggctgtagataatgaggaaaattatgcccagttgtttggtgcttgttttataaactgctttcttggatataactaactcttgtgatgatgtcattgccatgtagtgtctgcctgaaaatgggtcccagcggacaggggctgacccacgttactccccatgcggtttttcctctgaagtttatttcaggttccttcttgcctgctctgtggatcccctgctggggactcccagctctgaaatttgggaaaaagtagcccatgggcctttagaatgctttaatcctttctttagaatgctgtttaaacaccatttaccctacttatccctcaatgcacatgattgataccgttcatacaaaatggtcttacatctatgtaaaattttctgattcatctatttgaaaacattacacttaacaatgaaaaaagtttttcctccactgaaccctggaaacatggtccagttttgtgtgtgtgcgtgtgtgtaaatgtgtacacacagacataaagtacttgccctagtttgtggctaatgtggacacacaaaagctctttatgttataaatttttattgtcactaaaaaattttactgtctaaataagtaccttttattggagaaaaatcaaaaccccaaacaaacactgtggttgtttggttccattatagcacaattttgtgccatttctgggagcatttacagatgaatccccacacttagccattgaatgtaaaggggaaaaataaggtgagaatttgtaaatacttatctgttattttcaatatgttctatccttctacccaaatatataaaacaggaatttgcattcatgtgcatttaccaagaggttgttgttgttacttactgatcatgtgaagtggtgtcttaaacaactaaaagcgatgaaggttcatatgtttactcaaagaccattggcattcagaggatgctggacattaactggaactgctacttccaattcaataatgggagatttcaaatgcaaatctttaacttcatcttaaagatgaaatggttgcagaaaatctgtttagctccaactttggcttaatttaaatcaaagaacatttatgtaaccagatcagaaaatacagctgaaaatttatattcagtgattttgtatttgtggatactacttatggaaaagttacttggtgatacataaagatcgattttcaaata

SEQ ID NO: 32155 - DNA, 2448 bp, Homo sapiens
  source 1..2448: mol_type = unassigned DNA
atgagccagagcccggcgttcgggccccggaggggcagttctccccggggcgctgccggagccgctgcgcggcgcaacgagagccaggactatctgctcatggactcggagctgggagaagacggctgcccgcaagccccgctgccttgctacggctactacccctgcttccggggatctgacaacagactggctcaccggcggcagacagttctccgtgagaaggggagaaggttagctaatcgaggaccagcatacatgtttagtgatcgctccacaagcctatctatagaggaggaacgctttttggatgcagctgaatatggtaacatcccagtggtgcggaagatgttagaagaatgccactcactcaacgttaactgtgtggattacatgggccagaatgccctacagttggcagtggccaatgagcatctggaaattacagaacttcttctcaagaaagaaaacctctctcgagttggggatgctttgcttctagctattagtaaaggttatgttcggattgtggaagcaattctcagtcatccggcttttgctgaaggcaagaggttagcaaccagccctagccagtctgaactccagcaagatgatttttatgcctatgatgaagatgggacacggttctcccatgatgtgactccaatcattctggctgcccactgccaggaatatgaaattgtgcataccctcctgcggaagggtgctaggattgaacggcctcatgattatttctgcaagtgcaatgactgcaaccagaaacagaagcatgactcgtttagccactccagatctaggattaatgcctataaaggcctggcaagtccggcttacctgtcattgtctagtgaagatccagtcatgacggctttagaacttagcaatgaactggcagttctggccaatattgagaaagagttcaagatggggaagataatgcgtggaccattcatgaagtttgtagcacacgcagcctccttcaccatttttctgggactgctagtcatgaatgcagctgacagatttgaaggcacaaaactccttcctaatgaaaccagcacagataatgcaaaacagctgttcaggatgaaaacatcctgcttctcatggatggagatgctcattatatcctgggtaataggcatgatatgggctgaatgtaaagaaatctggactcagggccccaaggaatatttgtttgagttgtggaacatgcttgattttggtatgttagcaattttcgcagcatcattcattgcgagattcatggcattttggcatgcttccaaagcccagagcatcattgacgcaaatgatactttgaaggacttgacgaaagtaacattgggagacaatgtgaaatactacaatttggccaggataaagtgggacccctctgatcctcaaataatatctgaaggtctttatgcaattgctgtagttttaagtttctctaggatagcttatattttaccagcaaatgaaagctttggacctctgcagatatcacttggaagaacagtcaaagacatcttcaagttcatggtcatattcattatggtgtttgtggcctttatgattggaatgttcaatctctactcctactacattggtgcaaaacaaaatgaagccttcacaacagttgaagagagttttaagacactgttctgggctatatttggactttctgaagtgaaatcagtggtcatcaactataaccacaaattcattgaaaacattggttacgttctttatggagtctataatgttacgatggtcattgttttgctaaatatgttaattgccatgatcaacagttcattccaggaaattgaggatgacgctgatgtggagtggaaatttgcaagggccaaactctggttttcctactttgaggagggcagaacacttcctgtacccttcaatctggtgccgagtccaaagtccctgttttatctcttactgaagcttaaaaaatggatttctgagctgttccagggccataaaaaaggtttccaggaagatgcagagatgaacaagataaatgaagaaaagaaacttggaattttaggaagtcatgaagacctttcaaaattatcacttgacaaaaaacaggttgggcacaataaacaaccaagtataaggagctcagaagatttccatctaaatagtttcaataatcctccaagacaatatcagaaaataatgaaaaggctcattaaaagatatgtactgcaggcccagatagataaggagagtgatgaagtgaacgaaggggaactgaaggaaattaagcaggacatctcaagtctccgctatgaactccttgaagaaaaatctcagaatacagaagacctagcagaacttattagagaacttggagagaaattatccatggaaccaaatcaagaggaaaccaatagataa

SEQ ID NO: 32156 - DNA, 2631 bp, Homo sapiens
  source 1..2631: mol_type = unassigned DNA
atgagccagagcccggcgttcgggccccggaggggcagttctccccggggcgctgccggagccgctgcgcggcgcaacgagagccaggactatctgctcatggactcggagctgggagaagacggctgcccgcaagccccgctgccttgctacggctactacccctgcttccggggatctgacaacagactggctcaccggcggcagacagttctccgtgagaaggggagaaggttagctaatcgaggaccagcatacatgtttagtgatcgctccacaagcctatctatagaggaggaacgctttttggatgcagctgaatatggtaacatcccagtggtgcggaagatgttagaagaatgccactcactcaacgttaactgtgtggattacatgggccagaatgccctacagttggcagtggccaatgagcatctggaaattacagaacttcttctcaagaaagaaaacctctctcgagttggggatgctttgcttctagctattagtaaaggttatgttcggattgtggaagcaattctcagtcatccggcttttgctgaaggcaagaggttagcaaccagccctagccagtctgaactccagcaagatgatttttatgcctatgatgaagatgggacacggttctcccatgatgtgactccaatcattctggctgcccactgccaggaatatgaaattgtgcataccctcctgcggaagggtgctaggattgaacggcctcatgattatttctgcaagtgcaatgactgcaaccagaaacagaagcatgactcgtttagccactccagatctaggattaatgcctataaaggcctggcaagtccggcttacctgtcattgtctagtgaagatccagtcatgacggctttagaacttagcaatgaactggcagttctggccaatattgagaaagagttcaagaatgactacaaaaaactgtcaatgcagtgcaaagactttgttgttggactccttgatctgtgcagaaacactgaagaagtcgaggccattctgaatggggatgttgaaacgctccagagtggtgatcacggtcgcccaaatctcagccgtttaaaacttgccattaaatatgaagtaaaaaaaatggggaagataatgcgtggaccattcatgaagtttgtagcacacgcagcctccttcaccatttttctgggactgctagtcatgaatgcagctgacagatttgaaggcacaaaactccttcctaatgaaaccagcacagataatgcaaaacagctgttcaggatgaaaacatcctgcttctcatggatggagatgctcattatatcctgggtaataggcatgatatgggctgaatgtaaagaaatctggactcagggccccaaggaatatttgtttgagttgtggaacatgcttgattttggtatgttagcaattttcgcagcatcattcattgcgagattcatggcattttggcatgcttccaaagcccagagcatcattgacgcaaatgatactttgaaggacttgacgaaagtaacattgggagacaatgtgaaatactacaatttggccaggataaagtgggacccctctgatcctcaaataatatctgaaggtctttatgcaattgctgtagttttaagtttctctaggatagcttatattttaccagcaaatgaaagctttggacctctgcagatatcacttggaagaacagtcaaagacatcttcaagttcatggtcatattcattatggtgtttgtggcctttatgattggaatgttcaatctctactcctactacattggtgcaaaacaaaatgaagccttcacaacagttgaagagagttttaagacactgttctgggctatatttggactttctgaagtgaaatcagtggtcatcaactataaccacaaattcattgaaaacattggttacgttctttatggagtctataatgttacgatggtcattgttttgctaaatatgttaattgccatgatcaacagttcattccaggaaattgaggatgacgctgatgtggagtggaaatttgcaagggccaaactctggttttcctactttgaggagggcagaacacttcctgtacccttcaatctggtgccgagtccaaagtccctgttttatctcttactgaagcttaaaaaatggatttctgagctgttccagggccataaaaaaggtttccaggaagatgcagagatgaacaagataaatgaagaaaagaaacttggaattttaggaagtcatgaagacctttcaaaattatcacttgacaaaaaacaggttgggcacaataaacaaccaagtataaggagctcagaagatttccatctaaatagtttcaataatcctccaagacaatatcagaaaataatgaaaaggctcattaaaagatatgtactgcaggcccagatagataaggagagtgatgaagtgaacgaaggggaactgaaggaaattaagcaggacatctcaagtctccgctatgaactccttgaagaaaaatctcagaatacagaagacctagcagaacttattagagaacttggagagaaattatccatggaaccaaatcaagaggaaaccaatagataa

SEQ ID NO: 32157 - DNA, 2752 bp, Homo sapiens
  source 1..2752: mol_type = unassigned DNA
cacggttctgcctcggaaggcgagtttttaccactgcaacacaaagaacagaggagcgcgctttcacatcgttgcaacttaactcacttgaccagctctatacttcagcaccacggagagcggtacatccttggctaccacccatggggagccagcttctggcgactcaacaccggattccggtcatctagaggaggaacaagcctgcgtattacaccctcaatgttgaggaacagcaccttcaaaaacatgcagcgccggcacacaacgctgagggagaagggccgtcgccaggccatccggggtcccgcctacatgttcaacgagaagggcaccagtctgacgcccgaggaggagcgcttcctggactcggctgagtatggcaacatcccggtggtccggaaaatgctggaggagtccaagacccttaacttcaactgtgtggactacatggggcagaacgctctgcagctggccgtgggcaacgagcacctagaggtcacggagctgctgctgaagaaggagaacctggcacgggtgggggacgcgctgctgctggccatcagcaagggctatgtgcgcatcgtggaggccatcctcaaccacccggccttcgcgcagggccagcgcctgacgctcagcccgctggaacaggagctgcgcgacgacgacttctatgcctacgacgaggacggcacgcgcttctcccacgacatcacgcccatcatcctggcggcgcactgccaggagtatgagatcgtgcacatcctgctgctcaagggcgcccgcatcgagcggccccacgactacttctgcaagtgcaatgagtgcaccgagaaacagcggaaagactccttcagccactcgcgctcgcgcatgaacgcctacaaaggactggcgagtgctgcctacttgtccctgtccagcgaagaccctgtcctcaccgccctggagctcagcaacgagttagccagactagccaacattgagactgaatttaagttcgttgctcatcctaactgtcagcagcaattgcttaccatgtggtatgaaaatctctcaggcttacgtcaacagtctatcgctgtgaaattcctggctgtctttggagtctccataggcctcccttttctcgccatagcctattggattgctccgtgcagcaagctaggacgaaccctgaggagccctttcatgaagtttgtagctcatgcagtttcttttacaatcttcttgggattattagttgtgaatgcatctgaccgatttgaaggtgttaaaaccctgccaaacgaaaccttcacagactacccaaaacaaatcttcagagtgaaaaccacacagttctcctggacagaaatgctcattatgaagtgggtcttaggaatgatttggtccgaatgcaaggaaatctgggaggaggggccacgggagtacgtgctgcacttgtggaacctgctagatttcgggatgctgtccatcttcgtggcctccttcacagcacgcttcatggccttcctgaaggccacggaggcacagctgtacgtggaccagcacgtgcaggacgacacgctgcacaatgtctcgcttccgccggaagtggcatacttcacctacgccagggacaagtggtggccttcagaccctcagatcatatcggaagggctctacgcgatagccgtcgtgctgagcttctctcgcattgcatacattctgccagccaacgagagttttgggcccctgcagatctcgctagggagaactgtgaaagatatcttcaagttcatggtcattttcatcatggtatttgtggccttcatgattgggatgttcaacctgtactcttactaccgaggtgccaaatacaacccagcgtttacaacggttgaagaaagttttaaaactttgttttggtccatattcggcttatctgaagtaatctcagtggtgctgaaatacgaccacaaattcatcgagaacattggctacgttctctacggcgtttataacgtcaccatggtggtagtgttgctcaacatgctaatagccatgataaacaactcctatcaggaaattgaggaggatgcagatgtggaatggaagttcgcccgagcaaaactctggctgtcttactttgatgaaggaagaactctacctgctccttttaatctagtgccaagtcctaaatcattttattatctcataatgagaatcaagatgtgcctcataaaactctgcaaatctaaggccaaaagctgtgaaaatgaccttgaaatgggcatgctgaattccaaattcaagaagactcgctaccaggctggcatgaggaattctgaaaatctgacagcaaataacactttgagcaagcccaccagataccagaaaatcatgaaacggctcataaaaagatacgtcctgaaagcccaggtggacagagaaaatgacgaagtcaatgaaggcgagctgaaggaaatcaagcaagatatctccagcctgcgctatgagcttcttgaggaaaaatctcaagctactggtgagctggcagacctgattcaacaactcagcgagaagtttggaaagaacttaaacaaagaccacctgagggtgaacaagggcaaagacatttagcagcccacatcggcgtctgtgacttctaccagcattccaaggccaggttggatgccctcgcccccatccttggtggggaggggtccccagcccactcctctaggacacgaaggggatctcctgg

SEQ ID NO: 32158 - DNA, 2587 bp, Homo sapiens
  source 1..2587: mol_type = unassigned DNA
cacggttctgcctcggaaggcgagtttttaccactgcaacacaaagaacagaggagcgcgctttcacatcgttgcaacttaactcacttgaccagctctatacttcagcaccacggagagcggtacatccttggctaccacccatggggagccagcttctggcgactcaacaccggattccggtcatctagaggaggaacaagcctgcgtattacaccctcaatgttgaggaacagcaccttcaaaaacatgcagcgccggcacacaacgctgagggagaagggccgtcgccaggccatccggggtcccgcctacatgttcaacgagaagggcaccagtctgacgcccgaggaggagcgcttcctggactcggctgagtatggcaacatcccggtggtccggaaaatgctggaggagtccaagacccttaacttcaactgtgtggactacatggggcagaacgctctgcagctggccgtgggcaacgagcacctagaggtcacggagctgctgctgaagaaggagaacctggcacgggtgggggacgcgctgctgctggccatcagcaagggctatgtgcgcatcgtggaggccatcctcaaccacccggccttcgcgcagggccagcgcctgacgctcagcccgctggaacaggagctgcgcgacgacgacttctatgcctacgacgaggacggcacgcgcttctcccacgacatcacgcccatcatcctggcggcgcactgccaggagtatgagatcgtgcacatcctgctgctcaagggcgcccgcatcgagcggccccacgactacttctgcaagtgcaatgagtgcaccgagaaacagcggaaagactccttcagccactcgcgctcgcgcatgaacgcctacaaaggactggcgagtgctgcctacttgtccctgtccagcgaagaccctgtcctcaccgccctggagctcagcaacgagttagccagactagccaacattgagactgaatttaagctaggacgaaccctgaggagccctttcatgaagtttgtagctcatgcagtttcttttacaatcttcttgggattattagttgtgaatgcatctgaccgatttgaaggtgttaaaaccctgccaaacgaaaccttcacagactacccaaaacaaatcttcagagtgaaaaccacacagttctcctggacagaaatgctcattatgaagtgggtcttaggaatgatttggtccgaatgcaaggaaatctgggaggaggggccacgggagtacgtgctgcacttgtggaacctgctagatttcgggatgctgtccatcttcgtggcctccttcacagcacgcttcatggccttcctgaaggccacggaggcacagctgtacgtggaccagcacgtgcaggacgacacgctgcacaatgtctcgcttccgccggaagtggcatacttcacctacgccagggacaagtggtggccttcagaccctcagatcatatcggaagggctctacgcgatagccgtcgtgctgagcttctctcgcattgcatacattctgccagccaacgagagttttgggcccctgcagatctcgctagggagaactgtgaaagatatcttcaagttcatggtcattttcatcatggtatttgtggccttcatgattgggatgttcaacctgtactcttactaccgaggtgccaaatacaacccagcgtttacaacggttgaagaaagttttaaaactttgttttggtccatattcggcttatctgaagtaatctcagtggtgctgaaatacgaccacaaattcatcgagaacattggctacgttctctacggcgtttataacgtcaccatggtggtagtgttgctcaacatgctaatagccatgataaacaactcctatcaggaaattgaggaggatgcagatgtggaatggaagttcgcccgagcaaaactctggctgtcttactttgatgaaggaagaactctacctgctccttttaatctagtgccaagtcctaaatcattttattatctcataatgagaatcaagatgtgcctcataaaactctgcaaatctaaggccaaaagctgtgaaaatgaccttgaaatgggcatgctgaattccaaattcaagaagactcgctaccaggctggcatgaggaattctgaaaatctgacagcaaataacactttgagcaagcccaccagataccagaaaatcatgaaacggctcataaaaagatacgtcctgaaagcccaggtggacagagaaaatgacgaagtcaatgaaggcgagctgaaggaaatcaagcaagatatctccagcctgcgctatgagcttcttgaggaaaaatctcaagctactggtgagctggcagacctgattcaacaactcagcgagaagtttggaaagaacttaaacaaagaccacctgagggtgaacaagggcaaagacatttagcagcccacatcggcgtctgtgacttctaccagcattccaaggccaggttggatgccctcgcccccatccttggtggggaggggtccccagcccactcctctaggacacgaaggggatctcctgg

SEQ ID NO: 32159 - DNA, 2987 bp, Homo sapiens
  source 1..2987: mol_type = unassigned DNA
acagatgcttctccgtcatgttctctgggaaatttccccccgattaggaaaaggacggtaacacggttctgcctcggaaggcgagtttttaccactgcaacacaaagaacagaggagcgcgctttcacatcgttgcaacttaactcacttgaccagctctatacttcagcaccacggagagcggtacatccttggctaccacccatggggagccagcttctggcgactcaacaccggattccggtcatctagaggaggaacaagcctgcgtattacaccctcaatgttgaggaacagcaccttcaaaaacatgcagcgccggcacacaacgctgagggagaagggccgtcgccaggccatccggggtcccgcctacatgttcaacgagaagggcaccagtctgacgcccgaggaggagcgcttcctggactcggctgagtatggcaacatcccggtggtccggaaaatgctggaggagtccaagacccttaacttcaactgtgtggactacatggggcagaacgctctgcagctggccgtgggcaacgagcacctagaggtcacggagctgctgctgaagaaggagaacctggcacgggtgggggacgcgctgctgctggccatcagcaagggctatgtgcgcatcgtggaggccatcctcaaccacccggccttcgcgcagggccagcgcctgacgctcagcccgctggaacaggagctgcgcgacgacgacttctatgcctacgacgaggacggcacgcgcttctcccacgacatcacgcccatcatcctggcggcgcactgccaggagtatgagatcgtgcacatcctgctgctcaagggcgcccgcatcgagcggccccacgactacttctgcaagtgcaatgagtgcaccgagaaacagcggaaagactccttcagccactcgcgctcgcgcatgaacgcctacaaaggactggcgagtgctgcctacttgtccctgtccagcgaagaccctgtcctcaccgccctggagctcagcaacgagttagccagactagccaacattgagactgaatttaagaacgattacaggaagttatctatgcaatgcaaggattttgtagtgggcgtgctggacctgtgccgagacacagaagaggtggaagcaattttaaacggtgatgtgaacttccaagtctggtccgaccaccaccgtccaagtctgagccggatcaaactcgccattaaatatgaagtcaagaagttcgttgctcatcctaactgtcagcagcaattgcttaccatgtggtatgaaaatctctcaggcttacgtcaacagtctatcgctgtgaaattcctggctgtctttggagtctccataggcctcccttttctcgccatagcctattggattgctccgtgcagcaagctaggacgaaccctgaggagccctttcatgaagtttgtagctcatgcagtttcttttacaatcttcttgggattattagttgtgaatgcatctgaccgatttgaaggtgttaaaaccctgccaaacgaaaccttcacagactacccaaaacaaatcttcagagtgaaaaccacacagttctcctggacagaaatgctcattatgaagtgggtcttaggaatgatttggtccgaatgcaaggaaatctgggaggaggggccacgggagtacgtgctgcacttgtggaacctgctagatttcgggatgctgtccatcttcgtggcctccttcacagcacgcttcatggccttcctgaaggccacggaggcacagctgtacgtggaccagcacgtgcaggacgacacgctgcacaatgtctcgcttccgccggaagtggcatacttcacctacgccagggacaagtggtggccttcagaccctcagatcatatcggaagggctctacgcgatagccgtcgtgctgagcttctctcgcattgcatacattctgccagccaacgagagttttgggcccctgcagatctcgctagggagaactgtgaaagatatcttcaagttcatggtcattttcatcatggtatttgtggccttcatgattgggatgttcaacctgtactcttactaccgaggtgccaaatacaacccagcgtttacaacggttgaagaaagttttaaaactttgttttggtccatattcggcttatctgaagtaatctcagtggtgctgaaatacgaccacaaattcatcgagaacattggctacgttctctacggcgtttataacgtcaccatggtggtagtgttgctcaacatgctaatagccatgataaacaactcctatcaggaaattgaggaggatgcagatgtggaatggaagttcgcccgagcaaaactctggctgtcttactttgatgaaggaagaactctacctgctccttttaatctagtgccaagtcctaaatcattttattatctcataatgagaatcaagatgtgcctcataaaactctgcaaatctaaggccaaaagctgtgaaaatgaccttgaaatgggcatgctgaattccaaattcaagaagactcgctaccaggctggcatgaggaattctgaaaatctgacagcaaataacactttgagcaagcccaccagataccagaaaatcatgaaacggctcataaaaagatacgtcctgaaagcccaggtggacagagaaaatgacgaagtcaatgaaggcgagctgaaggaaatcaagcaagatatctccagcctgcgctatgagcttcttgaggaaaaatctcaagctactggtgagctggcagacctgattcaacaactcagcgagaagtttggaaagaacttaaacaaagaccacctgagggtgaacaagggcaaagacatttagcagcccacatcggcgtctgtgacttctaccagcattccaaggccaggttggatgccctcgcccccatccttggtggggaggggtccccagcccactcctctaggacacgaagggg

SEQ ID NO: 32160 - DNA, 5627 bp, Homo sapiens
  source 1..5627: mol_type = unassigned DNA
tgggggtctcagaatggagccctcagccctgaggaaagctggctcggagcaggaggagggctttgaggggctgcccagaagggtcactgacctggggatggtctccaatctccggcgcagcaacagcagcctcttcaagagctggaggctacagtgccccttcggcaacaatgacaagcaagaaagcctcagttcgtggattcctgaaaacatcaagaagaaagaatgcgtgtattttgtggaaagttccaaactgtctgatgctgggaaggtggtgtgtcagtgtggctacacgcatgagcagcacttggaggaggctaccaagccccacaccttccagggcacacagtgggacccaaagaaacatgtccaggagatgccaaccgatgcctttggcgacatcgtcttcacgggcctgagccagaaggtgaaaaagtacgtccgagtctcccaggacacgccctccagcgtgatctaccacctcatgacccagcactgggggctggacgtccccaatctcttgatctcggtgaccgggggggccaagaacttcaacatgaagccgcggctgaagagcattttccgcagaggcctggtcaaggtggctcagaccacaggggcctggatcatcacaggggggtcccacaccggcgtcatgaagcaggtaggcgaggcggtgcgggacttcagcctgagcagcagctacaaggaaggcgagctcatcaccatcggagtcgccacctggggcactgtccaccgccgcgagggcctgatccatcccacgggcagcttccccgccgagtacatactggatgaggatggccaagggaacctgacctgcctagacagcaaccactctcacttcatcctcgtggacgacgggacccacggccagtacggggtggagattcctctgaggaccaggctggagaagttcatatcggagcagaccaaggaaagaggaggtgtggccatcaagatccccatcgtgtgcgtggtgctggagggcggcccgggcacgttgcacaccatcgacaacgccaccaccaacggcaccccctgtgtggttgtggagggctcgggccgcgtggccgacgtcattgcccaggtggccaacctgcctgtctcggacatcactatctccctgatccagcagaaactgagcgtgttcttccaggagatgtttgagaccttcacggaaagcaggattgtcgagtggaccaaaaagatccaagatatcgtccggaggcggcagctgctgactgtcttccgggaaggcaaggatggtcagcaggacgtggatgtggccatcttgcaggccttgctgaaagcctcacggagccaagaccactttggccacgagaactgggaccaccagctgaaactggcagtggcatggaatcgcgtggacattgcccgcagtgagatcttcatggatgagtggcagtggaagccttcagatctgcaccccacgatgacagctgcactcatctccaacaagcctgagtttgtgaagctcttcctggagaacggggtgcagctgaaggagtttgtcacctgggacaccttgctctacctgtacgagaacctggacccctcctgcctgttccacagcaagctgcagatgcaccacgtggcccaggtgctgcgggagctgctgggggacttcacgcagccgctttatccccggccccggcacaacgaccggctgcggctcctgctgcccgttccccacgtcaagctcaacgtgcagggagtgagcctccggtccctctacaagcgttcctcaggccatgtgaccttcaccatggaccccatccgtgaccttctcatttgggccattgtccagaaccgtcgggagctggcaggaatcatctgggctcagagccaggactgcatcgcagcggccttggcctgcagcaagatcctgaaggaactgtccaaggaggaggaggacacggacagctcggaggagatgctggcgctggcggaggagtatgagcacagagccatcggggtcttcaccgagtgctaccggaaggacgaagagagagcccagaaactgctcacccgcgtgtccgaggcctgggggaagaccacctgcctgcagctcgccctggaggccaaggacatgaagtttgtgtctcacgggggcatccaggccttcctgaccaaggtgtggtggggccagctctccgtggacaatgggctgtggcgtgtgaccctgtgcatgctggccttcccgctgctcctcaccggcctcatctccttcagggagaagaggctgcaggatgtgggcacccccgcggcccgcgcccgtgccttcttcaccgcacccgtggtggtcttccacctgaacatcctctcctacttcgccttcctctgcctgttcgcctacgtgctcatggtggacttccagcctgtgccctcctggtgcgagtgtgccatctacctctggctcttctccttggtgtgcgaggagatgcggcagctcttctatgaccctgacgagtgcgggctgatgaagaaggcagccttgtacttcagtgacttctggaataagctggacgtcggcgcaatcttgctcttcgtggcagggctgacctgcaggctcatcccggcgacgctgtaccccgggcgcgtcatcctctctctggacttcatcctgttctgcctccggctcatgcacatttttaccatcagtaagacgctggggcccaagatcatcattgtgaagcggatgatgaaggacgtcttcttcttcctcttcctgctggctgtgtgggtggtgtccttcggggtggccaagcaggccatcctcatccacaacgagcgccgggtggactggctgttccgaggggccgtctaccactcctacctcaccatcttcgggcagatcccgggctacatcgacggtgtgaacttcaacccggagcactgcagccccaatggcaccgacccctacaagcctaagtgccccgagagcgacgcgacgcagcagaggccggccttccctgagtggctgacggtcctcctactctgcctctacctgctcttcaccaacatcctgctgctcaacctcctcatcgccatgttcaactacaccttccagcaggtgcaggagcacacggaccagatttggaagttccagcgccatgacctgatcgaggagtaccacggccgccccgccgcgccgccccccttcatcctcctcagccacctgcagctcttcatcaagagggtggtcctgaagactccggccaagaggcacaagcagctcaagaacaagctggagaagaacgaggaggcggccctgctatcctgggagatctacctgaaggagaactacctccagaaccgacagttccagcaaaagcagcggcccgagcagaagatcgaggacatcagcaataaggttgacgccatggtggacctgctggacctggacccactgaagaggtcgggctccatggagcagaggttggcctccctggaggagcaggtggcccagacagcccaagccctgcactggatcgtgaggacgctgcgggccagcggcttcagctcggaggcggacgtccccactctggcctcccagaaggccgcggaggagccggatgctgagccgggaggcaggaagaagacggaggagccgggcgacagctaccacgtgaatgcccggcacctcctctaccccaactgccctgtcacgcgcttccccgtgcccaacgagaaggtgccctgggagacggagttcctgatctatgacccacccttttacacggcagagaggaaggacgcggccgccatggaccccatgggagagaaccccatgggccgcacaggactgcgtgggcgcgggagcctcagctgcttcggacccaaccacacgctgtaccccatggtcacgcggtggaggcggaacgaggatggagccatctgcaggaagagcataaagaagatgctggaagtgctggtggtgaagctccctctctccgagcactgggccctgcctgggggctcccgggagccaggggagatgctacctcggaagctgaagcggatcctccggcaggagcactggccgtcttttgaaaacttgctgaagtgcggcatggaggtgtacaaaggctacatggatgacccgaggaacacggacaatgcctggatcgagacggtggccgtcagcgtccacttccaggaccagaatgacgtggagctgaacaggctgaactctaacctgcacgcctgcgactcgggggcctccatccgatggcaggtggtggacaggcgcatcccactctatgcgaaccacaagaccctcctccagaaggcagccgctgagttcggggctcactactgactgtgccctcaggctgggcggctccagtccatagacgttccccccagaaaccagggcttctctctcctgagcctggccaggactcaggctgttcctgggccctgcacatgatggggtttggtggacccagtgcccctcacggctgccgcaagtctgctgcagatgacctcatgaactggaaggggtcaaggtgacccgggaggagagctcaagacagggcacaggctactcagagctgaggggcccctgggacccttggccatcaggcgaggggctgggcctgtgcagctgggcccttggccagagtccactcccttcctggctgtgtcaccccgagcagctcatccaccatggaggtcattggcctgaggcaagttccccggagagtcggggtcccctgtggccccctcaggcctatgtctgtgaggaaggggccctgccactctccccaagagggcctccatgtttcgaggtgcctcaacatggagccttgcctggcctgggctaggggcactgtctgaactcctgactgtcaggataaactccgtgggggtacaggagcccagacaaagcccaggcctgtcaagagacgcagagggcccctgccagggttggccccagggaccctgggacgaggctgcagaagctctccctccctactccctgggagccacgtgctggccatgtggccagggacggcatgagcaggaggcggggacgtgggggccttctggtttggtgtcaacagctcacaggagcgtgaaccatgagggccctcaggaggggaacgtggtaaaacccaagacattaaatctgccatctcaggcctggctggctcttctgtgctttccacaaataaagttcctgacacgtccagggccaggggctgtgtgacggctgcctgaagttctcctcgatcccccggtgagcttcctgcagcctgtggatgtcctgcagcccctcagccctacccccaagtttctcctctgacccatcagctccctgtcttcattttcctaaacctgggctccagcatcgtccccaagcccaccaggccaggatgcaggcatccacatgccctcctccttggcttcccctgcgtggtggtgccaatgtgccctggcacccctgcagaggctccggatggagcctggggctgcctggccactgagcactggccgaggtgatgcccacccttccctggacaggcctctgtcttccacctgacccaaagctctctagccacccccttgtccccaggtat

SEQ ID NO: 32161 - DNA, 5989 bp, Homo sapiens
  source 1..5989: mol_type = unassigned DNA
tgcaccgggcacgcggcgcacgctcgggcgagatgtggatggccccgcggggccagggcggcggtgctgcgcggggacgcgggtgacgccggggcgcgggcggctccgagcagcaaccaccccatgtgtctctagaaccccagtgtagcgagctggagagaggactgtcctgagggcagcaggcctggttgcagctggcgtgggggtctcagaatggagccctcagccctgaggaaagctggctcggagcaggaggagggctttgaggggctgcccagaagggtcactgacctggggatggtctccaatctccggcgcagcaacagcagcctcttcaagagctggaggctacagtgccccttcggcaacaatgacaagcaagaaagcctcagttcgtggattcctgaaaacatcaagaagaaagaatgcgtgtattttgtggaaagttccaaactgtctgatgctgggaaggtggtgtgtcagtgtggctacacgcatgagcagcacttggaggaggctaccaagccccacaccttccagggcacacagtgggacccaaagaaacatgtccaggagatgccaaccgatgcctttggcgacatcgtcttcacgggcctgagccagaaggtgaaaaagtacgtccgagtctcccaggacacgccctccagcgtgatctaccacctcatgacccagcactgggggctggacgtccccaatctcttgatctcggtgaccgggggggccaagaacttcaacatgaagccgcggctgaagagcattttccgcagaggcctggtcaaggtggctcagaccacaggggcctggatcatcacaggggggtcccacaccggcgtcatgaagcaggtaggcgaggcggtgcgggacttcagcctgagcagcagctacaaggaaggcgagctcatcaccatcggagtcgccacctggggcactgtccaccgccgcgagggcctgatccatcccacgggcagcttccccgccgagtacatactggatgaggatggccaagggaacctgacctgcctagacagcaaccactctcacttcatcctcgtggacgacgggacccacggccagtacggggtggagattcctctgaggaccaggctggagaagttcatatcggagcagaccaaggaaagaggaggtgtggccatcaagatccccatcgtgtgcgtggtgctggagggcggcccgggcacgttgcacaccatcgacaacgccaccaccaacggcaccccctgtgtggttgtggagggctcgggccgcgtggccgacgtcattgcccaggtggccaacctgcctgtctcggacatcactatctccctgatccagcagaaactgagcgtgttcttccaggagatgtttgagaccttcacggaaagcaggattgtcgagtggaccaaaaagatccaagatatcgtccggaggcggcagctgctgactgtcttccgggaaggcaaggatggtcagcaggacgtggatgtggccatcttgcaggccttgctgaaagcctcacggagccaagaccactttggccacgagaactgggaccaccagctgaaactggcagtggcatggaatcgcgtggacattgcccgcagtgagatcttcatggatgagtggcagtggaagccttcagatctgcaccccacgatgacagctgcactcatctccaacaagcctgagtttgtgaagctcttcctggagaacggggtgcagctgaaggagtttgtcacctgggacaccttgctctacctgtacgagaacctggacccctcctgcctgttccacagcaagctgcagaaggtgctggtggaggatcccgagcgcccggcttgcgcgcccgcggcgccccgcctgcagatgcaccacgtggcccaggtgctgcgggagctgctgggggacttcacgcagccgctttatccccggccccggcacaacgaccggctgcggctcctgctgcccgttccccacgtcaagctcaacgtgcagggagtgagcctccggtccctctacaagcgttcctcaggccatgtgaccttcaccatggaccccatccgtgaccttctcatttgggccattgtccagaaccgtcgggagctggcaggaatcatctgggctcagagccaggactgcatcgcagcggccttggcctgcagcaagatcctgaaggaactgtccaaggaggaggaggacacggacagctcggaggagatgctggcgctggcggaggagtatgagcacagagccatcggggtcttcaccgagtgctaccggaaggacgaagagagagcccagaaactgctcacccgcgtgtccgaggcctgggggaagaccacctgcctgcagctcgccctggaggccaaggacatgaagtttgtgtctcacgggggcatccaggccttcctgaccaaggtgtggtggggccagctctccgtggacaatgggctgtggcgtgtgaccctgtgcatgctggccttcccgctgctcctcaccggcctcatctccttcagggagaagaggctgcaggatgtgggcacccccgcggcccgcgcccgtgccttcttcaccgcacccgtggtggtcttccacctgaacatcctctcctacttcgccttcctctgcctgttcgcctacgtgctcatggtggacttccagcctgtgccctcctggtgcgagtgtgccatctacctctggctcttctccttggtgtgcgaggagatgcggcagctcttctatgaccctgacgagtgcgggctgatgaagaaggcagccttgtacttcagtgacttctggaataagctggacgtcggcgcaatcttgctcttcgtggcagggctgacctgcaggctcatcccggcgacgctgtaccccgggcgcgtcatcctctctctggacttcatcctgttctgcctccggctcatgcacatttttaccatcagtaagacgctggggcccaagatcatcattgtgaagcggatgatgaaggacgtcttcttcttcctcttcctgctggctgtgtgggtggtgtccttcggggtggccaagcaggccatcctcatccacaacgagcgccgggtggactggctgttccgaggggccgtctaccactcctacctcaccatcttcgggcagatcccgggctacatcgacggtgtgaacttcaacccggagcactgcagccccaatggcaccgacccctacaagcctaagtgccccgagagcgacgcgacgcagcagaggccggccttccctgagtggctgacggtcctcctactctgcctctacctgctcttcaccaacatcctgctgctcaacctcctcatcgccatgttcaactacaccttccagcaggtgcaggagcacacggaccagatttggaagttccagcgccatgacctgatcgaggagtaccacggccgccccgccgcgccgccccccttcatcctcctcagccacctgcagctcttcatcaagagggtggtcctgaagactccggccaagaggcacaagcagctcaagaacaagctggagaagaacgaggaggcggccctgctatcctgggagatctacctgaaggagaactacctccagaaccgacagttccagcaaaagcagcggcccgagcagaagatcgaggacatcagcaataaggttgacgccatggtggacctgctggacctggacccactgaagaggtcgggctccatggagcagaggttggcctccctggaggagcaggtggcccagacagcccaagccctgcactggatcgtgaggacgctgcgggccagcggcttcagctcggaggcggacgtccccactctggcctcccagaaggccgcggaggagccggatgctgagccgggaggcaggaagaagacggaggagccgggcgacagctaccacgtgaatgcccggcacctcctctaccccaactgccctgtcacgcgcttccccgtgcccaacgagaaggtgccctgggagacggagttcctgatctatgacccacccttttacacggcagagaggaaggacgcggccgccatggaccccatgggagacaccctggagccactgtccacgatccagtacaacgtggtggatggcctgagggaccgccggagcttccacgggccgtacacagtgcaggccgggttgcccctgaaccccatgggccgcacaggactgcgtgggcgcgggagcctcagctgcttcggacccaaccacacgctgtaccccatggtcacgcggtggaggcggaacgaggatggagccatctgcaggaagagcataaagaagatgctggaagtgctggtggtgaagctccctctctccgagcactgggccctgcctgggggctcccgggagccaggggagatgctacctcggaagctgaagcggatcctccggcaggagcactggccgtcttttgaaaacttgctgaagtgcggcatggaggtgtacaaaggctacatggatgacccgaggaacacggacaatgcctggatcgagacggtggccgtcagcgtccacttccaggaccagaatgacgtggagctgaacaggctgaactctaacctgcacgcctgcgactcgggggcctccatccgatggcaggtggtggacaggcgcatcccactctatgcgaaccacaagaccctcctccagaaggcagccgctgagttcggggctcactactgactgtgccctcaggctgggcggctccagtccatagacgttccccccagaaaccagggcttctctctcctgagcctggccaggactcaggctgttcctgggccctgcacatgatggggtttggtggacccagtgcccctcacggctgccgcaagtctgctgcagatgacctcatgaactggaaggggtcaaggtgacccgggaggagagctcaagacagggcacaggctactcagagctgaggggcccctgggacccttggccatcaggcgaggggctgggcctgtgcagctgggcccttggccagagtccactcccttcctggctgtgtcaccccgagcagctcatccaccatggaggtcattggcctgaggcaagttccccggagagtcggggtcccctgtggccccctcaggcctatgtctgtgaggaaggggccctgccactctccccaagagggcctccatgtttcgaggtgcctcaacatggagccttgcctggcctgggctaggggcactgtctgaactcctgactgtcaggataaactccgtgggggtacaggagcccagacaaagcccaggcctgtcaagagacgcagagggcccctgccagggttggccccagggaccctgggacgaggctgcagaagctctccctccctactccctgggagccacgtgctggccatgtggccagggacggcatgagcaggaggcggggacgtgggggccttctggtttggtgtcaacagctcacaggagcgtgaaccatgagggccctcaggaggggaacgtggtaaaacccaagacattaaatctgccatctcaggcctggctggctcttctgtgctttccacaaataaagttcctgacacgtccagggccaggggctgtgtgacggctgcctgaagttctcctcgatcccccggtgagcttcctgcagcctgtggatgtcctgcagcccctcagccctacccccaagtttctcctctgacccatcagctccctgtcttcattttcctaaacctgggctccagcatcgtccccaagcccaccaggccaggatgcaggcatccacatgccctcctccttggcttcccctgcgtggtggtgccaatgtgccctggcacccctgcagaggctccggatggagcctggggctgcctggccactgagcactggccgaggtgatgcccacccttccctggacaggcctctgtcttccacctgacccaaagctctctagccacccccttgtccccaggtat

SEQ ID NO: 32162 - DNA, 6221 bp, Homo sapiens
  source 1..6221: mol_type = unassigned DNA
tgtgcagaattgtacagttgcgaaaccatgtcgctggcagctggtgctggcggtggagacttccctgtgcggtgctcagtgcagctgcacccgtgggggagggagctctttctctggccctgcagtcacctgaggttgttaccattatgaacggccgctgggacccccgcatgtgcatgtactcccccagagtgtccgggggccccagccaagggacacagctcaggcagctgggaacatgtgcaggctgatgaagagaaccggatgagggcttcacatgaggaagcatgtggccaggtcctctcagaacatcagcctcatcttcctgtctctgatctatttcagcaaccaccccatgtgtctctagaaccccagtgtagcgagctggagagaggactgtcctgagggcagcaggcctggttgcagctggcgtgggggtctcagaatggagccctcagccctgaggaaagctggctcggagcaggaggagggctttgaggggctgcccagaagggtcactgacctggggatggtctccaatctccggcgcagcaacagcagcctcttcaagagctggaggctacagtgccccttcggcaacaatgacaagcaagaaagcctcagttcgtggattcctgaaaacatcaagaagaaagaatgcgtgtattttgtggaaagttccaaactgtctgatgctgggaaggtggtgtgtcagtgtggctacacgcatgagcagcacttggaggaggctaccaagccccacaccttccagggcacacagtgggacccaaagaaacatgtccaggagatgccaaccgatgcctttggcgacatcgtcttcacgggcctgagccagaaggtgaaaaagtacgtccgagtctcccaggacacgccctccagcgtgatctaccacctcatgacccagcactgggggctggacgtccccaatctcttgatctcggtgaccgggggggccaagaacttcaacatgaagccgcggctgaagagcattttccgcagaggcctggtcaaggtggctcagaccacaggggcctggatcatcacaggggggtcccacaccggcgtcatgaagcaggtaggcgaggcggtgcgggacttcagcctgagcagcagctacaaggaaggcgagctcatcaccatcggagtcgccacctggggcactgtccaccgccgcgagggcctgatccatcccacgggcagcttccccgccgagtacatactggatgaggatggccaagggaacctgacctgcctagacagcaaccactctcacttcatcctcgtggacgacgggacccacggccagtacggggtggagattcctctgaggaccaggctggagaagttcatatcggagcagaccaaggaaagaggaggtgtggccatcaagatccccatcgtgtgcgtggtgctggagggcggcccgggcacgttgcacaccatcgacaacgccaccaccaacggcaccccctgtgtggttgtggagggctcgggccgcgtggccgacgtcattgcccaggtggccaacctgcctgtctcggacatcactatctccctgatccagcagaaactgagcgtgttcttccaggagatgtttgagaccttcacggaaagcaggattgtcgagtggaccaaaaagatccaagatatcgtccggaggcggcagctgctgactgtcttccgggaaggcaaggatggtcagcaggacgtggatgtggccatcttgcaggccttgctgaaagcctcacggagccaagaccactttggccacgagaactgggaccaccagctgaaactggcagtggcatggaatcgcgtggacattgcccgcagtgagatcttcatggatgagtggcagtggaagccttcagatctgcaccccacgatgacagctgcactcatctccaacaagcctgagtttgtgaagctcttcctggagaacggggtgcagctgaaggagtttgtcacctgggacaccttgctctacctgtacgagaacctggacccctcctgcctgttccacagcaagctgcagaaggtgctggtggaggatcccgagcgcccggcttgcgcgcccgcggcgccccgcctgcagatgcaccacgtggcccaggtgctgcgggagctgctgggggacttcacgcagccgctttatccccggccccggcacaacgaccggctgcggctcctgctgcccgttccccacgtcaagctcaacgtgcagggagtgagcctccggtccctctacaagcgttcctcaggccatgtgaccttcaccatggaccccatccgtgaccttctcatttgggccattgtccagaaccgtcgggagctggcaggaatcatctgggctcagagccaggactgcatcgcagcggccttggcctgcagcaagatcctgaaggaactgtccaaggaggaggaggacacggacagctcggaggagatgctggcgctggcggaggagtatgagcacagagccatcggggtcttcaccgagtgctaccggaaggacgaagagagagcccagaaactgctcacccgcgtgtccgaggcctgggggaagaccacctgcctgcagctcgccctggaggccaaggacatgaagtttgtgtctcacgggggcatccaggccttcctgaccaaggtgtggtggggccagctctccgtggacaatgggctgtggcgtgtgaccctgtgcatgctggccttcccgctgctcctcaccggcctcatctccttcagggagaagaggctgcaggatgtgggcacccccgcggcccgcgcccgtgccttcttcaccgcacccgtggtggtcttccacctgaacatcctctcctacttcgccttcctctgcctgttcgcctacgtgctcatggtggacttccagcctgtgccctcctggtgcgagtgtgccatctacctctggctcttctccttggtgtgcgaggagatgcggcagctcttctatgaccctgacgagtgcgggctgatgaagaaggcagccttgtacttcagtgacttctggaataagctggacgtcggcgcaatcttgctcttcgtggcagggctgacctgcaggctcatcccggcgacgctgtaccccgggcgcgtcatcctctctctggacttcatcctgttctgcctccggctcatgcacatttttaccatcagtaagacgctggggcccaagatcatcattgtgaagcggatgatgaaggacgtcttcttcttcctcttcctgctggctgtgtgggtggtgtccttcggggtggccaagcaggccatcctcatccacaacgagcgccgggtggactggctgttccgaggggccgtctaccactcctacctcaccatcttcgggcagatcccgggctacatcgacggtgtgaacttcaacccggagcactgcagccccaatggcaccgacccctacaagcctaagtgccccgagagcgacgcgacgcagcagaggccggccttccctgagtggctgacggtcctcctactctgcctctacctgctcttcaccaacatcctgctgctcaacctcctcatcgccatgttcaactacaccttccagcaggtgcaggagcacacggaccagatttggaagttccagcgccatgacctgatcgaggagtaccacggccgccccgccgcgccgccccccttcatcctcctcagccacctgcagctcttcatcaagagggtggtcctgaagactccggccaagaggcacaagcagctcaagaacaagctggagaagaacgaggaggcggccctgctatcctgggagatctacctgaaggagaactacctccagaaccgacagttccagcaaaagcagcggcccgagcagaagatcgaggacatcagcaataaggttgacgccatggtggacctgctggacctggacccactgaagaggtcgggctccatggagcagaggttggcctccctggaggagcaggtggcccagacagcccaagccctgcactggatcgtgaggacgctgcgggccagcggcttcagctcggaggcggacgtccccactctggcctcccagaaggccgcggaggagccggatgctgagccgggaggcaggaagaagacggaggagccgggcgacagctaccacgtgaatgcccggcacctcctctaccccaactgccctgtcacgcgcttccccgtgcccaacgagaaggtgccctgggagacggagttcctgatctatgacccacccttttacacggcagagaggaaggacgcggccgccatggaccccatgggagacaccctggagccactgtccacgatccagtacaacgtggtggatggcctgagggaccgccggagcttccacgggccgtacacagtgcaggccgggttgcccctgaaccccatgggccgcacaggactgcgtgggcgcgggagcctcagctgcttcggacccaaccacacgctgtaccccatggtcacgcggtggaggcggaacgaggatggagccatctgcaggaagagcataaagaagatgctggaagtgctggtggtgaagctccctctctccgagcactgggccctgcctgggggctcccgggagccaggggagatgctacctcggaagctgaagcggatcctccggcaggagcactggccgtcttttgaaaacttgctgaagtgcggcatggaggtgtacaaaggctacatggatgacccgaggaacacggacaatgcctggatcgagacggtggccgtcagcgtccacttccaggaccagaatgacgtggagctgaacaggctgaactctaacctgcacgcctgcgactcgggggcctccatccgatggcaggtggtggacaggcgcatcccactctatgcgaaccacaagaccctcctccagaaggcagccgctgagttcggggctcactactgactgtgccctcaggctgggcggctccagtccatagacgttccccccagaaaccagggcttctctctcctgagcctggccaggactcaggctgttcctgggccctgcacatgatggggtttggtggacccagtgcccctcacggctgccgcaagtctgctgcagatgacctcatgaactggaaggggtcaaggtgacccgggaggagagctcaagacagggcacaggctactcagagctgaggggcccctgggacccttggccatcaggcgaggggctgggcctgtgcagctgggcccttggccagagtccactcccttcctggctgtgtcaccccgagcagctcatccaccatggaggtcattggcctgaggcaagttccccggagagtcggggtcccctgtggccccctcaggcctatgtctgtgaggaaggggccctgccactctccccaagagggcctccatgtttcgaggtgcctcaacatggagccttgcctggcctgggctaggggcactgtctgaactcctgactgtcaggataaactccgtgggggtacaggagcccagacaaagcccaggcctgtcaagagacgcagagggcccctgccagggttggccccagggaccctgggacgaggctgcagaagctctccctccctactccctgggagccacgtgctggccatgtggccagggacggcatgagcaggaggcggggacgtgggggccttctggtttggtgtcaacagctcacaggagcgtgaaccatgagggccctcaggaggggaacgtggtaaaacccaagacattaaatctgccatctcaggcctggctggctcttctgtgctttccacaaataaagttcctgacacgtccagggccaggggctgtgtgacggctgcctgaagttctcctcgatcccccggtgagcttcctgcagcctgtggatgtcctgcagcccctcagccctacccccaagtttctcctctgacccatcagctccctgtcttcattttcctaaacctgggctccagcatcgtccccaagcccaccaggccaggatgcaggcatccacatgccctcctccttggcttcccctgcgtggtggtgccaatgtgccctggcacccctgcagaggctccggatggagcctggggctgcctggccactgagcactggccgaggtgatgcccacccttccctggacaggcctctgtcttccacctgacccaaagctctctagccacccccttgtccccaggtat

SEQ ID NO: 32163 - DNA, 582 bp, Homo sapiens
  source 1..582: mol_type = unassigned DNA
gcgcgagcccgggtgcggggactgaggcggccgtcccgggagcttgtgaagcaaccaccccatgtgtctctagaaccccagtgtagcgagctggagagaggactgtcctgagggcagcaggcctggttgcagctggcgtgggggtctcagaatggagccctcagccctgaggaaagctggctcggagcaggaggagggctttgaggggctgcccagaagggtcactgacctggggatggtctccaatctccggcgcagcaacagcagcctcttcaagagctggaggctacagtgccccttcggcaacaatgacaagcaagaaagcctcagttcgtggattcctgaaaacatcaagaagaaagaatgcgtgtattttgtggaaagttccaaactgtctgatgctgggaaggtggtgtgtcagtgtggctacacgcatgagcagcacttggaggaggctaccaagccccacaccttccagggcacacagtgggacccaaagaaacatgtccaggagatgccaaccgatgcctttggcgacatcgtcttcacgggcctgagccagaaggtgaaaaagtacgtccg

SEQ ID NO: 32164 - DNA, 1669 bp, Homo sapiens
  source 1..1669: mol_type = unassigned DNA
agccctgcactggatcgtgaggacgctgcgggccagcggcttcagctcggaggcggacgtccccactctggcctcccagaaggccgcggaggagccggatgctgagccgggagcaggaagaagacggaggagccgggcgacagtaccacgtgaatgcccggcacctcctctaccccaactgccctgtcacgcgcttccccgtgcccaacgagaaggtgccctgggagacggagttcctgatctatgacccacccttttacacggcagagaggaaggacgcggccgccatggaccccatgggagagaaccccatgggccgcacaggactgcgtgggcgcgggagcctcagctgcttcggacccaaccacacgctgtaccccatggtcacgcggtggaggcggaacgaggatggagccatctgcaggaagagcataaagaagatgctggaagtgctggtggtgaagctccctctctccgagcactgggccctgcctgggggctcccgggagccaggggagatgctacctcggaagctgaagcggatcctccggcaggagcactggccgtcttttgaaaacttgctgaagtgcggcatggaggtgtacaaaggctacatggatgacccgaggaacacggacaatgcctggatcgagacggtggccgtcagcgtccacttccaggaccagaatgacgtggagctgaacaggctgaactctaacctgcacgcctgcgactcgggggcctccatccgatggcaggtggtggacaggcgcatcccactctatgcgaaccacaagaccctcctccagaaggcagccgctgagttcggggctcactactgactgtgccctcaggctgggcggctccagtccatagacgttccccccagaaaccagggcttctctctcctgagcctggccaggactcaggctgttcctgggccctgcacatgatggggtttggtggacccagtgcccctcacggctgccgcaagtctgctgcagatgacctcatgaactggaaggggtcaaggtgacccgggaggagagctcaagacagggcacaggctactcagagctgaggggcccctgggacccttggccatcaggcgaggggctgggcctgtgcagctgggcccttggccagagtccactcccttcctggctgtgtcaccccgagcagctcatccaccatggaggtcattggcctgaggcaagttccccggagagtcggggtcccctgtggccccctcaggcctatgtctgtgaggaaggggccctgccactctccccaagagggcctccatgtttcgaggtgcctcaacatggagccttgcctggcctgggctaggggcactgtctgaactcctgactgtcaggataaactccgtgggggtacaggagcccagacaaagcccaggcctgtcaagagacgcagagggcccctgccagggttggccccagggaccctgggacgaggctgcagaagctctccctccctactccctgggagccacgtgctggccatgtggccagggacggcatgagcaggaggcggggacgtgggggccttctggtttggtgtcaacagctcacaggagcgtgaaccatgagggccctcaggaggggaacgtggtaaaacccaagacattaaatctgccatctcaggc

SEQ ID NO: 32165 - DNA, 5145 bp, Homo sapiens
  source 1..5145: mol_type = unassigned DNA
atggggaagaagtggagggatgcggcggaaatggagcggggctgctccgaccgcgaggacaacgcggagagccgcagacgcagccggagcgccagccggggcaggtttgccgagtcgtggaaaaggttaagttccaagcaggggtccaccaaacgctcgggactcccgtcgcagcagacgccggctcagaaatcctggatagaaagagcattttataaaagagaatgtgtccacatcatacccagcaccaaagacccccataggtgttgctgtgggcgtctgataggccagcatgttggcctcacccccagtatctccgtgcttcagaatgagaaaaatgaaagtcgcctctcccgaaatgacatccagtctgaaaagtggtccatcagcaaacacactcaactcagccctacggatgcttttgggaccattgagttccaaggaggtggccattccaacaaagccatgtatgtgcgagtatcttttgatacaaaacctgatctcctcttacacctgatgaccaaggaatggcagttggagcttcccaagcttctcatctctgtccatgggggcctgcagaactttgaactccagccaaaactcaagcaagtctttgggaaagggctcatcaaagcagcaatgacaactggagcgtggatattcactggaggggttaacacaggtgttattcgtcatgttggcgatgccttgaaggatcatgcctctaagtctcgaggaaagatatgcaccataggtattgccccctggggaattgtggaaaaccaggaggacctcattggaagagatgttgtccggccataccagaccatgtccaatcccatgagcaagctcactgttctcaacagcatgcattcccacttcattctggctgacaacgggaccactggaaaatatggagcagaggtgaaacttcgaagacaactggaaaagcatatttcactccagaagataaacacaagaatcggtcaaggtgttcctgtggtggcactcatagtggaaggaggacccaatgtgatctcgattgttttggagtaccttcgagacacccctcccgtgccagtggttgtctgtgatgggagtggacgggcatcggacatcctggcctttgggcataaatactcagaagaaggcggactgataaatgaatctttgagggaccagctgttggtgactatacagaagactttcacatacactcgaacccaagctcagcatctgttcatcatcctcatggagtgcatgaagaagaaggaattgattacggtatttcggatgggatcagaaggacaccaggacattgatttggctatcctgacagctttactcaaaggagccaatgcctcggccccagaccaactgagcttagctttagcctggaacagagtcgacatcgctcgcagccagatctttatttacgggcaacagtggccggtgggatctctggagcaagccatgttggatgccttagttctggacagagtggattttgtgaaattactcatagagaatggagtaagcatgcaccgttttctcaccatctccagactagaggaattgtacaatacgagacatgggccctcaaatacattgtaccacttggtcagggatgtcaaaaagcgagagtatccaggtttcggttggatctattttaaggggaacctgcccccagactacagaatcagcctgattgacatcggcctggtgatcgagtacctgatgggcggggcttatcgctgcaactacacgcgcaagcgcttccggaccctctaccacaacctcttcggccccaagagggatgatattcccttgaggcgaggaagaaagacaaccaagaaacgtgaagaagaggtggacattgacttggatgatcctgagatcaaccacttccccttccctttccatgagctcatggtgtgggctgttctcatgaagcggcagaagatggccctgttcttctggcagcacggtgaggaggccatggccaaggccctggtggcctgcaagctctgcaaagccatggctcatgaggcctctgagaacgacatggttgacgacatttcccaggagctgaatcacaattccagagactttggccagctggctgtggagctcctggaccagtcctacaagcaggacgaacagctggccatgaaactgctgacgtatgagctgaagaactggagcaacgccacgtgcctgcagcttgccgtggctgccaaacaccgcgacttcatcgcgcacacgtgcagccagatgctgctcaccgacatgtggatgggccggctccgcatgcgcaagaactcaggcctcaaggtaattctgggaattctacttcctccttcaattctcagcttggagttcaagaacaaagacgacatgccctatatgtctcaggcccaggaaatccacctccaagagaaggaggcagaagaaccagagaagcccacaaaggaaaaagaggaagaggacatggagctcacagcaatgttgggacgaaacaacggggagtcctccaggaagaaggatgaagaggaagttcagagcaagcaccggttaatccccctcggcagaaaaatctatgaattctacaatgcacccatcgtgaagttctggttctacacactggcgtatatcggatacctgatgctcttcaactatatcgtgttagtgaagatggaacgctggccgtccacccaggaatggatcgtaatctcctatattttcaccctgggaatagaaaagatgagagagattctgatgtcagagccagggaagttgctacagaaagtgaaggtatggctgcaggagtactggaatgtcacggacctcatcgccatccttctgttttctgtcggaatgatccttcgtctccaagaccagcccttcaggagtgacgggagggtcatctactgcgtgaacatcatttactggtatatccgtctcctagacatcttcggcgtgaacaagtatttgggcccgtatgtaatgatgattggaaaaatgatgatagacatgatgtactttgtcatcattatgctggtggttctgatgagctttggggtcgccaggcaagccatcctttttcccaatgaggagccatcatggaaactggccaagaacatcttctacatgccctattggatgatttatggggaagtgtttgcggaccagatagaccctccctgtggacagaatgagacccgagaggatggtaaaataatccagctgcctccctgcaagacaggagcttggatcgtgccggccatcatggcctgctacctcttagtggcaaacatcttgctggtcaacctcctcattgctgtctttaacaatacattttttgaagtaaaatcgatatccaaccaagtctggaagtttcagaggtatcagctcatcatgactttccatgaaaggccagttctgcccccaccactgatcatcttcagccacatgaccatgatattccagcacctgtgctgccgatggaggaaacacgagagcgacccggatgaaagggactacggcctgaaactcttcataaccgatgatgagctcaagaaagtacatgactttgaagagcaatgcatagaagaatacttcagagaaaaggatgatcggttcaactcatctaatgatgagaggatacgggtgacttcagaaagggtggagaacatgtctatgcggctggaggaagtcaacgagagagagcactccatgaaggcttcactccagaccgtggacatccggctggcgcagctggaagaccttatcgggcgcatggccacggccctggagcgcctgacaggtctggagcgggccgagtccaacaaaatccgctcgaggacctcgtcagactgcacggacgccgcctacattgtccgtcagagcagcttcaacagccaggaagggaacaccttcaagctccaagagagtatagaccctgcaggtgaggagaccatgtccccaacttctccaaccttaatgccccgtatgcgaagccattctttctattcggtcaatatgaaagacaaaggtggtatagaaaagttggaaagtatttttaaagaaaggtccctgagcctacaccgggctactagttcccactctgtagcaaaagaacccaaagctcctgcagcccctgccaacaccttggccattgttcctgattccagaagaccatcatcgtgtatagacatctatgtctctgctatggatgagctccactgtgatatagaccctctggacaattccgtgaacatccttgggctgggcgagccaagcttttcaactccagtaccttccacagccccttcaagtagtgcctatgcaacacttgcacccacagacagacctccaagccggagcattgattttgaggacatcacctccatggacactagatctttttcttcagactacacccacctcccagaatgccaaaacccctgggactcagagcctccgatgtaccacaccattgagcgttccaaaagtagccgctacctagccaccacaccctttcttctagaagaggctcccattgtgaaatctcatagctttatgttttccccctcaaggagctattatgccaactttggggtgcctgtaaaaacagcagaatacacaagtattacagactgtattgacacaaggtgtgtcaatgcccctcaagcaattgcggacagagctgccttccctggaggtcttggagacaaagtggaggacttaacttgctgccatccagagcgagaagcagaactgagtcaccccagctctgacagtgaggagaatgaggccaaaggccgcagagccaccattgcaatatcctcccaggagggtgataactcagagagaaccctgtccaacaacatcactgttcccaagatagagcgcgccaacagctactcggcagaggagccaagtgcgccatatgcacacaccaggaagagcttctccatcagtgacaaactcgacaggcagcggaacacagcaagcctgcgaaatcccttccagagaagcaagtcctccaagccggagggccgaggggacagcctgtccatgaggagactgtccagaacatcggctttccaaagctttgaaagcaagcacaactaaaccttctta

SEQ ID NO: 32166 - DNA, 4710 bp, Homo sapiens
  source 1..4710: mol_type = unassigned DNA
atgtatgtgcgagtatcttttgatacaaaacctgatctcctcttacacctgatgaccaaggaatggcagttggagcttcccaagcttctcatctctgtccatgggggcctgcagaactttgaactccagccaaaactcaagcaagtctttgggaaagggctcatcaaagcagcaatgacaactggagcgtggatattcactggaggggttaacacaggtgttattcgtcatgttggcgatgccttgaaggatcatgcctctaagtctcgaggaaagatatgcaccataggtattgccccctggggaattgtggaaaaccaggaggacctcattggaagagatgttgtccggccataccagaccatgtccaatcccatgagcaagctcactgttctcaacagcatgcattcccacttcattctggctgacaacgggaccactggaaaatatggagcagaggtgaaacttcgaagacaactggaaaagcatatttcactccagaagataaacacaagatgcctgccgtttttctctcttgactcccgcttgttttattcattttggggtagttgccagttagactcagttggaatcggtcaaggtgttcctgtggtggcactcatagtggaaggaggacccaatgtgatctcgattgttttggagtaccttcgagacacccctcccgtgccagtggttgtctgtgatgggagtggacgggcatcggacatcctggcctttgggcataaatactcagaagaaggcggactgataaatgaatctttgagggaccagctgttggtgactatacagaagactttcacatacactcgaacccaagctcagcatctgttcatcatcctcatggagtgcatgaagaagaaggaattgattacggtatttcggatgggatcagaaggacaccaggacattgatttggctatcctgacagctttactcaaaggagccaatgcctcggccccagaccaactgagcttagctttagcctggaacagagtcgacatcgctcgcagccagatctttatttacgggcaacagtggccggtgggatctctggagcaagccatgttggatgccttagttctggacagagtggattttgtgaaattactcatagagaatggagtaagcatgcaccgttttctcaccatctccagactagaggaattgtacaatacgagacatgggccctcaaatacattgtaccacttggtcagggatgtcaaaaaggggaacctgcccccagactacagaatcagcctgattgacatcggcctggtgatcgagtacctgatgggcggggcttatcgctgcaactacacgcgcaagcgcttccggaccctctaccacaacctcttcggccccaagagggatgatattcccttgaggcgaggaagaaagacaaccaagaaacgtgaagaagaggtggacattgacttggatgatcctgagatcaaccacttccccttccctttccatgagctcatggtgtgggctgttctcatgaagcggcagaagatggccctgttcttctggcagcacggtgaggaggccatggccaaggccctggtggcctgcaagctctgcaaagccatggctcatgaggcctctgagaacgacatggttgacgacatttcccaggagctgaatcacaattccagagactttggccagctggctgtggagctcctggaccagtcctacaagcaggacgaacagctggccatgaaactgctgacgtatgagctgaagaactggagcaacgccacgtgcctgcagcttgccgtggctgccaaacaccgcgacttcatcgcgcacacgtgcagccagatgctgctcaccgacatgtggatgggccggctccgcatgcgcaagaactcaggcctcaaggtaattctgggaattctacttcctccttcaattctcagcttggagttcaagaacaaagacgacatgccctatatgtctcaggcccaggaaatccacctccaagagaaggaggcagaagaaccagagaagcccacaaaggaaaaagaggaagaggacatggagctcacagcaatgttgggacgaaacaacggggagtcctccaggaagaaggatgaagaggaagttcagagcaagcaccggttaatccccctcggcagaaaaatctatgaattctacaatgcacccatcgtgaagttctggttctacacactggcgtatatcggatacctgatgctcttcaactatatcgtgttagtgaagatggaacgctggccgtccacccaggaatggatcgtaatctcctatattttcaccctgggaatagaaaagatgagagagattctgatgtcagagccagggaagttgctacagaaagtgaaggtatggctgcaggagtactggaatgtcacggacctcatcgccatccttctgttttctgtcggaatgatccttcgtctccaagaccagcccttcaggagtgacgggagggtcatctactgcgtgaacatcatttactggtatatccgtctcctagacatcttcggcgtgaacaagtatttgggcccgtatgtaatgatgattggaaaaatgatgatagacatgatgtactttgtcatcattatgctggtggttctgatgagctttggggtcgccaggcaagccatcctttttcccaatgaggagccatcatggaaactggccaagaacatcttctacatgccctattggatgatttatggggaagtgtttgcggaccagatagaccctccctgtggacagaatgagacccgagaggatggtaaaataatccagctgcctccctgcaagacaggagcttggatcgtgccggccatcatggcctgctacctcttagtggcaaacatcttgctggtcaacctcctcattgctgtctttaacaatacattttttgaagtaaaatcgatatccaaccaagtctggaagtttcagaggtatcagctcatcatgactttccatgaaaggccagttctgcccccaccactgatcatcttcagccacatgaccatgatattccagcacctgtgctgccgatggaggaaacacgagagcgacccggatgaaagggactacggcctgaaactcttcataaccgatgatgagctcaagaaagtacatgactttgaagagcaatgcatagaagaatacttcagagaaaaggatgatcggttcaactcatctaatgatgagaggatacgggtgacttcagaaagggtggagaacatgtctatgcggctggaggaagtcaacgagagagagcactccatgaaggcttcactccagaccgtggacatccggctggcgcagctggaagaccttatcgggcgcatggccacggccctggagcgcctgacaggtctggagcgggccgagtccaacaaaatccgctcgaggacctcgtcagactgcacggacgccgcctacattgtccgtcagagcagcttcaacagccaggaagggaacaccttcaagctccaagagagtatagaccctgcaggtgaggagaccatgtccccaacttctccaaccttaatgccccgtatgcgaagccattctttctattcggtcaatatgaaagacaaaggtggtatagaaaagttggaaagtatttttaaagaaaggtccctgagcctacaccgggctactagttcccactctgtagcaaaagaacccaaagctcctgcagcccctgccaacaccttggccattgttcctgattccagaagaccatcatcgtgtatagacatctatgtctctgctatggatgagctccactgtgatatagaccctctggacaattccgtgaacatccttgggctgggcgagccaagcttttcaactccagtaccttccacagccccttcaagtagtgcctatgcaacacttgcacccacagacagacctccaagccggagcattgattttgaggacatcacctccatggacactagatctttttcttcagactacacccacctcccagaatgccaaaacccctgggactcagagcctccgatgtaccacaccattgagcgttccaaaagtagccgctacctagccaccacaccctttcttctagaagaggctcccattgtgaaatctcatagctttatgttttccccctcaaggagctattatgccaactttggggtgcctgtaaaaacagcagaatacacaagtattacagactgtattgacacaaggtgtgtcaatgcccctcaagcaattgcggacagagctgccttccctggaggtcttggagacaaagtggaggacttaacttgctgccatccagagcgagaagcagaactgagtcaccccagctctgacagtgaggagaatgaggccaaaggccgcagagccaccattgcaatatcctcccaggagggtgataactcagagagaaccctgtccaacaacatcactgttcccaagatagagcgcgccaacagctactcggcagaggagccaagtgcgccatatgcacacaccaggaagagcttctccatcagtgacaaactcgacaggcagcggaacacagcaagcctgcgaaatcccttccagagaagcaagtcctccaagccggagggccgaggggacagcctgtccatgaggagactgtccagaacatcggctttccaaagctttgaaagcaagcacaactaa

SEQ ID NO: 32167 - DNA, 5966 bp, Homo sapiens
  source 1..5966: mol_type = unassigned DNA
agctgcagcaaaatgaaagcaacaggagctgctccggggactgcttttgccagtacccagaatcagtgctcaggctcagaaatcctggatagaaagagcattttataaaagagaatgtgtccacatcatacccagcaccaaagacccccataggtgttgctgtgggcgtctgataggccagcatgttggcctcacccccagtatctccgtgcttcagaatgagaaaaatgaaagtcgcctctcccgaaatgacatccagtctgaaaagtggtccatcagcaaacacactcaactcagccctacggatgcttttgggaccattgagttccaaggaggtggccattccaacaaagccatgtatgtgcgagtatcttttgatacaaaacctgatctcctcttacacctgatgaccaaggaatggcagttggagcttcccaagcttctcatctctgtccatgggggcctgcagaactttgaactccagccaaaactcaagcaagtctttgggaaagggctcatcaaagcagcaatgacaactggagcgtggatattcactggaggggttaacacaggtgttattcgtcatgttggcgatgccttgaaggatcatgcctctaagtctcgaggaaagatatgcaccataggtattgccccctggggaattgtggaaaaccaggaggacctcattggaagagatgttgtccggccataccagaccatgtccaatcccatgagcaagctcactgttctcaacagcatgcattcccacttcattctggctgacaacgggaccactggaaaatatggagcagaggtgaaacttcgaagacaactggaaaagcatatttcactccagaagataaacacaagatgcctgccgtttttctctcttgactcccgcttgttttattcattttggggtagttgccagttagactcagttggaatcggtcaaggtgttcctgtggtggcactcatagtggaaggaggacccaatgtgatctcgattgttttggagtaccttcgagacacccctcccgtgccagtggttgtctgtgatgggagtggacgggcatcggacatcctggcctttgggcataaatactcagaagaaggcggactgataaatgaatctttgagggaccagctgttggtgactatacagaagactttcacatacactcgaacccaagctcagcatctgttcatcatcctcatggagtgcatgaagaagaaggaattgattacggtatttcggatgggatcagaaggacaccaggacattgatttggctatcctgacagctttactcaaaggagccaatgcctcggccccagaccaactgagcttagctttagcctggaacagagtcgacatcgctcgcagccagatctttatttacgggcaacagtggccggtgggatctctggagcaagccatgttggatgccttagttctggacagagtggattttgtgaaattactcatagagaatggagtaagcatgcaccgttttctcaccatctccagactagaggaattgtacaatacgagacatgggccctcaaatacattgtaccacttggtcagggatgtcaaaaaggggaacctgcccccagactacagaatcagcctgattgacatcggcctggtgatcgagtacctgatgggcggggcttatcgctgcaactacacgcgcaagcgcttccggaccctctaccacaacctcttcggccccaagagggatgatattcccttgaggcgaggaagaaagacaaccaagaaacgtgaagaagaggtggacattgacttggatgatcctgagatcaaccacttccccttccctttccatgagctcatggtgtgggctgttctcatgaagcggcagaagatggccctgttcttctggcagcacggtgaggaggccatggccaaggccctggtggcctgcaagctctgcaaagccatggctcatgaggcctctgagaacgacatggttgacgacatttcccaggagctgaatcacaattccagagactttggccagctggctgtggagctcctggaccagtcctacaagcaggacgaacagctggccatgaaactgctgacgtatgagctgaagaactggagcaacgccacgtgcctgcagcttgccgtggctgccaaacaccgcgacttcatcgcgcacacgtgcagccagatgctgctcaccgacatgtggatgggccggctccgcatgcgcaagaactcaggcctcaaggtaattctgggaattctacttcctccttcaattctcagcttggagttcaagaacaaagacgacatgccctatatgtctcaggcccaggaaatccacctccaagagaaggaggcagaagaaccagagaagcccacaaaggaaaaagaggaagaggacatggagctcacagcaatgttgggacgaaacaacggggagtcctccaggaagaaggatgaagaggaagttcagagcaagcaccggttaatccccctcggcagaaaaatctatgaattctacaatgcacccatcgtgaagttctggttctacacactggcgtatatcggatacctgatgctcttcaactatatcgtgttagtgaagatggaacgctggccgtccacccaggaatggatcgtaatctcctatattttcaccctgggaatagaaaagatgagagagattctgatgtcagagccagggaagttgctacagaaagtgaaggtatggctgcaggagtactggaatgtcacggacctcatcgccatccttctgttttctgtcggaatgatccttcgtctccaagaccagcccttcaggagtgacgggagggtcatctactgcgtgaacatcatttactggtatatccgtctcctagacatcttcggcgtgaacaagtatttgggcccgtatgtaatgatgattggaaaaatgatgatagacatgatgtactttgtcatcattatgctggtggttctgatgagctttggggtcgccaggcaagccatcctttttcccaatgaggagccatcatggaaactggccaagaacatcttctacatgccctattggatgatttatggggaagtgtttgcggaccagatagaccctccctgtggacagaatgagacccgagaggatggtaaaataatccagctgcctccctgcaagacaggagcttggatcgtgccggccatcatggcctgctacctcttagtggcaaacatcttgctggtcaacctcctcattgctgtctttaacaatacattttttgaagtaaaatcgatatccaaccaagtctggaagtttcagaggtatcagctcatcatgactttccatgaaaggccagttctgcccccaccactgatcatcttcagccacatgaccatgatattccagcacctgtgctgccgatggaggaaacacgagagcgacccggatgaaagggactacggcctgaaactcttcataaccgatgatgagctcaagaaagtacatgactttgaagagcaatgcatagaagaatacttcagagaaaaggatgatcggttcaactcatctaatgatgagaggatacgggtgacttcagaaagggtggagaacatgtctatgcggctggaggaagtcaacgagagagagcactccatgaaggcttcactccagaccgtggacatccggctggcgcagctggaagaccttatcgggcgcatggccacggccctggagcgcctgacaggtctggagcgggccgagtccaacaaaatccgctcgaggacctcgtcagactgcacggacgccgcctacattgtccgtcagagcagcttcaacagccaggaagggaacaccttcaagctccaagagagtatagaccctgcaggtgaggagaccatgtccccaacttctccaaccttaatgccccgtatgcgaagccattctttctattcggtcaatatgaaagacaaaggtggtatagaaaagttggaaagtatttttaaagaaaggtccctgagcctacaccgggctactagttcccactctgtagcaaaagaacccaaagctcctgcagcccctgccaacaccttggccattgttcctgattccagaagaccatcatcgtgtatagacatctatgtctctgctatggatgagctccactgtgatatagaccctctggacaattccgtgaacatccttgggctgggcgagccaagcttttcaactccagtaccttccacagccccttcaagtagtgcctatgcaacacttgcacccacagacagacctccaagccggagcattgattttgaggacatcacctccatggacactagatctttttcttcagactacacccacctcccagaatgccaaaacccctgggactcagagcctccgatgtaccacaccattgagcgttccaaaagtagccgctacctagccaccacaccctttcttctagaagaggctcccattgtgaaatctcatagctttatgttttccccctcaaggagctattatgccaactttggggtgcctgtaaaaacagcagaatacacaagtattacagactgtattgacacaaggtgtgtcaatgcccctcaagcaattgcggacagagctgccttccctggaggtcttggagacaaagtggaggacttaacttgctgccatccagagcgagaagcagaactgagtcaccccagctctgacagtgaggagaatgaggccaaaggccgcagagccaccattgcaatatcctcccaggagggtgataactcagagagaaccctgtccaacaacatcactgttcccaagatagagcgcgccaacagctactcggcagaggagccaagtgcgccatatgcacacaccaggaagagcttctccatcagtgacaaactcgacaggcagcggaacacagcaagcctgcgaaatcccttccagagaagcaagtcctccaagccggagggccgaggggacagcctgtccatgaggagactgtccagaacatcggctttccaaagctttgaaagcaagcacaactaaaccttcttaatatccgccacagaaggctcaagaatccagccctaaaattctctccaactccagtttttcccctttccttgaatcatacctgctttattcttagctgagcaaaacaagcaatgctttgggaggtgttaactcaaaggtgacttctgggccacagatcaagaaagcatttgatctgacccagtgccagacacaggggatttaaggcatgttcacacttgctgggcagggagggggaagagagggagaaggaagggttagagatgaatgtgtatccgcagtcacagcagaaagccatgagagcaggggaaacaaggggcttcgagcacgctccatgccaggaggcatctgttgatttctgaccattatcaagagttgtaggatgcagggctaaattgcaaaataaaataaaatagccagcgtacacaatgagatattctaaacttccattctgttttcttttcacattggctccatcactggtgactgatgaagagcatcctctttattcagtataagccggcagcaagcagttctacctaacgtcccacatccttctcatgccaacacttctgtaattgatcattataaagaaaaaacaaggtaacagtcatagttcacctgtctcttatctattcacttctggtgccacaactgtttatccttttttgaagaaaataagggaacagaaatgcctttttgtattgcaatcgaaatgaaagaagagttgatgttaaaaaaacaaaagtcaagtgatttattatatacagtgggcgttcaagtctagtcgagcaagctcaggagaatgtaattaaataattttatattttttaatttattttgtatctcacctgtcatggatgaattcattcactgaatatgtaatattgaactt

SEQ ID NO: 32168 - DNA, 5957 bp, Homo sapiens
  source 1..5957: mol_type = unassigned DNA
agctgcagcaaaatgaaagcaacaggagctgctccggggactgcttttgccagtacccagaatcagtgctcaggctcagaaatcctggatagaaagagcattttataaaagagaatgtgtccacatcatacccagcaccaaagacccccataggtgttgctgtgggcgtctgataggccagcatgttggcctcacccccagtatctccgtgcttcagaatgagaaaaatgaaagtcgcctctcccgaaatgacatccagtctgaaaagtggtccatcagcaaacacactcaactcagccctacggatgcttttgggaccattgagttccaaggaggtggccattccaacaaagccatgtatgtgcgagtatcttttgatacaaaacctgatctcctcttacacctgatgaccaaggaatggcagttggagcttcccaagcttctcatctctgtccatgggggcctgcagaactttgaactccagccaaaactcaagcaagtctttgggaaagggctcatcaaagcagcaatgacaactggagcgtggatattcactggaggggttaacacaggtgttattcgtcatgttggcgatgccttgaaggatcatgcctctaagtctcgaggaaagatatgcaccataggtattgccccctggggaattgtggaaaaccaggaggacctcattggaagagatgttgtccggccataccagaccatgtccaatcccatgagcaagctcactgttctcaacagcatgcattcccacttcattctggctgacaacgggaccactggaaaatatggagcagaggtgaaacttcgaagacaactggaaaagcatatttcactccagaagataaacacaagaatcggtcaaggtgttcctgtggtggcactcatagtggaaggaggacccaatgtgatctcgattgttttggagtaccttcgagacacccctcccgtgccagtggttgtctgtgatgggagtggacgggcatcggacatcctggcctttgggcataaatactcagaagaaggcggactgataaatgaatctttgagggaccagctgttggtgactatacagaagactttcacatacactcgaacccaagctcagcatctgttcatcatcctcatggagtgcatgaagaagaaggaattgattacggtatttcggatgggatcagaaggacaccaggacattgatttggctatcctgacagctttactcaaaggagccaatgcctcggccccagaccaactgagcttagctttagcctggaacagagtcgacatcgctcgcagccagatctttatttacgggcaacagtggccggtgggatctctggagcaagccatgttggatgccttagttctggacagagtggattttgtgaaattactcatagagaatggagtaagcatgcaccgttttctcaccatctccagactagaggaattgtacaatacgagacatgggccctcaaatacattgtaccacttggtcagggatgtcaaaaagcgagagtatccaggtttcggttggatctattttaaggggaacctgcccccagactacagaatcagcctgattgacatcggcctggtgatcgagtacctgatgggcggggcttatcgctgcaactacacgcgcaagcgcttccggaccctctaccacaacctcttcggccccaagaggcccaaagccttgaaactgctgggaatggaggatgatattcccttgaggcgaggaagaaagacaaccaagaaacgtgaagaagaggtggacattgacttggatgatcctgagatcaaccacttccccttccctttccatgagctcatggtgtgggctgttctcatgaagcggcagaagatggccctgttcttctggcagcacggtgaggaggccatggccaaggccctggtggcctgcaagctctgcaaagccatggctcatgaggcctctgagaacgacatggttgacgacatttcccaggagctgaatcacaattccagagactttggccagctggctgtggagctcctggaccagtcctacaagcaggacgaacagctggccatgaaactgctgacgtatgagctgaagaactggagcaacgccacgtgcctgcagcttgccgtggctgccaaacaccgcgacttcatcgcgcacacgtgcagccagatgctgctcaccgacatgtggatgggccggctccgcatgcgcaagaactcaggcctcaaggtaattctgggaattctacttcctccttcaattctcagcttggagttcaagaacaaagacgacatgccctatatgtctcaggcccaggaaatccacctccaagagaaggaggcagaagaaccagagaagcccacaaaggaaaaagaggaagaggacatggagctcacagcaatgttgggacgaaacaacggggagtcctccaggaagaaggatgaagaggaagttcagagcaagcaccggttaatccccctcggcagaaaaatctatgaattctacaatgcacccatcgtgaagttctggttctacacactggcgtatatcggatacctgatgctcttcaactatatcgtgttagtgaagatggaacgctggccgtccacccaggaatggatcgtaatctcctatattttcaccctgggaatagaaaagatgagagagattctgatgtcagagccagggaagttgctacagaaagtgaaggtatggctgcaggagtactggaatgtcacggacctcatcgccatccttctgttttctgtcggaatgatccttcgtctccaagaccagcccttcaggagtgacgggagggtcatctactgcgtgaacatcatttactggtatatccgtctcctagacatcttcggcgtgaacaagtatttgggcccgtatgtaatgatgattggaaaaatgatgatagacatgatgtactttgtcatcattatgctggtggttctgatgagctttggggtcgccaggcaagccatcctttttcccaatgaggagccatcatggaaactggccaagaacatcttctacatgccctattggatgatttatggggaagtgtttgcggaccagatagaccctccctgtggacagaatgagacccgagaggatggtaaaataatccagctgcctccctgcaagacaggagcttggatcgtgccggccatcatggcctgctacctcttagtggcaaacatcttgctggtcaacctcctcattgctgtctttaacaatacattttttgaagtaaaatcgatatccaaccaagtctggaagtttcagaggtatcagctcatcatgactttccatgaaaggccagttctgcccccaccactgatcatcttcagccacatgaccatgatattccagcacctgtgctgccgatggaggaaacacgagagcgacccggatgaaagggactacggcctgaaactcttcataaccgatgatgagctcaagaaagtacatgactttgaagagcaatgcatagaagaatacttcagagaaaaggatgatcggttcaactcatctaatgatgagaggatacgggtgacttcagaaagggtggagaacatgtctatgcggctggaggaagtcaacgagagagagcactccatgaaggcttcactccagaccgtggacatccggctggcgcagctggaagaccttatcgggcgcatggccacggccctggagcgcctgacaggtctggagcgggccgagtccaacaaaatccgctcgaggacctcgtcagactgcacggacgccgcctacattgtccgtcagagcagcttcaacagccaggaagggaacaccttcaagctccaagagagtatagaccctgcaggtgaggagaccatgtccccaacttctccaaccttaatgccccgtatgcgaagccattctttctattcggtcaatatgaaagacaaaggtggtatagaaaagttggaaagtatttttaaagaaaggtccctgagcctacaccgggctactagttcccactctgtagcaaaagaacccaaagctcctgcagcccctgccaacaccttggccattgttcctgattccagaagaccatcatcgtgtatagacatctatgtctctgctatggatgagctccactgtgatatagaccctctggacaattccgtgaacatccttgggctgggcgagccaagcttttcaactccagtaccttccacagccccttcaagtagtgcctatgcaacacttgcacccacagacagacctccaagccggagcattgattttgaggacatcacctccatggacactagatctttttcttcagactacacccacctcccagaatgccaaaacccctgggactcagagcctccgatgtaccacaccattgagcgttccaaaagtagccgctacctagccaccacaccctttcttctagaagaggctcccattgtgaaatctcatagctttatgttttccccctcaaggagctattatgccaactttggggtgcctgtaaaaacagcagaatacacaagtattacagactgtattgacacaaggtgtgtcaatgcccctcaagcaattgcggacagagctgccttccctggaggtcttggagacaaagtggaggacttaacttgctgccatccagagcgagaagcagaactgagtcaccccagctctgacagtgaggagaatgaggccaaaggccgcagagccaccattgcaatatcctcccaggagggtgataactcagagagaaccctgtccaacaacatcactgttcccaagatagagcgcgccaacagctactcggcagaggagccaagtgcgccatatgcacacaccaggaagagcttctccatcagtgacaaactcgacaggcagcggaacacagcaagcctgcgaaatcccttccagagaagcaagtcctccaagccggagggccgaggggacagcctgtccatgaggagactgtccagaacatcggctttccaaagctttgaaagcaagcacaactaaaccttcttaatatccgccacagaaggctcaagaatccagccctaaaattctctccaactccagtttttcccctttccttgaatcatacctgctttattcttagctgagcaaaacaagcaatgctttgggaggtgttaactcaaaggtgacttctgggccacagatcaagaaagcatttgatctgacccagtgccagacacaggggatttaaggcatgttcacacttgctgggcagggagggggaagagagggagaaggaagggttagagatgaatgtgtatccgcagtcacagcagaaagccatgagagcaggggaaacaaggggcttcgagcacgctccatgccaggaggcatctgttgatttctgaccattatcaagagttgtaggatgcagggctaaattgcaaaataaaataaaatagccagcgtacacaatgagatattctaaacttccattctgttttcttttcacattggctccatcactggtgactgatgaagagcatcctctttattcagtataagccggcagcaagcagttctacctaacgtcccacatccttctcatgccaacacttctgtaattgatcattataaagaaaaaacaaggtaacagtcatagttcacctgtctcttatctattcacttctggtgccacaactgtttatccttttttgaagaaaataagggaacagaaatgcctttttgtattgcaatcgaaatgaaagaagagttgatgttaaaaaaacaaaagtcaagtgatttattatatacagtgggcgttcaagtctagtcgagcaagctcaggagaatgtaattaaataattttatattttttaatttattttgtatctcacctgtcatggatgaattcattcactgaatatgtaatattgaactt

SEQ ID NO: 32169 - DNA, 5996 bp, Homo sapiens
  source 1..5996: mol_type = unassigned DNA
agctgcagcaaaatgaaagcaacaggagctgctccggggactgcttttgccagtacccagaatcagtgctcaggctcagaaatcctggatagaaagagcattttataaaagagaatgtgtccacatcatacccagcaccaaagacccccataggtgttgctgtgggcgtctgataggccagcatgttggcctcacccccagtatctccgtgcttcagaatgagaaaaatgaaagtcgcctctcccgaaatgacatccagtctgaaaagtggtccatcagcaaacacactcaactcagccctacggatgcttttgggaccattgagttccaaggaggtggccattccaacaaagccatgtatgtgcgagtatcttttgatacaaaacctgatctcctcttacacctgatgaccaaggaatggcagttggagcttcccaagcttctcatctctgtccatgggggcctgcagaactttgaactccagccaaaactcaagcaagtctttgggaaagggctcatcaaagcagcaatgacaactggagcgtggatattcactggaggggttaacacaggtgttattcgtcatgttggcgatgccttgaaggatcatgcctctaagtctcgaggaaagatatgcaccataggtattgccccctggggaattgtggaaaaccaggaggacctcattggaagagatgttgtccggccataccagaccatgtccaatcccatgagcaagctcactgttctcaacagcatgcattcccacttcattctggctgacaacgggaccactggaaaatatggagcagaggtgaaacttcgaagacaactggaaaagcatatttcactccagaagataaacacaagatgcctgccgtttttctctcttgactcccgcttgttttattcattttggggtagttgccagttagactcagttggaatcggtcaaggtgttcctgtggtggcactcatagtggaaggaggacccaatgtgatctcgattgttttggagtaccttcgagacacccctcccgtgccagtggttgtctgtgatgggagtggacgggcatcggacatcctggcctttgggcataaatactcagaagaaggcggactgataaatgaatctttgagggaccagctgttggtgactatacagaagactttcacatacactcgaacccaagctcagcatctgttcatcatcctcatggagtgcatgaagaagaaggaattgattacggtatttcggatgggatcagaaggacaccaggacattgatttggctatcctgacagctttactcaaaggagccaatgcctcggccccagaccaactgagcttagctttagcctggaacagagtcgacatcgctcgcagccagatctttatttacgggcaacagtggccggtgggatctctggagcaagccatgttggatgccttagttctggacagagtggattttgtgaaattactcatagagaatggagtaagcatgcaccgttttctcaccatctccagactagaggaattgtacaatacgagacatgggccctcaaatacattgtaccacttggtcagggatgtcaaaaaggggaacctgcccccagactacagaatcagcctgattgacatcggcctggtgatcgagtacctgatgggcggggcttatcgctgcaactacacgcgcaagcgcttccggaccctctaccacaacctcttcggccccaagaggcccaaagccttgaaactgctgggaatggaggatgatattcccttgaggcgaggaagaaagacaaccaagaaacgtgaagaagaggtggacattgacttggatgatcctgagatcaaccacttccccttccctttccatgagctcatggtgtgggctgttctcatgaagcggcagaagatggccctgttcttctggcagcacggtgaggaggccatggccaaggccctggtggcctgcaagctctgcaaagccatggctcatgaggcctctgagaacgacatggttgacgacatttcccaggagctgaatcacaattccagagactttggccagctggctgtggagctcctggaccagtcctacaagcaggacgaacagctggccatgaaactgctgacgtatgagctgaagaactggagcaacgccacgtgcctgcagcttgccgtggctgccaaacaccgcgacttcatcgcgcacacgtgcagccagatgctgctcaccgacatgtggatgggccggctccgcatgcgcaagaactcaggcctcaaggtaattctgggaattctacttcctccttcaattctcagcttggagttcaagaacaaagacgacatgccctatatgtctcaggcccaggaaatccacctccaagagaaggaggcagaagaaccagagaagcccacaaaggaaaaagaggaagaggacatggagctcacagcaatgttgggacgaaacaacggggagtcctccaggaagaaggatgaagaggaagttcagagcaagcaccggttaatccccctcggcagaaaaatctatgaattctacaatgcacccatcgtgaagttctggttctacacactggcgtatatcggatacctgatgctcttcaactatatcgtgttagtgaagatggaacgctggccgtccacccaggaatggatcgtaatctcctatattttcaccctgggaatagaaaagatgagagagattctgatgtcagagccagggaagttgctacagaaagtgaaggtatggctgcaggagtactggaatgtcacggacctcatcgccatccttctgttttctgtcggaatgatccttcgtctccaagaccagcccttcaggagtgacgggagggtcatctactgcgtgaacatcatttactggtatatccgtctcctagacatcttcggcgtgaacaagtatttgggcccgtatgtaatgatgattggaaaaatgatgatagacatgatgtactttgtcatcattatgctggtggttctgatgagctttggggtcgccaggcaagccatcctttttcccaatgaggagccatcatggaaactggccaagaacatcttctacatgccctattggatgatttatggggaagtgtttgcggaccagatagaccctccctgtggacagaatgagacccgagaggatggtaaaataatccagctgcctccctgcaagacaggagcttggatcgtgccggccatcatggcctgctacctcttagtggcaaacatcttgctggtcaacctcctcattgctgtctttaacaatacattttttgaagtaaaatcgatatccaaccaagtctggaagtttcagaggtatcagctcatcatgactttccatgaaaggccagttctgcccccaccactgatcatcttcagccacatgaccatgatattccagcacctgtgctgccgatggaggaaacacgagagcgacccggatgaaagggactacggcctgaaactcttcataaccgatgatgagctcaagaaagtacatgactttgaagagcaatgcatagaagaatacttcagagaaaaggatgatcggttcaactcatctaatgatgagaggatacgggtgacttcagaaagggtggagaacatgtctatgcggctggaggaagtcaacgagagagagcactccatgaaggcttcactccagaccgtggacatccggctggcgcagctggaagaccttatcgggcgcatggccacggccctggagcgcctgacaggtctggagcgggccgagtccaacaaaatccgctcgaggacctcgtcagactgcacggacgccgcctacattgtccgtcagagcagcttcaacagccaggaagggaacaccttcaagctccaagagagtatagaccctgcaggtgaggagaccatgtccccaacttctccaaccttaatgccccgtatgcgaagccattctttctattcggtcaatatgaaagacaaaggtggtatagaaaagttggaaagtatttttaaagaaaggtccctgagcctacaccgggctactagttcccactctgtagcaaaagaacccaaagctcctgcagcccctgccaacaccttggccattgttcctgattccagaagaccatcatcgtgtatagacatctatgtctctgctatggatgagctccactgtgatatagaccctctggacaattccgtgaacatccttgggctgggcgagccaagcttttcaactccagtaccttccacagccccttcaagtagtgcctatgcaacacttgcacccacagacagacctccaagccggagcattgattttgaggacatcacctccatggacactagatctttttcttcagactacacccacctcccagaatgccaaaacccctgggactcagagcctccgatgtaccacaccattgagcgttccaaaagtagccgctacctagccaccacaccctttcttctagaagaggctcccattgtgaaatctcatagctttatgttttccccctcaaggagctattatgccaactttggggtgcctgtaaaaacagcagaatacacaagtattacagactgtattgacacaaggtgtgtcaatgcccctcaagcaattgcggacagagctgccttccctggaggtcttggagacaaagtggaggacttaacttgctgccatccagagcgagaagcagaactgagtcaccccagctctgacagtgaggagaatgaggccaaaggccgcagagccaccattgcaatatcctcccaggagggtgataactcagagagaaccctgtccaacaacatcactgttcccaagatagagcgcgccaacagctactcggcagaggagccaagtgcgccatatgcacacaccaggaagagcttctccatcagtgacaaactcgacaggcagcggaacacagcaagcctgcgaaatcccttccagagaagcaagtcctccaagccggagggccgaggggacagcctgtccatgaggagactgtccagaacatcggctttccaaagctttgaaagcaagcacaactaaaccttcttaatatccgccacagaaggctcaagaatccagccctaaaattctctccaactccagtttttcccctttccttgaatcatacctgctttattcttagctgagcaaaacaagcaatgctttgggaggtgttaactcaaaggtgacttctgggccacagatcaagaaagcatttgatctgacccagtgccagacacaggggatttaaggcatgttcacacttgctgggcagggagggggaagagagggagaaggaagggttagagatgaatgtgtatccgcagtcacagcagaaagccatgagagcaggggaaacaaggggcttcgagcacgctccatgccaggaggcatctgttgatttctgaccattatcaagagttgtaggatgcagggctaaattgcaaaataaaataaaatagccagcgtacacaatgagatattctaaacttccattctgttttcttttcacattggctccatcactggtgactgatgaagagcatcctctttattcagtataagccggcagcaagcagttctacctaacgtcccacatccttctcatgccaacacttctgtaattgatcattataaagaaaaaacaaggtaacagtcatagttcacctgtctcttatctattcacttctggtgccacaactgtttatccttttttgaagaaaataagggaacagaaatgcctttttgtattgcaatcgaaatgaaagaagagttgatgttaaaaaaacaaaagtcaagtgatttattatatacagtgggcgttcaagtctagtcgagcaagctcaggagaatgtaattaaataattttatattttttaatttattttgtatctcacctgtcatggatgaattcattcactgaatatgtaatattgaactt

SEQ ID NO: 32170 - DNA, 6269 bp, Homo sapiens
  source 1..6269: mol_type = unassigned DNA
tccgaccacaggctgttttgtgcaggctgtccctcttcttcaaaatcgtgcatcccctccccgaagcagcaggcagtgtgcctccattcagccacatttggtatgcatgagcacggctgcagagagaggggaggtggctgttttaagaaggttcaggggctcaggcaaggctacttgactagtcttccaagttccaggaagcctctgccctaatggaatttgcaggtgtggagatgaccatgggatgccagagccgtgggggaccgtttattttctaggcattgctcaggttttcagtttcttgttttcctggtggaatttggaaggggtcatgaatcaggctgatgctcctcgacccctaaactggaccatccggaagctgtgccacgcagcctttcttccatctgtcagacttctgaaggctcagaaatcctggatagaaagagcattttataaaagagaatgtgtccacatcatacccagcaccaaagacccccataggtgttgctgtgggcgtctgataggccagcatgttggcctcacccccagtatctccgtgcttcagaatgagaaaaatgaaagtcgcctctcccgaaatgacatccagtctgaaaagtggtccatcagcaaacacactcaactcagccctacggatgcttttgggaccattgagttccaaggaggtggccattccaacaaagccatgtatgtgcgagtatcttttgatacaaaacctgatctcctcttacacctgatgaccaaggaatggcagttggagcttcccaagcttctcatctctgtccatgggggcctgcagaactttgaactccagccaaaactcaagcaagtctttgggaaagggctcatcaaagcagcaatgacaactggagcgtggatattcactggaggggttaacacaggtgttattcgtcatgttggcgatgccttgaaggatcatgcctctaagtctcgaggaaagatatgcaccataggtattgccccctggggaattgtggaaaaccaggaggacctcattggaagagatgttgtccggccataccagaccatgtccaatcccatgagcaagctcactgttctcaacagcatgcattcccacttcattctggctgacaacgggaccactggaaaatatggagcagaggtgaaacttcgaagacaactggaaaagcatatttcactccagaagataaacacaagaatcggtcaaggtgttcctgtggtggcactcatagtggaaggaggacccaatgtgatctcgattgttttggagtaccttcgagacacccctcccgtgccagtggttgtctgtgatgggagtggacgggcatcggacatcctggcctttgggcataaatactcagaagaaggcggactgataaatgaatctttgagggaccagctgttggtgactatacagaagactttcacatacactcgaacccaagctcagcatctgttcatcatcctcatggagtgcatgaagaagaaggaattgattacggtatttcggatgggatcagaaggacaccaggacattgatttggctatcctgacagctttactcaaaggagccaatgcctcggccccagaccaactgagcttagctttagcctggaacagagtcgacatcgctcgcagccagatctttatttacgggcaacagtggccggtgggatctctggagcaagccatgttggatgccttagttctggacagagtggattttgtgaaattactcatagagaatggagtaagcatgcaccgttttctcaccatctccagactagaggaattgtacaatacgagacatgggccctcaaatacattgtaccacttggtcagggatgtcaaaaaggggaacctgcccccagactacagaatcagcctgattgacatcggcctggtgatcgagtacctgatgggcggggcttatcgctgcaactacacgcgcaagcgcttccggaccctctaccacaacctcttcggccccaagaggcccaaagccttgaaactgctgggaatggaggatgatattcccttgaggcgaggaagaaagacaaccaagaaacgtgaagaagaggtggacattgacttggatgatcctgagatcaaccacttccccttccctttccatgagctcatggtgtgggctgttctcatgaagcggcagaagatggccctgttcttctggcagcacggtgaggaggccatggccaaggccctggtggcctgcaagctctgcaaagccatggctcatgaggcctctgagaacgacatggttgacgacatttcccaggagctgaatcacaattccagagactttggccagctggctgtggagctcctggaccagtcctacaagcaggacgaacagctggccatgaaactgctgacgtatgagctgaagaactggagcaacgccacgtgcctgcagcttgccgtggctgccaaacaccgcgacttcatcgcgcacacgtgcagccagatgctgctcaccgacatgtggatgggccggctccgcatgcgcaagaactcaggcctcaaggtaattctgggaattctacttcctccttcaattctcagcttggagttcaagaacaaagacgacatgccctatatgtctcaggcccaggaaatccacctccaagagaaggaggcagaagaaccagagaagcccacaaaggaaaaagaggaagaggacatggagctcacagcaatgttgggacgaaacaacggggagtcctccaggaagaaggatgaagaggaagttcagagcaagcaccggttaatccccctcggcagaaaaatctatgaattctacaatgcacccatcgtgaagttctggttctacacactggcgtatatcggatacctgatgctcttcaactatatcgtgttagtgaagatggaacgctggccgtccacccaggaatggatcgtaatctcctatattttcaccctgggaatagaaaagatgagagagattctgatgtcagagccagggaagttgctacagaaagtgaaggtatggctgcaggagtactggaatgtcacggacctcatcgccatccttctgttttctgtcggaatgatccttcgtctccaagaccagcccttcaggagtgacgggagggtcatctactgcgtgaacatcatttactggtatatccgtctcctagacatcttcggcgtgaacaagtatttgggcccgtatgtaatgatgattggaaaaatgatgatagacatgatgtactttgtcatcattatgctggtggttctgatgagctttggggtcgccaggcaagccatcctttttcccaatgaggagccatcatggaaactggccaagaacatcttctacatgccctattggatgatttatggggaagtgtttgcggaccagatagaccctccctgtggacagaatgagacccgagaggatggtaaaataatccagctgcctccctgcaagacaggagcttggatcgtgccggccatcatggcctgctacctcttagtggcaaacatcttgctggtcaacctcctcattgctgtctttaacaatacattttttgaagtaaaatcgatatccaaccaagtctggaagtttcagaggtatcagctcatcatgactttccatgaaaggccagttctgcccccaccactgatcatcttcagccacatgaccatgatattccagcacctgtgctgccgatggaggaaacacgagagcgacccggatgaaagggactacggcctgaaactcttcataaccgatgatgagctcaagaaagtacatgactttgaagagcaatgcatagaagaatacttcagagaaaaggatgatcggttcaactcatctaatgatgagaggatacgggtgacttcagaaagggtggagaacatgtctatgcggctggaggaagtcaacgagagagagcactccatgaaggcttcactccagaccgtggacatccggctggcgcagctggaagaccttatcgggcgcatggccacggccctggagcgcctgacaggtctggagcgggccgagtccaacaaaatccgctcgaggacctcgtcagactgcacggacgccgcctacattgtccgtcagagcagcttcaacagccaggaagggaacaccttcaagctccaagagagtatagaccctgcaggtgaggagaccatgtccccaacttctccaaccttaatgccccgtatgcgaagccattctttctattcggtcaatatgaaagacaaaggtggtatagaaaagttggaaagtatttttaaagaaaggtccctgagcctacaccgggctactagttcccactctgtagcaaaagaacccaaagctcctgcagcccctgccaacaccttggccattgttcctgattccagaagaccatcatcgtgtatagacatctatgtctctgctatggatgagctccactgtgatatagaccctctggacaattccgtgaacatccttgggctgggcgagccaagcttttcaactccagtaccttccacagccccttcaagtagtgcctatgcaacacttgcacccacagacagacctccaagccggagcattgattttgaggacatcacctccatggacactagatctttttcttcagactacacccacctcccagaatgccaaaacccctgggactcagagcctccgatgtaccacaccattgagcgttccaaaagtagccgctacctagccaccacaccctttcttctagaagaggctcccattgtgaaatctcatagctttatgttttccccctcaaggagctattatgccaactttggggtgcctgtaaaaacagcagaatacacaagtattacagactgtattgacacaaggtgtgtcaatgcccctcaagcaattgcggacagagctgccttccctggaggtcttggagacaaagtggaggacttaacttgctgccatccagagcgagaagcagaactgagtcaccccagctctgacagtgaggagaatgaggccaaaggccgcagagccaccattgcaatatcctcccaggagggtgataactcagagagaaccctgtccaacaacatcactgttcccaagatagagcgcgccaacagctactcggcagaggagccaagtgcgccatatgcacacaccaggaagagcttctccatcagtgacaaactcgacaggcagcggaacacagcaagcctgcgaaatcccttccagagaagcaagtcctccaagccggagggccgaggggacagcctgtccatgaggagactgtccagaacatcggctttccaaagctttgaaagcaagcacaactaaaccttcttaatatccgccacagaaggctcaagaatccagccctaaaattctctccaactccagtttttcccctttccttgaatcatacctgctttattcttagctgagcaaaacaagcaatgctttgggaggtgttaactcaaaggtgacttctgggccacagatcaagaaagcatttgatctgacccagtgccagacacaggggatttaaggcatgttcacacttgctgggcagggagggggaagagagggagaaggaagggttagagatgaatgtgtatccgcagtcacagcagaaagccatgagagcaggggaaacaaggggcttcgagcacgctccatgccaggaggcatctgttgatttctgaccattatcaagagttgtaggatgcagggctaaattgcaaaataaaataaaatagccagcgtacacaatgagatattctaaacttccattctgttttcttttcacattggctccatcactggtgactgatgaagagcatcctctttattcagtataagccggcagcaagcagttctacctaacgtcccacatccttctcatgccaacacttctgtaattgatcattataaagaaaaaacaaggtaacagtcatagttcacctgtctcttatctattcacttctggtgccacaactgtttatccttttttgaagaaaataagggaacagaaatgcctttttgtattgcaatcgaaatgaaagaagagttgatgttaaaaaaacaaaagtcaagtgatttattatatacagtgggcgttcaagtctagtcgagcaagctcaggagaatgtaattaaataattttatattttttaatttattttgtatctcacctgtcatggatgaattcattcactgaatatgtaatattgaactt

SEQ ID NO: 32171 - DNA, 4618 bp, Homo sapiens
  source 1..4618: mol_type = unassigned DNA
tccgaccacaggctgttttgtgcaggctgtccctcttcttcaaaatcgtgcatcccctccccgaagcagcaggcagtgtgcctccattcagccacatttggtatgcatgagcacggctgcagagagaggggaggtggctgttttaagaaggttcaggggctcaggcaaggctacttgactagtcttccaagttccaggaagcctctgccctaatggaatttgcaggtgtggagatgaccatgggatgccagagccgtgggggaccgtttattttctaggcattgctcaggttttcagtttcttgttttcctggtggaatttggaaggggtcatgaatcaggctgatgctcctcgacccctaaactggaccatccggaagctgtgccacgcagcctttcttccatctgtcagacttctgaaggctcagaaatcctggatagaaagagcattttataaaagagaatgtgtccacatcatacccagcaccaaagacccccataggtgttgctgtgggcgtctgataggccagcatgttggcctcacccccagtatctccgtgcttcagaatgagaaaaatgaaagtcgcctctcccgaaatgacatccagtctgaaaagtggtccatcagcaaacacactcaactcagccctacggatgcttttgggaccattgagttccaaggaggtggccattccaacaaagccatgtatgtgcgagtatcttttgatacaaaacctgatctcctcttacacctgatgaccaaggaatggcagttggagcttcccaagcttctcatctctgtccatgggggcctgcagaactttgaactccagccaaaactcaagcaagtctttgggaaagggctcatcaaagcagcaatgacaactggagcgtggatattcactggaggggttaacacaggtgttattcgtcatgttggcgatgccttgaaggatcatgcctctaagtctcgaggaaagatatgcaccataggtattgccccctggggaattgtggaaaaccaggaggacctcattggaagagatgttgtccggccataccagaccatgtccaatcccatgagcaagctcactgttctcaacagcatgcattcccacttcattctggctgacaacgggaccactggaaaatatggagcagaggtgaaacttcgaagacaactggaaaagcatatttcactccagaagataaacacaagaatcggtcaaggtgttcctgtggtggcactcatagtggaaggaggacccaatgtgatctcgattgttttggagtaccttcgagacacccctcccgtgccagtggttgtctgtgatgggagtggacgggcatcggacatcctggcctttgggcataaatactcagaagaaggcggactgataaatgaatctttgagggaccagctgttggtgactatacagaagactttcacatacactcgaacccaagctcagcatctgttcatcatcctcatggagtgcatgaagaagaaggaattgattacggtatttcggatgggatcagaaggacaccaggacattgatttggctatcctgacagctttactcaaaggagccaatgcctcggccccagaccaactgagcttagctttagcctggaacagagtcgacatcgctcgcagccagatctttatttacgggcaacagtggccggtgggatctctggagcaagccatgttggatgccttagttctggacagagtggattttgtgaaattactcatagagaatggagtaagcatgcaccgttttctcaccatctccagactagaggaattgtacaatacgagacatgggccctcaaatacattgtaccacttggtcagggatgtcaaaaaggggaacctgcccccagactacagaatcagcctgattgacatcggcctggtgatcgagtacctgatgggcggggcttatcgctgcaactacacgcgcaagcgcttccggaccctctaccacaacctcttcggccccaagaggcccaaagccttgaaactgctgggaatggaggatgatattcccttgaggcgaggaagaaagacaaccaagaaacgtgaagaagaggtggacattgacttggatgatcctgagatcaaccacttccccttccctttccatgagctcatggtgtgggctgttctcatgaagcggcagaagatggccctgttcttctggcagcacggtgaggaggccatggccaaggccctggtggcctgcaagctctgcaaagccatggctcatgaggcctctgagaacgacatggttgacgacatttcccaggagctgaatcacaattccagagactttggccagctggctgtggagctcctggaccagtcctacaagcaggacgaacagctggccatgaaactgctgacgtatgagctgaagaactggagcaacgccacgtgcctgcagcttgccgtggctgccaaacaccgcgacttcatcgcgcacacgtgcagccagatgctgctcaccgacatgtggatgggccggctccgcatgcgcaagaactcaggcctcaaggtaattctgggaattctacttcctccttcaattctcagcttggagttcaagaacaaagacgacatgccctatatgtctcaggcccaggaaatccacctccaagagaaggaggcagaagaaccagagaagcccacaaaggaaaaagaggaagaggacatggagctcacagcaatgttgggacgaaacaacggggagtcctccaggaagaaggatgaagaggaagttcagagcaagcaccggttaatccccctcggcagaaaaatctatgaattctacaatgcacccatcgtgaagttctggttctacacactggcgtatatcggatacctgatgctcttcaactatatcgtgttagtgaagatggaacgctggccgtccacccaggaatggatcgtaatctcctatattttcaccctgggaatagaaaagatgagagagattctgatgtcagagccagggaagttgctacagaaagtgaaggtatggctgcaggagtactggaatgtcacggacctcatcgccatccttctgttttctgtcggaatgatccttcgtctccaagaccagcccttcaggagtgacgggagggtcatctactgcgtgaacatcatttactggtatatccgtctcctagacatcttcggcgtgaacaagtatttgggcccgtatgtaatgatgattggaaaaatgatgatagacatgatgtactttgtcatcattatgctggtggttctgatgagctttggggtcgccaggcaagccatcctttttcccaatgaggagccatcatggaaactggccaagaacatcttctacatgccctattggatgatttatggggaagtgtttgcggaccagatagaccctccctgtggacagaatgagacccgagaggatggtaaaataatccagctgcctccctgcaagacaggagcttggatcgtgccggccatcatggcctgctacctcttagtggcaaacatcttgctggtcaacctcctcattgctgtctttaacaatacattttttgaagtaaaatcgatatccaaccaagtctggaagtttcagaggtatcagctcatcatgactttccatgaaaggccagttctgcccccaccactgatcatcttcagccacatgaccatgatattccagcacctgtgctgccgatggaggaaacacgagagcgacccggatgaaagggactacggcctgaaactcttcataaccgatgatgagctcaagaaagtacatgactttgaagagcaatgcatagaagaatacttcagagaaaaggatgatcggttcaactcatctaatgatgagaggatacgggtgacttcagaaagggtggagaacatgtctatgcggctggaggaagtcaacgagagagagcactccatgaaggcttcactccagaccgtggacatccggctggcgcagctggaagaccttatcgggcgcatggccacggccctggagcgcctgacaggtctggagcgggccgagtccaacaaaatccgctcgaggacctcgtcagactgcacggacgccgcctacattgtccgtcagagcagcttcaacagccaggaagggaacaccttcaagctccaagagagtatagaccctgcagagcatcctctttattcagtataagccggcagcaagcagttctacctaacgtcccacatccttctcatgccaacacttctgtaattgatcattataaagaaaaaacaaggtaacagtcatagttcacctgtctcttatctattcacttctggtgccacaactgtttatccttttttgaagaaaataagggaacagaaatgcctttttgtattgcaatcgaaatgaaagaagagttgatgttaaaaaaacaaaagtcaagtgatttattatatacagtgggcgttcaagtctagtcgagcaagctcaggagaatgtaattaaataattttatattttttaatttattttgtatctcacctgtcatggatgaattcattcactgaatatgtaatattgaacttaaaaaaaaaaaaaaaaaaa

SEQ ID NO: 32172 - DNA, 4669 bp, Homo sapiens
  source 1..4669: mol_type = unassigned DNA
gtatgtgcgagtatcttttgatacaaaacctgatctcctcttacacctgatgaccaaggaatggcagttggagcttcccaagcttctcatctctgtccatgggggcctgcagaactttgaactccagccaaaactcaagcaagtctttgggaaagggctcatcaaagcagcaatgacaactggagcgtggatattcactggaggggttaacacaggtgttattcgtcatgttggcgatgccttgaaggatcatgcctctaagtctcgaggaaagatatgcaccataggtattgccccctggggaattgtggaaaaccaggaggacctcattggaagagatgttgtccggccataccagaccatgtccaatcccatgagcaagctcactgttctcaacagcatgcattcccacttcattctggctgacaacgggaccactggaaaatatggagcagaggtgaaacttcgaagacaactggaaaagcatatttcactccagaagataaacacaagaatcggtcaaggtgttcctgtggtggcactcatagtggaaggaggacccaatgtgatctcgattgttttggagtaccttcgagacacccctcccgtgccagtggttgtctgtgatgggagtggacgggcatcggacatcctggcctttgggcataaatactcagaagaaggcggactgataaatgaatctttgagggaccagctgttggtgactatacagaagactttcacatacactcgaacccaagctcagcatctgttcatcatcctcatggagtgcatgaagaagaaggaattgattacggtatttcggatgggatcagaaggacaccaggacattgatttggctatcctgacagctttactcaaaggagccaatgcctcggccccagaccaactgagcttagctttagcctggaacagagtcgacatcgctcgcagccagatctttatttacgggcaacagtggccggtgggatctctggagcaagccatgttggatgccttagttctggacagagtggattttgtgaaattactcatagagaatggagtaagcatgcaccgttttctcaccatctccagactagaggaattgtacaatacgagacatgggccctcaaatacattgtaccacttggtcagggatgtcaaaaagcgagagtatccaggtttcggttggatctattttaaggggaacctgcccccagactacagaatcagcctgattgacatcggcctggtgatcgagtacctgatgggcggggcttatcgctgcaactacacgcgcaagcgcttccggaccctctaccacaacctcttcggccccaagagggatgatattcccttgaggcgaggaagaaagacaaccaagaaacgtgaagaagaggtggacattgacttggatgatcctgagatcaaccacttccccttccctttccatgagctcatggtgtgggctgttctcatgaagcggcagaagatggccctgttcttctggcagcacggtgaggaggccatggccaaggccctggtggcctgcaagctctgcaaagccatggctcatgaggcctctgagaacgacatggttgacgacatttcccaggagctgaatcacaattccagagactttggccagctggctgtggagctcctggaccagtcctacaagcaggacgaacagctggccatgaaactgctgacgtatgagctgaagaactggagcaacgccacgtgcctgcagcttgccgtggctgccaaacaccgcgacttcatcgcgcacacgtgcagccagatgctgctcaccgacatgtggatgggccggctccgcatgcgcaagaactcaggcctcaaggtaattctgggaattctacttcctccttcaattctcagcttggagttcaagaacaaagacgacatgccctatatgtctcaggcccaggaaatccacctccaagagaaggaggcagaagaaccagagaagcccacaaaggaaaaagaggaagaggacatggagctcacagcaatgttgggacgaaacaacggggagtcctccaggaagaaggatgaagaggaagttcagagcaagcaccggttaatccccctcggcagaaaaatctatgaattctacaatgcacccatcgtgaagttctggttctacacactggcgtatatcggatacctgatgctcttcaactatatcgtgttagtgaagatggaacgctggccgtccacccaggaatggatcgtaatctcctatattttcaccctgggaatagaaaagatgagagagattctgatgtcagagccagggaagttgctacagaaagtgaaggtatggctgcaggagtactggaatgtcacggacctcatcgccatccttctgttttctgtcggaatgatccttcgtctccaagaccagcccttcaggagtgacgggagggtcatctactgcgtgaacatcatttactggtatatccgtctcctagacatcttcggcgtgaacaagtatttgggcccgtatgtaatgatgattggaaaaatgatgatagacatgatgtactttgtcatcattatgctggtggttctgatgagctttggggtcgccaggcaagccatcctttttcccaatgaggagccatcatggaaactggccaagaacatcttctacatgccctattggatgatttatggggaagtgtttgcggaccagatagaccctccctgtggacagaatgagacccgagaggatggtaaaataatccagctgcctccctgcaagacaggagcttggatcgtgccggccatcatggcctgctacctcttagtggcaaacatcttgctggtcaacctcctcattgctgtctttaacaatacattttttgaagtaaaatcgatatccaaccaagtctggaagtttcagaggtatcagctcatcatgactttccatgaaaggccagttctgcccccaccactgatcatcttcagccacatgaccatgatattccagcacctgtgctgccgatggaggaaacacgagagcgacccggatgaaagggactacggcctgaaactcttcataaccgatgatgagctcaagaaagtacatgactttgaagagcaatgcatagaagaatacttcagagaaaaggatgatcggttcaactcatctaatgatgagaggatacgggtgacttcagaaagggtggagaacatgtctatgcggctggaggaagtcaacgagagagagcactccatgaaggcttcactccagaccgtggacatccggctggcgcagctggaagaccttatcgggcgcatggccacggccctggagcgcctgacaggtctggagcgggccgagtccaacaaaatccgctcgaggacctcgtcagactgcacggacgccgcctacattgtccgtcagagcagcttcaacagccaggaagggaacaccttcaagctccaagagagtatagaccctgcaggtgaggagaccatgtccccaacttctccaaccttaatgccccgtatgcgaagccattctttctattcggtcaatatgaaagacaaaggtggtatagaaaagttggaaagtatttttaaagaaaggtccctgagcctacaccgggctactagttcccactctgtagcaaaagaacccaaagctcctgcagcccctgccaacaccttggccattgttcctgattccagaagaccatcatcgtgtatagacatctatgtctctgctatggatgagctccactgtgatatagaccctctggacaattccgtgaacatccttgggctgggcgagccaagcttttcaactccagtaccttccacagccccttcaagtagtgcctatgcaacacttgcacccacagacagacctccaagccggagcattgattttgaggacatcacctccatggacactagatctttttcttcagactacacccacctcccagaatgccaaaacccctgggactcagagcctccgatgtaccacaccattgagcgttccaaaagtagccgctacctagccaccacaccctttcttctagaagaggctcccattgtgaaatctcatagctttatgttttccccctcaaggagctattatgccaactttggggtgcctgtaaaaacagcagaatacacaagtattacagactgtattgacacaaggtgtgtcaatgcccctcaagcaattgcggacagagctgccttccctggaggtcttggagacaaagtggaggacttaacttgctgccatccagagcgagaagcagaactgagtcaccccagctctgacagtgaggagaatgaggccaaaggccgcagagccaccattgcaatatcctcccaggagggtgataactcagagagaaccctgtccaacaacatcactgttcccaagatagagcgcgccaacagctactcggcagaggagccaagtgcgccatatgcacacaccaggaagagcttctccatcagtgacaaactcgacaggcagcggaacacagcaagcctgcgaaatcccttccagagaagcaagtcctccaagccggagggccgaggggacagcctgtccatgaggagactgtccagaacatcggctttccaaagctttgaaagcaagcacaactaa

SEQ ID NO: 32173 - DNA, 4701 bp, Homo sapiens
  source 1..4701: mol_type = unassigned DNA
atgtatgtgcgagtatcttttgatacaaaacctgatctcctcttacacctgatgaccaaggaatggcagttggagcttcccaagcttctcatctctgtccatgggggcctgcagaactttgaactccagccaaaactcaagcaagtctttgggaaagggctcatcaaagcagcaatgacaactggagcgtggatattcactggaggggttaacacaggtgttattcgtcatgttggcgatgccttgaaggatcatgcctctaagtctcgaggaaagatatgcaccataggtattgccccctggggaattgtggaaaaccaggaggacctcattggaagagatgttgtccggccataccagaccatgtccaatcccatgagcaagctcactgttctcaacagcatgcattcccacttcattctggctgacaacgggaccactggaaaatatggagcagaggtgaaacttcgaagacaactggaaaagcatatttcactccagaagataaacacaagaatcggtcaaggtgttcctgtggtggcactcatagtggaaggaggacccaatgtgatctcgattgttttggagtaccttcgagacacccctcccgtgccagtggttgtctgtgatgggagtggacgggcatcggacatcctggcctttgggcataaatactcagaagaaggcggactgataaatgaatctttgagggaccagctgttggtgactatacagaagactttcacatacactcgaacccaagctcagcatctgttcatcatcctcatggagtgcatgaagaagaaggaattgattacggtatttcggatgggatcagaaggacaccaggacattgatttggctatcctgacagctttactcaaaggagccaatgcctcggccccagaccaactgagcttagctttagcctggaacagagtcgacatcgctcgcagccagatctttatttacgggcaacagtggccggtgggatctctggagcaagccatgttggatgccttagttctggacagagtggattttgtgaaattactcatagagaatggagtaagcatgcaccgttttctcaccatctccagactagaggaattgtacaatacgagacatgggccctcaaatacattgtaccacttggtcagggatgtcaaaaaggggaacctgcccccagactacagaatcagcctgattgacatcggcctggtgatcgagtacctgatgggcggggcttatcgctgcaactacacgcgcaagcgcttccggaccctctaccacaacctcttcggccccaagaggcccaaagccttgaaactgctgggaatggaggatgatattcccttgaggcgaggaagaaagacaaccaagaaacgtgaagaagaggtggacattgacttggatgatcctgagatcaaccacttccccttccctttccatgagctcatggtgtgggctgttctcatgaagcggcagaagatggccctgttcttctggcagcacggtgaggaggccatggccaaggccctggtggcctgcaagctctgcaaagccatggctcatgaggcctctgagaacgacatggttgacgacatttcccaggagctgaatcacaattccagagactttggccagctggctgtggagctcctggaccagtcctacaagcaggacgaacagctggccatgaaactgctgacgtatgagctgaagaactggagcaacgccacgtgcctgcagcttgccgtggctgccaaacaccgcgacttcatcgcgcacacgtgcagccagatgctgctcaccgacatgtggatgggccggctccgcatgcgcaagaactcaggcctcaaggtaattctgggaattctacttcctccttcaattctcagcttggagttcaagaacaaagacgacatgccctatatgtctcaggcccaggaaatccacctccaagagaaggaggcagaagaaccagagaagcccacaaaggaaaaagaggaagaggacatggagctcacagcaatgttgggacgaaacaacggggagtcctccaggaagaaggatgaagaggaagttcagagcaagcaccggttaatccccctcggcagaaaaatctatgaattctacaatgcacccatcgtgaagttctggttctacacactggcgtatatcggatacctgatgctcttcaactatatcgtgttagtgaagatggaacgctggccgtccacccaggaatggatcgtaatctcctatattttcaccctgggaatagaaaagatgagagagattctgatgtcagagccagggaagttgctacagaaagtgaaggtatggctgcaggagtactggaatgtcacggacctcatcgccatccttctgttttctgtcggaatgatccttcgtctccaagaccagcccttcaggagtgacgggagggtcatctactgcgtgaacatcatttactggtatatccgtctcctagacatcttcggcgtgaacaagtatttgggcccgtatgtaatgatgattggaaaaatgatgatagacatgatgtactttgtcatcattatgctggtggttctgatgagctttggggtcgccaggcaagccatcctttttcccaatgaggagccatcatggaaactggccaagaacatcttctacatgccctattggatgatttatggggaagtgtttgcggaccagatagaccgtaagcaagtttatgattctcatacaccaaagtcagctccctgtggacagaatgagacccgagaggatggtaaaataatccagctgcctccctgcaagacaggagcttggatcgtgccggccatcatggcctgctacctcttagtggcaaacatcttgctggtcaacctcctcattgctgtctttaacaatacattttttgaagtaaaatcgatatccaaccaagtctggaagtttcagaggtatcagctcatcatgactttccatgaaaggccagttctgcccccaccactgatcatcttcagccacatgaccatgatattccagcacctgtgctgccgatggaggaaacacgagagcgacccggatgaaagggactacggcctgaaactcttcataaccgatgatgagctcaagaaagtacatgactttgaagagcaatgcatagaagaatacttcagagaaaaggatgatcggttcaactcatctaatgatgagaggatacgggtgacttcagaaagggtggagaacatgtctatgcggctggaggaagtcaacgagagagagcactccatgaaggcttcactccagaccgtggacatccggctggcgcagctggaagaccttatcgggcgcatggccacggccctggagcgcctgacaggtctggagcgggccgagtccaacaaaatccgctcgaggacctcgtcagactgcacggacgccgcctacattgtccgtcagagcagcttcaacagccaggaagggaacaccttcaagctccaagagagtatagaccctgcaggtgaggagaccatgtccccaacttctccaaccttaatgccccgtatgcgaagccattctttctattcggtcaatatgaaagacaaaggtggtatagaaaagttggaaagtatttttaaagaaaggtccctgagcctacaccgggctactagttcccactctgtagcaaaagaacccaaagctcctgcagcccctgccaacaccttggccattgttcctgattccagaagaccatcatcgtgtatagacatctatgtctctgctatggatgagctccactgtgatatagaccctctggacaattccgtgaacatccttgggctgggcgagccaagcttttcaactccagtaccttccacagccccttcaagtagtgcctatgcaacacttgcacccacagacagacctccaagccggagcattgattttgaggacatcacctccatggacactagatctttttcttcagactacacccacctcccagaatgccaaaacccctgggactcagagcctccgatgtaccacaccattgagcgttccaaaagtagccgctacctagccaccacaccctttcttctagaagaggctcccattgtgaaatctcatagctttatgttttccccctcaaggagctattatgccaactttggggtgcctgtaaaaacagcagaatacacaagtattacagactgtattgacacaaggtgtgtcaatgcccctcaagcaattgcggacagagctgccttccctggaggtcttggagacaaagtggaggacttaacttgctgccatccagagcgagaagcagaactgagtcaccccagctctgacagtgaggagaatgaggccaaaggccgcagagccaccattgcaatatcctcccaggagggtgataactcagagagaaccctgtccaacaacatcactgttcccaagatagagcgcgccaacagctactcggcagaggagccaagtgcgccatatgcacacaccaggaagagcttctccatcagtgacaaactcgacaggcagcggaacacagcaagcctgcgaaatcccttccagagaagcaagtcctccaagccggagggccgaggggacagcctgtccatgaggagactgtccagaacatcggctttccaaagctttgaaagcaagcacaactaa

SEQ ID NO: 32174 - DNA, 4740 bp, Homo sapiens
  source 1..4740: mol_type = unassigned DNA
atgtatgtgcgagtatcttttgatacaaaacctgatctcctcttacacctgatgaccaaggaatggcagttggagcttcccaagcttctcatctctgtccatgggggcctgcagaactttgaactccagccaaaactcaagcaagtctttgggaaagggctcatcaaagcagcaatgacaactggagcgtggatattcactggaggggttaacacaggtgttattcgtcatgttggcgatgccttgaaggatcatgcctctaagtctcgaggaaagatatgcaccataggtattgccccctggggaattgtggaaaaccaggaggacctcattggaagagatgttgtccggccataccagaccatgtccaatcccatgagcaagctcactgttctcaacagcatgcattcccacttcattctggctgacaacgggaccactggaaaatatggagcagaggtgaaacttcgaagacaactggaaaagcatatttcactccagaagataaacacaagatgcctgccgtttttctctcttgactcccgcttgttttattcattttggggtagttgccagttagactcagttggaatcggtcaaggtgttcctgtggtggcactcatagtggaaggaggacccaatgtgatctcgattgttttggagtaccttcgagacacccctcccgtgccagtggttgtctgtgatgggagtggacgggcatcggacatcctggcctttgggcataaatactcagaagaaggcggactgataaatgaatctttgagggaccagctgttggtgactatacagaagactttcacatacactcgaacccaagctcagcatctgttcatcatcctcatggagtgcatgaagaagaaggaattgattacggtatttcggatgggatcagaaggacaccaggacattgatttggctatcctgacagctttactcaaaggagccaatgcctcggccccagaccaactgagcttagctttagcctggaacagagtcgacatcgctcgcagccagatctttatttacgggcaacagtggccggtgggatctctggagcaagccatgttggatgccttagttctggacagagtggattttgtgaaattactcatagagaatggagtaagcatgcaccgttttctcaccatctccagactagaggaattgtacaatacgagacatgggccctcaaatacattgtaccacttggtcagggatgtcaaaaaggggaacctgcccccagactacagaatcagcctgattgacatcggcctggtgatcgagtacctgatgggcggggcttatcgctgcaactacacgcgcaagcgcttccggaccctctaccacaacctcttcggccccaagaggcccaaagccttgaaactgctgggaatggaggatgatattcccttgaggcgaggaagaaagacaaccaagaaacgtgaagaagaggtggacattgacttggatgatcctgagatcaaccacttccccttccctttccatgagctcatggtgtgggctgttctcatgaagcggcagaagatggccctgttcttctggcagcacggtgaggaggccatggccaaggccctggtggcctgcaagctctgcaaagccatggctcatgaggcctctgagaacgacatggttgacgacatttcccaggagctgaatcacaattccagagactttggccagctggctgtggagctcctggaccagtcctacaagcaggacgaacagctggccatgaaactgctgacgtatgagctgaagaactggagcaacgccacgtgcctgcagcttgccgtggctgccaaacaccgcgacttcatcgcgcacacgtgcagccagatgctgctcaccgacatgtggatgggccggctccgcatgcgcaagaactcaggcctcaaggtaattctgggaattctacttcctccttcaattctcagcttggagttcaagaacaaagacgacatgccctatatgtctcaggcccaggaaatccacctccaagagaaggaggcagaagaaccagagaagcccacaaaggaaaaagaggaagaggacatggagctcacagcaatgttgggacgaaacaacggggagtcctccaggaagaaggatgaagaggaagttcagagcaagcaccggttaatccccctcggcagaaaaatctatgaattctacaatgcacccatcgtgaagttctggttctacacactggcgtatatcggatacctgatgctcttcaactatatcgtgttagtgaagatggaacgctggccgtccacccaggaatggatcgtaatctcctatattttcaccctgggaatagaaaagatgagagagattctgatgtcagagccagggaagttgctacagaaagtgaaggtatggctgcaggagtactggaatgtcacggacctcatcgccatccttctgttttctgtcggaatgatccttcgtctccaagaccagcccttcaggagtgacgggagggtcatctactgcgtgaacatcatttactggtatatccgtctcctagacatcttcggcgtgaacaagtatttgggcccgtatgtaatgatgattggaaaaatgatgatagacatgatgtactttgtcatcattatgctggtggttctgatgagctttggggtcgccaggcaagccatcctttttcccaatgaggagccatcatggaaactggccaagaacatcttctacatgccctattggatgatttatggggaagtgtttgcggaccagatagaccctccctgtggacagaatgagacccgagaggatggtaaaataatccagctgcctccctgcaagacaggagcttggatcgtgccggccatcatggcctgctacctcttagtggcaaacatcttgctggtcaacctcctcattgctgtctttaacaatacattttttgaagtaaaatcgatatccaaccaagtctggaagtttcagaggtatcagctcatcatgactttccatgaaaggccagttctgcccccaccactgatcatcttcagccacatgaccatgatattccagcacctgtgctgccgatggaggaaacacgagagcgacccggatgaaagggactacggcctgaaactcttcataaccgatgatgagctcaagaaagtacatgactttgaagagcaatgcatagaagaatacttcagagaaaaggatgatcggttcaactcatctaatgatgagaggatacgggtgacttcagaaagggtggagaacatgtctatgcggctggaggaagtcaacgagagagagcactccatgaaggcttcactccagaccgtggacatccggctggcgcagctggaagaccttatcgggcgcatggccacggccctggagcgcctgacaggtctggagcgggccgagtccaacaaaatccgctcgaggacctcgtcagactgcacggacgccgcctacattgtccgtcagagcagcttcaacagccaggaagggaacaccttcaagctccaagagagtatagaccctgcaggtgaggagaccatgtccccaacttctccaaccttaatgccccgtatgcgaagccattctttctattcggtcaatatgaaagacaaaggtggtatagaaaagttggaaagtatttttaaagaaaggtccctgagcctacaccgggctactagttcccactctgtagcaaaagaacccaaagctcctgcagcccctgccaacaccttggccattgttcctgattccagaagaccatcatcgtgtatagacatctatgtctctgctatggatgagctccactgtgatatagaccctctggacaattccgtgaacatccttgggctgggcgagccaagcttttcaactccagtaccttccacagccccttcaagtagtgcctatgcaacacttgcacccacagacagacctccaagccggagcattgattttgaggacatcacctccatggacactagatctttttcttcagactacacccacctcccagaatgccaaaacccctgggactcagagcctccgatgtaccacaccattgagcgttccaaaagtagccgctacctagccaccacaccctttcttctagaagaggctcccattgtgaaatctcatagctttatgttttccccctcaaggagctattatgccaactttggggtgcctgtaaaaacagcagaatacacaagtattacagactgtattgacacaaggtgtgtcaatgcccctcaagcaattgcggacagagctgccttccctggaggtcttggagacaaagtggaggacttaacttgctgccatccagagcgagaagcagaactgagtcaccccagctctgacagtgaggagaatgaggccaaaggccgcagagccaccattgcaatatcctcccaggagggtgataactcagagagaaccctgtccaacaacatcactgttcccaagatagagcgcgccaacagctactcggcagaggagccaagtgcgccatatgcacacaccaggaagagcttctccatcagtgacaaactcgacaggcagcggaacacagcaagcctgcgaaatcccttccagagaagcaagtcctccaagccggagggccgaggggacagcctgtccatgaggagactgtccagaacatcggctttccaaagctttgaaagcaagcacaactaa

SEQ ID NO: 32175 - DNA, 4701 bp, Homo sapiens
  source 1..4701: mol_type = unassigned DNA
atgtatgtgcgagtatcttttgatacaaaacctgatctcctcttacacctgatgaccaaggaatggcagttggagcttcccaagcttctcatctctgtccatgggggcctgcagaactttgaactccagccaaaactcaagcaagtctttgggaaagggctcatcaaagcagcaatgacaactggagcgtggatattcactggaggggttaacacaggtgttattcgtcatgttggcgatgccttgaaggatcatgcctctaagtctcgaggaaagatatgcaccataggtattgccccctggggaattgtggaaaaccaggaggacctcattggaagagatgttgtccggccataccagaccatgtccaatcccatgagcaagctcactgttctcaacagcatgcattcccacttcattctggctgacaacgggaccactggaaaatatggagcagaggtgaaacttcgaagacaactggaaaagcatatttcactccagaagataaacacaagaatcggtcaaggtgttcctgtggtggcactcatagtggaaggaggacccaatgtgatctcgattgttttggagtaccttcgagacacccctcccgtgccagtggttgtctgtgatgggagtggacgggcatcggacatcctggcctttgggcataaatactcagaagaaggcggactgataaatgaatctttgagggaccagctgttggtgactatacagaagactttcacatacactcgaacccaagctcagcatctgttcatcatcctcatggagtgcatgaagaagaaggaattgattacggtatttcggatgggatcagaaggacaccaggacattgatttggctatcctgacagctttactcaaaggagccaatgcctcggccccagaccaactgagcttagctttagcctggaacagagtcgacatcgctcgcagccagatctttatttacgggcaacagtggccggtgggatctctggagcaagccatgttggatgccttagttctggacagagtggattttgtgaaattactcatagagaatggagtaagcatgcaccgttttctcaccatctccagactagaggaattgtacaatacgagacatgggccctcaaatacattgtaccacttggtcagggatgtcaaaaagcgagagtatccaggtttcggttggatctattttaaggggaacctgcccccagactacagaatcagcctgattgacatcggcctggtgatcgagtacctgatgggcggggcttatcgctgcaactacacgcgcaagcgcttccggaccctctaccacaacctcttcggccccaagaggcccaaagccttgaaactgctgggaatggaggatgatattcccttgaggcgaggaagaaagacaaccaagaaacgtgaagaagaggtggacattgacttggatgatcctgagatcaaccacttccccttccctttccatgagctcatggtgtgggctgttctcatgaagcggcagaagatggccctgttcttctggcagcacggtgaggaggccatggccaaggccctggtggcctgcaagctctgcaaagccatggctcatgaggcctctgagaacgacatggttgacgacatttcccaggagctgaatcacaattccagagactttggccagctggctgtggagctcctggaccagtcctacaagcaggacgaacagctggccatgaaactgctgacgtatgagctgaagaactggagcaacgccacgtgcctgcagcttgccgtggctgccaaacaccgcgacttcatcgcgcacacgtgcagccagatgctgctcaccgacatgtggatgggccggctccgcatgcgcaagaactcaggcctcaaggtaattctgggaattctacttcctccttcaattctcagcttggagttcaagaacaaagacgacatgccctatatgtctcaggcccaggaaatccacctccaagagaaggaggcagaagaaccagagaagcccacaaaggaaaaagaggaagaggacatggagctcacagcaatgttgggacgaaacaacggggagtcctccaggaagaaggatgaagaggaagttcagagcaagcaccggttaatccccctcggcagaaaaatctatgaattctacaatgcacccatcgtgaagttctggttctacacactggcgtatatcggatacctgatgctcttcaactatatcgtgttagtgaagatggaacgctggccgtccacccaggaatggatcgtaatctcctatattttcaccctgggaatagaaaagatgagagagattctgatgtcagagccagggaagttgctacagaaagtgaaggtatggctgcaggagtactggaatgtcacggacctcatcgccatccttctgttttctgtcggaatgatccttcgtctccaagaccagcccttcaggagtgacgggagggtcatctactgcgtgaacatcatttactggtatatccgtctcctagacatcttcggcgtgaacaagtatttgggcccgtatgtaatgatgattggaaaaatgatgatagacatgatgtactttgtcatcattatgctggtggttctgatgagctttggggtcgccaggcaagccatcctttttcccaatgaggagccatcatggaaactggccaagaacatcttctacatgccctattggatgatttatggggaagtgtttgcggaccagatagaccctccctgtggacagaatgagacccgagaggatggtaaaataatccagctgcctccctgcaagacaggagcttggatcgtgccggccatcatggcctgctacctcttagtggcaaacatcttgctggtcaacctcctcattgctgtctttaacaatacattttttgaagtaaaatcgatatccaaccaagtctggaagtttcagaggtatcagctcatcatgactttccatgaaaggccagttctgcccccaccactgatcatcttcagccacatgaccatgatattccagcacctgtgctgccgatggaggaaacacgagagcgacccggatgaaagggactacggcctgaaactcttcataaccgatgatgagctcaagaaagtacatgactttgaagagcaatgcatagaagaatacttcagagaaaaggatgatcggttcaactcatctaatgatgagaggatacgggtgacttcagaaagggtggagaacatgtctatgcggctggaggaagtcaacgagagagagcactccatgaaggcttcactccagaccgtggacatccggctggcgcagctggaagaccttatcgggcgcatggccacggccctggagcgcctgacaggtctggagcgggccgagtccaacaaaatccgctcgaggacctcgtcagactgcacggacgccgcctacattgtccgtcagagcagcttcaacagccaggaagggaacaccttcaagctccaagagagtatagaccctgcaggtgaggagaccatgtccccaacttctccaaccttaatgccccgtatgcgaagccattctttctattcggtcaatatgaaagacaaaggtggtatagaaaagttggaaagtatttttaaagaaaggtccctgagcctacaccgggctactagttcccactctgtagcaaaagaacccaaagctcctgcagcccctgccaacaccttggccattgttcctgattccagaagaccatcatcgtgtatagacatctatgtctctgctatggatgagctccactgtgatatagaccctctggacaattccgtgaacatccttgggctgggcgagccaagcttttcaactccagtaccttccacagccccttcaagtagtgcctatgcaacacttgcacccacagacagacctccaagccggagcattgattttgaggacatcacctccatggacactagatctttttcttcagactacacccacctcccagaatgccaaaacccctgggactcagagcctccgatgtaccacaccattgagcgttccaaaagtagccgctacctagccaccacaccctttcttctagaagaggctcccattgtgaaatctcatagctttatgttttccccctcaaggagctattatgccaactttggggtgcctgtaaaaacagcagaatacacaagtattacagactgtattgacacaaggtgtgtcaatgcccctcaagcaattgcggacagagctgccttccctggaggtcttggagacaaagtggaggacttaacttgctgccatccagagcgagaagcagaactgagtcaccccagctctgacagtgaggagaatgaggccaaaggccgcagagccaccattgcaatatcctcccaggagggtgataactcagagagaaccctgtccaacaacatcactgttcccaagatagagcgcgccaacagctactcggcagaggagccaagtgcgccatatgcacacaccaggaagagcttctccatcagtgacaaactcgacaggcagcggaacacagcaagcctgcgaaatcccttccagagaagcaagtcctccaagccggagggccgaggggacagcctgtccatgaggagactgtccagaacatcggctttccaaagctttgaaagcaagcacaactaa

SEQ ID NO: 32176 - DNA, 5205 bp, Homo sapiens
  source 1..5205: mol_type = unassigned DNA
atggggaagaagtggagggatgcggcggaaatggagcggggctgctccgaccgcgaggacaacgcggagagccgcagacgcagccggagcgccagccggggcaggtttgccgagtcgtggaaaaggttaagttccaagcaggggtccaccaaacgctcgggactcccgtcgcagcagacgccggctcagaaatcctggatagaaagagcattttataaaagagaatgtgtccacatcatacccagcaccaaagacccccataggtgttgctgtgggcgtctgataggccagcatgttggcctcacccccagtatctccgtgcttcagaatgagaaaaatgaaagtcgcctctcccgaaatgacatccagtctgaaaagtggtccatcagcaaacacactcaactcagccctacggatgcttttgggaccattgagttccaaggaggtggccattccaacaaagccatgtatgtgcgagtatcttttgatacaaaacctgatctcctcttacacctgatgaccaaggaatggcagttggagcttcccaagcttctcatctctgtccatgggggcctgcagaactttgaactccagccaaaactcaagcaagtctttgggaaagggctcatcaaagcagcaatgacaactggagcgtggatattcactggaggggttaacacaggtgttattcgtcatgttggcgatgccttgaaggatcatgcctctaagtctcgaggaaagatatgcaccataggtattgccccctggggaattgtggaaaaccaggaggacctcattggaagagatgttgtccggccataccagaccatgtccaatcccatgagcaagctcactgttctcaacagcatgcattcccacttcattctggctgacaacgggaccactggaaaatatggagcagaggtgaaacttcgaagacaactggaaaagcatatttcactccagaagataaacacaagatgcctgccgtttttctctcttgactcccgcttgttttattcattttggggtagttgccagttagactcagttggaatcggtcaaggtgttcctgtggtggcactcatagtggaaggaggacccaatgtgatctcgattgttttggagtaccttcgagacacccctcccgtgccagtggttgtctgtgatgggagtggacgggcatcggacatcctggcctttgggcataaatactcagaagaaggcggactgataaatgaatctttgagggaccagctgttggtgactatacagaagactttcacatacactcgaacccaagctcagcatctgttcatcatcctcatggagtgcatgaagaagaaggaattgattacggtatttcggatgggatcagaaggacaccaggacattgatttggctatcctgacagctttactcaaaggagccaatgcctcggccccagaccaactgagcttagctttagcctggaacagagtcgacatcgctcgcagccagatctttatttacgggcaacagtggccggtgggatctctggagcaagccatgttggatgccttagttctggacagagtggattttgtgaaattactcatagagaatggagtaagcatgcaccgttttctcaccatctccagactagaggaattgtacaatacgagacatgggccctcaaatacattgtaccacttggtcagggatgtcaaaaaggggaacctgcccccagactacagaatcagcctgattgacatcggcctggtgatcgagtacctgatgggcggggcttatcgctgcaactacacgcgcaagcgcttccggaccctctaccacaacctcttcggccccaagaggcccaaagccttgaaactgctgggaatggaggatgatattcccttgaggcgaggaagaaagacaaccaagaaacgtgaagaagaggtggacattgacttggatgatcctgagatcaaccacttccccttccctttccatgagctcatggtgtgggctgttctcatgaagcggcagaagatggccctgttcttctggcagcacggtgaggaggccatggccaaggccctggtggcctgcaagctctgcaaagccatggctcatgaggcctctgagaacgacatggttgacgacatttcccaggagctgaatcacaattccagagactttggccagctggctgtggagctcctggaccagtcctacaagcaggacgaacagctggccatgaaactgctgacgtatgagctgaagaactggagcaacgccacgtgcctgcagcttgccgtggctgccaaacaccgcgacttcatcgcgcacacgtgcagccagatgctgctcaccgacatgtggatgggccggctccgcatgcgcaagaactcaggcctcaaggtaattctgggaattctacttcctccttcaattctcagcttggagttcaagaacaaagacgacatgccctatatgtctcaggcccaggaaatccacctccaagagaaggaggcagaagaaccagagaagcccacaaaggaaaaagaggaagaggacatggagctcacagcaatgttgggacgaaacaacggggagtcctccaggaagaaggatgaagaggaagttcagagcaagcaccggttaatccccctcggcagaaaaatctatgaattctacaatgcacccatcgtgaagttctggttctacacactggcgtatatcggatacctgatgctcttcaactatatcgtgttagtgaagatggaacgctggccgtccacccaggaatggatcgtaatctcctatattttcaccctgggaatagaaaagatgagagagattctgatgtcagagccagggaagttgctacagaaagtgaaggtatggctgcaggagtactggaatgtcacggacctcatcgccatccttctgttttctgtcggaatgatccttcgtctccaagaccagcccttcaggagtgacgggagggtcatctactgcgtgaacatcatttactggtatatccgtctcctagacatcttcggcgtgaacaagtatttgggcccgtatgtaatgatgattggaaaaatgatgatagacatgatgtactttgtcatcattatgctggtggttctgatgagctttggggtcgccaggcaagccatcctttttcccaatgaggagccatcatggaaactggccaagaacatcttctacatgccctattggatgatttatggggaagtgtttgcggaccagatagaccctccctgtggacagaatgagacccgagaggatggtaaaataatccagctgcctccctgcaagacaggagcttggatcgtgccggccatcatggcctgctacctcttagtggcaaacatcttgctggtcaacctcctcattgctgtctttaacaatacattttttgaagtaaaatcgatatccaaccaagtctggaagtttcagaggtatcagctcatcatgactttccatgaaaggccagttctgcccccaccactgatcatcttcagccacatgaccatgatattccagcacctgtgctgccgatggaggaaacacgagagcgacccggatgaaagggactacggcctgaaactcttcataaccgatgatgagctcaagaaagtacatgactttgaagagcaatgcatagaagaatacttcagagaaaaggatgatcggttcaactcatctaatgatgagaggatacgggtgacttcagaaagggtggagaacatgtctatgcggctggaggaagtcaacgagagagagcactccatgaaggcttcactccagaccgtggacatccggctggcgcagctggaagaccttatcgggcgcatggccacggccctggagcgcctgacaggtctggagcgggccgagtccaacaaaatccgctcgaggacctcgtcagactgcacggacgccgcctacattgtccgtcagagcagcttcaacagccaggaagggaacaccttcaagctccaagagagtatagaccctgcaggtgaggagaccatgtccccaacttctccaaccttaatgccccgtatgcgaagccattctttctattcggtcaatatgaaagacaaaggtggtatagaaaagttggaaagtatttttaaagaaaggtccctgagcctacaccgggctactagttcccactctgtagcaaaagaacccaaagctcctgcagcccctgccaacaccttggccattgttcctgattccagaagaccatcatcgtgtatagacatctatgtctctgctatggatgagctccactgtgatatagaccctctggacaattccgtgaacatccttgggctgggcgagccaagcttttcaactccagtaccttccacagccccttcaagtagtgcctatgcaacacttgcacccacagacagacctccaagccggagcattgattttgaggacatcacctccatggacactagatctttttcttcagactacacccacctcccagaatgccaaaacccctgggactcagagcctccgatgtaccacaccattgagcgttccaaaagtagccgctacctagccaccacaccctttcttctagaagaggctcccattgtgaaatctcatagctttatgttttccccctcaaggagctattatgccaactttggggtgcctgtaaaaacagcagaatacacaagtattacagactgtattgacacaaggtgtgtcaatgcccctcaagcaattgcggacagagctgccttccctggaggtcttggagacaaagtggaggacttaacttgctgccatccagagcgagaagcagaactgagtcaccccagctctgacagtgaggagaatgaggccaaaggccgcagagccaccattgcaatatcctcccaggagggtgataactcagagagaaccctgtccaacaacatcactgttcccaagatagagcgcgccaacagctactcggcagaggagccaagtgcgccatatgcacacaccaggaagagcttctccatcagtgacaaactcgacaggcagcggaacacagcaagcctgcgaaatcccttccagagaagcaagtcctccaagccggagggccgaggggacagcctgtccatgaggagactgtccagaacatcggctttccaaagctttgaaagcaagcacaactaa

SEQ ID NO: 32177 - DNA, 2121 bp, Homo sapiens
  source 1..2121: mol_type = unassigned DNA
aaatgaaagcaacaggagctgctccggggactgcttttgccagtacccagaatcagtgctcaggctcagaaatcctggatagaaagagcattttataaaagagaatgtgtccacatcatacccagcaccaaagacccccataggtgttgctgtgggcgtctgataggccagcatgttggcctcacccccagtatctccgtgcttcagaatgagaaaaatgaaagtcgcctctcccgaaatgacatccagtctgaaaagtggtccatcagcaaacacactcaactcagccctacggatgcttttgggaccattgagttccaaggaggtggccattccaacaaagccatgtatgtgcgagtatcttttgatacaaaacctgatctcctcttacacctgatgaccaaggaatggcagttggagcttcccaagcttctcatctctgtccatgggggcctgcagaactttgaactccagccaaaactcaagcaagtctttgggaaagggctcatcaaagcagcaatgacaactggagcgtggatattcactggaggggttaacacaggtgttattcgtcatgttggcgatgccttgaaggatcatgcctctaagtctcgaggaaagatatgcaccataggtattgccccctggggaattgtggaaaaccaggaggacctcattggaagagatgttgtccggccataccagaccatgtccaatcccatgagcaagctcactgttctcaacagcatgcattcccacttcattctggctgacaacgggaccactggaaaatatggagcagaggtgaaacttcgaagacaactggaaaagcatatttcactccagaagataaacacaagttttcatagttacaaaacagctcatgtggaccttcaggataaaagacaggtgaagactgccttagagcaagcagagtggcagccgggaagaggaatgtttgatcatgataatctcatgcaaagtacataaaggggtatatatatgtatgtatatatgtatgtatgtttatatgtgtttatatgcatacatatacatatgtgttttatatatatatatatatatatatttttttttttttttgagacaaagcctcactctgtcactgaggctttggtgcaatggcaccctcagggctcactgcagcctcgacttcccaggctcaagtgattctcctacctcagggtcctgagtagctgggactacaggcacatgcatcaaaccccactaatttttaaaaatatttttgtagagacaggttcttgctatatttcccaggctgatcctgaattcctgggctcaaatgatcctcccgcctcggtctctcttttattctctctctctccctctttttccctctctttcatagattctttctcttttctctcccctctctctctccttcctcccccataccacttccttccctcttcctggggccatgtgatctctcccctccatggtaccctctgctcctttgttttctacctgcatatggcttttttgttcattggcttaccttcctcacatggttggtctggaggaccaccactaacagaggcttcattccccaagtatgcatgccctggaagcccatctcccagttactggccttgggctcaggatctccacttcaatcccaggaaagcaaatctggctcactgcaggtctgacatccatgtaagtccagccagctttgaaaaaagtcaagcagggctgcgccttctatgcagtggatgggtctgttctctgacaggggagaggggatagggcggacaccatgagagttttcagtacacatgccacagtgacctctttggccagcttaaaggatttcccattcaatctactcatccactgcccagcttctgtcctttgtcctccgattactagatagaaaagcaaagcaagaaggcaatgccccaaaagaaggccagtcgatgggcattaatacaggattgctgtgaaaatgcctcgagcactgagaatgcacaaaatagatttgtttagctgtattgaaaacaaacagaaaaaaatacagtttgccatattaatttaatatattctgcattctcagtccctaggaaaagatacactatgcac

SEQ ID NO: 32178 - DNA, 4053 bp, Homo sapiens
  source 1..4053: mol_type = unassigned DNA
ggtctggaagcagagccggcggagggagcgccggggccctgggctgcaggaggttgcggcggccgcggcagcatggtggtgccggagaaggagcagagctggatccccaagatcttcaagaagaagacctgcacgacgttcatagttgactccacagatccgggagggaccttgtgccagtgtgggcgcccccggaccgcccaccccgcagtggccatggaggatgccttcggggcagccgtggtgaccgtgtgggacagcgatgcacacaccacggagaagcccaccgatgcctacggagagctggacttcacgggggccggccgcaagcacagcaatttcctccggctctctgaccgaacggatccagctgcagtttatagtctggtcacacgcacatggggcttccgtgccccgaacctggtggtgtcagtgctggggggatcggggggccccgtcctccagacctggctgcaggacctgctgcgtcgtgggctggtgcgggctgcccagagcacaggagcctggattgtcactgggggtctgcacacgggcatcggccggcatgttggtgtggctgtacgggaccatcagatggccagcactgggggcaccaaggtggtggccatgggtgtggccccctggggtgtggtccggaatagagacaccctcatcaaccccaagggctcgttccctgcgaggtaccggtggcgcggtgacccggaggacggggtccagtttcccctggactacaactactcggccttcttcctggtggacgacggcacacacggctgcctggggggcgagaaccgcttccgcttgcgcctggagtcctacatctcacagcagaagacgggcgtgggagggactggaattgacatccctgtcctgctcctcctgattgatggtgatgagaagatgttgacgcgaatagagaacgccacccaggctcagctcccatgtctcctcgtggctggctcagggggagctgcggactgcctggcggagaccctggaagacactctggccccagggagtgggggagccaggcaaggcgaagcccgagatcgaatcaggcgtttctttcccaaaggggaccttgaggtcctgcaggcccaggtggagaggattatgacccggaaggagctcctgacagtctattcttctgaggatgggtctgaggaattcgagaccatagttttgaaggcccttgtgaaggcctgtgggagctcggaggcctcagcctacctggatgagctgcgtttggctgtggcttggaaccgcgtggacattgcccagagtgaactctttcggggggacatccaatggcggtccttccatctcgaagcttccctcatggacgccctgctgaatgaccggcctgagttcgtgcgcttgctcatttcccacggcctcagcctgggccacttcctgaccccgatgcgcctggcccaactctacagcgcggcgccctccaactcgctcatccgcaaccttttggaccaggcgtcccacagcgcaggcaccaaagccccagccctaaaagggggagctgcggagctccggccccctgacgtggggcatgtgctgaggatgctgctggggaagatgtgcgcgccgaggtacccctccgggggcgcctgggaccctcacccaggccagggcttcggggagagcatgtatctgctctcggacaaggccacctcgccgctctcgctggatgctggcctcgggcaggccccctggagcgacctgcttctttgggcactgttgctgaacagggcacagatggccatgtacttctgggagatgggttccaatgcagtttcctcagctcttggggcctgtttgctgctccgggtgatggcacgcctggagcctgacgctgaggaggcagcacggaggaaagacctggcgttcaagtttgaggggatgggcgttgacctctttggcgagtgctatcgcagcagtgaggtgagggctgcccgcctcctcctccgtcgctgcccgctctggggggatgccacttgcctccagctggccatgcaagctgacgcccgtgccttctttgcccaggatggggtacagtctctgctgacacagaagtggtggggagatatggccagcactacacccatctgggccctggttctcgccttcttttgccctccactcatctacacccgcctcatcaccttcaggaaatcagaagaggagcccacacgggaggagctagagtttgacatggatagtgtcattaatggggaagggcctgtcgggacggcggacccagccgagaagacgccgctgggggtcccgcgccagtcgggccgtccgggttgctgcgggggccgctgcggggggcgccggtgcctacgccgctggttccacttctggggcgcgccggtgaccatcttcatgggcaacgtggtcagctacctgctgttcctgctgcttttctcgcgggtgctgctcgtggatttccagccggcgccgcccggctccctggagctgctgctctatttctgggctttcacgctgctgtgcgaggaactgcgccagggcctgagcggaggcgggggcagcctcgccagcgggggccccgggcctggccatgcctcactgagccagcgcctgcgcctctacctcgccgacagctggaaccagtgcgacctagtggctctcacctgcttcctcctgggcgtgggctgccggctgaccccgggtttgtaccacctgggccgcactgtcctctgcatcgacttcatggttttcacggtgcggctgcttcacatcttcacggtcaacaaacagctggggcccaagatcgtcatcgtgagcaagatgatgaaggacgtgttcttcttcctcttcttcctcggcgtgtggctggtagcctatggcgtggccacggaggggctcctgaggccacgggacagtgacttcccaagtatcctgcgccgcgtcttctaccgtccctacctgcagatcttcgggcagattccccaggaggacatggacgtggccctcatggagcacagcaactgctcgtcggagcccggcttctgggcacaccctcctggggcccaggcgggcacctgcgtctcccagtatgccaactggctggtggtgctgctcctcgtcatcttcctgctcgtggccaacatcctgctggtcaacttgctcattgccatgttcagttacacattcggcaaagtacagggcaacagcgatctctactggaaggcgcagcgttaccgcctcatccgggaattccactctcggcccgcgctggccccgccctttatcgtcatctcccacttgcgcctcctgctcaggcaattgtgcaggcgaccccggagcccccagccgtcctccccggccctcgagcatttccgggtttacctttctaaggaagccgagcggaagctgctaacgtgggaatcggtgcataaggagaactttctgctggcacgcgctagggacaagcgggagagcgactccgagcgtctgaagcgcacgtcccagaaggtggacttggcactgaaacagctgggacacatccgcgagtacgaacagcgcctgaaagtgctggagcgggaggtccagcagtgtagccgcgtcctggggtgggtggccgaggccctgagccgctctgccttgctgcccccaggtgggccgccaccccctgacctgcctgggtccaaagactgagccctgctggcggacttcaaggagaagcccccacaggggattttgctcctagagtaaggctcatctgggcctcggcccccgcacctggtggccttgtccttgaggtgagccccatgtccatctgggccactgtcaggaccacctttgggagtgtcatccttacaaaccacagcatgcccggctcctcccagaaccagtcccagcctgggaggatcaaggcctggatcccgggccgttatccatctggaggctgcagggtccttggggtaacagggaccacagacccctcaccactcacagattcctcacactggggaaataaagccatttcagagg

SEQ ID NO: 32179 - DNA, 3273 bp, Homo sapiens
  source 1..3273: mol_type = unassigned DNA
aggaggttgcggcggccgcggcagcatggtggtgccggagaaggagcagagctggatccccaagatcttcaagaagaagacctgcacgacgttcatagttgactccacagatccgggggctcgttccctgcgaggtaccggtggcgcggtgacccggaggacggggtccagtttcccctggactacaactactcggccttcttcctggtggacgacggcacacacggctgcctggggggcgagaaccgcttccgcttgcgcctggagtcctacatctcacagcagaagacgggcgtgggagggactggaattgacatccctgtcctgctcctcctgattgatggtgatgagaagatgttgacgcgaatagagaacgccacccaggctcagctcccatgtctcctcgtggctggctcagggggagctgcggactgcctggcggagaccctggaagacactctggccccagggagtgggggagccaggcaaggcgaagcccgagatcgaatcaggcgtttctttcccaaaggggaccttgaggtcctgcaggcccagtccttccatctcgaagcttccctcatggacgccctgctgaatgaccggcctgagttcgtgcgcttgctcatttcccacggcctcagcctgggccacttcctgaccccgatgcgcctggcccaactctacagcgcggcgccctccaactcgctcatccgcaaccttttggaccaggcgtcccacagcgcaggcaccaaagccccagccctaaaagggggagctgcggagctccggccccctgacgtggggcatgtgctgaggatgctgctggggaagatgtgcgcgccgaggtacccctccgggggcgcctgggaccctcacccaggccagggcttcggggagagcatgtatctgctctcggacaaggccacctcgccgctctcgctggatgctggcctcgggcaggccccctggagcgacctgcttctttgggcactgttgctgaacagggcacagatggccatgtacttctgggagatgggttccaatgcagtttcctcagctcttggggcctgtttgctgctccgggtgatggcacgcctggagcctgacgctgaggaggcagcacggaggaaagacctggcgttcaagtttgaggggatgggcgttgacctctttggcgagtgctatcgcagcagtgaggtgagggctgcccgcctcctcctccgtcgctgcccgctctggggggatgccacttgcctccagctggccatgcaagctgacgcccgtgccttctttgcccaggatggggtacagtctctgctgacacagaagtggtggggagatatggccagcactacacccatctgggccctggttctcgccttcttttgccctccactcatctacacccgcctcatcaccttcaggaaatcagaagaggagcccacacgggaggagctagagtttgacatggatagtgtcattaatggggaagggcctgtcgggacggcggacccagccgagaagacgccgctgggggtcccgcgccagtcgggccgtccgggttgctgcgggggccgctgcggggggcgccggtgcctacgccgctggttccacttctggggcgcgccggtgaccatcttcatgggcaacgtggtcagctacctgctgttcctgctgcttttctcgcgggtgctgctcgtggatttccagccggcgccgcccggctccctggagctgctgctctatttctgggctttcacgctgctgtgcgaggaactgcgccagggcctgagcggaggcgggggcagcctcgccagcgggggccccgggcctggccatgcctcactgagccagcgcctgcgcctctacctcgccgacagctggaaccagtgcgacctagtggctctcacctgcttcctcctgggcgtgggctgccggctgaccccgggtttgtaccacctgggccgcactgtcctctgcatcgacttcatggttttcacggtgcggctgcttcacatcttcacggtcaacaaacagctggggcccaagatcgtcatcgtgagcaagatgatgaaggacgtgttcttcttcctcttcttcctcggcgtgtggctggtagcctatggcgtggccacggaggggctcctgaggccacgggacagtgacttcccaagtatcctgcgccgcgtcttctaccgtccctacctgcagatcttcgggcagattccccaggaggacatggacgtggccctcatggagcacagcaactgctcgtcggagcccggcttctgggcacaccctcctggggcccaggcgggcacctgcgtctcccagtatgccaactggctggtggtgctgctcctcgtcatcttcctgctcgtggccaacatcctgctggtcaacttgctcattgccatgttcagttacacattcggcaaagtacagggcaacagcgatctctactggaaggcgcagcgttaccgcctcatccgggaattccactctcggcccgcgctggccccgccctttatcgtcatctcccacttgcgcctcctgctcaggcaattgtgcaggcgaccccggagcccccagccgtcctccccggccctcgagcatttccgggtttacctttctaaggaagccgagcggaagctgctaacgtgggaatcggtgcataaggagaactttctgctggcacgcgctagggacaagcgggagagcgactccgagcgtctgaagcgcacgtcccagaaggtggacttggcactgaaacagctgggacacatccgcgagtacgaacagcgcctgaaagtgctggagcgggaggtccagcagtgtagccgcgtcctggggtgggtggccgaggccctgagccgctctgccttgctgcccccaggtgggccgccaccccctgacctgcctgggtccaaagactgagccctgctggcggacttcaaggagaagcccccacaggggattttgctcctagagtaaggctcatctgggcctcggcccccgcacctggtggccttgtccttgaggtgagccccatgtccatctgggccactgtcaggaccacctttgggagtgtcatccttacaaaccacagcatgcccggctcctcccagaaccagtcccagcctgggaggatcaaggcctggatcccgggccgttatccatctggaggctgcagggtccttggggtaacagggaccacagacccctcaccactcacagattcctcacactggggaaataaagccatttcagagg

SEQ ID NO: 32180 - DNA, 3618 bp, Homo sapiens
  source 1..3618: mol_type = unassigned DNA
ggtctggaagcagagccggcggagggagcgccggggccctgggctgcaggaggttgcggcggccgcggcagcatggtggtgccggagaaggagcagagctggatccccaagatcttcaagaagaagacctgcacgacgttcatagttgactccacagatccgggagggaccttgtgccagtgtgggcgcccccggaccgcccaccccgcagtggccatggaggatgccttcggggcagccgtggtgaccgtgtgggacagcgatgcacacaccacggagaagcccaccgatgcctacggagagctggacttcacgggggccggccgcaagcacagcaatttcctccggctctctgaccgaacggatccagctgcagtttatagtctggtcacacgcacatggggcttccgtgccccgaacctggtggtgtcagtgctggggggatcggggggccccgtcctccagacctggctgcaggacctgctgcgtcgtgggctggtgcgggctgcccagagcacaggagcctggattgtcactgggggtctgcacacgggcatcggccggcatgttggtgtggctgtacgggaccatcagatggccagcactgggggcaccaaggtggtggccatgggtgtggccccctggggtgtggtccggaatagagacaccctcatcaaccccaagggctcgttccctgcgaggtaccggtggcgcggtgacccggaggacggggtccagtttcccctggactacaactactcggccttcttcctggtggacgacggcacacacggctgcctggggggcgagaaccgcttccgcttgcgcctggagtcctacatctcacagcagaagacgggcgtgggagggactggaattgacatccctgtcctgctcctcctgattgatggtgatgagaagatgttgacgcgaatagagaacgccacccaggctcagctcccatgtctcctcgtggctggctcagggggagctgcggactgcctggcggagaccctggaagacactctggccccagggagtgggggagccaggcaaggcgaagcccgagatcgaatcaggcgtttctttcccaaaggggaccttgaggtcctgcaggcccaggtggagaggattatgacccggaaggagctcctgacagtctattcttctgaggatgggtctgaggaattcgagaccatagttttgaaggcccttgtgaaggcctgtgggagctcggaggcctcagcctacctggatgagctgcgtttggctgtggcttggaaccgcgtggacattgcccagagtgaactctttcggggggacatccaatggcggtccttccatctcgaagcttccctcatggacgccctgctgaatgaccggcctgagttcgtgcgcttgctcatttcccacggcctcagcctgggccacttcctgaccccgatgcgcctggcccaactctacagcgcggcgccctccaactcgctcatccgcaaccttttggaccaggcgtcccacagcgcaggcaccaaagccccagccctaaaagggggagctgcggagctccggccccctgacgtggggcatgtgctgaggatgctgctggggaagatgtgcgcgccgaggtacccctccgggggcgcctgggaccctcacccaggccagggcttcggggagagcatgtatctgctctcggacaaggccacctcgccgctctcgctggatgctggcctcgggcaggccccctggagcgacctgcttctttgggcactgttgctgaacagggcacagatggccatgtacttctgggagatgggttccaatgcagtttcctcagctcttggggcctgtttgctgctccgggtgatggcacgcctggagcctgacgctgaggaggcagcacggaggaaagacctggcgttcaagtttgaggggatgggcgttgacctctttggcgagtgctatcgcagcagtgaggtgagggctgcccgcctcctcctccgtcgctgcccgctctggggggatgccacttgcctccagctggccatgcaagctgacgcccgtgccttctttgcccaggatggggtacagtctctgctgacacagaagtggtggggagatatggccagcactacacccatctgggccctggttctcgccttcttttgccctccactcatctacacccgcctcatcaccttcaggaaatcagaagaggagcccacacgggaggagctagagtttgacatggatagtgtcattaatggggaagggcctgtcgggctgaccccgggtttgtaccacctgggccgcactgtcctctgcatcgacttcatggttttcacggtgcggctgcttcacatcttcacggtcaacaaacagctggggcccaagatcgtcatcgtgagcaagatgatgaaggacgtgttcttcttcctcttcttcctcggcgtgtggctggtagcctatggcgtggccacggaggggctcctgaggccacgggacagtgacttcccaagtatcctgcgccgcgtcttctaccgtccctacctgcagatcttcgggcagattccccaggaggacatggacgtggccctcatggagcacagcaactgctcgtcggagcccggcttctgggcacaccctcctggggcccaggcgggcacctgcgtctcccagtatgccaactggctggtggtgctgctcctcgtcatcttcctgctcgtggccaacatcctgctggtcaacttgctcattgccatgttcagttacacattcggcaaagtacagggcaacagcgatctctactggaaggcgcagcgttaccgcctcatccgggaattccactctcggcccgcgctggccccgccctttatcgtcatctcccacttgcgcctcctgctcaggcaattgtgcaggcgaccccggagcccccagccgtcctccccggccctcgagcatttccgggtttacctttctaaggaagccgagcggaagctgctaacgtgggaatcggtgcataaggagaactttctgctggcacgcgctagggacaagcgggagagcgactccgagcgtctgaagcgcacgtcccagaaggtggacttggcactgaaacagctgggacacatccgcgagtacgaacagcgcctgaaagtgctggagcgggaggtccagcagtgtagccgcgtcctggggtgggtggccgaggccctgagccgctctgccttgctgcccccaggtgggccgccaccccctgacctgcctgggtccaaagactgagccctgctggcggacttcaaggagaagcccccacaggggattttgctcctagagtaaggctcatctgggcctcggcccccgcacctggtggccttgtccttgaggtgagccccatgtccatctgggccactgtcaggaccacctttgggagtgtcatccttacaaaccacagcatgcccggctcctcccagaaccagtcccagcctgggaggatcaaggcctggatcccgggccgttatccatctggaggctgcagggtccttggggtaacagggaccacagacccctcaccactcacagattcctcacactggggaaataaagccatttcagagg

SEQ ID NO: 32181 - DNA, 3929 bp, Homo sapiens
  source 1..3929: mol_type = unassigned DNA
gaggccaccatgcaggatgtccaaggcccccgtcccggaagccccggggatgctgaagaccggcgggagctgggcttgcacaggggcgaggtcaactttggagggtctgggaagaagcgaggcaagtttgtacgggtgccgagcggagtggccccgtctgtgctctttgacctgctgcttgctgagtggcacctgccggcccccaacctggtggtgtccctggtgggtgaggagcagcctttcgccatgaagtcctggctgcgggatgtgctgcgcaaggggctggtgaaggcggctcagagcacaggagcctggatcctgaccagtgccctccgcgtgggcctggccaggcatgtcgggcaggccgtgcgcgaccactcgctggccagcacgtccaccaaggtccgtgtggttgctgtcggcatggcctcgctgggccgcgtcctgcaccgccgcattctggaggaggcccaggaggattttcctgtccactaccctgaggatgacggcggcagccagggccccctctgttcactggacagcaacctctcccacttcatcctggtggagccaggccccccggggaagggcgatgggctgacggagctgcggctgaggctggagaagcacatctcggagcagagggcgggctacgggggcactggcagcatcgagatccctgtcctctgcttgctggtcaatggtgatcccaacaccttggagaggatctccagggccgtggagcaggctgccccgtggctgatcctggtaggctcggggggcatcgccgatgtgcttgctgccctagtgaaccagccccacctcctggtgcccaaggtggccgagaagcagtttaaggagaagttccccagcaagcatttctcttgggaggacatcgtgcgctggaccaagctgctgcagaacatcacctcacaccagcacctgctcaccgtgtatgacttcgagcaggagggctccgaggagctggacacggtcatcctgaaggcgctggtgaaagcctgcaagagccacagccaggagcctcaggactatctggatgagctcaagctggccgtggcctgggaccgcgtggacatcgccaagagtgagatcttcaatggggacgtggagtggaagtcctgtgacctggaggaggtgatggtggacgccctggtcagcaacaagcccgagtttgtgcgcctctttgtggacaacggcgcagacgtggccgacttcctgacgtatgggcggctgcaggagctctaccgctccgtgtcacgcaagagcctgctcttcgacctgctgcagcggaagcaggaggaggcccggctgacgctggccggcctgggcacccagcaggcccgggagccacccgcggggccaccggccttctccctgcacgaggtctcccgcgtactcaaggacttcctgcaggacgcctgccgaggcttctaccaggacggccggccaggggaccgcaggagggcggagaagggcccggccaagcggcccacgggccagaagtggctgctggacctgaaccagaagagcgagaacccctggcgggacctgttcctgtgggccgtgctgcagaaccgccacgagatggccacctacttctgggccatgggccaggaaggtgtggcagccgcactggccgcctgcaaaatcctcaaagagatgtcgcacctggagacggaggccgaggcggcccgagccacgcgcgaggcgaaatacgagcggctggcccttgacctcttctccgagtgctacagcaacagtgaggcccgcgccttcgccctgctggtgcgccggaaccgctgctggagcaagaccacctgcctgcacctggccaccgaggctgacgccaaggccttctttgcccacgacggcgttcaggccttcctgaccaggatctggtggggggacatggccgcaggcacgcccatcctgcggctgctaggagccttcctctgccccgccctcgtctataccaacctcatcaccttcagtgaggaagctcccctgaggacaggcctggaggacctgcaggacctggacagcctggacacggagaagagcccgctgtatggcctgcagagccgggtggaggagctggtggaggcgccgagggctcagggtgaccgaggcccacgtgctgtcttcctgctcacacgctggcggaaattctggggcgctcccgtgactgtgttcctggggaacgtggtcatgtacttcgccttcctcttcctgttcacctacgtcctgctggtggacttcaggccgcccccccagggcccctcagggcccgaggtcaccctctacttctgggtctttacgctggtgctggaggaaatccggcagggcttcttcacagacgaggacacacacctggtgaagaagttcacactgtatgtgggggacaactggaacaagtgtgacatggtggccatcttcctgttcatcgtgggtgtcacctgcaggatgctgccgtcggcgtttgaggctggccgcacagtcctcgccatggacttcatggtgttcacgctgcggctgatccatatctttgccatacacaagcagctgggccccaagatcatcgtggtagagcgcatgatgaaggacgtcttcttcttcctcttctttctgagcgtgtggctcgtggcctacggtgtcaccacccaggcgctgctgcacccccatgacggccgcctggagtggatcttccgccgggtgctctaccggccctacctgcagatcttcggccagatcccactggacgagattgatgaagcccgtgtgaactgctccacccacccactgctgctggaggactcaccatcctgccccagcctctatgccaactggctggtcatcctcctgctggtcaccttcctgttggtcaccaatgtgctgctcatgaacctgctcatcgccatgttcagctacacgttccaggtggtgcagggcaacgcagacatgttctggaagttccagcgctacaacctgattgtggagtaccacgagcgccccgccctggccccgcccttcatcctgctcagccacctgagcctgacgctccgccgggtcttcaagaaggaggctgagcacaagcgggagcacctggagagagacctgccagaccccctggaccagaaggtcgtcacctgggagacagtccagaaggagaacttcctgagcaagatggagaagcggaggagggacagcgagggggaggtgctgcggaaaaccgcccacagagtggacttcattgccaagtacctcgggggtctgagagagcaagaaaagcgcatcaagtgtctggagtcacagatcaactactgctcggtgctcgtgtcctccgtggctgacgtgctggcccagggtggcggcccccggagctctcagcactgtggcgagggaagccagctggtggctgctgaccacagaggtggtttagatggctgggaacaacccggggctggccagcctccctcggacacctgagctgcttggcctgccacgtgtggggccacctctcctcagctggccaccctgcacgttgtgcactgacctttgccgacctccagcggaaccccccagggggcaccagccccccagcagacaatggccctcctggtgcctcaccacagaccctcacccaaaggaaccgctccttgtccctcctggcctccccggaggcacagcagtgtcatggggctgtctcccctgacaggcacaactccccgggcagaaaacgtgccccaccgcatccctacctggaaactgaccagcctgcactgtggaaaagctggccctgtggcgtgacgggggagcacccccatccagactgcgaagctgctctggggtctgcacccacccctgccctgacttgtgttgcctgacaagagactcatctttttttgaaa

SEQ ID NO: 32182 - DNA, 2625 bp, Homo sapiens
  source 1..2625: mol_type = unassigned DNA
gaggccaccatgcaggatgtccaaggcccccgtcccggaagccccggggatgctgaagaccggcgggagctgggcttgcacaggggcgaggtcaactttggagggtctgggaagaagcgaggcaagtttgtacgggtgccgagcggagtggccccgtctgtgctctttgacctgctgcttgctgagtggcacctgccggcccccaacctggtggtgtccctggtgggtgaggagcagcctttcgccatgaagtcctggctgcgggatgtgctgcgcaaggggctggtgaaggcggctcagagcacaggagcctggatcctgaccagtgccctccgcgtgggcctggccaggcatgtcgggcaggccgtgcgcgaccactcgctggccagcacgtccaccaaggtccgtgtggttgctgtcggcatggcctcgctgggccgcgtcctgcaccgccgcattctggaggaggcccaggaggattttcctgtccactaccctgaggatgacggcggcagccagggccccctctgttcactggacagcaacctctcccacttcatcctggtggagccaggccccccggggaagggcgatgggctgacggagctgcggctgaggctggagaagcacatctcggagcagagggcgggctacgggggcactggcagcatcgagatccctgtcctctgcttgctggtcaatggtgatcccaacaccttggagaggatctccagggccgtggagcaggctgccccgtggctgatcctggtaggctcggggggcatcgccgatgtgcttgctgccctagtgaaccagccccacctcctggtgcccaaggtggccgagaagcagtttaaggagaagttccccagcaagcatttctcttgggaggacatcgtgcgctggaccaagctgctgcagaacatcacctcacaccagcacctgctcaccgtgtatgacttcgagcaggagggctccgaggagctggacacggtcatcctgaaggcgctggtgaaagcctgcaagagccacagccaggagcctcaggactatctggatgagctcaagctggccgtggcctgggaccgcgtggacatcgccaagagtgagatcttcaatggggacgtggagtggaagtcctgtgacctggaggaggtgatggtggacgccctggtcagcaacaagcccgagtttgtgcgcctctttgtggacaacggcgcagacgtggccgacttcctgacgtatgggcggctgcaggagctctaccgctccgtgtcacgcaagagcctgctcttcgacctgctgcagcggaagcaggaggaggcccggctgacgctggccggcctgggcacccagcaggcccgggagccacccgcggggccaccggccttctccctgcacgaggtctcccgcgtactcaaggacttcctgcaggacgcctgccgaggcttctaccaggacggccggccaggggaccgcaggagggcggagaagggcccggccaagcggcccacgggccagaagtggctgctggacctgaaccagaagagcgagaacccctggcgggacctgttcctgtgggccgtgctgcagaaccgccacgagatggccacctacttctgggccatgggccaggaaggtgtggcagccgcactggccgcctgcaaaatcctcaaagagatgtcgcacctggagacggaggccgaggcggcccgagccacgcgcgaggcgaaatacgagcggctggcccttgacctcttctccgagtgctacagcaacagtgaggcccgcgccttcgccctgctggtgcgccggaaccgctgctggagcaagaccacctgcctgcacctggccaccgaggctgacgccaaggccttctttgcccacgacggcgttcaggccttcctgaccaggatctggtggggggacatggccgcaggcacgcccatcctgcggctgctaggagccttcctctgccccgccctcgtctataccaacctcatcaccttcagtgaggaagctcccctgaggacaggcctggaggacctgcaggacctggacagcctggacacggagaagagcccgctgtatggcctgcagagccgggtggaggagctggtggaggcgccgagggctcagggtgaccgaggcccacgtgctgtcttcctgctcacacgctggcggaaattctggggcgctcccgtgactgtgttcctggggaacgtggtcatgtacttcgccttcctcttcctgttcacctacgtcctgctggtggacttcaggccgcccccccagggcccctcagggcccgaggtcaccctctacttctgggtctttacgctggtgctggaggaaatccggcagggcttcttcacagacgaggacacacacctggtgaagaagttcacactgtatgtgggggacaactggaacaagtgtgacatggtggccatcttcctgttcatcgtgggtgtcacctgcaggatgctgccgtcggcgtttgaggctggccgcacagtcctcgccatggacttcatggtgttcacgctgcggctgatccatatctttgccatacacaagcagctgggccccaagatcatcgtggtagagcgcatgaagccagtg

SEQ ID NO: 32183 - DNA, 3932 bp, Homo sapiens
  source 1..3932: mol_type = unassigned DNA
gaggccaccatgcaggatgtccaaggcccccgtcccggaagccccggggatgctgaagaccggcgggagctgggcttgcacaggggcgaggtcaactttggagggtctgggaagaagcgaggcaagtttgtacgggtgccgagcggagtggccccgtctgtgctctttgacctgctgcttgctgagtggcacctgccggcccccaacctggtggtgtccctggtgggtgaggagcagcctttcgccatgaagtcctggctgcgggatgtgctgcgcaaggggctggtgaaggcggctcagagcacaggagcctggatcctgaccagtgccctccgcgtgggcctggccaggcatgtcgggcaggccgtgcgcgaccactcgctggccagcacgtccaccaaggtccgtgtggttgctgtcggcatggcctcgctgggccgcgtcctgcaccgccgcattctggaggaggcccaggtgcacgaggattttcctgtccactaccctgaggatgacggcggcagccagggccccctctgttcactggacagcaacctctcccacttcatcctggtggagccaggccccccggggaagggcgatgggctgacggagctgcggctgaggctggagaagcacatctcggagcagagggcgggctacgggggcactggcagcatcgagatccctgtcctctgcttgctggtcaatggtgatcccaacaccttggagaggatctccagggccgtggagcaggctgccccgtggctgatcctggtaggctcggggggcatcgccgatgtgcttgctgccctagtgaaccagccccacctcctggtgcccaaggtggccgagaagcagtttaaggagaagttccccagcaagcatttctcttgggaggacatcgtgcgctggaccaagctgctgcagaacatcacctcacaccagcacctgctcaccgtgtatgacttcgagcaggagggctccgaggagctggacacggtcatcctgaaggcgctggtgaaagcctgcaagagccacagccaggagcctcaggactatctggatgagctcaagctggccgtggcctgggaccgcgtggacatcgccaagagtgagatcttcaatggggacgtggagtggaagtcctgtgacctggaggaggtgatggtggacgccctggtcagcaacaagcccgagtttgtgcgcctctttgtggacaacggcgcagacgtggccgacttcctgacgtatgggcggctgcaggagctctaccgctccgtgtcacgcaagagcctgctcttcgacctgctgcagcggaagcaggaggaggcccggctgacgctggccggcctgggcacccagcaggcccgggagccacccgcggggccaccggccttctccctgcacgaggtctcccgcgtactcaaggacttcctgcaggacgcctgccgaggcttctaccaggacggccggccaggggaccgcaggagggcggagaagggcccggccaagcggcccacgggccagaagtggctgctggacctgaaccagaagagcgagaacccctggcgggacctgttcctgtgggccgtgctgcagaaccgccacgagatggccacctacttctgggccatgggccaggaaggtgtggcagccgcactggccgcctgcaaaatcctcaaagagatgtcgcacctggagacggaggccgaggcggcccgagccacgcgcgaggcgaaatacgagcggctggcccttgacctcttctccgagtgctacagcaacagtgaggcccgcgccttcgccctgctggtgcgccggaaccgctgctggagcaagaccacctgcctgcacctggccaccgaggctgacgccaaggccttctttgcccacgacggcgttcaggccttcctgaccaggatctggtggggggacatggccgcaggcacgcccatcctgcggctgctaggagccttcctctgccccgccctcgtctataccaacctcatcaccttcagtgaggaagctcccctgaggacaggcctggaggacctgcaggacctggacagcctggacacggagaagagcccgctgtatggcctgcagagccgggtggaggagctggtggaggcgccgagggctcagggtgaccgaggcccacgtgctgtcttcctgctcacacgctggcggaaattctggggcgctcccgtgactgtgttcctggggaacgtggtcatgtacttcgccttcctcttcctgttcacctacgtcctgctggtggacttcaggccgcccccccagggcccctcagggcccgaggtcaccctctacttctgggtctttacgctggtgctggaggaaatccggcagggcttcttcacagacgaggacacacacctggtgaagaagttcacactgtatgtgggggacaactggaacaagtgtgacatggtggccatcttcctgttcatcgtgggtgtcacctgcaggatgctgccgtcggcgtttgaggctggccgcacagtcctcgccatggacttcatggtgttcacgctgcggctgatccatatctttgccatacacaagcagctgggccccaagatcatcgtggtagagcgcatgatgaaggacgtcttcttcttcctcttctttctgagcgtgtggctcgtggcctacggtgtcaccacccaggcgctgctgcacccccatgacggccgcctggagtggatcttccgccgggtgctctaccggccctacctgcagatcttcggccagatcccactggacgagattgatgaagcccgtgtgaactgctccacccacccactgctgctggaggactcaccatcctgccccagcctctatgccaactggctggtcatcctcctgctggtcaccttcctgttggtcaccaatgtgctgctcatgaacctgctcatcgccatgttcagctacacgttccaggtggtgcagggcaacgcagacatgttctggaagttccagcgctacaacctgattgtggagtaccacgagcgccccgccctggccccgcccttcatcctgctcagccacctgagcctgacgctccgccgggtcttcaagaaggaggctgagcacaagcgggagcacctggagagagacctgccagaccccctggaccagaaggtcgtcacctgggagacagtccagaaggagaacttcctgagcaagatggagaagcggaggagggacagcgagggggaggtgctgcggaaaaccgcccacagagtggacttcattgccaagtacctcgggggtctgagagagcaagaaaagcgcatcaagtgtctggagtcacagatcaactactgctcggtgctcgtgtcctccgtggctgacgtgctggcccagggtggcggcccccggagctctcagcactgtggcgagggaagccagctggtggctgctgaccacagaggtggtttagatggctgggaacaacccggggctggccagcctccctcggacacctgagctgcttggcctgccacgtgtggggccacctctcctcagctggccaccctgcacgttgtgcactgacctttgccgacctccagcggaaccccccagggggcaccagccccccagcagacaatggccctcctggtgcctcaccacagaccctcacccaaaggaaccgctccttgtccctcctggcctccccggaggcacagcagtgtcatggggctgtctcccctgacaggcacaactccccgggcagaaaacgtgccccaccgcatccctacctggaaactgaccagcctgcactgtggaaaagctggccctgtggcgtgacgggggagcacccccatccagactgcgaagctgctctggggtctgcacccacccctgccctgacttgtgttgcctgacaagagactcatctttttttg

SEQ ID NO: 32184 - DNA, 3902 bp, Homo sapiens
  source 1..3902: mol_type = unassigned DNA
cccggaagccccggggatgctgaagaccggcgggagctgggcttgcacaggggcgaggtcaactttggagggtctgggaagaagcgaggcaagtttgtacgggtgccgagcggagtggccccgtctgtgctctttgacctgctgcttgctgagtggcacctgccggcccccaacctggtggtgtccctggtgggtgaggagcagcctttcgccatgaagtcctggctgcgggatgtgctgcgcaaggggctggtgaaggcggctcagagcacaggagcctggatcctgaccagtgccctccgcgtgggcctggccaggcatgtcgggcaggccgtgcgcgaccactcgctggccagcacgtccaccaaggtccgtgtggttgctgtcggcatggcctcgctgggccgcgtcctgcaccgccgcattctggaggaggcccaggtgcacgaggattttcctgtccactaccctgaggatgacggcggcagccagggccccctctgttcactggacagcaacctctcccacttcatcctggtggagccaggccccccggggaagggcgatgggctgacggagctgcggctgaggctggagaagcacatctcggagcagagggcgggctacgggggcactggcagcatcgagatccctgtcctctgcttgctggtcaatggtgatcccaacaccttggagaggatctccagggccgtggagcaggctgccccgtggctgatcctggtaggctcggggggcatcgccgatgtgcttgctgccctagtgaaccagccccacctcctggtgcccaaggtggccgagaagcagtttaaggagaagttccccagcaagcatttctcttgggaggacatcgtgcgctggaccaagctgctgcagaacatcacctcacaccagcacctgctcaccgtgtatgacttcgagcaggagggctccgaggagctggacacggtcatcctgaaggcgctggtgaaagcctgcaagagccacagccaggagcctcaggactatctggatgagctcaagctggccgtggcctgggaccgcgtggacatcgccaagagtgagatcttcaatggggacgtggagtggaagtcctgtgacctggaggaggtgatggtggacgccctggtcagcaacaagcccgagtttgtgcgcctctttgtggacaacggcgcagacgtggccgacttcctgacgtatgggcggctgcaggagctctaccgctccgtgtcacgcaagagcctgctcttcgacctgctgcagcggaagcaggaggaggcccggctgacgctggccggcctgggcacccagcaggcccgggagccacccgcggggccaccggccttctccctgcacgaggtctcccgcgtactcaaggacttcctgcaggacgcctgccgaggcttctaccaggacggccggccaggggaccgcaggagggcggagaagggcccggccaagcggcccacgggccagaagtggctgctggacctgaaccagaagagcgagaacccctggcgggacctgttcctgtgggccgtgctgcagaaccgccacgagatggccacctacttctgggccatgggccaggaaggtgtggcagccgcactggccgcctgcaaaatcctcaaagagatgtcgcacctggagacggaggccgaggcggcccgagccacgcgcgaggcgaaatacgagcggctggcccttgacctcttctccgagtgctacagcaacagtgaggcccgcgccttcgccctgctggtgcgccggaaccgctgctggagcaagaccacctgcctgcacctggccaccgaggctgacgccaaggccttctttgcccacgacggcgttcaggccttcctgaccaggatctggtggggggacatggccgcaggcacgcccatcctgcggctgctaggagccttcctctgccccgccctcgtctataccaacctcatcaccttcagtgaggaagctcccctgaggacaggcctggaggacctgcaggacctggacagcctggacacggagaagagcccgctgtatggcctgcagagccgggtggaggagctggtggaggcgccgagggctcagggtgaccgaggcccacgtgctgtcttcctgctcacacgctggcggaaattctggggcgctcccgtgactgtgttcctggggaacgtggtcatgtacttcgccttcctcttcctgttcacctacgtcctgctggtggacttcaggccgcccccccagggcccctcagggcccgaggtcaccctctacttctgggtctttacgctggtgctggaggaaatccggcagggcttcttcacagacgaggacacacacctggtgaagaagttcacactgtatgtgggggacaactggaacaagtgtgacatggtggccatcttcctgttcatcgtgggtgtcacctgcaggatgctgccgtcggcgtttgaggctggccgcacagtcctcgccatggacttcatggtgttcacgctgcggctgatccatatctttgccatacacaagcagctgggccccaagatcatcgtggtagagcgcatgatgaaggacgtcttcttcttcctcttctttctgagcgtgtggctcgtggcctacggtgtcaccacccaggcgctgctgcacccccatgacggccgcctggagtggatcttccgccgggtgctctaccggccctacctgcagatcttcggccagatcccactggacgagattgatgaagcccgtgtgaactgctccacccacccactgctgctggaggactcaccatcctgccccagcctctatgccaactggctggtcatcctcctgctggtcaccttcctgttggtcaccaatgtgctgctcatgaacctgctcatcgccatgttcagctacacgttccaggtggtgcagggcaacgcagacatgttctggaagttccagcgctacaacctgattgtggagtaccacgagcgccccgccctggccccgcccttcatcctgctcagccacctgagcctgacgctccgccgggtcttcaagaaggaggctgagcacaagcgggagcacctggagagagacctgccagaccccctggaccagaaggtcgtcacctgggagacagtccagaaggagaacttcctgagcaagatggagaagcggaggagggacagcgagggggaggtgctgcggaaaaccgcccacagagtggacttcattgccaagtacctcgggggtctgagagagcaagaaaagcgcatcaagtgtctggagtcacagatcaactactgctcggtgctcgtgtcctccgtggctgacgtgctggcccagggtggcggcccccggagctctcagcactgtggcgagggaagccagctggtggctgctgaccacagaggtggtttagatggctgggaacaacccggggctggccagcctccctcggacacctgagctgcttggcctgccacgtgtggggccacctctcctcagctggccaccctgcacgttgtgcactgacctttgccgacctccagcggaaccccccagggggcaccagccccccagcagacaatggccctcctggtgcctcaccacagaccctcacccaaaggaaccgctccttgtccctcctggcctccccggaggcacagcagtgtcatggggctgtctcccctgacaggcacaactccccgggcagaaaacgtgccccaccgcatccctacctggaaactgaccagcctgcactgtggaaaagctggccctgtggcgtgacgggggagcacccccatccagactgcgaagctgctctggggtctgcacccacccctgccctgacttgtgttgcctgacaagagactcatctttttttgaaa

SEQ ID NO: 32185 - DNA, 3740 bp, Homo sapiens
  source 1..3740: mol_type = unassigned DNA
agacaaggagcttgagatcaacctgagcaacatagggagaccccatctctacaaataactgaaaaaaaaaaaaagctaggtgtggtggtacatacctgtggtcccatctactcaggaggctgagacaggaggattgcgtgagcctggctcaagacaaggcgtgccggtcgtggggctggtggtggaaggcggtcccaacgtcatcctgtcagtgtgggagactgtcaaggacaaggacccagtggtggtgtgtgagggcacaggtagggcggctgacctcctggccttcacacacaaacacctggcagatgaagggatgctgcgacctcaggtgaaagaggagatcatctgcatgattcagaacactttcaactttagtcttaaacagtccaagcaccttttccaaattctaatggagtgtatggttcacagggattgtattaccatatttgatgctgactctgaagagcagcaagacctggacttagcaatcctaacagctttgctgaagggcacaaatttatcagcgtcagagcaattaaatctggcaatggcttgggacagggtggacattgccaagaaacatatcctaatttatgaacaacactggaagcctgatgccctggaacaagcaatgtcagatgctttagtgatggatcgggtggattttgtgaagctcttaatagaatatggagtgaacctccatcgctttcttaccatccctcgactggaagagctctacaatacaaaacaaggacctactaatacactcttgcatcatctcgtccaagatgtgaaacagcatacccttctttcaggctaccgaataaccttgattgacattggattagtagtagaatacctcattggtagagcatatcgcagcaactacactagaaaacatttcagagccctctacaacaacctctacagaaaatacaagcaccagagacactcctcaggaaatagaaatgagtctgcagaaagtacgctgcactcccagttcattagaactgcacagccatacaaattcaaggaaaagtctatagtccttcataaatcaaggaagaagtcaaaagaacaaaatgtatcagatgaccctgagtctactggctttctttacccttacaatgacctgctggtttgggctgtgctgatgaaaaggcagaagatggctatgttcttctggcagcatggagaggaggccacggttaaagccgtgattgcgtgtatcctctaccgggcaatggcccatgaagctaaggagagtcacatggtggatgatgcctcagaagagttgaagaattactcaaaacagtttggccagctggctctggacttgttggagaaggcattcaagcagaatgagcgcatggccatgacgctgttgacgtatgaactcaggaactggagcaattcgacctgccttaaactggccgtgtcgggaggattacgaccctttgtttcacatacttgtacccagatgctactgacagacatgtggatggggaggctgaaaatgaggaaaaactcttggttaaagattattataagcattattttaccacccaccattttgacactggaatttaaaagcaaagctgagatgtcacatgttccccagtcccaggacttccaatttatgtggtattacagtgaccagaacgccagcagttccaaagaaagtgcttctgtgaaagagtatgatttggaaaggggccatgatgagaaactggatgaaaatcagcattttggtttggaaagtgggcaccaacaccttccgtggaccaggaaagtctatgagttctacagtgctccaattgtcaagttttggttttatacgatggcgtatttggcattcctcatgctgttcacttacaccgtgttggtggagatgcagccccagcccagcgtgcaggagtggcttgttagcatttacatcttcaccaatgctattgaggtggtcagggagatctgtatttcagaacctgggaagtttacccaaaaggtgaaggtatggattagtgagtactggaacttaacagaaactgtggccattggcctgttttcagctggcttcgtccttcgatggggtgaccctccttttcacacagcgggaagactgatctactgcatagacatcatattctggttctcacggctcctggacttctttgctgtgaatcaacatgcaggtccatatgtgaccatgattgcaaaaatgacagcaaacatgttctatattgtgatcatcatggccatagtcctgctgagctttggagtggcacgcaaggccatcctttcgccaaaagagccaccatcttggagtctagctcgagatattgtatttgagccatactggatgatatacggagaagtctatgctggagaaatagatgtttgttcaagccagccatcctgccctcctggttcttttcttactccattcttgcaagctgtctacctcttcgtgcaatatatcatcatggtgaacctgttgattgctttcttcaacaacgtttacttagatatggaatccatttcaaataacctgtggaaatacaaccgctatcgctacatcatgacctaccacgagaagccctggctgcccccacctctcatcctgctgagccacgtgggccttctcctccgccgcctgtgctgtcatcgagctcctcacgaccaagaagagggtgacgttggattaaaactctacctcagtaaggaggatctgaaaaaacttcatgattttgaggagcagtgcgtggaaaaatacttccatgagaagatggaagatgtgaattgtagttgtgaggaacgaatccgagtgacatcagaaagggttacagagatgtacttccagctgaaagaaatgaatgaaaaggtgtcttttataaaggactccttactgtctttggacagccaggtgggacacctgcaggatctctctgccctgactgtggataccctgaaagtcctttctgctgttgacactttgcaagaggatgaggctctcctggccaagagaaagcattctacttgcaaaaaacttccccacagctggagcaatgtcatctgtgcagaggttctaggcagcatggagatcgctggagagaagaaataccagtattatagcatgccctcttctttgctgaggagcctggctggaggccggcatcccccaagagtgcagaggggggcacttcttgagattacaaacagtaaaagagaggctacaaatgtaagaaatgaccaggaaaggcaagaaacacaaagtagtatagtggtttctggggtgtctcctaacaggcaagcacactcaaagtatggccagtttcttctggtcccctctaatctaaagcgagttcctttttcagcagaaactgtcttgcctctgtccagaccctctgtgccagatgtgctggcaactgaacaggacatccagactgaggttcttgttcatctgactgggcagaccccagttgtctctgactgggcatcagtggatgaacccaaggaaaagcacgagcctattgctcacttactggatggacaagacaaggcagagcaagtgctacccactttgagttgcacacctgaacccatgacaatgagctcccctctccgcagatacaggcccttcgctaggagtcatagttttagattccataaggaggagaaattgatgaagatctgtaagattaaaagtaaggaataaacatttaaaatatcagcattaa

SEQ ID NO: 32186 - DNA, 1568 bp, Homo sapiens
  source 1..1568: mol_type = unassigned DNA
actacaaaggatgtctgtgatgacagtggccatcccatttgatcctcgttattcttcttttatcgaaggaaactgagagtcaccttcttttctaggcagttaggtaactgaagccgaaaggtattgtgacagatccactgggctgtaaaaggcagcgtgtggaggtggagcccagagtttctgcctccacagttaaaagctcagacagggctttgggagcagggcctgcaaatcaaagatgaaagaacaacctgtcttggagcgcttgcagtcccagaaatcctggattaaaggagtatttgacaagagagaatgtagcacaatcatacccagctcaaaaaatcctcacagatgtactccagtatgccaagtctgccagaatttaatcaggtgttactgtggccgactgattggagaccatgctgggatagattattcctggaccatctcagctgccaagggtaaagaaagtgaacaatggtctgttgaaaagcacacaacgaaaagcccaacagatacttttggcacgattaatttccaagatggagagcacacccatcatgccaagtatattagaacttcttatgatacaaaactggatcatctgttacatttaatgttgaaagagtggaaaatggaactgcccaagcttgtgatctcagtccatgggggcatccagaactttactatgccctctaaatttaaagagattttcagccaaggtttggttaaagctgcagagacaacaggagcgtggataataactgaaggcatcaatacaggagtgtccaagcatgttggggatgccttgaaatcccattcctctcattccttgagaaaaatctggacagttggaatccctccttggggtgtcattgagaaccagagagaccttattggaaaagatgtggtgtgcctgtaccagactctggataaccccctcagcaagctcacaacactcaacagcatgcactcgcacttcatcctgtctgatgatgggaccgtgggcaagtatggaaatgaaatgaagctcagaaggaacctggagaagtacctctctctgcagaaaatacactgccgtgagtatcacaggggctcagtcacccagtctggttgcaggcctgctgaggtctttcatggtcttccctgaccatcagagctagcttgaggggactaggggtgtgagctttgatggtcagggaagatgacatttcatgtgttggtggggtggccctaggcagggaaggggttaagaccagacaggatttttagaaatagggaccttggggctgggtgtggtggctcacgcctgtaatcccagcactttgggaggctgaggcgggtggatcacctgaagtcaggagtcgagaccaacctggccaacatggtgaaaccctgtctctgctaaaaatacaaaaattagccaggtgtggtggtgcatgcctgtaatcccagctactcaggaggctgaggcaggagaatgacttgaacctggggtgtagaggttacagtgagctgagatcgccccactgcacttcagcccaggtgacagagcaagactctgtctc

SEQ ID NO: 32187 - DNA, 8425 bp, Homo sapiens
  source 1..8425: mol_type = unassigned DNA
actacaaaggatgtctgtgatgacagtggccatcccatttgatcctcgttattcttcttttatcgaaggaaactgagagtcaccttcttttctaggcagttaggtaactgaagccgaaaggtattgtgacagatccactgggctgtaaaaggcagcgtgtggaggtggagcccagagtttctgcctccacagttaaaagctcagacagggctttgggagcagggcctgcaaatcaaagatgaaagaacaacctgtcttggagcgcttgcagtcccagaaatcctggattaaaggagtatttgacaagagagaatgtagcacaatcatacccagctcaaaaaatcctcacagatgtactccagtatgccaagtctgccagaatttaatcaggtgttactgtggccgactgattggagaccatgctgggatagattattcctggaccatctcagctgccaagggtaaagaaagtgaacaatggtctgttgaaaagcacacaacgaaaagcccaacagatacttttggcacgattaatttccaagatggagagcacacccatcatgccaagtatattagaacttcttatgatacaaaactggatcatctgttacatttaatgttgaaagagtggaaaatggaactgcccaagcttgtgatctcagtccatgggggcatccagaactttactatgccctctaaatttaaagagattttcagccaaggtttggttaaagctgcagagacaacaggagcgtggataataactgaaggcatcaatacaggagtgtccaagcatgttggggatgccttgaaatcccattcctctcattccttgagaaaaatctggacagttggaatccctccttggggtgtcattgagaaccagagagaccttattggaaaagatgtggtgtgcctgtaccagactctggataaccccctcagcaagctcacaacactcaacagcatgcactcgcacttcatcctgtctgatgatgggaccgtgggcaagtatggaaatgaaatgaagctcagaaggaacctggagaagtacctctctctgcagaaaatacactgccgctcaagacaaggcgtgccggtcgtggggctggtggtggaaggcggtcccaacgtcatcctgtcagtgtgggagactgtcaaggacaaggacccagtggtggtgtgtgagggcacaggtagggcggctgacctcctggccttcacacacaaacacctggcagatgaagggatgctgcgacctcaggtgaaagaggagatcatctgcatgattcagaacactttcaactttagtcttaaacagtccaagcaccttttccaaattctaatggagtgtatggttcacagggattgtattaccatatttgatgctgactctgaagagcagcaagacctggacttagcaatcctaacagctttgctgaagggcacaaatttatcagcgtcagagcaattaaatctggcaatggcttgggacagggtggacattgccaagaaacatatcctaatttatgaacaacactggaagcctgatgccctggaacaagcaatgtcagatgctttagtgatggatcgggtggattttgtgaagctcttaatagaatatggagtgaacctccatcgctttcttaccatccctcgactggaagagctctacaatacaaaacaaggacctactaatacactcttgcatcatctcgtccaagatgtgaaacagcatacccttctttcaggctaccgaataaccttgattgacattggattagtagtagaatacctcattggtagagcatatcgcagcaactacactagaaaacatttcagagccctctacaacaacctctacagaaaatacaagcaccagagacactcctcaggaaatagaaatgagtctgcagaaagtacgctgcactcccagttcattagaactgcacagccatacaaattcaaggaaaagtctatagtccttcataaatcaaggaagaagtcaaaagaacaaaatgtatcagatgaccctgagtctactggctttctttacccttacaatgacctgctggtttgggctgtgctgatgaaaaggcagaagatggctatgttcttctggcagcatggagaggaggccacggttaaagccgtgattgcgtgtatcctctaccgggcaatggcccatgaagctaaggagagtcacatggtggatgatgcctcagaagagttgaagaattactcaaaacagtttggccagctggctctggacttgttggagaaggcattcaagcagaatgagcgcatggccatgacgctgttgacgtatgaactcaggaactggagcaattcgacctgccttaaactggccgtgtcgggaggattacgaccctttgtttcacatacttgtacccagatgctactgacagacatgtggatggggaggctgaaaatgaggaaaaactcttggttaaagattattataagcattattttaccacccaccattttgacactggaatttaaaagcaaagctgagatgtcacatgttccccagtcccaggacttccaatttatgtggtattacagtgaccagaacgccagcagttccaaagaaagtgcttctgtgaaagagtatgatttggaaaggggccatgatgagaaactggatgaaaatcagcattttggtttggaaagtgggcaccaacaccttccgtggaccaggaaagtctatgagttctacagtgctccaattgtcaagttttggttttatacgatggcgtatttggcattcctcatgctgttcacttacaccgtgttggtggagatgcagccccagcccagcgtgcaggagtggcttgttagcatttacatcttcaccaatgctattgaggtggtcagggagatctgtatttcagaacctgggaagtttacccaaaaggtgaaggtatggattagtgagtactggaacttaacagaaactgtggccattggcctgttttcagctggcttcgtccttcgatggggtgaccctccttttcacacagcgggaagactgatctactgcatagacatcatattctggttctcacggctcctggacttctttgctgtgaatcaacatgcaggtccatatgtgaccatgattgcaaaaatgacagcaaacatgttctatattgtgatcatcatggccatagtcctgctgagctttggagtggcacgcaaggccatcctttcgccaaaagagccaccatcttggagtctagctcgagatattgtatttgagccatactggatgatatacggagaagtctatgctggagaaatagatgtttgttcaagccagccatcctgccctcctggttcttttcttactccattcttgcaagctgtctacctcttcgtgcaatatatcatcatggtgaacctgttgattgctttcttcaacaacgtttacttagatatggaatccatttcaaataacctgtggaaatacaaccgctatcgctacatcatgacctaccacgagaagccctggctgcccccacctctcatcctgctgagccacgtgggccttctcctccgccgcctgtgctgtcatcgagctcctcacgaccaagaagagggtgacgttggattaaaactctacctcagtaaggaggatctgaaaaaacttcatgattttgaggagcagtgcgtggaaaaatacttccatgagaagatggaagatgtgaattgtagttgtgaggaacgaatccgagtgacatcagaaagggttacagagatgtacttccagctgaaagaaatgaatgaaaaggtgtcttttataaaggactccttactgtctttggacagccaggtgggacacctgcaggatctctctgccctgactgtggataccctgaaagtcctttctgctgttgacactttgcaagaggatgaggctctcctggccaagagaaagcattctacttgcaaaaaacttccccacagctggagcaatgtcatctgtgcagaggttctaggcagcatggagatcgctggagagaagaaataccagtattatagcatgccctcttctttgctgaggagcctggctggaggccggcatcccccaagagtgcagaggggggcacttcttgagattacaaacagtaaaagagaggctacaaatgtaagaaatgaccaggaaaggcaagaaacacaaagtagtatagtggtttctggggtgtctcctaacaggcaagcacactcaaagtatggccagtttcttctggtcccctctaatctaaagcgagttcctttttcagcagaaactgtcttgcctctgtccagaccctctgtgccagatgtgctggcaactgaacaggacatccagactgaggttcttgttcatctgactgggcagaccccagttgtctctgactgggcatcagtggatgaacccaaggaaaagcacgagcctattgctcacttactggatggacaagacaaggcagagcaagtgctacccactttgagttgcacacctgaacccatgacaatgagctcccctctttcccaagccaagatcatgcaaactggaggtggatatgtaaactgggcattttcagaaggtgatgaaactggtgtgtttagcatcaagaaaaagtggcaaacctgcttgccctccacttgtgacagtgattcctctcggagtgaacagcaccagaagcaggcccaggacagctccctatctgataactcaacaagatcggcccagagtagtgaatgctcagaggtgggaccatggcttcagccaaacacatccttttggatcaatcctctccgcagatacaggcccttcgctaggagtcatagttttagattccataaggaggagaaattgatgaagatctgtaagattaaaaatctttcaggctcttcagaaatagggcagggagcatgggtcaaagcgaaaatgctaaccaaagacaggagactgtcaaagaaaaagaagaatactcaaggactccaggtgccaatcataacagtcaatgcctgctctcagagtgaccagttgaatccagagccaggagaaaacagcatctctgaagaggagtacagcaagaactggttcacagtgtccaaatttagtcacacaggtgtagaaccttacatacatcagaaaatgaaaactaaagaaattggacaatgtgctatacaaatcagtgattacctaaagcagtctcaagaggatctcagcaaaaactctttgtggaattccaggagcaccaacctcaataggaactccctgctgaaaagttcaattggagttgacaagatctcagcctccttaaaaagccctcaagagcctcaccatcattattcagccattgaaaggaataatttaatgaggctttctcagaccataccatttacaccagtccaactgtttgcaggagaagaaataactgtctacaggttggaggagagttcccctttaaaccttgataaaagcatgtcctcttggtctcagcgtgggagagcggcaatgatccaggtattgtcccgagaggagatggatgggggcctccgtaaagctatgagagtcgtcagcacttggtctgaggatgacattctcaagccgggacaagttttcattgtcaagtcctttcttcctgaggttgtgcggacatggcataaaatcttccaggagagcactgtgcttcatctttgcctcagggaaattcaacaacaaagagctgctcaaaaattgatctataccttcaaccaagtgaaaccacaaaccataccctacacaccaaggttcctggaagttttcttaatctactgccattcagccaaccagtggttgaccattgagaagtatatgacaggggagttccggaagtataacaacaacaatggtgatgaaatcacccccaccaacaccctggaggagctgatgttggctttctctcactggacctatgagtacactcggggagagctgctggttttagatttgcaaggtgttggagaaaatttgacagatccatctgttataaaacctgaagtcaaacaatcaagaggaatggtgtttggaccggccaatttgggggaagatgcaattagaaacttcattgcaaaacatcattgtaactcctgctgccggaagctcaaactcccggatttaaaaagaaatgactattcccctgaaaggataaattccacctttggacttgagataaaaatagaatcagctgaggagcctccagcaagggagacgggtagaaattccccagaagatgatatgcaactataaaaagggaggagcaagaagatcccagtgcttgccctgcctgccaggaactctgtgataacatagattgatcaacgtgatgttgattacatcagcgtctccttgggacacgccttctgagcctcacatctccttctgttcaaaggcctcattggtatatgatcaatgggttctcctagacactgacctctgtccagggcactttgcagctccatcctcaagttccacacgaagatgcttggatgagtcagctgggaatattgttcttgtgtacctcattgctttagctggtcacttggaactttggagcagaatcctgcacattaaaggatggggttgggggggatacatttattttattttctcactatgtatgcagactggaccccctactactatttgtcacctcacccacagattgtatttatgtctatatatatgttcataaaaagttatgtgatttcctcctctgtcttttccacaacataggactttgaatagcaatgataggaaaaacaatggaacaagggtgggtttgcacagattggagcacattcctgcacaaactaccaagtatactggtgaaatctcgatgggtttcagatattgtcagtgaatcatatgatgcctggatatttcaggtttctgtaaaagaaagggaaacctaaaacaaatacccttccatatataatatatatggaatatgtatattatatatatttttatatatataatatatatggaatatatatattatatatataaaatacatatggaatatatatattttatatatatatatatatatttttatttttgagatggagtttcactctttttacccaggctggagtgcaatgatgcgatctcactgcaacctctgcctcccgggcttgagcgattcttgtgtctcagtcttccgggtagctgggactacaggtgtgcaccactatgcctggctaattttgtatttttagtagagatggggtttcaccatgttggccaggctggtctcaaactcctgacctcagatgatccacctgccttggcttcccaaagtgctgggattacaggcgtgagccactgcgcctggcctttttttttttttttttaaacgagaacaagaatatgaagaactggaaatcattaagaaagggtttcccttccttaaagctcaggggtactattagttaggagttgactaactcaacctgtaaaacaccactcctccttccaaagttgtatatataatattgcaggttaaattactttatgtcaggtcctatgaagaaagatacggtttcagactgaaaacatgtttcacaggtgtttgcttccttccagagcagagttccctattcccctggcataaagaatgtatatatattttgaaatatggctgagaacatgtcattggtttgtgaggcctaaggtgaagcactcctggcagccacactgtgtagtgtatttgagggatcagtcatccctcttgtatgctgggcctggttgccctacctcgaacaagcaccagcttttcacacaaggagagatgtggggctgggagtcctctccccatcctattgcatctcctttcttattataagctgttccagttcacaggcagcaaacctcctgggtttgaaaaattccaacttatttttatctttaatcctgacattagctgacttgctagtgagcttgctttaaaaatctacactcttgcattcttaggcatacaggggaaatgttgaaaaggaaggtggaaaaccaagaatttagtttgccaatgattgcctctgattcttgtaagtttgagttccacaagggctaatttattccccttttacttgggttttggggtggtggaaagcgggaaatttgggtgatttgttgattggcaatgaggataaaatgttaatacttttttggggacttaacaactttatcctattctacaagtcagtaaaggaacaattggtactcacctcagtgctgcactcaactatggaaagaggcagagtttgcttgcccaattgccaaactaaagacatcagttcattggtcaaatatttgttacctggaatggaacttgaaagcaaatacatttggatttcaaatttc

SEQ ID NO: 32188 - DNA, 8271 bp, Homo sapiens
  source 1..8271: mol_type = unassigned DNA
gctttccgaggcggctggagaagtgcccagacggccgtccctccgcgcccctgcgcgtccccgtgcgcccagtgttccccgtgcaggagtcccggagcgatgacagcgccggttacgtcccagaaatcctggattaaaggagtatttgacaagagagaatgtagcacaatcatacccagctcaaaaaatcctcacagatgtactccagtatgccaagtctgccagaatttaatcaggtgttactgtggccgactgattggagaccatgctgggatagattattcctggaccatctcagctgccaagggtaaagaaagtgaacaatggtctgttgaaaagcacacaacgaaaagcccaacagatacttttggcacgattaatttccaagatggagagcacacccatcatgccaagtatattagaacttcttatgatacaaaactggatcatctgttacatttaatgttgaaagagtggaaaatggaactgcccaagcttgtgatctcagtccatgggggcatccagaactttactatgccctctaaatttaaagagattttcagccaaggtttggttaaagctgcagagacaacaggagcgtggataataactgaaggcatcaatacaggagtgtccaagcatgttggggatgccttgaaatcccattcctctcattccttgagaaaaatctggacagttggaatccctccttggggtgtcattgagaaccagagagaccttattggaaaagatgtggtgtgcctgtaccagactctggataaccccctcagcaagctcacaacactcaacagcatgcactcgcacttcatcctgtctgatgatgggaccgtgggcaagtatggaaatgaaatgaagctcagaaggaacctggagaagtacctctctctgcagaaaatacactgccgctcaagacaaggcgtgccggtcgtggggctggtggtggaaggcggtcccaacgtcatcctgtcagtgtgggagactgtcaaggacaaggacccagtggtggtgtgtgagggcacaggtagggcggctgacctcctggccttcacacacaaacacctggcagatgaagggatgctgcgacctcaggtgaaagaggagatcatctgcatgattcagaacactttcaactttagtcttaaacagtccaagcaccttttccaaattctaatggagtgtatggttcacagggattgtattaccatatttgatgctgactctgaagagcagcaagacctggacttagcaatcctaacagctttgctgaagggcacaaatttatcagcgtcagagcaattaaatctggcaatggcttgggacagggtggacattgccaagaaacatatcctaatttatgaacaacactggaagcctgatgccctggaacaagcaatgtcagatgctttagtgatggatcgggtggattttgtgaagctcttaatagaatatggagtgaacctccatcgctttcttaccatccctcgactggaagagctctacaatacaaaacaaggacctactaatacactcttgcatcatctcgtccaagatgtgaaacagcatacccttctttcaggctaccgaataaccttgattgacattggattagtagtagaatacctcattggtagagcatatcgcagcaactacactagaaaacatttcagagccctctacaacaacctctacagaaaatacaagcaccagagacactcctcaggaaatagaaatgagtctgcagaaagtacgctgcactcccagttcattagaactgcacagccatacaaattcaaggaaaagtctatagtccttcataaatcaaggaagaagtcaaaagaacaaaatgtatcagatgaccctgagtctactggctttctttacccttacaatgacctgctggtttgggctgtgctgatgaaaaggcagaagatggctatgttcttctggcagcatggagaggaggccacggttaaagccgtgattgcgtgtatcctctaccgggcaatggcccatgaagctaaggagagtcacatggtggatgatgcctcagaagagttgaagaattactcaaaacagtttggccagctggctctggacttgttggagaaggcattcaagcagaatgagcgcatggccatgacgctgttgacgtatgaactcaggaactggagcaattcgacctgccttaaactggccgtgtcgggaggattacgaccctttgtttcacatacttgtacccagatgctactgacagacatgtggatggggaggctgaaaatgaggaaaaactcttggttaaagattattataagcattattttaccacccaccattttgacactggaatttaaaagcaaagctgagatgtcacatgttccccagtcccaggacttccaatttatgtggtattacagtgaccagaacgccagcagttccaaagaaagtgcttctgtgaaagagtatgatttggaaaggggccatgatgagaaactggatgaaaatcagcattttggtttggaaagtgggcaccaacaccttccgtggaccaggaaagtctatgagttctacagtgctccaattgtcaagttttggttttatacgatggcgtatttggcattcctcatgctgttcacttacaccgtgttggtggagatgcagccccagcccagcgtgcaggagtggcttgttagcatttacatcttcaccaatgctattgaggtggtcagggagatctgtatttcagaacctgggaagtttacccaaaaggtgaaggtatggattagtgagtactggaacttaacagaaactgtggccattggcctgttttcagctggcttcgtccttcgatggggtgaccctccttttcacacagcgggaagactgatctactgcatagacatcatattctggttctcacggctcctggacttctttgctgtgaatcaacatgcaggtccatatgtgaccatgattgcaaaaatgacagcaaacatgttctatattgtgatcatcatggccatagtcctgctgagctttggagtggcacgcaaggccatcctttcgccaaaagagccaccatcttggagtctagctcgagatattgtatttgagccatactggatgatatacggagaagtctatgctggagaaatagatgtttgttcaagccagccatcctgccctcctggttcttttcttactccattcttgcaagctgtctacctcttcgtgcaatatatcatcatggtgaacctgttgattgctttcttcaacaacgtttacttagatatggaatccatttcaaataacctgtggaaatacaaccgctatcgctacatcatgacctaccacgagaagccctggctgcccccacctctcatcctgctgagccacgtgggccttctcctccgccgcctgtgctgtcatcgagctcctcacgaccaagaagagggtgacgttggattaaaactctacctcagtaaggaggatctgaaaaaacttcatgattttgaggagcagtgcgtggaaaaatacttccatgagaagatggaagatgtgaattgtagttgtgaggaacgaatccgagtgacatcagaaagggttacagagatgtacttccagctgaaagaaatgaatgaaaaggtgtcttttataaaggactccttactgtctttggacagccaggtgggacacctgcaggatctctctgccctgactgtggataccctgaaagtcctttctgctgttgacactttgcaagaggatgaggctctcctggccaagagaaagcattctacttgcaaaaaacttccccacagctggagcaatgtcatctgtgcagaggttctaggcagcatggagatcgctggagagaagaaataccagtattatagcatgccctcttctttgctgaggagcctggctggaggccggcatcccccaagagtgcagaggggggcacttcttgagattacaaacagtaaaagagaggctacaaatgtaagaaatgaccaggaaaggcaagaaacacaaagtagtatagtggtttctggggtgtctcctaacaggcaagcacactcaaagtatggccagtttcttctggtcccctctaatctaaagcgagttcctttttcagcagaaactgtcttgcctctgtccagaccctctgtgccagatgtgctggcaactgaacaggacatccagactgaggttcttgttcatctgactgggcagaccccagttgtctctgactgggcatcagtggatgaacccaaggaaaagcacgagcctattgctcacttactggatggacaagacaaggcagagcaagtgctacccactttgagttgcacacctgaacccatgacaatgagctcccctctttcccaagccaagatcatgcaaactggaggtggatatgtaaactgggcattttcagaaggtgatgaaactggtgtgtttagcatcaagaaaaagtggcaaacctgcttgccctccacttgtgacagtgattcctctcggagtgaacagcaccagaagcaggcccaggacagctccctatctgataactcaacaagatcggcccagagtagtgaatgctcagaggtgggaccatggcttcagccaaacacatccttttggatcaatcctctccgcagatacaggcccttcgctaggagtcatagttttagattccataaggaggagaaattgatgaagatctgtaagattaaaaatctttcaggctcttcagaaatagggcagggagcatgggtcaaagcgaaaatgctaaccaaagacaggagactgtcaaagaaaaagaagaatactcaaggactccaggtgccaatcataacagtcaatgcctgctctcagagtgaccagttgaatccagagccaggagaaaacagcatctctgaagaggagtacagcaagaactggttcacagtgtccaaatttagtcacacaggtgtagaaccttacatacatcagaaaatgaaaactaaagaaattggacaatgtgctatacaaatcagtgattacctaaagcagtctcaagaggatctcagcaaaaactctttgtggaattccaggagcaccaacctcaataggaactccctgctgaaaagttcaattggagttgacaagatctcagcctccttaaaaagccctcaagagcctcaccatcattattcagccattgaaaggaataatttaatgaggctttctcagaccataccatttacaccagtccaactgtttgcaggagaagaaataactgtctacaggttggaggagagttcccctttaaaccttgataaaagcatgtcctcttggtctcagcgtgggagagcggcaatgatccaggtattgtcccgagaggagatggatgggggcctccgtaaagctatgagagtcgtcagcacttggtctgaggatgacattctcaagccgggacaagttttcattgtcaagtcctttcttcctgaggttgtgcggacatggcataaaatcttccaggagagcactgtgcttcatctttgcctcagggaaattcaacaacaaagagctgctcaaaaattgatctataccttcaaccaagtgaaaccacaaaccataccctacacaccaaggttcctggaagttttcttaatctactgccattcagccaaccagtggttgaccattgagaagtatatgacaggggagttccggaagtataacaacaacaatggtgatgaaatcacccccaccaacaccctggaggagctgatgttggctttctctcactggacctatgagtacactcggggagagctgctggttttagatttgcaaggtgttggagaaaatttgacagatccatctgttataaaacctgaagtcaaacaatcaagaggaatggtgtttggaccggccaatttgggggaagatgcaattagaaacttcattgcaaaacatcattgtaactcctgctgccggaagctcaaactcccggatttaaaaagaaatgactattcccctgaaaggataaattccacctttggacttgagataaaaatagaatcagctgaggagcctccagcaagggagacgggtagaaattccccagaagatgatatgcaactataaaaagggaggagcaagaagatcccagtgcttgccctgcctgccaggaactctgtgataacatagattgatcaacgtgatgttgattacatcagcgtctccttgggacacgccttctgagcctcacatctccttctgttcaaaggcctcattggtatatgatcaatgggttctcctagacactgacctctgtccagggcactttgcagctccatcctcaagttccacacgaagatgcttggatgagtcagctgggaatattgttcttgtgtacctcattgctttagctggtcacttggaactttggagcagaatcctgcacattaaaggatggggttgggggggatacatttattttattttctcactatgtatgcagactggaccccctactactatttgtcacctcacccacagattgtatttatgtctatatatatgttcataaaaagttatgtgatttcctcctctgtcttttccacaacataggactttgaatagcaatgataggaaaaacaatggaacaagggtgggtttgcacagattggagcacattcctgcacaaactaccaagtatactggtgaaatctcgatgggtttcagatattgtcagtgaatcatatgatgcctggatatttcaggtttctgtaaaagaaagggaaacctaaaacaaatacccttccatatataatatatatggaatatgtatattatatatatttttatatatataatatatatggaatatatatattatatatataaaatacatatggaatatatatattttatatatatatatatatatttttatttttgagatggagtttcactctttttacccaggctggagtgcaatgatgcgatctcactgcaacctctgcctcccgggcttgagcgattcttgtgtctcagtcttccgggtagctgggactacaggtgtgcaccactatgcctggctaattttgtatttttagtagagatggggtttcaccatgttggccaggctggtctcaaactcctgacctcagatgatccacctgccttggcttcccaaagtgctgggattacaggcgtgagccactgcgcctggcctttttttttttttttttaaacgagaacaagaatatgaagaactggaaatcattaagaaagggtttcccttccttaaagctcaggggtactattagttaggagttgactaactcaacctgtaaaacaccactcctccttccaaagttgtatatataatattgcaggttaaattactttatgtcaggtcctatgaagaaagatacggtttcagactgaaaacatgtttcacaggtgtttgcttccttccagagcagagttccctattcccctggcataaagaatgtatatatattttgaaatatggctgagaacatgtcattggtttgtgaggcctaaggtgaagcactcctggcagccacactgtgtagtgtatttgagggatcagtcatccctcttgtatgctgggcctggttgccctacctcgaacaagcaccagcttttcacacaaggagagatgtggggctgggagtcctctccccatcctattgcatctcctttcttattataagctgttccagttcacaggcagcaaacctcctgggtttgaaaaattccaacttatttttatctttaatcctgacattagctgacttgctagtgagcttgctttaaaaatctacactcttgcattcttaggcatacaggggaaatgttgaaaaggaaggtggaaaaccaagaatttagtttgccaatgattgcctctgattcttgtaagtttgagttccacaagggctaatttattccccttttacttgggttttggggtggtggaaagcgggaaatttgggtgatttgttgattggcaatgaggataaaatgttaatacttttttggggacttaacaactttatcctattctacaagtcagtaaaggaacaattggtactcacctcagtgctgcactcaactatggaaagaggcagagtttgcttgcccaattgccaaactaaagacatcagttcattggtcaaatatttgttacctggaatggaacttgaaagcaaatacatttggatttcaaatttc

SEQ ID NO: 32189 - DNA, 6082 bp, Homo sapiens
  source 1..6082: mol_type = unassigned DNA
actacaaaggatgtctgtgatgacagtggccatcccatttgatcctcgttattcttcttttatcgaaggaaactgagagtcaccttcttttctaggcagttaggtaactgaagccgaaaggtattgtgacagatccactgggctgtaaaaggcagcgtgtggaggtggagcccagagtttctgcctccacagttaaaagctcagacagggctttgggagcagggcctgcaaatcaaagatgaaagaacaacctgtcttggagcgcttgcagtcccagaaatcctggattaaaggagtatttgacaagagagaatgtagcacaatcatacccagctcaaaaaatcctcacagatgtactccagtatgccaagtctgccagaatttaatcaggtgttactgtggccgactgattggagaccatgctgggatagattattcctggaccatctcagctgccaagggtaaagaaagtgaacaatggtctgttgaaaagcacacaacgaaaagcccaacagatacttttggcacgattaatttccaagatggagagcacacccatcatgccaagtatattagaacttcttatgatacaaaactggatcatctgttacatttaatgttgaaagagtggaaaatggaactgcccaagcttgtgatctcagtccatgggggcatccagaactttactatgccctctaaatttaaagagattttcagccaaggtttggttaaagctgcagagacaacaggagcgtggataataactgaaggcatcaatacaggagtgtccaagcatgttggggatgccttgaaatcccattcctctcattccttgagaaaaatctggacagttggaatccctccttggggtgtcattgagaaccagagagaccttattggaaaagatgtggtgtgcctgtaccagactctggataaccccctcagcaagctcacaacactcaacagcatgcactcgcacttcatcctgtctgatgatgggaccgtgggcaagtatggaaatgaaatgaagctcagaaggaacctggagaagtacctctctctgcagaaaatacactgccgctcaagacaaggcgtgccggtcgtggggctggtggtggaaggcggtcccaacgtcatcctgtcagtgtgggagactgtcaaggacaaggacccagtggtggtgtgtgagggcacaggtagggcggctgacctcctggccttcacacacaaacacctggcagatgaagggatgctgcgacctcaggtgaaagaggagatcatctgcatgattcagaacactttcaactttagtcttaaacagtccaagcaccttttccaaattctaatggagtgtatggttcacagggattgtattaccatatttgatgctgactctgaagagcagcaagacctggacttagcaatcctaacagctttgctgaagggcacaaatttatcagcgtcagagcaattaaatctggcaatggcttgggacagggtggacattgccaagaaacatatcctaatttatgaacaacactggaagcctgatgccctggaacaagcaatgtcagatgctttagtgatggatcgggtggattttgtgaagctcttaatagaatatggagtgaacctccatcgctttcttaccatccctcgactggaagagctctacaatacaaaacaaggacctactaatacactcttgcatcatctcgtccaagatgtgaaacagcatacccttctttcaggctaccgaataaccttgattgacattggattagtagtagaatacctcattggtagagcatatcgcagcaactacactagaaaacatttcagagccctctacaacaacctctacagaaaatacaagcaccagagacactcctcaggaaatagaaatgagtctgcagaaagtacgctgcactcccagttcattagaactgcacagccatacaaattcaaggaaaagtctatagtccttcataaatcaaggaagaagtcaaaagaacaaaatgtatcagatgaccctgagtctactggctttctttacccttacaatgacctgctggtttgggctgtgctgatgaaaaggcagaagatggctatgttcttctggcagcatggagaggaggccacggttaaagccgtgattgcgtgtatcctctaccgggcaatggcccatgaagctaaggagagtcacatggtggatgatgcctcagaagagttgaagaattactcaaaacagtttggccagctggctctggacttgttggagaaggcattcaagcagaatgagcgcatggccatgacgctgttgacgtatgaactcaggaactggagcaattcgacctgccttaaactggccgtgtcgggaggattacgaccctttgtttcacatacttgtacccagatgctactgacagacatgtggatggggaggctgaaaatgaggaaaaactcttggttaaagattattataagcattattttaccacccaccattttgacactggaatttaaaagcaaagctgagatgtcacatgttccccagtcccaggacttccaatttatgtggtattacagtgaccagaacgccagcagttccaaagaaagtgcttctgtgaaagagtatgatttggaaaggggccatgatgagaaactggatgaaaatcagcattttggtttggaaagtgggcaccaacaccttccgtggaccaggaaagtctatgagttctacagtgctccaattgtcaagttttggttttatacgatggcgtatttggcattcctcatgctgttcacttacaccgtgttggtggagatgcagccccagcccagcgtgcaggagtggcttgttagcatttacatcttcaccaatgctattgaggtggtcagggagatctgtatttcagaacctgggaagtttacccaaaaggtgaaggtatggattagtgagtactggaacttaacagaaactgtggccattggcctgttttcagctggcttcgtccttcgatggggtgaccctccttttcacacagcgggaagactgatctactgcatagacatcatattctggttctcacggctcctggacttctttgctgtgaatcaacatgcaggtccatatgtgaccatgattgcaaaaatgacagcaaacatgttctatattgtgatcatcatggccatagtcctgctgagctttggagtggcacgcaaggccatcctttcgccaaaagagccaccatcttggagtctagctcgagatattgtatttgagccatactggatgatatacggagaagtctatgctggagaaatagatgtttgttcaagccagccatcctgccctcctggttcttttcttactccattcttgcaagctgtctacctcttcgtgcaatatatcatcatggtgaacctgttgattgctttcttcaacaacgtttacttagatatggaatccatttcaaataacctgtggaaatacaaccgctatcgctacatcatgacctaccacgagaagccctggctgcccccacctctcatcctgctgagccacgtgggccttctcctccgccgcctgtgctgtcatcgagctcctcacgaccaagaagagggtgacgttggattaaaactctacctcagtaaggaggatctgaaaaaacttcatgattttgaggagcagtgcgtggaaaaatacttccatgagaagatggaagatgtgaattgtagttgtgaggaacgaatccgagtgacatcagaaagggttacagagatgtacttccagctgaaagaaatgaatgaaaaggtgtcttttataaaggactccttactgtctttggacagccaggtgggacacctgcaggatctctctgccctgactgtggataccctgaaagtcctttctgctgttgacactttgcaagaggatgaggctctcctggccaagagaaagcattctacttgcaaaaaacttccccacagctggagcaatgtcatctgtgcagaggttctaggcagcatggagatcgctggagagaagaaataccagtattatagcatgccctcttctttgctgaggagcctggctggaggccggcatcccccaagagtgcagaggggggcacttcttgagattacaaacagtaaaagagaggctacaaatgtaagaaatgaccaggaaaggcaagaaacacaaagtagtatagtggtttctggggtgtctcctaacaggcaagcacactcaaagtatggccagtttcttctggtcccctctaatctaaagcgagttcctttttcagcagaaactgtcttgcctctgtccagaccctctgtgccagatgtgctggcaactgaacaggacatccagactgaggttcttgttcatctgactgggcagaccccagttgtctctgactgggcatcagtggatgaacccaaggaaaagcacgagcctattgctcacttactggatggacaagacaaggcagagcaagtgctacccactttgagttgcacacctgaacccatgacaatgagctcccctctttcccaagccaagatcatgcaaactggaggtggatatgtaaactgggcattttcagaaggtgatgaaactggtgtgtttagcatcaagaaaaagtggcaaacctgcttgccctccacttgtgacagtgattcctctcggagtgaacagcaccagaagcaggcccaggacagctccctatctgataactcaacaagatcggcccagagtagtgaatgctcagaggtgggaccatggcttcagccaaacacatccttttggatcaatcctctccgcagatacaggcccttcgctaggagtcatagttttagattccataaggaggagaaattgatgaagatctgtaagattaaaaatctttcaggctcttcagaaatagggcagggagcatgggtcaaagcgaaaatgctaaccaaagacaggagactgtcaaagaaaaagaagaatactcaaggactccaggtgccaatcataacagtcaatgcctgctctcagagtgaccagttgaatccagagccaggagaaaacagcatctctgaagaggagtacagcaagaactggttcacagtgtccaaatttagtcacacaggtgtagaaccttacatacatcagaaaatgaaaactaaagaaattggacaatgtgctatacaaatcagtgattacctaaagcagtctcaagaggatctcagcaaaaactctttgtggaattccaggagcaccaacctcaataggaactccctccatgtaattaaaatgccaatctcctctctaatttcagagatctcagcctccttaaaaagccctcaagagcctcaccatcattattcagccattgaaaggaataatttaatgaggctttctcagaccataccatttacaccagtccaactgtttgcaggagaagaaataactgtctacaggttggaggagagttcccctttaaaccttgataaaagcatgtcctcttggtctcagcgtgggagagcggcaatgatccaggtattgtcccgagaggagatggatgggggcctccgtaaagctatgagagtcgtcagcacttggtctgaggatgacattctcaagccgggacaagttttcattgtcaagtcctttcttcctgaggttgtgcggacatggcataaaatcttccaggagagcactgtgcttcatctttgcctcagggaaattcaacaacaaagagctgctcaaaaattgatctataccttcaaccaagtgaaaccacaaaccataccctacacaccaaggttcctggaagttttcttaatctactgccattcagccaaccagtggttgaccattgagaagtatatgacaggggagttccggaagtataacaacaacaatggtgatgaaatcacccccaccaacaccctggaggagctgatgttggctttctctcactggacctatgagtacactcggggagagctgctggttttagatttgcaagctctctggttctgggattctatgctgaaagccaggcttggaggttggagaatgtag

SEQ ID NO: 32190 - DNA, 3825 bp, Homo sapiens
  source 1..3825: mol_type = unassigned DNA
cgtgagtcaccacacccagccctccttcaatcccagaaatcctggattaaaggagtatttgacaagagagaatgtagcacaatcatacccagctcaaaaaatcctcacagatgtactccagtatgccaagtctgccagaatttaatcaggtgttactgtggccgactgattggagaccatgctgggatagattattcctggaccatctcagctgccaagggtaaagaaagtgaacaatggtctgttgaaaagcacacaacgaaaagcccaacagatacttttggcacgattaatttccaagatggagagcacacccatcatgccaagtatattagaacttcttatgatacaaaactggatcatctgttacatttaatgttgaaagagtggaaaatggaactgcccaagcttgtgatctcagtccatgggggcatccagaactttactatgccctctaaatttaaagagattttcagccaaggtttggttaaagctgcagagacaacaggagcgtggataataactgaaggcatcaatacaggagtgtccaagcatgttggggatgccttgaaatcccattcctctcattccttgagaaaaatctggacagttggaatccctccttggggtgtcattgagaaccagagagaccttattggaaaagatgtggtgtgcctgtaccagactctggataaccccctcagcaagctcacaacactcaacagcatgcactcgcacttcatcctgtctgatgatgggaccgtgggcaagtatggaaatgaaatgaagctcagaaggaacctggagaagtacctctctctgcagaaaatacactgcccaggagaagaaataactgtctacaggttggaggagagttcccctttaaaccttgataaaagcatgtcctcttggtctcagcgtgggagagcggcaatgatccaggtattgtcccgagaggagatggatgggggcctccgtaaagctatgagagtcgtcagcacttggtctgaggatgacattctcaagccgggacaagttttcattgtcaagtcctttcttcctgaggttgtgcggacatggcataaaatcttccaggagagcactgtgcttcatctttgcctcagggaaattcaacaacaaagagctgctcaaaaattgatctataccttcaaccaagtgaaaccacaaaccataccctacacaccaaggttcctggaagttttcttaatctactgccattcagccaaccagtggttgaccattgagaagtatatgacaggggagttccggaagtataacaacaacaatggtgatgaaatcacccccaccaacaccctggaggagctgatgttggctttctctcactggacctatgagtacactcggggagagctgctggttttagatttgcaaggtgttggagaaaatttgacagatccatctgttataaaacctgaagtcaaacaatcaagaggaatggtgtttggaccggccaatttgggggaagatgcaattagaaacttcattgcaaaacatcattgtaactcctgctgccggaagctcaaactcccggatttaaaaagaaatgactattcccctgaaaggataaattccacctttggacttgagataaaaatagaatcagctgaggagcctccagcaagggagacgggtagaaattccccagaagatgatatgcaactataaaaagggaggagcaagaagatcccagtgcttgccctgcctgccaggaactctgtgataacatagattgatcaacgtgatgttgattacatcagcgtctccttgggacacgccttctgagcctcacatctccttctgttcaaaggcctcattggtatatgatcaatgggttctcctagacactgacctctgtccagggcactttgcagctccatcctcaagttccacacgaagatgcttggatgagtcagctgggaatattgttcttgtgtacctcattgctttagctggtcacttggaactttggagcagaatcctgcacattaaaggatggggttgggggggatacatttattttattttctcactatgtatgcagactggaccccctactactatttgtcacctcacccacagattgtatttatgtctatatatatgttcataaaaagttatgtgatttcctcctctgtcttttccacaacataggactttgaatagcaatgataggaaaaacaatggaacaagggtgggtttgcacagattggagcacattcctgcacaaactaccaagtatactggtgaaatctcgatgggtttcagatattgtcagtgaatcatatgatgcctggatatttcaggtttctgtaaaagaaagggaaacctaaaacaaatacccttccatatataatatatatggaatatgtatattatatatatttttatatatataatatatatggaatatatatattatatatataaaatacatatggaatatatatattttatatatatatatatatatttttatttttgagatggagtttcactctttttacccaggctggagtgcaatgatgcgatctcactgcaacctctgcctcccgggcttgagcgattcttgtgtctcagtcttccgggtagctgggactacaggtgtgcaccactatgcctggctaattttgtatttttagtagagatggggtttcaccatgttggccaggctggtctcaaactcctgacctcagatgatccacctgccttggcttcccaaagtgctgggattacaggcgtgagccactgcgcctggcctttttttttttttttttaaacgagaacaagaatatgaagaactggaaatcattaagaaagggtttcccttccttaaagctcaggggtactattagttaggagttgactaactcaacctgtaaaacaccactcctccttccaaagttgtatatataatattgcaggttaaattactttatgtcaggtcctatgaagaaagatacggtttcagactgaaaacatgtttcacaggtgtttgcttccttccagagcagagttccctattcccctggcataaagaatgtatatatattttgaaatatggctgagaacatgtcattggtttgtgaggcctaaggtgaagcactcctggcagccacactgtgtagtgtatttgagggatcagtcatccctcttgtatgctgggcctggttgccctacctcgaacaagcaccagcttttcacacaaggagagatgtggggctgggagtcctctccccatcctattgcatctcctttcttattataagctgttccagttcacaggcagcaaacctcctgggtttgaaaaattccaacttatttttatctttaatcctgacattagctgacttgctagtgagcttgctttaaaaatctacactcttgcattcttaggcatacaggggaaatgttgaaaaggaaggtggaaaaccaagaatttagtttgccaatgattgcctctgattcttgtaagtttgagttccacaagggctaatttattccccttttacttgggttttggggtggtggaaagcgggaaatttgggtgatttgttgattggcaatgaggataaaatgttaatacttttttggggacttaacaactttatcctattctacaagtcagtaaaggaacaattggtactcacctcagtgctgcactcaactatggaaagaggcagagtttgcttgcccaattgccaaactaaagacatcagttcattggtcaaatatttgttacctggaatggaacttgaaagcaaatacatttggatttcaaatttc

SEQ ID NO: 32191 - DNA, 4936 bp, Homo sapiens
  source 1..4936: mol_type = unassigned DNA
actacaaaggatgtctgtgatgacagtggccatcccatttgatcctcgttattcttcttttatcgaaggaaactgagagtcaccttcttttctaggcagttaggtaactgaagccgaaaggtattgtgacagatccactgggctgtaaaaggcagcgtgtggaggtggagcccagagtttctgcctccacagttaaaagctcagacagggctttgggagcagggcctgcaaatcaaagatgaaagaacaacctgtcttggagcgcttgcagtcccagaaatcctggattaaaggagtatttgacaagagagaatgtagcacaatcatacccagctcaaaaaatcctcacagatgtactccagtatgccaagtctgccagaatttaatcaggtgttactgtggccgactgattggagaccatgctgggatagattattcctggaccatctcagctgccaagggtaaagaaagtgaacaatggtctgttgaaaagcacacaacgaaaagcccaacagatacttttggcacgattaatttccaagatggagagcacacccatcatgccaagtatattagaacttcttatgatacaaaactggatcatctgttacatttaatgttgaaagagtggaaaatggaactgcccaagcttgtgatctcagtccatgggggcatccagaactttactatgccctctaaatttaaagagattttcagccaaggtttggttaaagctgcagagacaacaggagcgtggataataactgaaggcatcaatacaggagtgtccaagcatgttggggatgccttgaaatcccattcctctcattccttgagaaaaatctggacagttggaatccctccttggggtgtcattgagaaccagagagaccttattggaaaagatgtggtgtgcctgtaccagactctggataaccccctcagcaagctcacaacactcaacagcatgcactcgcacttcatcctgtctgatgatgggaccgtgggcaagtatggaaatgaaatgaagctcagaaggaacctggagaagtacctctctctgcagaaaatacactgccgctcaagacaaggcgtgccggtcgtggggctggtggtggaaggcggtcccaacgtcatcctgtcagtgtgggagactgtcaaggacaaggacccagtggtggtgtgtgagggcacaggtagggcggctgacctcctggccttcacacacaaacacctggcagatgaagggatgctgcgacctcaggtgaaagaggagatcatctgcatgattcagaacactttcaactttagtcttaaacagtccaagcaccttttccaaattctaatggagtgtatggttcacagggattgtattaccatatttgatgctgactctgaagagcagcaagacctggacttagcaatcctaacagctttgctgaagggcacaaatttatcagcgtcagagcaattaaatctggcaatggcttgggacagggtggacattgccaagaaacatatcctaatttatgaacaacactggaagcctgatgccctggaacaagcaatgtcagatgctttagtgatggatcgggtggattttgtgaagctcttaatagaatatggagtgaacctccatcgctttcttaccatccctcgactggaagagctctacaatacaaaacaaggacctactaatacactcttgcatcatctcgtccaagatgtgaaacaggatctcagcaaaaactctttgtggaattccaggagcaccaacctcaataggaactccctccatgtaattaaaatgccaatctcctctctaatttcagagatctcagcctccttaaaaagccctcaagagcctcaccatcattattcagccattgaaaggaataatttaatgaggctttctcagaccataccatttacaccagtccaactgtttgcaggagaagaaataactgtctacaggttggaggagagttcccctttaaaccttgataaaagcatgtcctcttggtctcagcgtgggagagcggcaatgatccaggtattgtcccgagaggagatggatgggggcctccgtaaagctatgagagtcgtcagcacttggtctgaggatgacattctcaagccgggacaagttttcattgtcaagtcctttcttcctgaggttgtgcggacatggcataaaatcttccaggagagcactgtgcttcatctttgcctcagggaaattcaacaacaaagagctgctcaaaaattgatctataccttcaaccaagtgaaaccacaaaccataccctacacaccaaggttcctggaagttttcttaatctactgccattcagccaaccagtggttgaccattgagaagtatatgacaggggagttccggaagtataacaacaacaatggtgatgaaatcacccccaccaacaccctggaggagctgatgttggctttctctcactggacctatgagtacactcggggagagctgctggttttagatttgcaaggtgttggagaaaatttgacagatccatctgttataaaacctgaagtcaaacaatcaagaggaatggtgtttggaccggccaatttgggggaagatgcaattagaaacttcattgcaaaacatcattgtaactcctgctgccggaagctcaaactcccggatttaaaaagaaatgactattcccctgaaaggataaattccacctttggacttgagataaaaatagaatcagctgaggagcctccagcaagggagacgggtagaaattccccagaagatgatatgcaactataaaaagggaggagcaagaagatcccagtgcttgccctgcctgccaggaactctgtgataacatagattgatcaacgtgatgttgattacatcagcgtctccttgggacacgccttctgagcctcacatctccttctgttcaaaggcctcattggtatatgatcaatgggttctcctagacactgacctctgtccagggcactttgcagctccatcctcaagttccacacgaagatgcttggatgagtcagctgggaatattgttcttgtgtacctcattgctttagctggtcacttggaactttggagcagaatcctgcacattaaaggatggggttgggggggatacatttattttattttctcactatgtatgcagactggaccccctactactatttgtcacctcacccacagattgtatttatgtctatatatatgttcataaaaagttatgtgatttcctcctctgtcttttccacaacataggactttgaatagcaatgataggaaaaacaatggaacaagggtgggtttgcacagattggagcacattcctgcacaaactaccaagtatactggtgaaatctcgatgggtttcagatattgtcagtgaatcatatgatgcctggatatttcaggtttctgtaaaagaaagggaaacctaaaacaaatacccttccatatataatatatatggaatatgtatattatatatatttttatatatataatatatatggaatatatatattatatatataaaatacatatggaatatatatattttatatatatatatatatatttttatttttgagatggagtttcactctttttacccaggctggagtgcaatgatgcgatctcactgcaacctctgcctcccgggcttgagcgattcttgtgtctcagtcttccgggtagctgggactacaggtgtgcaccactatgcctggctaattttgtatttttagtagagatggggtttcaccatgttggccaggctggtctcaaactcctgacctcagatgatccacctgccttggcttcccaaagtgctgggattacaggcgtgagccactgcgcctggcctttttttttttttttttaaacgagaacaagaatatgaagaactggaaatcattaagaaagggtttcccttccttaaagctcaggggtactattagttaggagttgactaactcaacctgtaaaacaccactcctccttccaaagttgtatatataatattgcaggttaaattactttatgtcaggtcctatgaagaaagatacggtttcagactgaaaacatgtttcacaggtgtttgcttccttccagagcagagttccctattcccctggcataaagaatgtatatatattttgaaatatggctgagaacatgtcattggtttgtgaggcctaaggtgaagcactcctggcagccacactgtgtagtgtatttgagggatcagtcatccctcttgtatgctgggcctggttgccctacctcgaacaagcaccagcttttcacacaaggagagatgtggggctgggagtcctctccccatcctattgcatctcctttcttattataagctgttccagttcacaggcagcaaacctcctgggtttgaaaaattccaacttatttttatctttaatcctgacattagctgacttgctagtgagcttgctttaaaaatctacactcttgcattcttaggcatacaggggaaatgttgaaaaggaaggtggaaaaccaagaatttagtttgccaatgattgcctctgattcttgtaagtttgagttccacaagggctaatttattccccttttacttgggttttggggtggtggaaagcgggaaatttgggtgatttgttgattggcaatgaggataaaatgttaatacttttttggggacttaacaactttatcctattctacaagtcagtaaaggaacaattggtactcacctcagtgctgcactcaactatggaaagaggcagagtttgcttgcccaattgccaaactaaagacatcagttcattggtcaaatatttgttacctggaatggaacttgaaagcaaatacatttggatttcaaatttc

SEQ ID NO: 32192 - DNA, 5290 bp, Homo sapiens
  source 1..5290: mol_type = unassigned DNA
actacaaaggatgtctgtgatgacagtggccatcccatttgatcctcgttattcttcttttatcgaaggaaactgagagtcaccttcttttctaggcagttaggtaactgaagccgaaaggtattgtgacagatccactgggctgtaaaaggcagcgtgtggaggtggagcccagagtttctgcctccacagttaaaagctcagacagggctttgggagcagggcctgcaaatcaaagatgaaagaacaacctgtcttggagcgcttgcagtcccagaaatcctggattaaaggagtatttgacaagagagaatgtagcacaatcatacccagctcaaaaaatcctcacagatgtactccagtatgccaagtctgccagaatttaatcaggtgttactgtggccgactgattggagaccatgctgggatagattattcctggaccatctcagctgccaagggtaaagaaagtgaacaatggtctgttgaaaagcacacaacgaaaagcccaacagatacttttggcacgattaatttccaagatggagagcacacccatcatgccaagtatattagaacttcttatgatacaaaactggatcatctgttacatttaatgttgaaagagtggaaaatggaactgcccaagcttgtgatctcagtccatgggggcatccagaactttactatgccctctaaatttaaagagattttcagccaaggtttggttaaagctgcagagacaacaggagcgtggataataactgaaggcatcaatacaggagtgtccaagcatgttggggatgccttgaaatcccattcctctcattccttgagaaaaatctggacagttggaatccctccttggggtgtcattgagaaccagagagaccttattggaaaagatgtggtgtgcctgtaccagactctggataaccccctcagcaagctcacaacactcaacagcatgcactcgcacttcatcctgtctgatgatgggaccgtgggcaagtatggaaatgaaatgaagctcagaaggaacctggagaagtacctctctctgcagaaaatacactgccgctcaagacaaggcgtgccggtcgtggggctggtggtggaaggcggtcccaacgtcatcctgtcagtgtgggagactgtcaaggacaaggacccagtggtggtgtgtgagggcacaggtagggcggctgacctcctggccttcacacacaaacacctggcagatgaagggatgctgcgacctcaggtgaaagaggagatcatctgcatgattcagaacactttcaactttagtcttaaacagtccaagcaccttttccaaattctaatggagtgtatggttcacagggattgtattaccatatttgatgctgactctgaagagcagcaagacctggacttagcaatcctaacagctttgctgaagggcacaaatttatcagcgtcagagcaattaaatctggcaatggcttgggacagggtggacattgccaagaaacatatcctaatttatgaacaacactggaagcctgatgccctggaacaagcaatgtcagatgctttagtgatggatcgggtggattttgtgaagctcttaatagaatatggagtgaacctccatcgctttcttaccatccctcgactggaagagctctacaatacaaaacaaggacctactaatacactcttgcatcatctcgtccaagatgtgaaacagcatacccttctttcaggctaccgaataaccttgattgacattggattagtagtagaatacctcattggtagagcatatcgcagcaactacactagaaaacatttcagagccctctacaacaacctctacagaaaatacaagatcataacagtcaatgcctgctctcagagtgaccagttgaatccagagccaggagaaaacagcatctctgaagaggagtacagcaagaactggttcacagtgtccaaatttagtcacacaggtgtagaaccttacatacatcagaaaatgaaaactaaagaaattggacaatgtgctatacaaatcagtgattacctaaagcagtctcaagaggatctcagcaaaaactctttgtggaattccaggagcaccaacctcaataggaactccctccatgtaattaaaatgccaatctcctctctaatttcagagatctcagcctccttaaaaagccctcaagagcctcaccatcattattcagccattgaaaggaataatttaatgaggctttctcagaccataccatttacaccagtccaactgtttgcaggagaagaaataactgtctacaggttggaggagagttcccctttaaaccttgataaaagcatgtcctcttggtctcagcgtgggagagcggcaatgatccaggtattgtcccgagaggagatggatgggggcctccgtaaagctatgagagtcgtcagcacttggtctgaggatgacattctcaagccgggacaagttttcattgtcaagtcctttcttcctgaggttgtgcggacatggcataaaatcttccaggagagcactgtgcttcatctttgcctcagggaaattcaacaacaaagagctgctcaaaaattgatctataccttcaaccaagtgaaaccacaaaccataccctacacaccaaggttcctggaagttttcttaatctactgccattcagccaaccagtggttgaccattgagaagtatatgacaggggagttccggaagtataacaacaacaatggtgatgaaatcacccccaccaacaccctggaggagctgatgttggctttctctcactggacctatgagtacactcggggagagctgctggttttagatttgcaaggtgttggagaaaatttgacagatccatctgttataaaacctgaagtcaaacaatcaagaggaatggtgtttggaccggccaatttgggggaagatgcaattagaaacttcattgcaaaacatcattgtaactcctgctgccggaagctcaaactcccggatttaaaaagaaatgactattcccctgaaaggataaattccacctttggacttgagataaaaatagaatcagctgaggagcctccagcaagggagacgggtagaaattccccagaagatgatatgcaactataaaaagggaggagcaagaagatcccagtgcttgccctgcctgccaggaactctgtgataacatagattgatcaacgtgatgttgattacatcagcgtctccttgggacacgccttctgagcctcacatctccttctgttcaaaggcctcattggtatatgatcaatgggttctcctagacactgacctctgtccagggcactttgcagctccatcctcaagttccacacgaagatgcttggatgagtcagctgggaatattgttcttgtgtacctcattgctttagctggtcacttggaactttggagcagaatcctgcacattaaaggatggggttgggggggatacatttattttattttctcactatgtatgcagactggaccccctactactatttgtcacctcacccacagattgtatttatgtctatatatatgttcataaaaagttatgtgatttcctcctctgtcttttccacaacataggactttgaatagcaatgataggaaaaacaatggaacaagggtgggtttgcacagattggagcacattcctgcacaaactaccaagtatactggtgaaatctcgatgggtttcagatattgtcagtgaatcatatgatgcctggatatttcaggtttctgtaaaagaaagggaaacctaaaacaaatacccttccatatataatatatatggaatatgtatattatatatatttttatatatataatatatatggaatatatatattatatatataaaatacatatggaatatatatattttatatatatatatatatatttttatttttgagatggagtttcactctttttacccaggctggagtgcaatgatgcgatctcactgcaacctctgcctcccgggcttgagcgattcttgtgtctcagtcttccgggtagctgggactacaggtgtgcaccactatgcctggctaattttgtatttttagtagagatggggtttcaccatgttggccaggctggtctcaaactcctgacctcagatgatccacctgccttggcttcccaaagtgctgggattacaggcgtgagccactgcgcctggcctttttttttttttttttaaacgagaacaagaatatgaagaactggaaatcattaagaaagggtttcccttccttaaagctcaggggtactattagttaggagttgactaactcaacctgtaaaacaccactcctccttccaaagttgtatatataatattgcaggttaaattactttatgtcaggtcctatgaagaaagatacggtttcagactgaaaacatgtttcacaggtgtttgcttccttccagagcagagttccctattcccctggcataaagaatgtatatatattttgaaatatggctgagaacatgtcattggtttgtgaggcctaaggtgaagcactcctggcagccacactgtgtagtgtatttgagggatcagtcatccctcttgtatgctgggcctggttgccctacctcgaacaagcaccagcttttcacacaaggagagatgtggggctgggagtcctctccccatcctattgcatctcctttcttattataagctgttccagttcacaggcagcaaacctcctgggtttgaaaaattccaacttatttttatctttaatcctgacattagctgacttgctagtgagcttgctttaaaaatctacactcttgcattcttaggcatacaggggaaatgttgaaaaggaaggtggaaaaccaagaatttagtttgccaatgattgcctctgattcttgtaagtttgagttccacaagggctaatttattccccttttacttgggttttggggtggtggaaagcgggaaatttgggtgatttgttgattggcaatgaggataaaatgttaatacttttttggggacttaacaactttatcctattctacaagtcagtaaaggaacaattggtactcacctcagtgctgcactcaactatggaaagaggcagagtttgcttgcccaattgccaaactaaagacatcagttcattggtcaaatatttgttacctggaatggaacttgaaagcaaatacatttggatttcaaatttc

SEQ ID NO: 32193 - DNA, 4651 bp, Homo sapiens
  source 1..4651: mol_type = unassigned DNA
actacaaaggatgtctgtgatgacagtggccatcccatttgatcctcgttattcttcttttatcgaaggaaactgagagtcaccttcttttctaggcagttaggtaactgaagccgaaaggtattgtgacagatccactgggctgtaaaaggcagcgtgtggaggtggagcccagagtttctgcctccacagttaaaagctcagacagggctttgggagcagggcctgcaaatcaaagatgaaagaacaacctgtcttggagcgcttgcagtcccagaaatcctggattaaaggagtatttgacaagagagaatgtagcacaatcatacccagctcaaaaaatcctcacagatgtactccagtatgccaagtctgccagaatttaatcaggtgttactgtggccgactgattggagaccatgctgggatagattattcctggaccatctcagctgccaagggtaaagaaagtgaacaatggtctgttgaaaagcacacaacgaaaagcccaacagatacttttggcacgattaatttccaagatggagagcacacccatcatgccaagtatattagaacttcttatgatacaaaactggatcatctgttacatttaatgttgaaagagtggaaaatggaactgcccaagcttgtgatctcagtccatgggggcatccagaactttactatgccctctaaatttaaagagattttcagccaaggtttggttaaagctgcagagacaacaggagcgtggataataactgaaggcatcaatacaggagtgtccaagcatgttggggatgccttgaaatcccattcctctcattccttgagaaaaatctggacagttggaatccctccttggggtgtcattgagaaccagagagaccttattggaaaagatgtggtgtgcctgtaccagactctggataaccccctcagcaagctcacaacactcaacagcatgcactcgcacttcatcctgtctgatgatgggaccgtgggcaagtatggaaatgaaatgaagctcagaaggaacctggagaagtacctctctctgcagaaaatacactgccgctcaagacaaggcgtgccggtcgtggggctggtggtggaaggcggtcccaacgtcatcctgtcagtgtgggagactgtcaaggacaaggacccagtggtggtgtgtgagggcacaggtagggcggctgacctcctggccttcacacacaaacacctggcagatgaagggatgctgcgacctcaggtgaaagaggagatcatctgcatgattcagaacactttcaactttagtcttaaacagtccaagcaccttttccaaattctaatggagtgtatggttcacagggattgtattaccatatttgatgctgactctgaagagcagcaagacctggacttagcaatcctaacagctttgctgaagggcacaaatttatcagcgtcagagcaattaaatctggcaatggcttgggacagggtggacattgccaagaaacatatcctaatttatgaacaacactggaagcctgatgccctggaacaagcaatgtcagatgctttagtgatggatcgggtggattttgtgaagctcttaatagaatatggagtgaacctccatcgctttcttaccatccctcgactggaagagctctacaatacaaaacaaggacctactaatacactcttgcatcatctcgtccaagatgtgaaacagcatacccttctttcaggctaccgaataaccttgattgacattggattagtagtagaatacctcattggtagagcatatcgcagcaactacactagaaaacatttcagagccctctacaacaacctctacagaaaatacaagcaccagagacactcctcaggaaatagaaatgagtctgcagaaagtacgctgcactcccagttcattagaactgcacagccatacaaattcaaggaaaagtctatagtccttcataaatcaaggaagaagtcaaaagaacaaaatgtatcagatgaccctgagtctactggctttctttacccttacaatgacctgctggtttgggctgtgctgatgaaaaggcagaagatggctatgttcttctggcagcatggagaggaggccacggttaaagccgtgattgcgtgtatcctctaccgggcaatggcccatgaagctaaggagagtcacatggtggatgatgcctcagaagagttgaagaattactcaaaacagtttggccagctggctctggacttgttggagaaggcattcaagcagaatgagcgcatggccatgacgctgttgacgtatgaactcaggaactggagcaattcgacctgccttaaactggccgtgtcgggaggattacgaccctttgtttcacatacttgtacccagatgctactgacagacatgtggatggggaggctgaaaatgaggaaaaactcttggttaaagattattataagcattattttaccacccaccattttgacactggaatttaaaagcaaagctgagatgtcacatgttccccagtcccaggacttccaatttatgtggtattacagtgaccagaacgccagcagttccaaagaaagtgcttctgtgaaagagtatgatttggaaaggggccatgatgagaaactggatgaaaatcagcattttggtttggaaagtgggcaccaacaccttccgtggaccaggaaagtctatgagttctacagtgctccaattgtcaagttttggttttatacgatggcgtatttggcattcctcatgctgttcacttacaccgtgttggtggagatgcagccccagcccagcgtgcaggagtggcttgttagcatttacatcttcaccaatgctattgaggtggtcagggagatctgtatttcagaacctgggaagtttacccaaaaggtgaaggtatggattagtgagtactggaacttaacagaaactgtggccattggcctgttttcagctggcttcgtccttcgatggggtgaccctccttttcacacagcgggaagactgatctactgcatagacatcatattctggttctcacggctcctggacttctttgctgtgaatcaacatgcaggtccatatgtgaccatgattgcaaaaatgacagcaaacatgttctatattgtgatcatcatggccatagtcctgctgagctttggagtggcacgcaaggccatcctttcgccaaaagagccaccatcttggagtctagctcgagatattgtatttgagccatactggatgatatacggagaagtctatgctggagaaatagatgtttgttcaagccagccatcctgccctcctggttcttttcttactccattcttgcaagctgtctacctcttcgtgcaatatatcatcatggtgaacctgttgattgctttcttcaacaacgtttacttagatatggaatccatttcaaataacctgtggaaatacaaccgctatcgctacatcatgacctaccacgagaagccctggctgcccccacctctcatcctgctgagccacgtgggccttctcctccgccgcctgtgctgtcatcgagctcctcacgaccaagaagagggtgacgttggattaaaactctacctcagtaaggaggatctgaaaaaacttcatgattttgaggagcagtgcgtggaaaaatacttccatgagaagatggaagatgtgaattgtagttgtgaggaacgaatccgagtgacatcagaaagggttacagagatgtacttccagctgaaagaaatgaatgaaaaggtgtcttttataaaggactccttactgtctttggacagccaggtgggacacctgcaggatctctctgccctgactgtggataccctgaaagtcctttctgctgttgacactttgcaagaggatgaggctctcctggccaagagaaagcattctacttgcaaaaaacttccccacagctggagcaatgtcatctgtgcagaggttctaggcagcatggagatcgctggagagaagaaataccagtattatagcatgccctcttctttgctgaggagcctggctggaggccggcatcccccaagagtgcagaggggggcacttcttgagattacaaacagtaaaagagaggctacaaatgtaagaaatgaccaggaaaggcaagaaacacaaagtagtatagtggtttctggggtgtctcctaacaggcaagcacactcaaagtatggccagtttcttctggtcccctctaatctaaagcgagttcctttttcagcagaaactgtcttgcctctgtccagaccctctgtgccagatgtgctggcaactgaacaggacatccagactgaggttcttgttcatctgactgggcagaccccagttgtctctgactgggcatcagtggatgaacccaaggaaaagcacgagcctattgctcacttactggatggacaagacaaggcagagcaagtgctacccactttgagttgcacacctgaacccatgacaatgagctcccctctttccagatacaggcccttcgctaggagtcatagttttagattccataaggaggagaaattgatgaagatctgtaagattaaaagtaaggaataa

SEQ ID NO: 32194 - DNA, 8244 bp, Homo sapiens
  source 1..8244: mol_type = unassigned DNA
atctaacgaggatctagaatagctaggatttatgaaataccggctttcaagttctctggtctccacccaaagatgattatcctatctaagtcccagaaatcctggattaaaggagtatttgacaagagagaatgtagcacaatcatacccagctcaaaaaatcctcacagatgtactccagtatgccaagtctgccagaatttaatcaggtgttactgtggccgactgattggagaccatgctgggatagattattcctggaccatctcagctgccaagggtaaagaaagtgaacaatggtctgttgaaaagcacacaacgaaaagcccaacagatacttttggcacgattaatttccaagatggagagcacacccatcatgccaagtatattagaacttcttatgatacaaaactggatcatctgttacatttaatgttgaaagagtggaaaatggaactgcccaagcttgtgatctcagtccatgggggcatccagaactttactatgccctctaaatttaaagagattttcagccaaggtttggttaaagctgcagagacaacaggagcgtggataataactgaaggcatcaatacaggagtgtccaagcatgttggggatgccttgaaatcccattcctctcattccttgagaaaaatctggacagttggaatccctccttggggtgtcattgagaaccagagagaccttattggaaaagatgtggtgtgcctgtaccagactctggataaccccctcagcaagctcacaacactcaacagcatgcactcgcacttcatcctgtctgatgatgggaccgtgggcaagtatggaaatgaaatgaagctcagaaggaacctggagaagtacctctctctgcagaaaatacactgccgctcaagacaaggcgtgccggtcgtggggctggtggtggaaggcggtcccaacgtcatcctgtcagtgtgggagactgtcaaggacaaggacccagtggtggtgtgtgagggcacaggtagggcggctgacctcctggccttcacacacaaacacctggcagatgaagggatgctgcgacctcaggtgaaagaggagatcatctgcatgattcagaacactttcaactttagtcttaaacagtccaagcaccttttccaaattctaatggagtgtatggttcacagggattgtattaccatatttgatgctgactctgaagagcagcaagacctggacttagcaatcctaacagctttgctgaagggcacaaatttatcagcgtcagagcaattaaatctggcaatggcttgggacagggtggacattgccaagaaacatatcctaatttatgaacaacactggaagcctgatgccctggaacaagcaatgtcagatgctttagtgatggatcgggtggattttgtgaagctcttaatagaatatggagtgaacctccatcgctttcttaccatccctcgactggaagagctctacaatacaaaacaaggacctactaatacactcttgcatcatctcgtccaagatgtgaaacagcatacccttctttcaggctaccgaataaccttgattgacattggattagtagtagaatacctcattggtagagcatatcgcagcaactacactagaaaacatttcagagccctctacaacaacctctacagaaaatacaagcaccagagacactcctcaggaaatagaaatgagtctgcagaaagtacgctgcactcccagttcattagaactgcacagccatacaaattcaaggaaaagtctatagtccttcataaatcaaggaagaagtcaaaagaacaaaatgtatcagatgaccctgagtctactggctttctttacccttacaatgacctgctggtttgggctgtgctgatgaaaaggcagaagatggctatgttcttctggcagcatggagaggaggccacggttaaagccgtgattgcgtgtatcctctaccgggcaatggcccatgaagctaaggagagtcacatggtggatgatgcctcagaagagttgaagaattactcaaaacagtttggccagctggctctggacttgttggagaaggcattcaagcagaatgagcgcatggccatgacgctgttgacgtatgaactcaggaactggagcaattcgacctgccttaaactggccgtgtcgggaggattacgaccctttgtttcacatacttgtacccagatgctactgacagacatgtggatggggaggctgaaaatgaggaaaaactcttggttaaagattattataagcattattttaccacccaccattttgacactggaatttaaaagcaaagctgagatgtcacatgttccccagtcccaggacttccaatttatgtggtattacagtgaccagaacgccagcagttccaaagaaagtgcttctgtgaaagagtatgatttggaaaggggccatgatgagaaactggatgaaaatcagcattttggtttggaaagtgggcaccaacaccttccgtggaccaggaaagtctatgagttctacagtgctccaattgtcaagttttggttttatacgatggcgtatttggcattcctcatgctgttcacttacaccgtgttggtggagatgcagccccagcccagcgtgcaggagtggcttgttagcatttacatcttcaccaatgctattgaggtggtcagggagatctgtatttcagaacctgggaagtttacccaaaaggtgaaggtatggattagtgagtactggaacttaacagaaactgtggccattggcctgttttcagctggcttcgtccttcgatggggtgaccctccttttcacacagcgggaagactgatctactgcatagacatcatattctggttctcacggctcctggacttctttgctgtgaatcaacatgcaggtccatatgtgaccatgattgcaaaaatgacagcaaacatgttctatattgtgatcatcatggccatagtcctgctgagctttggagtggcacgcaaggccatcctttcgccaaaagagccaccatcttggagtctagctcgagatattgtatttgagccatactggatgatatacggagaagtctatgctggagaaatagatgtttgttcaagccagccatcctgccctcctggttcttttcttactccattcttgcaagctgtctacctcttcgtgcaatatatcatcatggtgaacctgttgattgctttcttcaacaacgtttacttagatatggaatccatttcaaataacctgtggaaatacaaccgctatcgctacatcatgacctaccacgagaagccctggctgcccccacctctcatcctgctgagccacgtgggccttctcctccgccgcctgtgctgtcatcgagctcctcacgaccaagaagagggtgacgttggattaaaactctacctcagtaaggaggatctgaaaaaacttcatgattttgaggagcagtgcgtggaaaaatacttccatgagaagatggaagatgtgaattgtagttgtgaggaacgaatccgagtgacatcagaaagggttacagagatgtacttccagctgaaagaaatgaatgaaaaggtgtcttttataaaggactccttactgtctttggacagccaggtgggacacctgcaggatctctctgccctgactgtggataccctgaaagtcctttctgctgttgacactttgcaagaggatgaggctctcctggccaagagaaagcattctacttgcaaaaaacttccccacagctggagcaatgtcatctgtgcagaggttctaggcagcatggagatcgctggagagaagaaataccagtattatagcatgccctcttctttgctgaggagcctggctggaggccggcatcccccaagagtgcagaggggggcacttcttgagattacaaacagtaaaagagaggctacaaatgtaagaaatgaccaggaaaggcaagaaacacaaagtagtatagtggtttctggggtgtctcctaacaggcaagcacactcaaagtatggccagtttcttctggtcccctctaatctaaagcgagttcctttttcagcagaaactgtcttgcctctgtccagaccctctgtgccagatgtgctggcaactgaacaggacatccagactgaggttcttgttcatctgactgggcagaccccagttgtctctgactgggcatcagtggatgaacccaaggaaaagcacgagcctattgctcacttactggatggacaagacaaggcagagcaagtgctacccactttgagttgcacacctgaacccatgacaatgagctcccctctttcccaagccaagatcatgcaaactggaggtggatatgtaaactgggcattttcagaaggtgatgaaactggtgtgtttagcatcaagaaaaagtggcaaacctgcttgccctccacttgtgacagtgattcctctcggagtgaacagcaccagaagcaggcccaggacagctccctatctgataactcaacaagatcggcccagagtagtgaatgctcagaggtgggaccatggcttcagccaaacacatccttttggatcaatcctctccgcagatacaggcccttcgctaggagtcatagttttagattccataaggaggagaaattgatgaagatctgtaagattaaaaatctttcaggctcttcagaaatagggcagggagcatgggtcaaagcgaaaatgctaaccaaagacaggagactgtcaaagaaaaagaagaatactcaaggactccaggtgccaatcataacagtcaatgcctgctctcagagtgaccagttgaatccagagccaggagaaaacagcatctctgaagaggagtacagcaagaactggttcacagtgtccaaatttagtcacacaggtgtagaaccttacatacatcagaaaatgaaaactaaagaaattggacaatgtgctatacaaatcagtgattacctaaagcagtctcaagaggatctcagcaaaaactctttgtggaattccaggagcaccaacctcaataggaactccctgctgaaaagttcaattggagttgacaagatctcagcctccttaaaaagccctcaagagcctcaccatcattattcagccattgaaaggaataatttaatgaggctttctcagaccataccatttacaccagtccaactgtttgcaggagaagaaataactgtctacaggttggaggagagttcccctttaaaccttgataaaagcatgtcctcttggtctcagcgtgggagagcggcaatgatccaggtattgtcccgagaggagatggatgggggcctccgtaaagctatgagagtcgtcagcacttggtctgaggatgacattctcaagccgggacaagttttcattgtcaagtcctttcttcctgaggttgtgcggacatggcataaaatcttccaggagagcactgtgcttcatctttgcctcagggaaattcaacaacaaagagctgctcaaaaattgatctataccttcaaccaagtgaaaccacaaaccataccctacacaccaaggttcctggaagttttcttaatctactgccattcagccaaccagtggttgaccattgagaagtatatgacaggggagttccggaagtataacaacaacaatggtgatgaaatcacccccaccaacaccctggaggagctgatgttggctttctctcactggacctatgagtacactcggggagagctgctggttttagatttgcaaggtgttggagaaaatttgacagatccatctgttataaaacctgaagtcaaacaatcaagaggaatggtgtttggaccggccaatttgggggaagatgcaattagaaacttcattgcaaaacatcattgtaactcctgctgccggaagctcaaactcccggatttaaaaagaaatgactattcccctgaaaggataaattccacctttggacttgagataaaaatagaatcagctgaggagcctccagcaagggagacgggtagaaattccccagaagatgatatgcaactataaaaagggaggagcaagaagatcccagtgcttgccctgcctgccaggaactctgtgataacatagattgatcaacgtgatgttgattacatcagcgtctccttgggacacgccttctgagcctcacatctccttctgttcaaaggcctcattggtatatgatcaatgggttctcctagacactgacctctgtccagggcactttgcagctccatcctcaagttccacacgaagatgcttggatgagtcagctgggaatattgttcttgtgtacctcattgctttagctggtcacttggaactttggagcagaatcctgcacattaaaggatggggttgggggggatacatttattttattttctcactatgtatgcagactggaccccctactactatttgtcacctcacccacagattgtatttatgtctatatatatgttcataaaaagttatgtgatttcctcctctgtcttttccacaacataggactttgaatagcaatgataggaaaaacaatggaacaagggtgggtttgcacagattggagcacattcctgcacaaactaccaagtatactggtgaaatctcgatgggtttcagatattgtcagtgaatcatatgatgcctggatatttcaggtttctgtaaaagaaagggaaacctaaaacaaatacccttccatatataatatatatggaatatgtatattatatatatttttatatatataatatatatggaatatatatattatatatataaaatacatatggaatatatatattttatatatatatatatatatttttatttttgagatggagtttcactctttttacccaggctggagtgcaatgatgcgatctcactgcaacctctgcctcccgggcttgagcgattcttgtgtctcagtcttccgggtagctgggactacaggtgtgcaccactatgcctggctaattttgtatttttagtagagatggggtttcaccatgttggccaggctggtctcaaactcctgacctcagatgatccacctgccttggcttcccaaagtgctgggattacaggcgtgagccactgcgcctggcctttttttttttttttttaaacgagaacaagaatatgaagaactggaaatcattaagaaagggtttcccttccttaaagctcaggggtactattagttaggagttgactaactcaacctgtaaaacaccactcctccttccaaagttgtatatataatattgcaggttaaattactttatgtcaggtcctatgaagaaagatacggtttcagactgaaaacatgtttcacaggtgtttgcttccttccagagcagagttccctattcccctggcataaagaatgtatatatattttgaaatatggctgagaacatgtcattggtttgtgaggcctaaggtgaagcactcctggcagccacactgtgtagtgtatttgagggatcagtcatccctcttgtatgctgggcctggttgccctacctcgaacaagcaccagcttttcacacaaggagagatgtggggctgggagtcctctccccatcctattgcatctcctttcttattataagctgttccagttcacaggcagcaaacctcctgggtttgaaaaattccaacttatttttatctttaatcctgacattagctgacttgctagtgagcttgctttaaaaatctacactcttgcattcttaggcatacaggggaaatgttgaaaaggaaggtggaaaaccaagaatttagtttgccaatgattgcctctgattcttgtaagtttgagttccacaagggctaatttattccccttttacttgggttttggggtggtggaaagcgggaaatttgggtgatttgttgattggcaatgaggataaaatgttaatacttttttggggacttaacaactttatcctattctacaagtcagtaaaggaacaattggtactcacctcagtgctgcactcaactatggaaagaggcagagtttgcttgcccaattgccaaactaaagacatcagttcattggtcaaatatttgttacctggaatggaacttgaaagcaaatacatttggatttcaaatttc

SEQ ID NO: 32195 - DNA, 8437 bp, Homo sapiens
  source 1..8437: mol_type = unassigned DNA
actacaaaggatgtctgtgatgacagtggccatcccatttgatcctcgttattcttcttttatcgaaggaaactgagagtcaccttcttttctaggcagttaggtaactgaagccgaaaggtattgtgacagatccactgggctgtaaaaggcagcgtgtggaggtggagcccagagtttctgcctccacagttaaaagctcagacagggctttgggagcagggcctgcaaatcaaagatgaaagaacaacctgtcttggagcgcttgcagtcccagaaatcctggattaaaggagtatttgacaagagagaatgtagcacaatcatacccagctcaaaaaatcctcacagatgtactccagtatgccaagtctgccagaatttaatcaggtgttactgtggccgactgattggagaccatgctgggatagattattcctggaccatctcagctgccaagggtaaagaaagtgaacaatggtctgttgaaaagcacacaacgaaaagcccaacagatacttttggcacgattaatttccaagatggagagcacacccatcatgccaagtatattagaacttcttatgatacaaaactggatcatctgttacatttaatgttgaaagagtggaaaatggaactgcccaagcttgtgatctcagtccatgggggcatccagaactttactatgccctctaaatttaaagagattttcagccaaggtttggttaaagctgcagagacaacaggagcgtggataataactgaaggcatcaatacaggagtgtccaagcatgttggggatgccttgaaatcccattcctctcattccttgagaaaaatctggacagttggaatccctccttggggtgtcattgagaaccagagagaccttattggaaaagatgtggtgtgcctgtaccagactctggataaccccctcagcaagctcacaacactcaacagcatgcactcgcacttcatcctgtctgatgatgggaccgtgggcaagtatggaaatgaaatgaagctcagaaggaacctggagaagtacctctctctgcagaaaatacactgccgctcaagacaaggcgtgccggtcgtggggctggtggtggaaggcggtcccaacgtcatcctgtcagtgtgggagactgtcaaggacaaggacccagtggtggtgtgtgagggcacaggtagggcggctgacctcctggccttcacacacaaacacctggcagatgaagggatgctgcgacctcaggtgaaagaggagatcatctgcatgattcagaacactttcaactttagtcttaaacagtccaagcaccttttccaaattctaatggagtgtatggttcacagggattgtattaccatatttgatgctgactctgaagagcagcaagacctggacttagcaatcctaacagctttgctgaagggcacaaatttatcagcgtcagagcaattaaatctggcaatggcttgggacagggtggacattgccaagaaacatatcctaatttatgaacaacactggaagcctgatgccctggaacaagcaatgtcagatgctttagtgatggatcgggtggattttgtgaagctcttaatagaatatggagtgaacctccatcgctttcttaccatccctcgactggaagagctctacaatacaaaacaaggacctactaatacactcttgcatcatctcgtccaagatgtgaaacagcatacccttctttcaggctaccgaataaccttgattgacattggattagtagtagaatacctcattggtagagcatatcgcagcaactacactagaaaacatttcagagccctctacaacaacctctacagaaaatacaagcaccagagacactcctcaggaaatagaaatgagtctgcagaaagtacgctgcactcccagttcattagaactgcacagccatacaaattcaaggaaaagtctatagtccttcataaatcaaggaagaagtcaaaagaacaaaatgtatcagatgaccctgagtctactggctttctttacccttacaatgacctgctggtttgggctgtgctgatgaaaaggcagaagatggctatgttcttctggcagcatggagaggaggccacggttaaagccgtgattgcgtgtatcctctaccgggcaatggcccatgaagctaaggagagtcacatggtggatgatgcctcagaagagttgaagaattactcaaaacagtttggccagctggctctggacttgttggagaaggcattcaagcagaatgagcgcatggccatgacgctgttgacgtatgaactcaggaactggagcaattcgacctgccttaaactggccgtgtcgggaggattacgaccctttgtttcacatacttgtacccagatgctactgacagacatgtggatggggaggctgaaaatgaggaaaaactcttggttaaagattattataagcattattttaccacccaccattttgacactggaatttaaaagcaaagctgagatgtcacatgttccccagtcccaggacttccaatttatgtggtattacagtgaccagaacgccagcagttccaaagaaagtgcttctgtgaaagagtatgatttggaaaggggccatgatgagaaactggatgaaaatcagcattttggtttggaaagtgggcaccaacaccttccgtggaccaggaaagtctatgagttctacagtgctccaattgtcaagttttggttttatacgatggcgtatttggcattcctcatgctgttcacttacaccgtgttggtggagatgcagccccagcccagcgtgcaggagtggcttgttagcatttacatcttcaccaatgctattgaggtggtcagggagatctgtatttcagaacctgggaagtttacccaaaaggtgaaggtatggattagtgagtactggaacttaacagaaactgtggccattggcctgttttcagctggcttcgtccttcgatggggtgaccctccttttcacacagcgggaagactgatctactgcatagacatcatattctggttctcacggctcctggacttctttgctgtgaatcaacatgcaggtccatatgtgaccatgattgcaaaaatgacagcaaacatgttctatattgtgatcatcatggccatagtcctgctgagctttggagtggcacgcaaggccatcctttcgccaaaagagccaccatcttggagtctagctcgagatattgtatttgagccatactggatgatatacggagaagtctatgctggagaaatagatgtttgttcaagccagccatcctgccctcctggttcttttcttactccattcttgcaagctgtctacctcttcgtgcaatatatcatcatggtgaacctgttgattgctttcttcaacaacgtttacttagatatggaatccatttcaaataacctgtggaaatacaaccgctatcgctacatcatgacctaccacgagaagccctggctgcccccacctctcatcctgctgagccacgtgggccttctcctccgccgcctgtgctgtcatcgagctcctcacgaccaagaagagggtgacgttggattaaaactctacctcagtaaggaggatctgaaaaaacttcatgattttgaggagcagtgcgtggaaaaatacttccatgagaagatggaagatgtgaattgtagttgtgaggaacgaatccgagtgacatcagaaagggttacagagatgtacttccagctgaaagaaatgaatgaaaaggtgtcttttataaaggactccttactgtctttggacagccaggtgggacacctgcaggatctctctgccctgactgtggataccctgaaagtcctttctgctgttgacactttgcaagaggatgaggctctcctggccaagagaaagcattctacttgcaaaaaacttccccacagctggagcaatgtcatctgtgcagaggttctaggcagcatggagatcgctggagagaagaaataccagtattatagcatgccctcttctttgctgaggagcctggctggaggccggcatcccccaagagtgcagaggggggcacttcttgagattacaaacagtaaaagagaggctacaaatgtaagaaatgaccaggaaaggcaagaaacacaaagtagtatagtggtttctggggtgtctcctaacaggcaagcacactcaaagtatggccagtttcttctggtcccctctaatctaaagcgagttcctttttcagcagaaactgtcttgcctctgtccagaccctctgtgccagatgtgctggcaactgaacaggacatccagactgaggttcttgttcatctgactgggcagaccccagttgtctctgactgggcatcagtggatgaacccaaggaaaagcacgagcctattgctcacttactggatggacaagacaaggcagagcaagtgctacccactttgagttgcacacctgaacccatgacaatgagctcccctctttcccaagccaagatcatgcaaactggaggtggatatgtaaactgggcattttcagaaggtgatgaaactggtgtgtttagcatcaagaaaaagtggcaaacctgcttgccctccacttgtgacagtgattcctctcggagtgaacagcaccagaagcaggcccaggacagctccctatctgataactcaacaagatcggcccagagtagtgaatgctcagaggtgggaccatggcttcagccaaacacatccttttggatcaatcctctccgcagatacaggcccttcgctaggagtcatagttttagattccataaggaggagaaattgatgaagatctgtaagattaaaaatctttcaggctcttcagaaatagggcagggagcatgggtcaaagcgaaaatgctaaccaaagacaggagactgtcaaagaaaaagaagaatactcaaggactccaggtgccaatcataacagtcaatgcctgctctcagagtgaccagttgaatccagagccaggagaaaacagcatctctgaagaggagtacagcaagaactggttcacagtgtccaaatttagtcacacaggtgtagaaccttacatacatcagaaaatgaaaactaaagaaattggacaatgtgctatacaaatcagtgattacctaaagcagtctcaagaggatctcagcaaaaactctttgtggaattccaggagcaccaacctcaataggaactccctccatgtaattaaaatgccaatctcctctctaatttcagagatctcagcctccttaaaaagccctcaagagcctcaccatcattattcagccattgaaaggaataatttaatgaggctttctcagaccataccatttacaccagtccaactgtttgcaggagaagaaataactgtctacaggttggaggagagttcccctttaaaccttgataaaagcatgtcctcttggtctcagcgtgggagagcggcaatgatccaggtattgtcccgagaggagatggatgggggcctccgtaaagctatgagagtcgtcagcacttggtctgaggatgacattctcaagccgggacaagttttcattgtcaagtcctttcttcctgaggttgtgcggacatggcataaaatcttccaggagagcactgtgcttcatctttgcctcagggaaattcaacaacaaagagctgctcaaaaattgatctataccttcaaccaagtgaaaccacaaaccataccctacacaccaaggttcctggaagttttcttaatctactgccattcagccaaccagtggttgaccattgagaagtatatgacaggggagttccggaagtataacaacaacaatggtgatgaaatcacccccaccaacaccctggaggagctgatgttggctttctctcactggacctatgagtacactcggggagagctgctggttttagatttgcaaggtgttggagaaaatttgacagatccatctgttataaaacctgaagtcaaacaatcaagaggaatggtgtttggaccggccaatttgggggaagatgcaattagaaacttcattgcaaaacatcattgtaactcctgctgccggaagctcaaactcccggatttaaaaagaaatgactattcccctgaaaggataaattccacctttggacttgagataaaaatagaatcagctgaggagcctccagcaagggagacgggtagaaattccccagaagatgatatgcaactataaaaagggaggagcaagaagatcccagtgcttgccctgcctgccaggaactctgtgataacatagattgatcaacgtgatgttgattacatcagcgtctccttgggacacgccttctgagcctcacatctccttctgttcaaaggcctcattggtatatgatcaatgggttctcctagacactgacctctgtccagggcactttgcagctccatcctcaagttccacacgaagatgcttggatgagtcagctgggaatattgttcttgtgtacctcattgctttagctggtcacttggaactttggagcagaatcctgcacattaaaggatggggttgggggggatacatttattttattttctcactatgtatgcagactggaccccctactactatttgtcacctcacccacagattgtatttatgtctatatatatgttcataaaaagttatgtgatttcctcctctgtcttttccacaacataggactttgaatagcaatgataggaaaaacaatggaacaagggtgggtttgcacagattggagcacattcctgcacaaactaccaagtatactggtgaaatctcgatgggtttcagatattgtcagtgaatcatatgatgcctggatatttcaggtttctgtaaaagaaagggaaacctaaaacaaatacccttccatatataatatatatggaatatgtatattatatatatttttatatatataatatatatggaatatatatattatatatataaaatacatatggaatatatatattttatatatatatatatatatttttatttttgagatggagtttcactctttttacccaggctggagtgcaatgatgcgatctcactgcaacctctgcctcccgggcttgagcgattcttgtgtctcagtcttccgggtagctgggactacaggtgtgcaccactatgcctggctaattttgtatttttagtagagatggggtttcaccatgttggccaggctggtctcaaactcctgacctcagatgatccacctgccttggcttcccaaagtgctgggattacaggcgtgagccactgcgcctggcctttttttttttttttttaaacgagaacaagaatatgaagaactggaaatcattaagaaagggtttcccttccttaaagctcaggggtactattagttaggagttgactaactcaacctgtaaaacaccactcctccttccaaagttgtatatataatattgcaggttaaattactttatgtcaggtcctatgaagaaagatacggtttcagactgaaaacatgtttcacaggtgtttgcttccttccagagcagagttccctattcccctggcataaagaatgtatatatattttgaaatatggctgagaacatgtcattggtttgtgaggcctaaggtgaagcactcctggcagccacactgtgtagtgtatttgagggatcagtcatccctcttgtatgctgggcctggttgccctacctcgaacaagcaccagcttttcacacaaggagagatgtggggctgggagtcctctccccatcctattgcatctcctttcttattataagctgttccagttcacaggcagcaaacctcctgggtttgaaaaattccaacttatttttatctttaatcctgacattagctgacttgctagtgagcttgctttaaaaatctacactcttgcattcttaggcatacaggggaaatgttgaaaaggaaggtggaaaaccaagaatttagtttgccaatgattgcctctgattcttgtaagtttgagttccacaagggctaatttattccccttttacttgggttttggggtggtggaaagcgggaaatttgggtgatttgttgattggcaatgaggataaaatgttaatacttttttggggacttaacaactttatcctattctacaagtcagtaaaggaacaattggtactcacctcagtgctgcactcaactatggaaagaggcagagtttgcttgcccaattgccaaactaaagacatcagttcattggtcaaatatttgttacctggaatggaacttgaaagcaaatacatttggatttcaaatttc

SEQ ID NO: 32196 - DNA, 7263 bp, Homo sapiens
  source 1..7263: mol_type = unassigned DNA
gcgccgctcacgtggtccgtccccagccccgtcgccggcggaggcgggcgcgggcgcgtccctgtggccagtcacccggaggagttggtcgcacaattatgaaagactcggcttctgctgctagcgccggagctgagttagttctgagaaggtttccctgggcgttccttgtccggcggcctctgctgccgcctccggagacgcttcccgatagatggctacaggccgcggaggaggaggaggtggagttgctgcccttccggagtccgccccgtgaggagaatgtcccagaaatcctggatagaaagcactttgaccaagagggaatgtgtatatattataccaagttccaaggaccctcacagatgccttccaggatgtcaaatttgtcagcaactcgtcaggtgtttttgtggtcgcttggtcaagcaacatgcttgttttactgcaagtcttgccatgaaatactcagatgtgaaattgggtgaccattttaatcaggcaatagaagaatggtctgtggaaaagcatacagaacagagcccaacggatgcttatggagtcataaattttcaagggggttctcattcctacagagctaagtatgtgaggctatcatatgacaccaaacctgaagtcattctgcaacttctgcttaaagaatggcaaatggagttacccaaacttgttatctctgtacatgggggcatgcagaaatttgagcttcacccacgaatcaagcagttgcttggaaaaggtcttattaaagctgcagttacaactggagcctggattttaactggaggagtaaacacaggtgtggcaaaacatgttggagatgccctcaaagaacatgcttccagatcatctcgaaagatttgcactatcggaatagctccatggggagtgattgaaaacagaaatgatcttgttgggagagatgtggttgctccttatcaaaccttattgaaccccctgagcaaattgaatgttttgaataatctgcattcccatttcatattggtggatgatggcactgttggaaagtatggggcggaagtcagactgagaagagaacttgaaaaaactattaatcagcaaagaattcatgctaggattggccagggtgtccctgtggtggcacttatatttgagggtgggccaaatgttatcctcacagttcttgaataccttcaggaaagcccccctgttccagtagttgtgtgtgaaggaacaggcagagctgcagatctgctagcgtatattcataaacaaacagaagaaggagggaatcttcctgatgcagcagagcccgatattatttccactatcaaaaaaacatttaactttggccagaatgaagcacttcatttatttcaaacactgatggagtgcatgaaaagaaaggagcttatcactgttttccatattgggtcagatgaacatcaagatatagatgtagcaatacttactgcactgctaaaaggtactaatgcatctgcatttgaccagcttatccttacattggcatgggatagagttgacattgccaaaaatcatgtatttgtttatggacagcagtggctggttggatccttggaacaagctatgcttgatgctcttgtaatggatagagttgcatttgtaaaacttcttattgaaaatggagtaagcatgcataaattccttaccattccgagactggaagaactttacaacactaaacaaggtccaactaatccaatgctgtttcatcttgttcgagacgtcaaacagggaaatcttcctccaggatataagatcactctgattgatataggacttgttattgaatatctcatgggaggaacctacagatgcacctatactaggaaacgttttcgattaatatataatagtcttggtggaaataatcggaggtctggccgaaatacctccagcagcactcctcagttgcgaaagagtcatgaatcttttggcaatagggcagataaaaaggaaaaaatgaggcataaccatttcattaagacagcacagccctaccgaccaaagattgatacagttatggaagaaggaaagaagaaaagaaccaaagatgaaattgtagacattgatgatccagaaaccaagcgctttccttatccacttaatgaacttttaatttgggcttgccttatgaagaggcaggtcatggcccgttttttatggcaacatggtgaagaatcaatggctaaagcattagttgcctgtaagatctatcgttcaatggcatatgaagcaaagcagagtgacctggtagatgatacttcagaagaactaaaacagtattccaatgattttggtcagttggccgttgaattattagaacagtccttcagacaagatgaaaccatggctatgaaattgctcacttatgaactgaagaactggagtaattcaacctgccttaagttagcagtttcttcaagacttagaccttttgtagctcacacctgtacacaaatgttgttatctgatatgtggatgggaaggctgaatatgaggaaaaattcctggtacaaggtcatactaagcattttagttccacctgccatattgctgttagagtataaaactaaggctgaaatgtcccatatcccacaatctcaagatgctcatcagatgacaatggatgacagcgaaaacaactttcagaacataacagaagagatccccatggaagtgtttaaagaagtacggattttggatagtaatgaaggaaagaatgagatggagatacaaatgaaatcaaaaaagcttccaattacgcgaaagttttatgccttttatcatgcaccaattgtaaaattctggtttaacacgttggcatatttaggatttctgatgctttatacatttgtggttcttgtacaaatggaacagttaccttcagttcaagaatggattgttattgcttatatttttacttatgccattgagaaagtccgtgagatctttatgtctgaagctgggaaagtaaaccagaagattaaagtatggtttagtgattacttcaacatcagtgatacaattgccataatttctttcttcattggatttggactaagatttggagcaaaatggaactttgcaaatgcatatgataatcatgtttttgtggctggaagattaatttactgtcttaacataatattttggtatgtgcgtttgctagattttctagctgtaaatcaacaggcaggaccttatgtaatgatgattggaaaaatggtggccaatatgttctacattgtagtgattatggctcttgtattacttagttttggtgttcccagaaaggcaatactttatcctcatgaagcaccatcttggactcttgctaaagatatagtttttcacccatactggatgatttttggtgaagtttatgcatacgaaattgatgtgtgtgcaaatgattctgttatccctcaaatctgtggtcctgggacgtggttgactccatttcttcaagcagtctacctctttgtacagtatatcattatggttaatcttcttattgcatttttcaacaatgtgtatttacaagtgaaggcaatttccaatattgtatggaagtaccagcgttatcattttattatggcttatcatgagaaaccagttctgcctcctccacttatcattcttagccatatagtttctctgttttgctgcatatgtaagagaagaaagaaagataagacttccgatggaccaaaacttttcttaacagaagaagatcaaaagaaacttcatgattttgaagagcagtgtgttgaaatgtatttcaatgaaaaagatgacaaatttcattctgggagtgaagagagaattcgtgtcacttttgaaagagtggaacagatgtgcattcagattaaagaagttggagatcgtgtcaactacataaaaagatcattacaatcattagattctcaaattggccatttgcaagatctttcagccctgacggtagatacattaaaaacactcactgcccagaaagcgtcggaagctagcaaagttcataatgaaatcacacgagaactgagcatttccaaacacttggctcaaaaccttattgatgatggtcctgtaagaccttctgtatggaaaaagcatggtgttgtaaatacacttagctcctctcttcctcaaggtgatcttgaaagtaataatccttttcattgtaatattttaatgaaagatgacaaagatccccagtgtaatatatttggtcaagacttacctgcagtaccccagagaaaagaatttaattttccagaggctggttcctcttctggtgccttattcccaagtgctgtttcccctccagaactgcgacagagactacatggggtagaactcttaaaaatatttaataaaaatcaaaaattaggcagttcatctactagcataccacatctgtcatccccaccaaccaaattttttgttagtacaccatctcagccaagttgcaaaagccacttggaaactggaaccaaagatcaagaaactgtttgctctaaagctacagaaggagataatacagaatttggagcatttgtaggacacagagatagcatggatttacagaggtttaaagaaacatcaaacaagataaaaatactatccaataacaatacttctgaaaacactttgaaacgagtgagttctcttgctggatttactgactgtcacagaacttccattcctgttcattcaaaacaagcagaaaaaatcagtagaaggccatctaccgaagacactcatgaagtagattccaaagcagctttaataccggattggttacaagatagaccatcaaacagagaaatgccatctgaagaaggaacattaaatggtctcacttctccatttaagccagctatggatacaaattactattattcagctgtggaaagaaataacttgatgaggttatcacagagcattccatttacacctgtgcctccaagaggggagcctgtcacagtgtatcgtttggaagagagttcacccaacatactaaataacagcatgtcttcttggtcacaactaggcctctgtgccaaaatagagtttttaagcaaagaggagatgggaggaggtttacgaagagctgtcaaagtacagtgtacctggtcagaacatgatatcctcaaatcagggcatctttatattatcaaatcttttcttccagaggtggttaatacatggtcaagtatttacaaagaagatacagttctgcatctctgtctgagagaaattcaacaacagagagcagcacaaaagcttacgtttgcctttaatcaaatgaaacccaaatccataccatattctccaaggttccttgaagttttcctgctgtattgccattcagcaggacagtggtttgctgtggaagaatgtatgactggagaatttagaaaatacaacaataataatggagatgagattattccaactaatactctggaagagatcatgctagcctttagccactggacttacgaatatacaagaggggagttactggtacttgatttgcaaggtgttggtgaaaatttgactgacccatctgtgataaaagcagaagaaaagagatcctgtgatatggtttttggcccagcaaatctaggagaagatgcaattaaaaacttcagagcaaaacatcactgtaattcttgctgtagaaagcttaaacttccagatctgaagaggaatgattatacgcctgataaaattatatttcctcaggatgagccttcagatttgaatcttcagcctggaaattccaccaaagaatcagaatcaactaattctgttcgtctgatgttataatattaatattactgaatcattggttttgcctgcacctcacagaaatgttactgtgtcacttttccctcgggaggaaattgtttggtaatatagaaaggtgtatgcaagttgaatttgctgactccagcacagttaaaaggtcaatattcttttgacctgattaatcagtcagaaagtccctataggatagagctggcagctgagaaattttaaaggtaattgataattagtatttataactttttaaagggctctttgtatagcagaggatctcatttgactttgttttgatgagggtgatgctctctcttatgtggtacaataccattaaccaaaggtaggtgtccatgcagattttattggcagctgttttattgccattcaactagggaaatgaagaaatcacgcagccttttggttaaatggcagtcaaaattttcctcagtgtatttagtgtgttcagtgatgatatcactggttcccaactagatgcttgttggccacgggaagggaaatgacttgttctaattctaggttcacagaggtatgagaagcctgaactgaagaccattttcaagagggacggtatttatgaatcagggttaggctccatatttaaagatagagccagtttttttttttaaatagaacccaaattgtgtaaaaatgttaattgggttttttaaacattgttttatcaagtcactgttaagtagaagaaagccatggtaaactgatacataacctaaattataaaagcagaaacctaactcactcgtcaagggaagttaccttttgaggaaagttaaagtacttttttccctatctgtatctatagcaacaacccagaacttacaaacttctccaaagattttattgattgttatatcaaatcagaatgtaaacatgaactcttgcatatatttaaaattgtgttggaacatttgaacatgaatgctgtttgtggtacttaagaaattaattcagttggattatcattatgtgatactggcagattgcagtgcaaccttatgccaataaaatgtaatttaacagccccagatattgttgaatattcaacaataacaagaaaagcttttcatctaagttttatgctttaattttttttctttttttttctttttcttttgtttccttggtactaattttaatttttatttggaagggagcagtataaagcttatttgtatttagtagtgtatctcatagatacagacaaggcaagagatgataagctgtttaaatagtgtttaatattgattgggggtggggagaaagaaaaagtgtattacttaaagatactatatacgttttgtatatcattaaatctttaaaagaaatgaaataaatttattgtttaca

SEQ ID NO: 32197 - DNA, 5621 bp, Homo sapiens
  source 1..5621: mol_type = unassigned DNA
aagaaaatcctgcttgacaaaaaccgtcacttaggaaaagatgtcctttcgggcagccaggctcagcatgaggaacagaaggaatgacactctggacagcacccggaccctgtactccagcgcgtctcggagcacagacttgtcttacagtgaaagcgacttggtgaattttattcaagcaaattttaagaaacgagaatgtgtcttctttaccaaagattccaaggccacggagaatgtgtgcaagtgtggctatgcccagagccagcacatggaaggcacccagatcaaccaaagtgagaaatggaactacaagaaacacaccaaggaatttcctaccgacgcctttggggatattcagtttgagacactggggaagaaagggaagtatatacgtctgtcctgcgacacggacgcggaaatcctttacgagctgctgacccagcactggcacctgaaaacacccaacctggtcatttctgtgaccgggggcgccaagaacttcgccctgaagccgcgcatgcgcaagatcttcagccggctcatctacatcgcgcagtccaaaggtgcttggattctcacgggaggcacccattatggcctgatgaagtacatcggggaggtggtgagagataacaccatcagcaggagttcagaggagaatattgtggccattggcatagcagcttggggcatggtctccaaccgggacaccctcatcaggaattgcgatgctgagggctattttttagcccagtaccttatggatgacttcacaagagatccactgtatatcctggacaacaaccacacacatttgctgctcgtggacaatggctgtcatggacatcccactgtcgaagcaaagctccggaatcagctagagaagtatatctctgagcgcactattcaagattccaactatggtggcaagatccccattgtgtgttttgcccaaggaggtggaaaagagactttgaaagccatcaatacctccatcaaaaataaaattccttgtgtggtggtggaaggctcgggccagatcgctgatgtgatcgctagcctggtggaggtggaggatgccctgacatcttctgccgtcaaggagaagctggtgcgctttttaccccgcacggtgtcccggctgcctgaggaggagactgagagttggatcaaatggctcaaagaaattctcgaatgttctcacctattaacagttattaaaatggaagaagctggggatgaaattgtgagcaatgccatctcctacgctctatacaaagccttcagcaccagtgagcaagacaaggataactggaatgggcagctgaagcttctgctggagtggaaccagctggacttagccaatgatgagattttcaccaatgaccgccgatgggagtctgctgaccttcaagaagtcatgtttacggctctcataaaggacagacccaagtttgtccgcctctttctggagaatggcttgaacctacggaagtttctcacccatgatgtcctcactgaactcttctccaaccacttcagcacgcttgtgtaccggaatctgcagatcgccaagaattcctataatgatgccctcctcacgtttgtctggaaactggttgcgaacttccgaagaggcttccggaaggaagacagaaatggccgggacgagatggacatagaactccacgacgtgtctcctattactcggcaccccctgcaagctctcttcatctgggccattcttcagaataagaaggaactctccaaagtcatttgggagcagaccaggggctgcactctggcagccctgggagccagcaagcttctgaagactctggccaaagtgaagaacgacatcaatgctgctggggagtccgaggagctggctaatgagtacgagacccgggctgttgagctgttcactgagtgttacagcagcgatgaagacttggcagaacagctgctggtctattcctgtgaagcttggggtggaagcaactgtctggagctggcggtggaggccacagaccagcatttcatcgcccagcctggggtccagaattttctttctaagcaatggtatggagagatttcccgagacaccaagaactggaagattatcctgtgtctgtttattatacccttggtgggctgtggctttgtatcatttaggaagaaacctgtcgacaagcacaagaagctgctttggtactatgtggcgttcttcacctcccccttcgtggtcttctcctggaatgtggtcttctacatcgccttcctcctgctgtttgcctacgtgctgctcatggatttccattcggtgccacacccccccgagctggtcctgtactcgctggtctttgtcctcttctgtgatgaagtgagacagtggtacgtaaatggggtgaattattttactgacctgtggaatgtgatggacacgctggggcttttttacttcatagcaggaattgtatttcggctccactcttctaataaaagctctttgtattctggacgagtcattttctgtctggactacattattttcactctaagattgatccacatttttactgtaagcagaaacttaggacccaagattataatgctgcagaggatgctgatcgatgtgttcttcttcctgttcctctttgcggtgtggatggtggcctttggcgtggccaggcaagggatccttaggcagaatgagcagcgctggaggtggatattccgttcggtcatctacgagccctacctggccatgttcggccaggtgcccagtgacgtggatggtaccacgtatgactttgcccactgcaccttcactgggaatgagtccaagccactgtgtgtggagctggatgagcacaacctgccccggttccccgagtggatcaccatccccctggtgtgcatctacatgttatccaccaacatcctgctggtcaacctgctggtcgccatgtttggctacacggtgggcaccgtccaggagaacaatgaccaggtctggaagttccagaggtacttcctggtgcaggagtactgcagccgcctcaatatccccttccccttcatcgtcttcgcttacttctacatggtggtgaagaagtgcttcaagtgttgctgcaaggagaaaaacatggagtcttctgtctgctgtttcaaaaatgaagacaatgagactctggcatgggagggtgtcatgaaggaaaactaccttgtcaagatcaacacaaaagccaacgacacctcagaggaaatgaggcatcgatttagacaactggatacaaagcttaatgatctcaagggtcttctgaaagagattgctaataaaatcaaataaaactgtatgaactctaatggagaaaaatctaattatagcaagatcatattaaggaatgctgatgaacaattttgctatcgactactaaatgagagattttcagacccctgggtacatggtggatgattttaaatcaccctagtgtgctgagaccttgagaataaagtgtgtgattggtttcatacttgaagacggatataaaggaagaatatttcctttatgtgtttctccagaatggtgcctgtttctctctgtgtctcaatgcctgggactggaggttgatagtttaagtgtgttcttaccgcctcctttttcctttaatcttatttttgatgaacacatatataggagaacatctatcctatgaataagaacctggtcatgctttactcctgtattgttattttgttcatttccaattgattctctacttttcccttttttgtattatgtgactaattagttggcatattgttaaaagtctctcaaattaggccagattctaaaacatgctgcagcaagaggaccccgctctcttcaggaaaagtgttttcatttctcaggatgcttcttacctgtcagaggaggtgacaaggcagtctcttgctctcttggactcaccaggctcctattgaaggaaccacccccattcctaaatatgtgaaaagtcgcccaaaatgcaaccttgaaaggcactactgactttgttcttattggatactcctcttattatttttccattaaaaataatagctggctattatagaaaatttagaccatacagagatgtagaaagaacataaattgtccccattaccttaaggtaatcactgctaacaatttctggatggtttttcaagtctattttttttctatgtatgtctcaattctctttcaaaattttacagaatgttatcatactacatatatactttttatgtaagctttttcacttagtattttatcaaatatgtttttattatattcatagccttcttaaacattatatcaataattgcataataggcaacctctagcgattaccataattttgctcattgaaggctatctccagttgatcattgggatgagcatctttgtgcatgaatcctattgctgtatttgggaaaattttccaaggttagattccaataaatatctatttattattaaatattaaaatatctatttattattaaaaccatttataaggctttttcataaatgtatagcaaataggaattattaacttgagcataagatatgagatacatgaacctgaactattaaaataaaatattatatttaacccttagtttaagaagaagtcaatatgcttatttaaatattatggatggtgggcagatcacttgaggtcaggagttcgagaccagcctggccaacatggcaaaaccacatctctactaaaaataaaaaaattagctgggtgtggtggtgcactcctgtaatcccagctactcagaaggctgaggtacaagaattgctggaacctgggaggcggaggttgcagtgaaccaagattgcaccactgcactccagccggggtgacagagtgagactccgactgaaaataaataaataaataaataaataaataaataaatattatggatggtgaagggaatggtatagaattggagagattatcttactgaacacctgtagtcccagctttctctggaagtggtcgtatttgagcaggatgtgcacaaggcaattgaaatgcccataattagtttctcagctttgaatacactataaactcactggctgaaggaggaaattttagaaggaagctactaaaagatctaatttgaaaaactacaaaagcattaactaaaaaagtttattttccttttgtctgggcagtagtgaaaataactactcacaacattcactatgtttgcaaggaattaacacaaataaaagatgcctttttacttaaacaccaagacagaaaacttgcccaatactgagaagcaacttgcattagagagggaactgttaaatgttttcaacccagttcatctggtggatgtttttgcaggttactctgagaattttgcttatgaaaaatcattatttttagtgtagttcacaataatgtattgaacatacttctaatcaaaggtgctatgtccttgtgtatggtactaaatgtgtcctgtgtacttttgcacaactgagaatcctgcagcttggtttaatgagtgtgttcatgaaataaataatggaggaattgtca

SEQ ID NO: 32198 - DNA, 904 bp, Homo sapiens
  source 1..904: mol_type = unassigned DNA
ctgcctttctccaccagagactcttcctcagggaggacttggtgaattttattcaagcaaattttaagaaacgagaatgtgtcttctttaccaaagattccaaggccacgctcaatgaaatccttccttcctgtccacaccatcgtgcttatcagggagaatgtgtgcaagtgtggctatgcccagagccagcacatggaaggcacccagatcaaccaaagtgagaaatggaactacaagaaacacaccaaggaatttcctaccgacgcctttggggatattcagtttgagacactggggaagaaagggaagtatatacgtctgtcctgcgacacggacgcggaaatcctttacgagctgctgacccagcactggcacctgaaaacacccaacctggtcatttctgtgaccgggggcgccaagaacttcgccctgaagccgcgcatgcgcaagatcttcagccggctcatctacatcgcgcagtccaaaggtgcttggattctcacgggaggcacccattatggcctgatgaagtacatcggggaggtggtgagagataacaccatcagcaggagttcagaggagaatattgtggccattggcatagcagcttggggcatggtctccaaccgggacaccctcatcaggaattgcgatgctgaggtaccggtgggacaggaggaggtctgctaggtcacatggaagaaagaccatggcatgggcctgtggcctgaaccctggggctctgtgatggagccagccagatcatggggaagtctgcctttcaaggagtgcctttgggaccttaaaggaattgaaaacaaggatgacgtacctaattaactgctgggaaagagttaacaatgaatgttttgttcattaaaatgtgttctcagcaatctca

SEQ ID NO: 32199 - DNA, 722 bp, Homo sapiens
  source 1..722: mol_type = unassigned DNA
ctcagggaggacttggtgaattttattcaagcaaattttaagaaacgagaatgtgtcttctttaccaaagattccaaggccacggagaatgtgtgcaagtgtggctatgcccagagccagcacatggaaggcacccagatcaaccaaagtgagaaatggaactacaagaaacacaccaaggaatttcctaccgacgcctttggggatattcagtttgagacactggggaagaaagggaagtatatacgtctgtcctgcgacacggacgcggaaatcctttacgagctgctgacccagcactggcacctgaaaacacccaacctggtcatttctgtgaccgggggcgccaagaacttcgccctgaagccgcgcatgcgcaagatcttcagccggctcatctacatcgcgcagtccaaaggtgcttggattctcacgggaggcacccattatggcctgatgaagtacatcggggaggtggtgagagataacaccatcagcaggagttcagaggagaatattgtggccattggcatagcagcttggggcatggtctccaaccgggacaccctcatcaggaattgcgatgctgaggtaccggtgggacaggaggaggtctgctaggtcacatggaagaaagaccatggcatgggcctgtggcctgaaccctggggctctgtgatggagccagccagatcatggggaagtctgcctttcaaggagtg

SEQ ID NO: 32200 - DNA, 3348 bp, Homo sapiens
  source 1..3348: mol_type = unassigned DNA
tcctgcttgacaaaaaccgtcacttaggaaaagatgtcctttcgggcagccaggctcagcatgaggaacagaaggaatgacactctggacagcacccggaccctgtactccagcgcgtctcggagcacagacttgtcttacagtgaaagcgacttggtgaattttattcaagcaaattttaagaaacgagaatgtgtcttctttaccaaagattccaaggccacggagaatgtgtgcaagtgtggctatgcccagagccagcacatggaaggcacccagatcaaccaaagtgagaaatggaactacaagaaacacaccaaggaatttcctaccgacgcctttggggatattcagtttgagacactggggaagaaagggaagtatatacgtctgtcctgcgacacggacgcggaaatcctttacgagctgctgacccagcactggcacctgaaaacacccaacctggtcatttctgtgaccgggggcgccaagaacttcgccctgaagccgcgcatgcgcaagatcttcagccggctcatctacatcgcgcagtccaaaggtgcttggattctcacgggaggcacccattatggcctgatgaagtacatcggggaggtggtgagagataacaccatcagcaggagttcagaggagaatattgtggccattggcatagcagcttggggcatggtctccaaccgggacaccctcatcaggaattgcgatgctgagggctattttttagcccagtaccttatggatgacttcacaagagatccactgtatatcctggacaacaaccacacacatttgctgctcgtggacaatggctgtcatggacatcccactgtcgaagcaaagctccggaatcagctagagaagtatatctctgagcgcactattcaagattccaactatggtggcaagatccccattgtgtgttttgcccaaggaggtggaaaagagactttgaaatcaagaagatttgggaggagaatttcagtgacatgaataacctgtgtacttagtgttggccttgacagtcaacctgccaaagagaagagttgacattaattcgggagacttaaagattgtaaccggcatatatattagaaagctatggccaacctatctgcattgagatgagctgtgatcatacacacacagattgcccccaaaccagatgtttccagaccacctaaggcccatttatatgccacctggggatgcaggccatcaatacctccatcaaaaataaaattccttgtgtggtggtggaaggctcgggccagatcgctgatgtgatcgctagcctggtggaggtggaggatgccctgacatcttctgccgtcaaggagaagctggtgcgctttttaccccgcacggtgtcccggctgcctgaggaggagactgagagttggatcaaatggctcaaagaaattctcgaatgttctcacctattaacagttattaaaatggaagaagctggggatgaaattgtgagcaatgccatctcctacgctctatacaaagccttcagcaccagtgagcaagacaaggataactggaatgggcagctgaagcttctgctggagtggaaccagctggacttagccaatgatgagattttcaccaatgaccgccgatgggagtctgctgaccttcaagaagtcatgtttacggctctcataaaggacagacccaagtttgtccgcctctttctggagaatggcttgaacctacggaagtttctcacccatgatgtcctcactgaactcttctccaaccacttcagcacgcttgtgtaccggaatctgcagatcgccaagaattcctataatgatgccctcctcacgtttgtctggaaactggttgcgaacttccgaagaggcttccggaaggaagacagaaatggccgggacgagatggacatagaactccacgacgtgtctcctattactcggcaccccctgcaagctctcttcatctgggccattcttcagaataagaaggaactctccaaagtcatttgggagcagaccaggggctgcactctggcagccctgggagccagcaagcttctgaagactctggccaaagtgaagaacgacatcaatgctgctggggagtccgaggagctggctaatgagtacgagacccgggctgttgagctgttcactgagtgttacagcagcgatgaagacttggcagaacagctgctggtctattcctgtgaagcttggggtggaagcaactgtctggagctggcggtggaggccacagaccagcatttcatcgcccagcctggggtccagtggtacgtaaatggggtgaattattttactgacctgtggaatgtgatggacacgctggggcttttttacttcatagcaggaattgtatttcggctccactcttctaataaaagctctttgtattctggacgagtcattttctgtctggactacattattttcactctaagattgatccacatttttactgtaagcagaaacttaggacccaagattataatgctgcagaggatgctgatcgatgtgttcttcttcctgttcctctttgcggtgtggatggtggcctttggcgtggccaggcaagggatccttaggcagaatgagcagcgctggaggtggatattccgttcggtcatctacgagccctacctggccatgttcggccaggtgcccagtgacgtggatggtaccacgtatgactttgcccactgcaccttcactgggaatgagtccaagccactgtgtgtggagctggatgagcacaacctgccccggttccccgagtggatcaccatccccctggtgtgcatctacatgttatccaccaacatcctgctggtcaacctgctggtcgccatgtttggctacacggtgggcaccgtccaggagaacaatgaccaggtctggaagttccagaggtacttcctggtgcaggagtactgcagccgcctcaatatccccttccccttcatcgtcttcgcttacttctacatggtggtgaagaagtgcttcaagtgttgctgcaaggagaaaaacatggagtcttctgtctgctgtttcaaaaatgaagacaatgagactctggcatgggagggtgtcatgaaggaaaactaccttgtcaagatcaacacaaaagccaacgacacctcagaggaaatgaggcatcgatttagacaactggatacaaagcttaatgatctcaagggtcttctgaaagagattgctaataaaatcaaataaaactgtatgaactctaatggagaaaaatctaattatagcaagatcatattaaggaatgctgatgaacaatttt

SEQ ID NO: 32201 - DNA, 4170 bp, Homo sapiens
  source 1..4170: mol_type = unassigned DNA
ccgaagggcgtccacagcgactcctgctagtgcagggcagctgctgccagggccgggcccgggaccccacggaggcggggagaccactcttctcccacacgagcccagctctcccttcgagtagcaaccgccttcaagctcacaagcacccgtgggcctggggtgtgcctgcgtctagctggttgcacactgggccacagaggatccagcaaggatgaagaaatggagcagcacagacttgggggcagctgcggacccactccaaaaggacacctgcccagaccccctggatggagaccctaactccaggccacctccagccaagccccagctctccacggccaagagccgcacccggctctttgggaagggtgactcggaggaggctttcccggtggattgccctcacgaggaaggtgagctggactcctgcccgaccatcacagtcagccctgttatcaccatccagaggccaggagacggccccaccggtgccaggctgctgtcccaggactctgtcgccgccagcaccgagaagaccctcaggctctatgatcgcaggagtatctttgaagccgttgctcagaataactgccaggatctggagagcctgctgctcttcctgcagaagagcaagaagcacctcacagacaacgagttcaaaggtggccccagcgctgggctcggggagggccccagccctggcctgccctgaccctcccttatgtctttcagaccctgagacagggaagacctgtctgctgaaagccatgctcaacctgcacgacggacagaacaccaccatccccctgctcctggagatcgcgcggcaaacggacagcctgaaggagcttgtcaacgccagctacacggacagctactacaagggccagacagcactgcacatcgccatcgagagacgcaacatggccctggtgaccctcctggtggagaacggagcagacgtccaggctgcggcccatggggacttctttaagaaaaccaaagggcggcctggattctacttcggtgaactgcccctgtccctggccgcgtgcaccaaccagctgggcatcgtgaagttcctgctgcagaactcctggcagacggccgacatcagcgccagggactcggtgggcaacacggtgctgcacgccctggtggaggtggccgacaacacggccgacaacacgaagtttgtgacgagcatgtacaatgagattctgatgctgggggccaaactgcacccgacgctgaagctggaggagctcaccaacaagaagggaatgacgccgctggctctggcagctgggaccgggaagatcggggtcttggcctatattctccagcgggagatccaggagcccgagtgcaggcacctgtccaggaagttcaccgagtgggcctacgggcccgtgcactcctcgctgtacgacctgtcctgcatcgacacctgcgagaagaactcggtgctggaggtgatcgcctacagcagcagcgagacccctaatcgccacgacatgctcttggtggagccgctgaaccgactcctgcaggacaagtgggacagattcgtcaagcgcatcttctacttcaacttcctggtctactgcctgtacatgatcatcttcaccatggctgcctactacaggcccgtggatggcttgcctccctttaagatggaaaaaactggagactatttccgagttactggagagatcctgtctgtgttaggaggagtctacttctttttccgagggattcagtatttcctgcagaggcggccgtcgatgaagaccctgtttgtggacagctacagtgagatgcttttctttctgcagtcactgttcatgctggccaccgtggtgctgtacttcagccacctcaaggagtatgtggcttccatggtattctccctggccttgggctggaccaacatgctctactacacccgcggtttccagcagatgggcatctatgccgtcatgatagagaagatgatcctgagagacctgtgccgtttcatgtttgtctacatcgtcttcttgttcgggttttccacagcggtggtgacgctgattgaagacgggaagaatgactccctgccgtctgagtccacgtcgcacaggtggcgggggcctgcctgcaggccccccgatagctcctacaacagcctgtactccacctgcctggagctgttcaagttcaccatcggcatgggcgacctggagttcactgagaactatgacttcaaggctgtcttcatcatcctgctgctggcctatgtaattctcacctacatcctcctgctcaacatgctcatcgccctcatgggtgagactgtcaacaagatcgcacaggagagcaagaacatctggaagctgcagagagccatcaccatcctggacacggagaagagcttccttaagtgcatgaggaaggccttccgctcaggcaagctgctgcaggtggggtacacacctgatggcaaggacgactaccggtggtgcttcagggtggacgaggtgaactggaccacctggaacaccaacgtgggcatcatcaacgaagacccgggcaactgtgagggcgtcaagcgcaccctgagcttctccctgcggtcaagcagagtttcaggcagacactggaagaactttgccctggtcccccttttaagagaggcaagtgctcgagataggcagtctgctcagcccgaggaagtttatctgcgacagttttcagggtctctgaagccagaggacgctgaggtcttcaagagtcctgccgcttccggggagaagtgaggacgtcacgcagacagcactgtcaacactgggccttaggagaccccgttgccacggggggctgctgagggaacaccagtgctctgtcagcagcctggcctggtctgtgcctgcccagcatgttcccaaatctgtgctggacaagctgtgggaagcgttcttggaagcatggggagtgatgtacatccaaccgtcactgtccccaagtgaatctcctaacagactttcaggtttttactcactttactaaacagtttggatggtcagtctctactgggacatgttaggcccttgttttctttgattttattcttttttttgagacagaatttcactcttctcacccaggctggaatgcagtggcacaattttggctccctgcaacctccgcctcctggattccagcaattctcctgcctcggcttcccaagtagctgggattacaggcacgtgccaccatgtctggctaattttttgtatttttttaatagatatggggtttcgccatgttggccaggctggtctcgaactcctgacctcaggtgatccgcccacctcggcctcccaaagtgctgggattacaggtgtgagcctccacacctggctgttttctttgattttattctttttttttttttctgtgagacagagtttcactcttgttgcccaggctggagtgcagtggtgtgatcttggctcactgcaacttctgcctcccgggttcaagcgattcttctgcttcagtctcccaagtagcttggattacaggtgagcactaccacgcccggctaatttttgtatttttaatagagacggggtttcaccatgttggccaggctggtctcgaactcttgacctcaggtgatctgcccgccttggcctcccaaagtgctgggattacaggtgtgagccgctgcgctcggccttctttgattttatattattaggagcaaaagtaaatgaagcccaggaaaacacctttgggaacaaactcttcctttgatggaaaatgcagaggcccttcctctctgtgccgtgcttgctcctcttacctgcccgggtggtttgggggtgttggtgtttcctccctggagaagatgggggaggctgtcccactcccagctctggcagaatcaagctgttgcagcagtgccttcttcatccttccttacgatcaatcacagtctccagaagatcagctcaattgctgtgcaggttaaaactacagaaccacatcccaaaggtacctggtaagaatgtttgaaagatcttccatttctaggaaccccagtcctgcttctccgcaatggcacatgcttccactccatccatactggcatcctcaaataaacagatatgtatacat

SEQ ID NO: 32202 - DNA, 2340 bp, Homo sapiens
  source 1..2340: mol_type = unassigned DNA
atgaagaaatggagcagcacagacttgggggcagctgcggacccactccaaaaggacacctgcccagaccccctggatggagaccctaactccaggccacctccagccaagccccagctctccacggccaagagccgcacccggctctttgggaagggtgactcggaggaggctttcccggtggattgccctcacgaggaaggtgagctggactcctgcccgaccatcacagtcagccctgttatcaccatccagaggccaggagacggccccaccggtgccaggctgctgtcccaggactctgtcgccgccagcaccgagaagaccctcaggctctatgatcgcaggagtatctttgaagccgttgctcagaataactgccaggatctggagagcctgctgctcttcctgcagaagagcaagaagcacctcacagacaacgagttcaaagaccctgagacagggaagacctgtctgctgaaagccatgctcaacctgcacgacggacagaacaccaccatccccctgctcctggagatcgcgcggcaaacggacagcctgaaggagcttgtcaacgccagctacacggacagctactacaagggccagacagcactgcacatcgccatcgagagacgcaacatggccctggtgaccctcctggtggagaacggagcagacgtccaggctgcggcccatggggacttctttaagaaaaccaaagggcggcctggattctacttcggtgaactgcccctgtccctggccgcgtgcaccaaccagctgggcatcgtgaagttcctgctgcagaactcctggcagacggccgacatcagcgccagggactcggtgggcaacacggtgctgcacgccctggtggaggtggccgacaacacggccgacaacacgaagtttgtgacgagcatgtacaatgagattctgatgctgggggccaaactgcacccgacgctgaagctggaggagctcaccaacaagaagggaatgacgccgctggctctggcagctgggaccgggaagatcgggaatcgccacgacatgctcttggtggagccgctgaaccgactcctgcaggacaagtgggacagattcgtcaagcgcatcttctacttcaacttcctggtctactgcctgtacatgatcatcttcaccatggctgcctactacaggcccgtggatggcttgcctccctttaagatggaaaaaactggagactatttccgagttactggagagatcctgtctgtgttaggaggagtctacttctttttccgagggattcagtatttcctgcagaggcggccgtcgatgaagaccctgtttgtggacagctacagtgagatgcttttctttctgcagtcactgttcatgctggccaccgtggtgctgtacttcagccacctcaaggagtatgtggcttccatggtattctccctggccttgggctggaccaacatgctctactacacccgcggtttccagcagatgggcatctatgccgtcatgatagagaagatgatcctgagagacctgtgccgtttcatgtttgtctacatcgtcttcttgttcgggttttccacagcggtggtgacgctgattgaagacgggaagaatgactccctgccgtctgagtccacgtcgcacaggtggcgggggcctgcctgcaggccccccgatagctcctacaacagcctgtactccacctgcctggagctgttcaagttcaccatcggcatgggcgacctggagttcactgagaactatgacttcaaggctgtcttcatcatcctgctgctggcctatgtaattctcacctacatcctcctgctcaacatgctcatcgccctcatgggtgagactgtcaacaagatcgcacaggagagcaagaacatctggaagctgcagagagccatcaccatcctggacacggagaagagcttccttaagtgcatgaggaaggccttccgctcaggcaagctgctgcaggtggggtacacacctgatggcaaggacgactaccggtggtgcttcagggtggacgaggtgaactggaccacctggaacaccaacgtgggcatcatcaacgaagacccgggcaactgtgagggcgtcaagcgcaccctgagcttctccctgcggtcaagcagagtttcaggcagacactggaagaactttgccctggtcccccttttaagagaggcaagtgctcgagataggcagtctgctcagcccgaggaagtttatctgcgacagttttcagggtctctgaagccagaggacgctgaggtcttcaagagtcctgccgcttccggggagaagtga

SEQ ID NO: 32203 - DNA, 4413 bp, Homo sapiens
  source 1..4413: mol_type = unassigned DNA
ctgccgctcaccctattccagggacacagtctgcttggctcttctggactgagccatcctcatcaccgagatcctccctgaattcagcccacgacagccaccccggccgttttccttgttctgtgtggggagggaggcagcgcggtggttatcaacctcaccctgcagaggaggcacctgaggcccagagacgaggagggatgggtctaacccagaaccacagatggctctgagccgggggcctgtccaccctcccaggccgacgtcagtggccgcaggactgcctgggccctgctaggcctgctcacctctgaggcctctggggtgagaggttcagtcctggaaacacttcagttctagggggctgggggcagcagcaagttggagttttggggtaccctgcttcacagggcccttggcaaggagggcaggtggggtctaaggacaagcagtccttactttgggagtcaaccccggcgtggtggctgctgcaggttgcacactgggccacagaggatccagcaaggatgaagaaatggagcagcacagacttgggggcagctgcggacccactccaaaaggacacctgcccagaccccctggatggagaccctaactccaggccacctccagccaagccccagctctccacggccaagagccgcacccggctctttgggaagggtgactcggaggaggctttcccggtggattgccctcacgaggaaggtgagctggactcctgcccgaccatcacagtcagccctgttatcaccatccagaggccaggagacggccccaccggtgccaggctgctgtcccaggactctgtcgccgccagcaccgagaagaccctcaggctctatgatcgcaggagtatctttgaagccgttgctcagaataactgccaggatctggagagcctgctgctcttcctgcagaagagcaagaagcacctcacagacaacgagttcaaagaccctgagacagggaagacctgtctgctgaaagccatgctcaacctgcacgacggacagaacaccaccatccccctgctcctggagatcgcgcggcaaacggacagcctgaaggagcttgtcaacgccagctacacggacagctactacaagggccagacagcactgcacatcgccatcgagagacgcaacatggccctggtgaccctcctggtggagaacggagcagacgtccaggctgcggcccatggggacttctttaagaaaaccaaagggcggcctggattctacttcggtgaactgcccctgtccctggccgcgtgcaccaaccagctgggcatcgtgaagttcctgctgcagaactcctggcagacggccgacatcagcgccagggactcggtgggcaacacggtgctgcacgccctggtggaggtggccgacaacacggccgacaacacgaagtttgtgacgagcatgtacaatgagattctgatgctgggggccaaactgcacccgacgctgaagctggaggagctcaccaacaagaagggaatgacgccgctggctctggcagctgggaccgggaagatcggggtcttggcctatattctccagcgggagatccaggagcccgagtgcaggcacctgtccaggaagttcaccgagtgggcctacgggcccgtgcactcctcgctgtacgacctgtcctgcatcgacacctgcgagaagaactcggtgctggaggtgatcgcctacagcagcagcgagacccctaatcgccacgacatgctcttggtggagccgctgaaccgactcctgcaggacaagtgggacagattcgtcaagcgcatcttctacttcaacttcctggtctactgcctgtacatgatcatcttcaccatggctgcctactacaggcccgtggatggcttgcctccctttaagatggaaaaaactggagactatttccgagttactggagagatcctgtctgtgttaggaggagtctacttctttttccgagggattcagtatttcctgcagaggcggccgtcgatgaagaccctgtttgtggacagctacagtgagatgcttttctttctgcagtcactgttcatgctggccaccgtggtgctgtacttcagccacctcaaggagtatgtggcttccatggtattctccctggccttgggctggaccaacatgctctactacacccgcggtttccagcagatgggcatctatgccgtcatgatagagaagatgatcctgagagacctgtgccgtttcatgtttgtctacatcgtcttcttgttcgggttttccacagcggtggtgacgctgattgaagacgggaagaatgactccctgccgtctgagtccacgtcgcacaggtggcgggggcctgcctgcaggccccccgatagctcctacaacagcctgtactccacctgcctggagctgttcaagttcaccatcggcatgggcgacctggagttcactgagaactatgacttcaaggctgtcttcatcatcctgctgctggcctatgtaattctcacctacatcctcctgctcaacatgctcatcgccctcatgggtgagactgtcaacaagatcgcacaggagagcaagaacatctggaagctgcagagagccatcaccatcctggacacggagaagagcttccttaagtgcatgaggaaggccttccgctcaggcaagctgctgcaggtggggtacacacctgatggcaaggacgactaccggtggtgcttcagggtggacgaggtgaactggaccacctggaacaccaacgtgggcatcatcaacgaagacccgggcaactgtgagggcgtcaagcgcaccctgagcttctccctgcggtcaagcagagtttcaggcagacactggaagaactttgccctggtcccccttttaagagaggcaagtgctcgagataggcagtctgctcagcccgaggaagtttatctgcgacagttttcagggtctctgaagccagaggacgctgaggtcttcaagagtcctgccgcttccggggagaagtgaggacgtcacgcagacagcactgtcaacactgggccttaggagaccccgttgccacggggggctgctgagggaacaccagtgctctgtcagcagcctggcctggtctgtgcctgcccagcatgttcccaaatctgtgctggacaagctgtgggaagcgttcttggaagcatggggagtgatgtacatccaaccgtcactgtccccaagtgaatctcctaacagactttcaggtttttactcactttactaaacagtttggatggtcagtctctactgggacatgttaggcccttgttttctttgattttattcttttttttgagacagaatttcactcttctcacccaggctggaatgcagtggcacaattttggctccctgcaacctccgcctcctggattccagcaattctcctgcctcggcttcccaagtagctgggattacaggcacgtgccaccatgtctggctaattttttgtatttttttaatagatatggggtttcgccatgttggccaggctggtctcgaactcctgacctcaggtgatccgcccacctcggcctcccaaagtgctgggattacaggtgtgagcctccacacctggctgttttctttgattttattctttttttttttttctgtgagacagagtttcactcttgttgcccaggctggagtgcagtggtgtgatcttggctcactgcaacttctgcctcccgggttcaagcgattcttctgcttcagtctcccaagtagcttggattacaggtgagcactaccacgcccggctaatttttgtatttttaatagagacggggtttcaccatgttggccaggctggtctcgaactcttgacctcaggtgatctgcccgccttggcctcccaaagtgctgggattacaggtgtgagccgctgcgctcggccttctttgattttatattattaggagcaaaagtaaatgaagcccaggaaaacacctttgggaacaaactcttcctttgatggaaaatgcagaggcccttcctctctgtgccgtgcttgctcctcttacctgcccgggtggtttgggggtgttggtgtttcctccctggagaagatgggggaggctgtcccactcccagctctggcagaatcaagctgttgcagcagtgccttcttcatccttccttacgatcaatcacagtctccagaagatcagctcaattgctgtgcaggttaaaactacagaaccacatcccaaaggtacctggtaagaatgtttgaaagatcttccatttctaggaaccccagtcctgcttctccgcaatggcacatgcttccactccatccatactggcatcctcaaataaacagatatgtatacat

SEQ ID NO: 32204 - DNA, 4087 bp, Homo sapiens
  source 1..4087: mol_type = unassigned DNA
gcagagtgtgcagtatagattcagcgtttgtcgactgactgaatgatagcacaatcccggctgcttcctgttggctgggtttggttggactgggacccgtcagaggaaaaggcaacgccgctgacaaagaacattgccgaaaggttcatgggaggctccggctaacaggttgcacactgggccacagaggatccagcaaggatgaagaaatggagcagcacagacttgggggcagctgcggacccactccaaaaggacacctgcccagaccccctggatggagaccctaactccaggccacctccagccaagccccagctctccacggccaagagccgcacccggctctttgggaagggtgactcggaggaggctttcccggtggattgccctcacgaggaaggtgagctggactcctgcccgaccatcacagtcagccctgttatcaccatccagaggccaggagacggccccaccggtgccaggctgctgtcccaggactctgtcgccgccagcaccgagaagaccctcaggctctatgatcgcaggagtatctttgaagccgttgctcagaataactgccaggatctggagagcctgctgctcttcctgcagaagagcaagaagcacctcacagacaacgagttcaaagaccctgagacagggaagacctgtctgctgaaagccatgctcaacctgcacgacggacagaacaccaccatccccctgctcctggagatcgcgcggcaaacggacagcctgaaggagcttgtcaacgccagctacacggacagctactacaagggccagacagcactgcacatcgccatcgagagacgcaacatggccctggtgaccctcctggtggagaacggagcagacgtccaggctgcggcccatggggacttctttaagaaaaccaaagggcggcctggattctacttcggtgaactgcccctgtccctggccgcgtgcaccaaccagctgggcatcgtgaagttcctgctgcagaactcctggcagacggccgacatcagcgccagggactcggtgggcaacacggtgctgcacgccctggtggaggtggccgacaacacggccgacaacacgaagtttgtgacgagcatgtacaatgagattctgatgctgggggccaaactgcacccgacgctgaagctggaggagctcaccaacaagaagggaatgacgccgctggctctggcagctgggaccgggaagatcggggtcttggcctatattctccagcgggagatccaggagcccgagtgcaggcacctgtccaggaagttcaccgagtgggcctacgggcccgtgcactcctcgctgtacgacctgtcctgcatcgacacctgcgagaagaactcggtgctggaggtgatcgcctacagcagcagcgagacccctaatcgccacgacatgctcttggtggagccgctgaaccgactcctgcaggacaagtgggacagattcgtcaagcgcatcttctacttcaacttcctggtctactgcctgtacatgatcatcttcaccatggctgcctactacaggcccgtggatggcttgcctccctttaagatggaaaaaactggagactatttccgagttactggagagatcctgtctgtgttaggaggagtctacttctttttccgagggattcagtatttcctgcagaggcggccgtcgatgaagaccctgtttgtggacagctacagtgagatgcttttctttctgcagtcactgttcatgctggccaccgtggtgctgtacttcagccacctcaaggagtatgtggcttccatggtattctccctggccttgggctggaccaacatgctctactacacccgcggtttccagcagatgggcatctatgccgtcatgatagagaagatgatcctgagagacctgtgccgtttcatgtttgtctacatcgtcttcttgttcgggttttccacagcggtggtgacgctgattgaagacgggaagaatgactccctgccgtctgagtccacgtcgcacaggtggcgggggcctgcctgcaggccccccgatagctcctacaacagcctgtactccacctgcctggagctgttcaagttcaccatcggcatgggcgacctggagttcactgagaactatgacttcaaggctgtcttcatcatcctgctgctggcctatgtaattctcacctacatcctcctgctcaacatgctcatcgccctcatgggtgagactgtcaacaagatcgcacaggagagcaagaacatctggaagctgcagagagccatcaccatcctggacacggagaagagcttccttaagtgcatgaggaaggccttccgctcaggcaagctgctgcaggtggggtacacacctgatggcaaggacgactaccggtggtgcttcagggtggacgaggtgaactggaccacctggaacaccaacgtgggcatcatcaacgaagacccgggcaactgtgagggcgtcaagcgcaccctgagcttctccctgcggtcaagcagagtttcaggcagacactggaagaactttgccctggtcccccttttaagagaggcaagtgctcgagataggcagtctgctcagcccgaggaagtttatctgcgacagttttcagggtctctgaagccagaggacgctgaggtcttcaagagtcctgccgcttccggggagaagtgaggacgtcacgcagacagcactgtcaacactgggccttaggagaccccgttgccacggggggctgctgagggaacaccagtgctctgtcagcagcctggcctggtctgtgcctgcccagcatgttcccaaatctgtgctggacaagctgtgggaagcgttcttggaagcatggggagtgatgtacatccaaccgtcactgtccccaagtgaatctcctaacagactttcaggtttttactcactttactaaacagtttggatggtcagtctctactgggacatgttaggcccttgttttctttgattttattcttttttttgagacagaatttcactcttctcacccaggctggaatgcagtggcacaattttggctccctgcaacctccgcctcctggattccagcaattctcctgcctcggcttcccaagtagctgggattacaggcacgtgccaccatgtctggctaattttttgtatttttttaatagatatggggtttcgccatgttggccaggctggtctcgaactcctgacctcaggtgatccgcccacctcggcctcccaaagtgctgggattacaggtgtgagcctccacacctggctgttttctttgattttattctttttttttttttctgtgagacagagtttcactcttgttgcccaggctggagtgcagtggtgtgatcttggctcactgcaacttctgcctcccgggttcaagcgattcttctgcttcagtctcccaagtagcttggattacaggtgagcactaccacgcccggctaatttttgtatttttaatagagacggggtttcaccatgttggccaggctggtctcgaactcttgacctcaggtgatctgcccgccttggcctcccaaagtgctgggattacaggtgtgagccgctgcgctcggccttctttgattttatattattaggagcaaaagtaaatgaagcccaggaaaacacctttgggaacaaactcttcctttgatggaaaatgcagaggcccttcctctctgtgccgtgcttgctcctcttacctgcccgggtggtttgggggtgttggtgtttcctccctggagaagatgggggaggctgtcccactcccagctctggcagaatcaagctgttgcagcagtgccttcttcatccttccttacgatcaatcacagtctccagaagatcagctcaattgctgtgcaggttaaaactacagaaccacatcccaaaggtacctggtaagaatgtttgaaagatcttccatttctaggaaccccagtcctgcttctccgcaatggcacatgcttccactccatccatactggcatcctcaaataaacagatatgtatacat

SEQ ID NO: 32205 - DNA, 2607 bp, Homo sapiens
  source 1..2607: mol_type = unassigned DNA
cagaggatccagcaaggatgaagaaatggagcagcacagacttgggggcagctgcggacccactccaaaaggacacctgcccagaccccctggatggagaccctaactccaggccacctccagccaagccccagctctccacggccaagagccgcacccggctctttgggaagggtgactcggaggaggctttcccggtggattgccctcacgaggaaggtgagctggactcctgcccgaccatcacagtcagccctgttatcaccatccagaggccaggagacggccccaccggtgccaggctgctgtcccaggactctgtcgccgccagcaccgagaagaccctcaggctctatgatcgcaggagtatctttgaagccgttgctcagaataactgccaggatctggagagcctgctgctcttcctgcagaagagcaagaagcacctcacagacaacgagttcaaagaccctgagacagggaagacctgtctgctgaaagccatgctcaacctgcacgacggacagaacaccaccatccccctgctcctggagatcgcgcggcaaacggacagcctgaaggagcttgtcaacgccagctacacggacagctactacaagggccagacagcactgcacatcgccatcgagagacgcaacatggccctggtgaccctcctggtggagaacggagcagacgtccaggctgcggcccatggggacttctttaagaaaaccaaagggcggcctggattctacttcggtgaactgcccctgtccctggccgcgtgcaccaaccagctgggcatcgtgaagttcctgctgcagaactcctggcagacggccgacatcagcgccagggactcggtgggcaacacggtgctgcacgccctggtggaggtggccgacaacacggccgacaacacgaagtttgtgacgagcatgtacaatgagattctgatgctgggggccaaactgcacccgacgctgaagctggaggagctcaccaacaagaagggaatgacgccgctggctctggcagctgggaccgggaagatcggggttatcgagaatggaccaccgctgtccttcatggtcttggcctatattctccagcgggagatccaggagcccgagtgcaggcacctgtccaggaagttcaccgagtgggcctacgggcccgtgcactcctcgctgtacgacctgtcctgcatcgacacctgcgagaagaactcggtgctggaggtgatcgcctacagcagcagcgagacccctaatcgccacgacatgctcttggtggagccgctgaaccgactcctgcaggacaagtgggacagattcgtcaagcgcatcttctacttcaacttcctggtctactgcctgtacatgatcatcttcaccatggctgcctactacaggcccgtggatggcttgcctccctttaagatggaaaaaactggagactatttccgagttactggagagatcctgtctgtgttaggaggagtctacttctttttccgagggattcagtatttcctgcagaggcggccgtcgatgaagaccctgtttgtggacagctacagtgagatgcttttctttctgcagtcactgttcatgctggccaccgtggtgctgtacttcagccacctcaaggagtatgtggcttccatggtattctccctggccttgggctggaccaacatgctctactacacccgcggtttccagcagatgggcatctatgccgtcatgatagagaagatgatcctgagagacctgtgccgtttcatgtttgtctacatcgtcttcttgttcgggttttccacagcggtggtgacgctgattgaagacgggaagaatgactccctgccgtctgagtccacgtcgcacaggtggcgggggcctgcctgcaggccccccgatagctcctacaacagcctgtactccacctgcctggagctgttcaagttcaccatcggcatgggcgacctggagttcactgagaactatgacttcaaggctgtcttcatcatcctgctgctggcctatgtaattctcacctacatcctcctgctcaacatgctcatcgccctcatgggtgagactgtcaacaagatcgcacaggagagcaagaacatctggaagctgcagagagccatcaccatcctggacacggagaagagcttccttaagtgcatgaggaaggccttccgctcaggcaagctgctgcaggtggggtacacacctgatggcaaggacgactaccggtggtgcttcagggtggacgaggtgaactggaccacctggaacaccaacgtgggcatcatcaacgaagacccgggcaactgtgagggcgtcaagcgcaccctgagcttctccctgcggtcaagcagagtttcaggcagacactggaagaactttgccctggtcccccttttaagagaggcaagtgctcgagataggcagtctgctcagcccgaggaagtttatctgcgacagttttcagggtctctgaagccagaggacgctgaggtcttcaagagtcctgccgcttccggggagaagtgaggacgtcacgcagacagcactgtcaacactgggcctt

SEQ ID NO: 32206 - DNA, 2776 bp, Homo sapiens
  source 1..2776: mol_type = unassigned DNA
ctctggtggctagcctgtcctgacaggggagagttaagctcccgttctccaccgtgccggctggccaggtgggctgagggtgaccgagagaccagaacctgcttgctggagcttagtgctcagagctggggagggaggttccgccgctcctctgctgtcagcgccggcagcccctcccggcttcacttcctcccgcagcccctgctactgagaagctccgggatcccagcagccgccacgccctggcctcagcctgcggggctccagtcaggccaacaccgacgcgcagctgggaggaagacaggacccttgacatctccatctgcacagaggtcctggctggaccgagcagcctcctcctcctaggatgacctcaccctccagctctccagttttcaggttggagacattagatggaggccaagaagatggctctgaggcggacagaggaaagctggattttgggagcgggctgcctcccatggagtcacagttccagggcgaggaccggaaattcgcccctcagataagagtcaacctcaactaccgaaagggaacaggtgccagtcagccggatccaaaccgatttgaccgagatcggctcttcaatgcggtctcccggggtgtccccgaggatctggctggacttccagagtacctgagcaagaccagcaagtacctcaccgactcggaatacacagagggctccacaggtaagacgtgcctgatgaaggctgtgctgaaccttaaggacggagtcaatgcctgcattctgccactgctgcagatcgacagggactctggcaatcctcagcccctggtaaatgcccagtgcacagatgactattaccgaggccacagcgctctgcacatcgccattgagaagaggagtctgcagtgtgtgaagctcctggtggagaatggggccaatgtgcatgcccgggcctgcggccgcttcttccagaagggccaagggacttgcttttatttcggtgagctacccctctctttggccgcttgcaccaagcagtgggatgtggtaagctacctcctggagaacccacaccagcccgccagcctgcaggccactgactcccagggcaacacagtcctgcatgccctagtgatgatctcggacaactcagctgagaacattgcactggtgaccagcatgtatgatgggctcctccaagctggggcccgcctctgccctaccgtgcagcttgaggacatccgcaacctgcaggatctcacgcctctgaagctggccgccaaggagggcaagatcgagattttcaggcacatcctgcagcgggagttttcaggactgagccacctttcccgaaagttcaccgagtggtgctatgggcctgtccgggtgtcgctgtatgacctggcttctgtggacagctgtgaggagaactcagtgctggagatcattgcctttcattgcaagagcccgcaccgacaccgaatggtcgttttggagcccctgaacaaactgctgcaggcgaaatgggatctgctcatccccaagttcttcttaaacttcctgtgtaatctgatctacatgttcatcttcaccgctgttgcctaccatcagcctaccctgaagaagcaggccgcccctcacctgaaagcggaggttggaaactccatgctgctgacgggccacatccttatcctgctaggggggatctacctcctcgtgggccagctgtggtacttctggcggcgccacgtgttcatctggatctcgttcatagacagctactttgaaatcctcttcctgttccaggccctgctcacagtggtgtcccaggtgctgtgtttcctggccatcgagtggtacctgcccctgcttgtgtctgcgctggtgctgggctggctgaacctgctttactatacacgtggcttccagcacacaggcatctacagtgtcatgatccagaaggtcatcctgcgggacctgctgcgcttccttctgatctacttagtcttccttttcggcttcgctgtagccctggtgagcctgagccaggaggcttggcgccccgaagctcctacaggccccaatgccacagagtcagtgcagcccatggagggacaggaggacgagggcaacggggcccagtacaggggtatcctggaagcctccttggagctcttcaaattcaccatcggcatgggcgagctggccttccaggagcagctgcacttccgcggcatggtgctgctgctgctgctggcctacgtgctgctcacctacatcctgctgctcaacatgctcatcgccctcatgagcgagaccgtcaacagtgtcgccactgacagctggagcatctggaagctgcagaaagccatctctgtcctggagatggagaatggctattggtggtgcaggaagaagcagcgggcaggtgtgatgctgaccgttggcactaagccagatggcagccccgatgagcgctggtgcttcagggtggaggaggtgaactgggcttcatgggagcagacgctgcctacgctgtgtgaggacccgtcaggggcaggtgtccctcgaactctcgagaaccctgtcctggcttcccctcccaaggaggatgaggatggtgcctctgaggaaaactatgtgcccgtccagctcctccagtccaactgatggcccagatgcagcaggaggccagaggacagagcagaggatctttccaaccacatctgctggctctggggtcccagtgaattctggtggcaaatatatattttcactaactaa

SEQ ID NO: 32207 - DNA, 796 bp, Homo sapiens
  source 1..796: mol_type = unassigned DNA
agatttctcattaggtgtgccttcttggtggtgtctgatatgtttcaacattgggcccagcgttgggcccagtcagccggatccaaaccgatttgaccgagatcggctcttcaatgcggtctcccggggtgtccccgaggatctggctggacttccagagtacctgagcaagaccagcaagtacctcaccgactcggaatacacagagggctccacaggtaagacgtgcctgatgaaggctgtgctgaaccttaaggacggagtcaatgcctgcattctgccactgctgcagatcgacagggactctggcaatcctcagcccctggtaaatgcccagtgcacagatgactattaccgaggccacagcgctctgcacatcgccattgagaagaggagtctgcagtgtgtgaagctcctggtggagaatggggccaatgtgcatgcccgggcctgcggccgcttcttccagaagggccaagggacttgcttttatttcggtgagctacccctctctttggccgcttgcaccaagcagtgggatgtggtaagctacctcctggagaacccacaccagcccgccagcctgcaggccactgactcccagggcaacacagtcctgcatgccctagtgatgatctcggacaactcagctgagaacattgcactggtgaccagcatgtatgatgggctcctccaagctggggcccgcctctgccctaccgtgcagcttgaggacatccgcaacctgcaggatctcacgcctctgaagctggccgccaaggagggcaagatcgag

SEQ ID NO: 32208 - DNA, 3420 bp, Homo sapiens
  source 1..3420: mol_type = unassigned DNA
ccacaacttcgatcttggcacctgcggcctcccctgccttttctccggtggggatgaggctgctgtgtgggtgtgggggtgactcacacgggccacgtgggtgggcgggtgctgcagctgtggctggtgggcgtggcctgcctggcgccgagggcaggtggctcagccagttctgcctctgacgcctcattccagccatccctctgcctgcaatgagagcttcccgccgcctcagccacagtcccacccgggggccttgggccccagacatgcggtgatctcagggcaagggttgccacgaccacccagaacctcaccagccatgaaagcccaccccaaggagatggtgcctctcatgggcaagagagttgctgcccccagtgggaaccctgccatcctgccagagaagaggccggcggagatcacccccacaaagaagagtgcacacttcttcctggagatagaagggtttgaacccaaccccacagttgccaagacctctcctcctgtcttctccaagcccatggattccaacatccggcagtgcatctctggtaactgtgatgacatggactccccccagtctcctcaggatgatgtgacagagaccccatccaatcccaacagccccagtgcacagctggccaaggaagagcagaggaggaaaaagaggcggctgaagaagcgcatctttgcagccgtgtctgagggctgcgtggaggagttggtagagttgctggtggagctgcaggagctttgcaggcggcgccatgatgaggatgtgcctgacttcctcatgcacaagctgacggcctccgacacggggaagacctgcctgatgaaggccttgttaaacatcaaccccaacaccaaggagatagtgcggatcctgcttgcctttgctgaagagaacgacatcctgggcaggttcatcaacgccgagtacacagaggaggcctatgaagggcagacggcgctgaacatcgccatcgagcggcggcagggggacatcgcagccctgctcatcgccgccggcgccgacgtcaacgcgcacgccaagggggccttcttcaaccccaagtaccaacacgaaggcttctacttcggtgagacgcccctggccctggcagcatgcaccaaccagcccgagattgtgcagctgctgatggagcacgagcagacggacatcacctcgcgggactcacgaggcaacaacatccttcacgccctggtgaccgtggccgaggacttcaagacgcagaatgactttgtgaagcgcatgtacgacatgatcctactgcggagtggcaactgggagctggagaccactcgcaacaacgatggcctcacgccgctgcagctggccgccaagatgggcaaggcggagatcctgaagtacatcctcagtcgtgagatcaaggagaagcggctccggagcctgtccaggaagttcaccgactgggcgtacggacccgtgtcatcctccctctacgacctcaccaacgtggacaccaccacggacaactcagtgctggaaatcactgtctacaacaccaacatcgacaaccggcatgagatgctgaccctggagccgctgcacacgctgctgcatatgaagtggaagaagtttgccaagcacatgttctttctgtccttctgcttttatttcttctacaacatcaccctgaccctcgtctcgtactaccgcccccgggaggaggaggccatcccgcaccccttggccctgacgcacaagatggggtggctgcagctcctagggaggatgtttgtgctcatctgggccatgtgcatctctgtgaaagagggcattgccatcttcctgctgagaccctcggatctgcagtccatcctctcggatgcctggttccactttgtcttttttatccaagctgtgcttgtgatactgtctgtcttcttgtacttgtttgcctacaaagagtacctcgcctgcctcgtgctggccatggccctgggctgggcgaacatgctctactatacgcggggtttccagtccatgggcatgtacagcgtcatgatccagaaggtcattttgcatgatgttctgaagttcttgtttgtatatatcgtgtttttgcttggatttggagtagccttggcctcgctgatcgagaagtgtcccaaagacaacaaggactgcagctcctacggcagcttcagcgacgcagtgctggaactcttcaagctcaccataggcctgggtgacctgaacatccagcagaactccaagtatcccattctctttctgttcctgctcatcacctatgtcatcctcacctttgttctcctcctcaacatgctcattgctctgatgggcgagactgtggagaacgtctccaaggagagcgaacgcatctggcgcctgcagagagccaggaccatcttggagtttgagaaaatgttaccagaatggctgaggagcagattccggatgggagagctgtgcaaagtggccgaggatgatttccgactgtgtttgcggatcaatgaggtgaagtggactgaatggaagacgcacgtctccttccttaacgaagacccggggcctgtaagacgaacagatttcaacaaaatccaagattcttccaggaacaacagcaaaaccactctcaatgcatttgaagaagtcgaggaattcccggaaacctcggtgtagaagcggaacccagagctggtgtgcgcgtgcgctgtctggcgctgcaggcggagtcaccgactctgtgcagagaggctttgagggatggtggagtccggctctgctggcctagaagcagagtgcaccctcgtgctcagtgctcagtgggtgtctgaactgaggggcagttgtcaatttgtctgagtgggaaacatcctggattttgttacttggcaaacagctggtgtaaacctacagccagcagcagtctggagcctgggagcctcctgaagtcccgggtgaagcctctggttttaccaattgcaggtcggcttggctgggagagatggatggcgggaaaggggcagcagtcttgaggagcagggagaggagtctttcctcctgccagcttcccccgtcagccccaaccccagcccacacattgtaccatctcttctgctgtgactgggttgcctgaatttgtgggagacccgtgatcccatcccagagtgtgcgggggacggaggtaagctggatatcctgggggaggaggggaatgcgctctggaaacacccttccggaacccttcggggaaaaggagaccatccttggagtgaacgtcccctgacaccccaaggttcaaactgtctcaagctgagagatgtttttagtagcagaattaacacagggttttaacttgcaatacggaaaagacatttcagttgagaatgaaaattactacaatg

SEQ ID NO: 32209 - DNA, 6113 bp, Homo sapiens
  source 1..6113: mol_type = unassigned DNA
ccacaacttcgatcttggcacctgcggcctcccctgccttttctccggtggggatgaggctgctgtgtgggtgtgggggtgactcacacgggccacgtgggtgggcgggtgctgcagctgtggctggtgggcgtggcctgcctggcgccgagggcaggtggctcagccagttctgcctctgacgcctcattccagccatccctctgcctgcaatgagagcttcccgccgcctcagccacagtcccacccgggggccttgggccccagacatgcggtgatctcagggcaagggttgccacgaccacccagaacctcaccagccatgaaagcccaccccaaggagatggtgcctctcatgggcaagagagttgctgcccccagtgggaaccctgccatcctgccagagaagaggccggcggagatcacccccacaaagaagagtgcacacttcttcctggagatagaagggtttgaacccaaccccacagttgccaagacctctcctcctgtcttctccaagcccatggattccaacatccggcagtgcatctctggtaactgtgatgacatggactccccccagtctcctcaggatgatgtgacagagaccccatccaatcccaacagccccagtgcacagctggccaaggaagagcagaggaggaaaaagaggcggctgaagaagcgcatctttgcagccgtgtctgagggctgcgtggaggagttggtagagttgctggtggagctgcaggagctttgcaggcggcgccatgatgaggatgtgcctgacttcctcatgcacaagctgacggcctccgacacggggaagacctgcctgatgaaggccttgttaaacatcaaccccaacaccaaggagatagtgcggatcctgcttgcctttgctgaagagaacgacatcctgggcaggttcatcaacgccgagtacacagaggaggcctatgaagggcagacggcgctgaacatcgccatcgagcggcggcagggggacatcgcagccctgctcatcgccgccggcgccgacgtcaacgcgcacgccaagggggccttcttcaaccccaagtaccaacacgaaggcttctacttcggtgagacgcccctggccctggcagcatgcaccaaccagcccgagattgtgcagctgctgatggagcacgagcagacggacatcacctcgcgggactcacgaggcaacaacatccttcacgccctggtgaccgtggccgaggacttcaagacgcagaatgactttgtgaagcgcatgtacgacatgatcctactgcggagtggcaactgggagctggagaccactcgcaacaacgatggcctcacgccgctgcagctggccgccaagatgggcaaggcggagatcctgaagtacatcctcagtcgtgagatcaaggagaagcggctccggagcctgtccaggaagttcaccgactgggcgtacggacccgtgtcatcctccctctacgacctcaccaacgtggacaccaccacggacaactcagtgctggaaatcactgtctacaacaccaacatcgacaaccggcatgagatgctgaccctggagccgctgcacacgctgctgcatatgaagtggaagaagtttgccaagcacatgttctttctgtccttctgcttttatttcttctacaacatcaccctgaccctcgtctcgtactaccgcccccgggaggaggaggccatcccgcaccccttggccctgacgcacaagatggggtggctgcagctcctagggaggatgtttgtgctcatctgggccatgtgcatctctgtgaaagagggcattgccatcttcctgctgagaccctcggatctgcagtccatcctctcggatgcctggttccactttgtcttttttatccaagctgtgcttgtgatactgtctgtcttcttgtacttgtttgcctacaaagagtacctcgcctgcctcgtgctggccatggccctgggctgggcgaacatgctctactatacgcggggtttccagtccatgggcatgtacagcgtcatgatccagaaggtcattttgcatgatgttctgaagttcttgtttgtatatatcgtgtttttgcttggatttggagtagccttggcctcgctgatcgagaagtgtcccaaagacaacaaggactgcagctcctacggcagcttcagcgacgcagtgctggaactcttcaagctcaccataggcctgggtgacctgaacatccagcagaactccaagtatcccattctctttctgttcctgctcatcacctatgtcatcctcacctttgttctcctcctcaacatgctcattgctctgatgggcgagactgtggagaacgtctccaaggagagcgaacgcatctggcgcctgcagagagccaggaccatcttggagtttgagaaaatgttaccagaatggctgaggagcagattccggatgggagagctgtgcaaagtggccgaggatgatttccgactgtgtttgcggatcaatgaggtgaagtggactgaatggaagacgcacgtctccttccttaacgaagacccggggcctgtaagacgaacagcagatttcaacaaaatccaagattcttccaggaacaacagcaaaaccactctcaatgcatttgaagaagtcgaggaattcccggaaacctcggtgtagaagcggaacccagagctggtgtgcgcgtgcgctgtctggcgctgcaggcggagtcaccgactctgtgcagagaggctttgagggatggtggagtccggctctgctggcctagaagcagagtgcaccctcgtgctcagtgctcagtgggtgtctgaactgaggggcagttgtcaatttgtctgagtgggaaacatcctggattttgttacttggcaaacagctggtgtaaacctacagccagcagcagtctggagcctgggagcctcctgaagtcccgggtgaagcctctggttttaccaattgcaggtcggcttggctgggagagatggatggcgggaaaggggcagcagtcttgaggagcagggagaggagtctttcctcctgccagcttcccccgtcagccccaaccccagcccacacattgtaccatctcttctgctgtgactgggttgcctgaatttgtgggagacccgtgatcccatcccagagtgtgcgggggacggaggtaagctggatatcctgggggaggaggggaatgcgctctggaaacacccttccggaacccttcggggaaaaggagaccatccttggagtgaacgtcccctgacaccccaaggttcaaactgtctcaagctgagagatgtttttagtagcagaattaacacagggttttaacttgcaatacggaaaagacatttcagttgagaatgaaaattactacaatgaagtttgtgattttaaaagtggagacagactgggggctttggggctggatgtaagtattatatatttggcctcagggtgcccagagcaagacaaaaagcttttcttcacacacacaaaagtctgcatgagacactccgggcaagtcctgctgggccgccgcgatctgggtgaaaggtcctggctcttttcctcgtcctgacctcacagtagcgcgtgcctgtgtgctgggatcgtggctttcgctgaagcagaaatagcagctgctcgatcgatatcatcttggaactcagcagttagtcgcatacctcagtatgtctcagtgggggaatttaacaaaatgcctcaactgctttggtacgaagtattttttttttaattttaactgtgaattttgaagctgaaggggaagcttgtgagagaaaagcatttgccaagactttgagcttatttttaggtcctcgtcctctgatgttctctttctgaaatgacacggagtcagtctggggggcagaggtgaagtggagacggaaggattttccaggtgactggggccgaaaccaccagaaaatccactctgccgccgttatctggtgaaaggattcatgtaaaaatgttcgaggtggaattataaaaatagtaaccataaatgttaatcttaaatggcagaaatagaaatttggccttcagataacatggcgatagataagttcatctggcttgaggcaaactgaagagtcggggcctagcagtgcactctgggccagtttctctgccctgggccactctgtgtgccagactagctggacagatagagactttgtgcccctgatggggccgattggggagaggtgggctggggtgtgtgaggcttcacaatccacagcagcccctgccctcccagctgacccagggagtaatcgcgtgctctaagccacagtggtcggggctgggcatgggcctctggagaagagaagatttgaggagaactgtcctagaggcaggaggagcagatgtgtttcagaatgggcagaattaggaaattgagaaagattttggctcaacagaatccagcaactgctccagatgttggagatgtttaagcagaagctggttgcgcacttaatgaggaatgttgttgaaaatggtcattggaagaagtttaaggtcccttttagcctggagattgtacaaatcagcattccacatctggagttagctacccgcattaagcctgaacagacatcttggtctgaaaggaagtggtttggattcatgatgccaagctccacactatggagctgggaattccagaattgctttgactcagatattaatggagaaagtcatatccattaatggataaagccgtatctgttatggataaagccgtatccagagttgctttgactcggatgttaatggataaagccaattattgatttctatttgcctaacctgccagcttttgtccaagtggggaatggagagccatagggatgtttgtcatctcacatgttttggtgatctgctgtctgtgggtctggatggaatttgttggcaagaccattttctgtattggatattcttcccaacagtgtccaccccaaaaggctttcagccaaaacgtctgagcctaggtaggtttaccaagggaagccataagtcaagaagcatcagagtgaaaaggagcacttccttcattttacgcccagaggctaatgctccgagaggaatgtgtacttgggcaaagtcatgcaggaaggtcatatcagagctgtggaggctggagtgtcctgattcttggaccacagatgtctccctgagccattatttatttatttttaaaaagcacagttattccatcattttgagtctttgtatttcgcttatattggggggcaggactattttctcaggtgtctcatttggcagtcaacattgtcccctatgttccctatgactagttgaaaattcaagtgtgcccacaggggtgcacaaaaccacacccatgcacacacacaccctcagcccccacacacaccccgttgaacccgtgggtctatcaggacatcctaaaactccgtgattgacatttcagtaatttcaggggaaggtgttttccagggatggggtctcccaggttcagatagtgcctttggctgcaaatgctcctttagctaaacttttcctcaggaagaattcattattctagacattatgtgatatatctgttaggaataaaaggtgcttaaccttcctccctgggatgtgggagaaggtgctggaggttgtactgtgaagtcttcaggctcttagaaggctccagcctgagagagccctttattattgacattcctgtccttcctcaaggcctggtgacctgtgacctttcgctctgggcagggcccaggtagatgggccgtcatccgggcctgtaagccgtacttgatttctgcattgatttacatattttttactgtgatcttggttccaaacacagaatcgtcaccccattctcccttgaatgtgccggatccttgtaaattctcatttacctacttgttcttagtgtgtatgtgtgtgcgaaactctatgttcaagaaagaaatcatacaaagagtaagaacatgtttgtgccattgaagaaatggttttttgatttctaataaatatttgttttgcctcgtta

SEQ ID NO: 32210 - DNA, 2735 bp, Homo sapiens
  source 1..2735: mol_type = unassigned DNA
gcctcagccacagtcccacccgggggccttgggccccagacatgcggtgatctcagggcaagggttgccacgaccacccagaacctcaccagccatgaaagcccaccccaaggagatggtgcctctcatgggcaagagagttgctgcccccagtgggaaccctgccatcctgccagagaagaggccggcggagatcacccccacaaagaagagtagacatggggtttcaccatgttggcgaggctggtctcaaactcccgacctcaactgatctgcccactttgacctcccagagggctgggattacaggcatgagccaccacacctggcctagcccagctttgaatctggactttgctacctatctgctgcgtgaccttggtgcacacttcttcctggagatagaagggtttgaacccaaccccacagttgccaagacctctcctcctgtcttctccaagcccatggattccaacatccggcagtgcatctctggtaactgtgatgacatggactccccccagtctcctcaggatgatgtgacagagaccccatccaatcccaacagccccagtgcacagctggccaaggaagagcagaggaggaaaaagaggcggctgaagaagcgcatctttgcagccgtgtctgagggctgcgtggaggagttggtagagttgctggtggagctgcaggagctttgcaggcggcgccatgatgaggatgtgcctgacttcctcatgcacaagctgacggcctccgacacggggaagacctgcctgatgaaggccttgttaaacatcaaccccaacaccaaggagatagtgcggatcctgcttgcctttgctgaagagaacgacatcctgggcaggttcatcaacgccgagtacacagaggaggcctatgaagggcagacggcgctgaacatcgccatcgagcggcggcagggggacatcgcagccctgctcatcgccgccggcgccgacgtcaacgcgcacgccaagggggccttcttcaaccccaagtaccaacacgaaggcttctacttcggtgagacgcccctggccctggcagcatgcaccaaccagcccgagattgtgcagctgctgatggagcacgagcagacggacatcacctcgcgggactcacgaggcaacaacatccttcacgccctggtgaccgtggccgaggacttcaagacgcagaatgactttgtgaagcgcatgtacgacatgatcctactgcggagtggcaactgggagctggagaccactcgcaacaacgatggcctcacgccgctgcagctggccgccaagatgggcaaggcggagatcctgaagtacatcctcagtcgtgagatcaaggagaagcggctccggagcctgtccaggaagttcaccgactgggcgtacggacccgtgtcatcctccctctacgacctcaccaacgtggacaccaccacggacaactcagtgctggaaatcactgtctacaacaccaacatcgacaaccggcatgagatgctgaccctggagccgctgcacacgctgctgcatatgaagtggaagaagtttgccaagcacatgttctttctgtccttctgcttttatttcttctacaacatcaccctgaccctcgtctcgtactaccgcccccgggaggaggaggccatcccgcaccccttggccctgacgcacaagatggggtggctgcagctcctagggaggatgtttgtgctcatctgggccatgtgcatctctgtgaaagagggcattgccatcttcctgctgagaccctcggatctgcagtccatcctctcggatgcctggttccactttgtcttttttatccaagctgtgcttgtgatactgtctgtcttcttgtacttgtttgcctacaaagagtacctcgcctgcctcgtgctggccatggccctgggctgggcgaacatgctctactatacgcggggtttccagtccatgggcatgtacagcgtcatgatccagaaggtcattttgcatgatgttctgaagttcttgtttgtatatatcgtgtttttgcttggatttggagtagccttggcctcgctgatcgagaagtgtcccaaagacaacaaggactgcagctcctacggcagcttcagcgacgcagtgctggaactcttcaagctcaccataggcctgggtgacctgaacatccagcagaactccaagtatcccattctctttctgttcctgctcatcacctatgtcatcctcacctttgttctcctcctcaacatgctcattgctctgatgggcgagactgtggagaacgtctccaaggagagcgaacgcatctggcgcctgcagagagccaggaccatcttggagtttgagaaaatgttaccagaatggctgaggagcagattccggatgggagagctgtgcaaagtggccgaggatgatttccgactgtgtttgcggatcaatgaggtgaagtggactgaatggaagacgcacgtctccttccttaacgaagacccggggcctgtaagacgaacagcagatttcaacaaaatccaagattcttccaggaacaacagcaaaaccactctcaatgcatttgaagaagtcgaggaattcccggaaacctcggtgtagaagcggaacccagagctggtgtgcgcgtgcgctgtctggcgctgcaggcggagtcaccgactctgtgcagagaggctttgagggatggtggagtcc

SEQ ID NO: 32211 - DNA, 3233 bp, Homo sapiens
  source 1..3233: mol_type = unassigned DNA
gggattcaggaagcgcggatctcccggccgccggcgcccagccgtcccggaggctgagcagtgcagacgggcctggggcaggcatggcggattccagcgaaggcccccgcgcggggcccggggaggtggctgagctccccggggatgagagtggcaccccaggtggggaggcttttcctctctcctccctggccaatctgtttgagggggaggatggctccctttcgccctcaccggctgatgccagtcgccctgctggcccaggcgatgggcgaccaaatctgcgcatgaagttccagggcgccttccgcaagggggtgcccaaccccatcgatctgctggagtccaccctatatgagtcctcggtggtgcctgggcccaagaaagcacccatggactcactgtttgactacggcacctatcgtcaccactccagtgacaacaagaggtggaggaagaagatcatagagaagcagccgcagagccccaaagcccctgcccctcagccgccccccatcctcaaagtcttcaaccggcctatcctctttgacatcgtgtcccggggctccactgctgacctggacgggctgctcccattcttgctgacccacaagaaacgcctaactgatgaggagtttcgagagccatctacggggaagacctgcctgcccaaggccttgctgaacctgagcaatggccgcaacgacaccatccctgtgctgctggacatcgcggagcgcaccggcaacatgagggagttcattaactcgcccttccgtgacatctactatcgaggtcagacagccctgcacatcgccattgagcgtcgctgcaaacactacgtggaacttctcgtggcccagggagctgatgtccacgcccaggcccgtgggcgcttcttccagcccaaggatgaggggggctacttctactttggggagctgcccctgtcgctggctgcctgcaccaaccagccccacattgtcaactacctgacggagaacccccacaagaaggcggacatgcggcgccaggactcgcgaggcaacacagtgctgcatgcgctggtggccattgctgacaacacccgtgagaacaccaagtttgttaccaagatgtacgacctgctgctgctcaagtgtgcccgcctcttccccgacagcaacctggaggccgtgctcaacaacgacggcctctcgcccctcatgatggctgccaagacgggcaagattgggatctttcagcacatcatccggcgggaggtgacggatgaggacacacggcacctgtcccgcaagttcaaggactgggcctatgggccagtgtattcctcgctttatgacctctcctccctggacacgtgtggggaagaggcctccgtgctggagatcctggtgtacaacagcaagattgagaaccgccacgagatgctggctgtggagcccatcaatgaactgctgcgggacaagtggcgcaagttcggggccgtctccttctacatcaacgtggtctcctacctgtgtgccatggtcatcttcactctcaccgcctactaccagccgctggagggcacaccgccgtacccttaccgcaccacggtggactacctgcggctggctggcgaggtcattacgctcttcactggggtcctgttcttcttcaccaacatcaaagacttgttcatgaagaaatgccctggagtgaattctctcttcattgatggctccttccagctgctctacttcatctactctgtcctggtgatcgtctcagcagccctctacctggcagggatcgaggcctacctggccgtgatggtctttgccctggtcctgggctggatgaatgccctttacttcacccgtgggctgaagctgacggggacctatagcatcatgatccagaagattctcttcaaggaccttttccgattcctgctcgtctacttgctcttcatgatcggctacgcttcagccctggtctccctcctgaacccgtgtgccaacatgaaggtgtgcaatgaggaccagaccaactgcacagtgcccacttacccctcgtgccgtgacagcgagaccttcagcaccttcctcctggacctgtttaagctgaccatcggcatgggcgacctggagatgctgagcagcaccaagtaccccgtggtcttcatcatcctgctggtgacctacatcatcctcacctttgtgctgctcctcaacatgctcattgccctcatgggcgagacagtgggccaggtctccaaggagagcaagcacatctggaagctgcagtgggccaccaccatcctggacattgagcgctccttccccgtattcctgaggaaggccttccgctctggggagatggtcaccgtgggcaagagctcggacggcactcctgaccgcaggtggtgcttcagggtggatgaggtgaactggtctcactggaaccagaacttgggcatcatcaacgaggacccgggcaagaatgagacctaccagtattatggcttctcgcataccgtgggccgcctccgcagggatcgctggtcctcggtggtaccccgcgtggtggaactgaacaagaactcgaacccggacgaggtggtggtgcctctggacagcatggggaacccccgctgcgatggccaccagcagggttacccccgcaagtggaggactgatgacgccccgctctagggactgcagcccagccccagcttctctgcccactcatttctagtccagccgcatttcagcagtgccttctggggtgtccccccacaccctgctttggccccagaggcgagggaccagtggaggtgccagggaggccccaggaccctgtggtcccctggctctgcctccccaccctggggtgggggctcccggccacctgtcttgctcctatggagtcacataagccaacgccagagcccctccacctcaggccccagcccctgcctctccattatttatttgctctgctctcaggaagcgacgtgacccctgccccagctggaacctggcagaggccttaggaccccgttccaagtgcactgcccggccaagccccagcctcagcctgcgcctgagctgcatgcgccaccatttttggcagcgtggcagctttgcaaggggctggggccctcggcgtggggccatgccttctgtgtgttctgtagtgtctgggatttgccggtgctcaataaatgtttattcattgacggtgga

SEQ ID NO: 32212 - DNA, 3058 bp, Homo sapiens
  source 1..3058: mol_type = unassigned DNA
ccggccgggattcaggaagcgcggatctcccggccgccggcgcccagccgtcccggaggctgagcagtgcagacgggcctggggcaggcatggcggattccagcgaaggcccccgcgcggggcccggggaggtggctgagctccccggggatgagagtggcaccccaggtggggaggcttttcctctctcctccctggccaatctgtttgagggggaggatggctccctttcgccctcaccggctgatgccagtcgccctgctggcccaggcgatgggcgaccaaatctgcgcatgaagttccagggcgccttccgcaagggggtgcccaaccccatcgatctgctggagtccaccctatatgagtcctcggtggtgcctgggcccaagaaagcacccatggactcactgtttgactacggcacctatcgtcaccactccagtgacaacaagaggtggaggaagaagatcatagagaagcagccgcagagccccaaagcccctgcccctcagccgccccccatcctcaaagtcttcaaccggcctatcctctttgacatcgtgtcccggggctccactgctgacctggacgggctgctcccattcttgctgacccacaagaaacgcctaactgatgaggagtttcgagagccatctacggggaagacctgcctgcccaaggccttgctgaacctgagcaatggccgcaacgacaccatccctgtgctgctggacatcgcggagcgcaccggcaacatgagggagttcattaactcgcccttccgtgacatctactatcgaggtcagacagccctgcacatcgccattgagcgtcgctgcaaacactacgtggaacttctcgtggcccagggagctgatgtccacgcccaggcccgtgggcgcttcttccagcccaaggatgaggggggctacttctactttggggagctgcccctgtcgctggctgcctgcaccaaccagccccacattgtcaactacctgacggagaacccccacaagaaggcggacatgcggcgccaggactcgcgaggcaacacagtgctgcatgcgctggtggccattgctgacaacacccgtgagaacaccaagtttgttaccaagatgtacgacctgctgctgctcaagtgtgcccgcctcttccccgacagcaacctggaggccgtgctcaacaacgacggcctctcgcccctcatgatggctgccaagacgggcaagattgggaaccgccacgagatgctggctgtggagcccatcaatgaactgctgcgggacaagtggcgcaagttcggggccgtctccttctacatcaacgtggtctcctacctgtgtgccatggtcatcttcactctcaccgcctactaccagccgctggagggcacaccgccgtacccttaccgcaccacggtggactacctgcggctggctggcgaggtcattacgctcttcactggggtcctgttcttcttcaccaacatcaaagacttgttcatgaagaaatgccctggagtgaattctctcttcattgatggctccttccagctgctctacttcatctactctgtcctggtgatcgtctcagcagccctctacctggcagggatcgaggcctacctggccgtgatggtctttgccctggtcctgggctggatgaatgccctttacttcacccgtgggctgaagctgacggggacctatagcatcatgatccagaagattctcttcaaggaccttttccgattcctgctcgtctacttgctcttcatgatcggctacgcttcagccctggtctccctcctgaacccgtgtgccaacatgaaggtgtgcaatgaggaccagaccaactgcacagtgcccacttacccctcgtgccgtgacagcgagaccttcagcaccttcctcctggacctgtttaagctgaccatcggcatgggcgacctggagatgctgagcagcaccaagtaccccgtggtcttcatcatcctgctggtgacctacatcatcctcacctttgtgctgctcctcaacatgctcattgccctcatgggcgagacagtgggccaggtctccaaggagagcaagcacatctggaagctgcagtgggccaccaccatcctggacattgagcgctccttccccgtattcctgaggaaggccttccgctctggggagatggtcaccgtgggcaagagctcggacggcactcctgaccgcaggtggtgcttcagggtggatgaggtgaactggtctcactggaaccagaacttgggcatcatcaacgaggacccgggcaagaatgagacctaccagtattatggcttctcgcataccgtgggccgcctccgcagggatcgctggtcctcggtggtaccccgcgtggtggaactgaacaagaactcgaacccggacgaggtggtggtgcctctggacagcatggggaacccccgctgcgatggccaccagcagggttacccccgcaagtggaggactgatgacgccccgctctagggactgcagcccagccccagcttctctgcccactcatttctagtccagccgcatttcagcagtgccttctggggtgtccccccacaccctgctttggccccagaggcgagggaccagtggaggtgccagggaggccccaggaccctgtggtcccctggctctgcctccccaccctggggtgggggctcccggccacctgtcttgctcctatggagtcacataagccaacgccagagcccctccacctcaggccccagcccctgcctctccattatttatttgctctgctctcaggaagcgacgtgacccctgccccagctggaacctggcagaggccttaggaccccgttccaagtgcactgcccggccaagccccagcctcagcctgcgcctgagctgcatgcgccaccatttttggcagcgtggcagctttgcaaggggctggggccctcggcgtggggccatgccttctgtgtgttctgtagtgtctgggatttgccggtgctcaataaatgtttattcattgacggtgg

SEQ ID NO: 32213 - DNA, 3097 bp, Homo sapiens
  source 1..3097: mol_type = unassigned DNA
ccggccgggattcaggaagcgcggatctcccggccgccggcgcccagccgtcccggaggctgagcagtgcagacgggcctggggcaggcatggcggattccagcgaaggcccccgcgcggggcccggggaggtggctgagctccccggggatgagagtggcaccccaggtggggaggcttttcctctctcctccctggccaatctgtttgagggggaggatggctccctttcgccctcaccggctgatgccagtcgccctgctggcccaggcgatgggcgaccaaatctgcgcatgaagttccagggcgccttccgcaagggggtgcccaaccccatcgatctgctggagtccaccctatatgagtcctcggtggtgcctgggcccaagaaagcacccatggactcactgtttgactacggcacctatcgtcaccactccagtgacaacaagaggtggaggaagaagatcatagagaagcagccgcagagccccaaagcccctgcccctcagccgccccccatcctcaaagtcttcaaccggcctatcctctttgacatcgtgtcccggggctccactgctgacctggacgggctgctcccattcttgctgacccacaagaaacgcctaactgatgaggagtttcgagagccatctacggggaagacctgcctgcccaaggccttgctgaacctgagcaatggccgcaacgacaccatccctgtgctgctggacatcgcggagcgcaccggcaacatgagggagttcattaactcgcccttccgtgacatctactatcgaggggagctgcccctgtcgctggctgcctgcaccaaccagccccacattgtcaactacctgacggagaacccccacaagaaggcggacatgcggcgccaggactcgcgaggcaacacagtgctgcatgcgctggtggccattgctgacaacacccgtgagaacaccaagtttgttaccaagatgtacgacctgctgctgctcaagtgtgcccgcctcttccccgacagcaacctggaggccgtgctcaacaacgacggcctctcgcccctcatgatggctgccaagacgggcaagattgggatctttcagcacatcatccggcgggaggtgacggatgaggacacacggcacctgtcccgcaagttcaaggactgggcctatgggccagtgtattcctcgctttatgacctctcctccctggacacgtgtggggaagaggcctccgtgctggagatcctggtgtacaacagcaagattgagaaccgccacgagatgctggctgtggagcccatcaatgaactgctgcgggacaagtggcgcaagttcggggccgtctccttctacatcaacgtggtctcctacctgtgtgccatggtcatcttcactctcaccgcctactaccagccgctggagggcacaccgccgtacccttaccgcaccacggtggactacctgcggctggctggcgaggtcattacgctcttcactggggtcctgttcttcttcaccaacatcaaagacttgttcatgaagaaatgccctggagtgaattctctcttcattgatggctccttccagctgctctacttcatctactctgtcctggtgatcgtctcagcagccctctacctggcagggatcgaggcctacctggccgtgatggtctttgccctggtcctgggctggatgaatgccctttacttcacccgtgggctgaagctgacggggacctatagcatcatgatccagaagattctcttcaaggaccttttccgattcctgctcgtctacttgctcttcatgatcggctacgcttcagccctggtctccctcctgaacccgtgtgccaacatgaaggtgtgcaatgaggaccagaccaactgcacagtgcccacttacccctcgtgccgtgacagcgagaccttcagcaccttcctcctggacctgtttaagctgaccatcggcatgggcgacctggagatgctgagcagcaccaagtaccccgtggtcttcatcatcctgctggtgacctacatcatcctcacctttgtgctgctcctcaacatgctcattgccctcatgggcgagacagtgggccaggtctccaaggagagcaagcacatctggaagctgcagtgggccaccaccatcctggacattgagcgctccttccccgtattcctgaggaaggccttccgctctggggagatggtcaccgtgggcaagagctcggacggcactcctgaccgcaggtggtgcttcagggtggatgaggtgaactggtctcactggaaccagaacttgggcatcatcaacgaggacccgggcaagaatgagacctaccagtattatggcttctcgcataccgtgggccgcctccgcagggatcgctggtcctcggtggtaccccgcgtggtggaactgaacaagaactcgaacccggacgaggtggtggtgcctctggacagcatggggaacccccgctgcgatggccaccagcagggttacccccgcaagtggaggactgatgacgccccgctctagggactgcagcccagccccagcttctctgcccactcatttctagtccagccgcatttcagcagtgccttctggggtgtccccccacaccctgctttggccccagaggcgagggaccagtggaggtgccagggaggccccaggaccctgtggtcccctggctctgcctccccaccctggggtgggggctcccggccacctgtcttgctcctatggagtcacataagccaacgccagagcccctccacctcaggccccagcccctgcctctccattatttatttgctctgctctcaggaagcgacgtgacccctgccccagctggaacctggcagaggccttaggaccccgttccaagtgcactgcccggccaagccccagcctcagcctgcgcctgagctgcatgcgccaccatttttggcagcgtggcagctttgcaaggggctggggccctcggcgtggggccatgccttctgtgtgttctgtagtgtctgggatttgccggtgctcaataaatgtttattcattgacggtgg

SEQ ID NO: 32214 - DNA, 3247 bp, Homo sapiens
  source 1..3247: mol_type = unassigned DNA
ggggcttcctggagcccccgcccctggccgggttctgcctgactcccctttcattcccttgcaggctgagcagtgcagacgggcctggggcaggcatggcggattccagcgaaggcccccgcgcggggcccggggaggtggctgagctccccggggatgagagtggcaccccaggtggggaggcttttcctctctcctccctggccaatctgtttgagggggaggatggctccctttcgccctcaccggctgatgccagtcgccctgctggcccaggcgatgggcgaccaaatctgcgcatgaagttccagggcgccttccgcaagggggtgcccaaccccatcgatctgctggagtccaccctatatgagtcctcggtggtgcctgggcccaagaaagcacccatggactcactgtttgactacggcacctatcgtcaccactccagtgacaacaagaggtggaggaagaagatcatagagaagcagccgcagagccccaaagcccctgcccctcagccgccccccatcctcaaagtcttcaaccggcctatcctctttgacatcgtgtcccggggctccactgctgacctggacgggctgctcccattcttgctgacccacaagaaacgcctaactgatgaggagtttcgagagccatctacggggaagacctgcctgcccaaggccttgctgaacctgagcaatggccgcaacgacaccatccctgtgctgctggacatcgcggagcgcaccggcaacatgagggagttcattaactcgcccttccgtgacatctactatcgaggtcagacagccctgcacatcgccattgagcgtcgctgcaaacactacgtggaacttctcgtggcccagggagctgatgtccacgcccaggcccgtgggcgcttcttccagcccaaggatgaggggggctacttctactttggggagctgcccctgtcgctggctgcctgcaccaaccagccccacattgtcaactacctgacggagaacccccacaagaaggcggacatgcggcgccaggactcgcgaggcaacacagtgctgcatgcgctggtggccattgctgacaacacccgtgagaacaccaagtttgttaccaagatgtacgacctgctgctgctcaagtgtgcccgcctcttccccgacagcaacctggaggccgtgctcaacaacgacggcctctcgcccctcatgatggctgccaagacgggcaagattgggatctttcagcacatcatccggcgggaggtgacggatgaggacacacggcacctgtcccgcaagttcaaggactgggcctatgggccagtgtattcctcgctttatgacctctcctccctggacacgtgtggggaagaggcctccgtgctggagatcctggtgtacaacagcaagattgagaaccgccacgagatgctggctgtggagcccatcaatgaactgctgcgggacaagtggcgcaagttcggggccgtctccttctacatcaacgtggtctcctacctgtgtgccatggtcatcttcactctcaccgcctactaccagccgctggagggcacaccgccgtacccttaccgcaccacggtggactacctgcggctggctggcgaggtcattacgctcttcactggggtcctgttcttcttcaccaacatcaaagacttgttcatgaagaaatgccctggagtgaattctctcttcattgatggctccttccagctgctctacttcatctactctgtcctggtgatcgtctcagcagccctctacctggcagggatcgaggcctacctggccgtgatggtctttgccctggtcctgggctggatgaatgccctttacttcacccgtgggctgaagctgacggggacctatagcatcatgatccagaagattctcttcaaggaccttttccgattcctgctcgtctacttgctcttcatgatcggctacgcttcagccctggtctccctcctgaacccgtgtgccaacatgaaggtgtgcaatgaggaccagaccaactgcacagtgcccacttacccctcgtgccgtgacagcgagaccttcagcaccttcctcctggacctgtttaagctgaccatcggcatgggcgacctggagatgctgagcagcaccaagtaccccgtggtcttcatcatcctgctggtgacctacatcatcctcacctttgtgctgctcctcaacatgctcattgccctcatgggcgagacagtgggccaggtctccaaggagagcaagcacatctggaagctgcagtgggccaccaccatcctggacattgagcgctccttccccgtattcctgaggaaggccttccgctctggggagatggtcaccgtgggcaagagctcggacggcactcctgaccgcaggtggtgcttcagggtggatgaggtgaactggtctcactggaaccagaacttgggcatcatcaacgaggacccgggcaagaatgagacctaccagtattatggcttctcgcataccgtgggccgcctccgcagggatcgctggtcctcggtggtaccccgcgtggtggaactgaacaagaactcgaacccggacgaggtggtggtgcctctggacagcatggggaacccccgctgcgatggccaccagcagggttacccccgcaagtggaggactgatgacgccccgctctagggactgcagcccagccccagcttctctgcccactcatttctagtccagccgcatttcagcagtgccttctggggtgtccccccacaccctgctttggccccagaggcgagggaccagtggaggtgccagggaggccccaggaccctgtggtcccctggctctgcctccccaccctggggtgggggctcccggccacctgtcttgctcctatggagtcacataagccaacgccagagcccctccacctcaggccccagcccctgcctctccattatttatttgctctgctctcaggaagcgacgtgacccctgccccagctggaacctggcagaggccttaggaccccgttccaagtgcactgcccggccaagccccagcctcagcctgcgcctgagctgcatgcgccaccatttttggcagcgtggcagctttgcaaggggctggggccctcggcgtggggccatgccttctgtgtgttctgtagtgtctgggatttgccggtgctcaataaatgtttattcattgacggtggaga

SEQ ID NO: 32215 - DNA, 2514 bp, Homo sapiens
  source 1..2514: mol_type = unassigned DNA
atggcggattccagcgaaggcccccgcgcggggcccggggaggtggctgagctccccggggatgagagtggcaccccaggcgatgggcgaccaaatctgcgcatgaagttccagggcgccttccgcaagggggtgcccaaccccatcgatctgctggagtccaccctatatgagtcctcggtggtgcctgggcccaagaaagcacccatggactcactgtttgactacggcacctatcgtcaccactccagtgacaacaagaggtggaggaagaagatcatagagaagcagccgcagagccccaaagcccctgcccctcagccgccccccatcctcaaagtcttcaaccggcctatcctctttgacatcgtgtcccggggctccactgctgacctggacgggctgctcccattcttgctgacccacaagaaacgcctaactgatgaggagtttcgagagccatctacggggaagacctgcctgcccaaggccttgctgaacctgagcaatggccgcaacgacaccatccctgtgctgctggacatcgcggagcgcaccggcaacatgagggagttcattaactcgcccttccgtgacatctactatcgaggtcagacagccctgcacatcgccattgagcgtcgctgcaaacactacgtggaacttctcgtggcccagggagctgatgtccacgcccaggcccgtgggcgcttcttccagcccaaggatgaggggggctacttctactttggggagctgcccctgtcgctggctgcctgcaccaaccagccccacattgtcaactacctgacggagaacccccacaagaaggcggacatgcggcgccaggactcgcgaggcaacacagtgctgcatgcgctggtggccattgctgacaacacccgtgagaacaccaagtttgttaccaagatgtacgacctgctgctgctcaagtgtgcccgcctcttccccgacagcaacctggaggccgtgctcaacaacgacggcctctcgcccctcatgatggctgccaagacgggcaagattgggatctttcagcacatcatccggcgggaggtgacggatgaggacacacggcacctgtcccgcaagttcaaggactgggcctatgggccagtgtattcctcgctttatgacctctcctccctggacacgtgtggggaagaggcctccgtgctggagatcctggtgtacaacagcaagattgagaaccgccacgagatgctggctgtggagcccatcaatgaactgctgcgggacaagtggcgcaagttcggggccgtctccttctacatcaacgtggtctcctacctgtgtgccatggtcatcttcactctcaccgcctactaccagccgctggagggcacaccgccgtacccttaccgcaccacggtggactacctgcggctggctggcgaggtcattacgctcttcactggggtcctgttcttcttcaccaacatcaaagacttgttcatgaagaaatgccctggagtgaattctctcttcattgatggctccttccagctgctctacttcatctactctgtcctggtgatcgtctcagcagccctctacctggcagggatcgaggcctacctggccgtgatggtctttgccctggtcctgggctggatgaatgccctttacttcacccgtgggctgaagctgacggggacctatagcatcatgatccagaagattctcttcaaggaccttttccgattcctgctcgtctacttgctcttcatgatcggctacgcttcagccctggtctccctcctgaacccgtgtgccaacatgaaggtgtgcaatgaggaccagaccaactgcacagtgcccacttacccctcgtgccgtgacagcgagaccttcagcaccttcctcctggacctgtttaagctgaccatcggcatgggcgacctggagatgctgagcagcaccaagtaccccgtggtcttcatcatcctgctggtgacctacatcatcctcacctttgtgctgctcctcaacatgctcattgccctcatgggcgagacagtgggccaggtctccaaggagagcaagcacatctggaagctgcagtgggccaccaccatcctggacattgagcgctccttccccgtattcctgaggaaggccttccgctctggggagatggtcaccgtgggcaagagctcggacggcactcctgaccgcaggtggtgcttcagggtggatgaggtgaactggtctcactggaaccagaacttgggcatcatcaacgaggacccgggcaagaatgagacctaccagtattatggcttctcgcataccgtgggccgcctccgcagggatcgctggtcctcggtggtaccccgcgtggtggaactgaacaagaactcgaacccggacgaggtggtggtgcctctggacagcatggggaacccccgctgcgatggccaccagcagggttacccccgcaagtggaggactgatgacgccccgctctag

SEQ ID NO: 32216 - DNA, 2436 bp, Homo sapiens
  source 1..2436: mol_type = unassigned DNA
atggcggattccagcgaaggcccccgcgcggggcccggggaggtggctgagctccccggggatgagagtggcaccccaggtggggaggcttttcctctctcctccctggccaatctgtttgagggggaggatggctccctttcgccctcaccggctgatgccagtcgccctgctggcccaggcgatgggcgaccaaatctgcgcatgaagttccagggcgccttccgcaagggggtgcccaaccccatcgatctgctggagtccaccctatatgagtcctcggtggtgcctgggcccaagaaagcacccatggactcactgtttgactacggcacctatcgtcaccactccagtgacaacaagaggtggaggaagaagatcatagagaagcagccgcagagccccaaagcccctgcccctcagccgccccccatcctcaaagtcttcaaccggcctatcctctttgacatcgtgtcccggggctccactgctgacctggacgggctgctcccattcttgctgacccacaagaaacgcctaactgatgaggagtttcgagagccatctacggggaagacctgcctgcccaaggccttgctgaacctgagcaatggccgcaacgacaccatccctgtgctgctggacatcgcggagcgcaccggcaacatgagggagttcattaactcgcccttccgtgacatctactatcgaggtcagacagccctgcacatcgccattgagcgtcgctgcaaacactacgtggaacttctcgtggcccagggagctgatgtccacgcccaggcccgtgggcgcttcttccagcccaaggatgaggggggctacttctactttggggagctgcccctgtcgctggctgcctgcaccaaccagccccacattgtcaactacctgacggagaacccccacaagaaggcggacatgcggcgccaggactcgcgaggcaacacagtgctgcatgcgctggtggccattgctgacaacacccgtgagaacaccaagtttgttaccaagatgtacgacctgctgctgctcaagtgtgcccgcctcttccccgacagcaacctggaggccgtgctcaacaacgacggcctctcgcccctcatgatggctgccaagacgggcaagattgggaaccgccacgagatgctggctgtggagcccatcaatgaactgctgcgggacaagtggcgcaagttcggggccgtctccttctacatcaacgtggtctcctacctgtgtgccatggtcatcttcactctcaccgcctactaccagccgctggagggcacaccgccgtacccttaccgcaccacggtggactacctgcggctggctggcgaggtcattacgctcttcactggggtcctgttcttcttcaccaacatcaaagacttgttcatgaagaaatgccctggagtgaattctctcttcattgatggctccttccagctgctctacttcatctactctgtcctggtgatcgtctcagcagccctctacctggcagggatcgaggcctacctggccgtgatggtctttgccctggtcctgggctggatgaatgccctttacttcacccgtgggctgaagctgacggggacctatagcatcatgatccagaagattctcttcaaggaccttttccgattcctgctcgtctacttgctcttcatgatcggctacgcttcagccctggtctccctcctgaacccgtgtgccaacatgaaggtgtgcaatgaggaccagaccaactgcacagtgcccacttacccctcgtgccgtgacagcgagaccttcagcaccttcctcctggacctgtttaagctgaccatcggcatgggcgacctggagatgctgagcagcaccaagtaccccgtggtcttcatcatcctgctggtgacctacatcatcctcacctttgtgctgctcctcaacatgctcattgccctcatgggcgagacagtgggccaggtctccaaggagagcaagcacatctggaagctgcagtgggccaccaccatcctggacattgagcgctccttccccgtattcctgaggaaggccttccgctctggggagatggtcaccgtgggcaagagctcggacggcactcctgaccgcaggtggtgcttcagggtggatgaggtgaactggtctcactggaaccagaacttgggcatcatcaacgaggacccgggcaagaatgagacctaccagtattatggcttctcgcataccgtgggccgcctccgcagggatcgctggtcctcggtggtaccccgcgtggtggaactgaacaagaactcgaacccggacgaggtggtggtgcctctggacagcatggggaacccccgctgcgatggccaccagcagggttacccccgcaagtggaggactgatgacgccccgctctag

SEQ ID NO: 32217 - DNA, 2475 bp, Homo sapiens
  source 1..2475: mol_type = unassigned DNA
atggcggattccagcgaaggcccccgcgcggggcccggggaggtggctgagctccccggggatgagagtggcaccccaggtggggaggcttttcctctctcctccctggccaatctgtttgagggggaggatggctccctttcgccctcaccggctgatgccagtcgccctgctggcccaggcgatgggcgaccaaatctgcgcatgaagttccagggcgccttccgcaagggggtgcccaaccccatcgatctgctggagtccaccctatatgagtcctcggtggtgcctgggcccaagaaagcacccatggactcactgtttgactacggcacctatcgtcaccactccagtgacaacaagaggtggaggaagaagatcatagagaagcagccgcagagccccaaagcccctgcccctcagccgccccccatcctcaaagtcttcaaccggcctatcctctttgacatcgtgtcccggggctccactgctgacctggacgggctgctcccattcttgctgacccacaagaaacgcctaactgatgaggagtttcgagagccatctacggggaagacctgcctgcccaaggccttgctgaacctgagcaatggccgcaacgacaccatccctgtgctgctggacatcgcggagcgcaccggcaacatgagggagttcattaactcgcccttccgtgacatctactatcgaggggagctgcccctgtcgctggctgcctgcaccaaccagccccacattgtcaactacctgacggagaacccccacaagaaggcggacatgcggcgccaggactcgcgaggcaacacagtgctgcatgcgctggtggccattgctgacaacacccgtgagaacaccaagtttgttaccaagatgtacgacctgctgctgctcaagtgtgcccgcctcttccccgacagcaacctggaggccgtgctcaacaacgacggcctctcgcccctcatgatggctgccaagacgggcaagattgggatctttcagcacatcatccggcgggaggtgacggatgaggacacacggcacctgtcccgcaagttcaaggactgggcctatgggccagtgtattcctcgctttatgacctctcctccctggacacgtgtggggaagaggcctccgtgctggagatcctggtgtacaacagcaagattgagaaccgccacgagatgctggctgtggagcccatcaatgaactgctgcgggacaagtggcgcaagttcggggccgtctccttctacatcaacgtggtctcctacctgtgtgccatggtcatcttcactctcaccgcctactaccagccgctggagggcacaccgccgtacccttaccgcaccacggtggactacctgcggctggctggcgaggtcattacgctcttcactggggtcctgttcttcttcaccaacatcaaagacttgttcatgaagaaatgccctggagtgaattctctcttcattgatggctccttccagctgctctacttcatctactctgtcctggtgatcgtctcagcagccctctacctggcagggatcgaggcctacctggccgtgatggtctttgccctggtcctgggctggatgaatgccctttacttcacccgtgggctgaagctgacggggacctatagcatcatgatccagaagattctcttcaaggaccttttccgattcctgctcgtctacttgctcttcatgatcggctacgcttcagccctggtctccctcctgaacccgtgtgccaacatgaaggtgtgcaatgaggaccagaccaactgcacagtgcccacttacccctcgtgccgtgacagcgagaccttcagcaccttcctcctggacctgtttaagctgaccatcggcatgggcgacctggagatgctgagcagcaccaagtaccccgtggtcttcatcatcctgctggtgacctacatcatcctcacctttgtgctgctcctcaacatgctcattgccctcatgggcgagacagtgggccaggtctccaaggagagcaagcacatctggaagctgcagtgggccaccaccatcctggacattgagcgctccttccccgtattcctgaggaaggccttccgctctggggagatggtcaccgtgggcaagagctcggacggcactcctgaccgcaggtggtgcttcagggtggatgaggtgaactggtctcactggaaccagaacttgggcatcatcaacgaggacccgggcaagaatgagacctaccagtattatggcttctcgcataccgtgggccgcctccgcagggatcgctggtcctcggtggtaccccgcgtggtggaactgaacaagaactcgaacccggacgaggtggtggtgcctctggacagcatggggaacccccgctgcgatggccaccagcagggttacccccgcaagtggaggactgatgacgccccgctctag

SEQ ID NO: 32218 - DNA, 2295 bp, Homo sapiens
  source 1..2295: mol_type = unassigned DNA
atggcggattccagcgaaggcccccgcgcggggcccggggaggtggctgagctccccggggatgagagtggcaccccaggtggggaggcttttcctctctcctccctggccaatctgtttgagggggaggatggctccctttcgccctcaccggctgatgccagtcgccctgctggcccaggcgatgggcgaccaaatctgcgcatgaagttccagggcgccttccgcaagggggtgcccaaccccatcgatctgctggagtccaccctatatgagtcctcggtggtgcctgggcccaagaaagcacccatggactcactgtttgactacggcacctatcgtcaccactccagtgacaacaagaggtggaggaagaagatcatagagaagcagccgcagagccccaaagcccctgcccctcagccgccccccatcctcaaagtcttcaaccggcctatcctctttgacatcgtgtcccggggctccactgctgacctggacgggctgctcccattcttgctgacccacaagaaacgcctaactgatgaggagtttcgagagccatctacggggaagacctgcctgcccaaggccttgctgaacctgagcaatggccgcaacgacaccatccctgtgctgctggacatcgcggagcgcaccggcaacatgagggagttcattaactcgcccttccgtgacatctactatcgaggggagctgcccctgtcgctggctgcctgcaccaaccagccccacattgtcaactacctgacggagaacccccacaagaaggcggacatgcggcgccaggactcgcgaggcaacacagtgctgcatgcgctggtggccattgctgacaacacccgtgagaacaccaagtttgttaccaagatgtacgacctgctgctgctcaagtgtgcccgcctcttccccgacagcaacctggaggccgtgctcaacaacgacggcctctcgcccctcatgatggctgccaagacgggcaagattgggaaccgccacgagatgctggctgtggagcccatcaatgaactgctgcgggacaagtggcgcaagttcggggccgtctccttctacatcaacgtggtctcctacctgtgtgccatggtcatcttcactctcaccgcctactaccagccgctggagggcacaccgccgtacccttaccgcaccacggtggactacctgcggctggctggcgaggtcattacgctcttcactggggtcctgttcttcttcaccaacatcaaagacttgttcatgaagaaatgccctggagtgaattctctcttcattgatggctccttccagctgctctacttcatctactctgtcctggtgatcgtctcagcagccctctacctggcagggatcgaggcctacctggccgtgatggtctttgccctggtcctgggctggatgaatgccctttacttcacccgtgggctgaagctgacggggacctatagcatcatgatccagaagattctcttcaaggaccttttccgattcctgctcgtctacttgctcttcatgatcggctacgcttcagccctggtctccctcctgaacccgtgtgccaacatgaaggtgtgcaatgaggaccagaccaactgcacagtgcccacttacccctcgtgccgtgacagcgagaccttcagcaccttcctcctggacctgtttaagctgaccatcggcatgggcgacctggagatgctgagcagcaccaagtaccccgtggtcttcatcatcctgctggtgacctacatcatcctcacctttgtgctgctcctcaacatgctcattgccctcatgggcgagacagtgggccaggtctccaaggagagcaagcacatctggaagctgcagtgggccaccaccatcctggacattgagcgctccttccccgtattcctgaggaaggccttccgctctggggagatggtcaccgtgggcaagagctcggacggcactcctgaccgcaggtggtgcttcagggtggatgaggtgaactggtctcactggaaccagaacttgggcatcatcaacgaggacccgggcaagaatgagacctaccagtattatggcttctcgcataccgtgggccgcctccgcagggatcgctggtcctcggtggtaccccgcgtggtggaactgaacaagaactcgaacccggacgaggtggtggtgcctctggacagcatggggaacccccgctgcgatggccaccagcagggttacccccgcaagtggaggactgatgacgccccgctctag

SEQ ID NO: 32219 - DNA, 2952 bp, Homo sapiens
  source 1..2952: mol_type = unassigned DNA
ctcagctctgcaaagagctcctccccctccaggaaaagcacttctccccaggcagggcggtcagtcccctcagcgcacctgcatgcacacacaccacctcacaaccacacactgcatgcacacacatacaccacagccacacactgtgcatacacgcacaccccacaacccacatactgcatgcacacacacacacctacaagctgcatgctgcatacacaagtcatacaggagataaactcagagtcccagccccaaatagaccccatctcttgctcagttgctgtcatcctagacctgtttctttcgccacatttctataatctgccagtgtctgcaaggagaagacatggggggttttctacctaaggcagaagggcccgggagccaactccagaaacttctgccctcctttctggtcagagaacaagactgggaccagcacctggacaagcttcatatgctgcagcagaagaggattctagagtctccactgcttcgagcatccaaggaaaatgacctgtctgttcttaggcaacttctactggactgcacctgtgacgttcgacaaagaggagccctgggggagacggcgctgcacatagcagccctctatgacaacttggaggcggccttggtgctgatggaggctgccccagagctggtctttgagcccaccacatgtgaggcttttgcaggtcagactgcactgcacatcgctgttgtgaaccagaatgtgaacctggtgcgtgccctgctcacccgcagggccagtgtctctgccagagccacaggcactgccttccgccgtagtccccgcaacctcatctactttggggagcaccctttgtcctttgctgcctgtgtgaacagcgaggagatcgtgcggctgctcattgagcatggagctgacatcagggcccaggactccctgggaaacacagtattacacatcctcatcctccagcccaacaaaacctttgcctgccagatgtacaacctgctgctgtcctacgatggacatggggaccacctgcagcccctggaccttgtgcccaatcaccagggtctcacccccttcaagctggctggagtggagggtaacactgtgatgttccagcacctgatgcagaagcggaggcacatccagtggacgtatggacccctgacctccattctctacgacctcacagagatcgactcctggggagaggagctgtccttcctggagcttgtggtctcctctgataaacgagaggctcgccaaattctggaacagaccccagtgaaggagctggtgagcttcaagtggaacaagtatggccggccgtacttctgcatcctggctgccttgtacctgctctacatgatctgctttaccacgtgctgcgtctaccgcccccttaagtttcgtggtggcaaccgcactcattctcgagacatcaccatcctccagcaaaaactactacaggaggcctatgagacacgtgaagatatcatcaggctggtgggggagctggtgagcatcgttggggctgtgatcatcctgctcctagagattccagacatcttcagggttggtgcctctcgctattttggaaagacgattcttggggggccattccatgtcatcatcatcacctatgcctccctggtgctggtgaccatggtgatgcggctcaccaacaccaatggggaggtggtgcccatgtcctttgccctggtgctgggctggtgcagtgtcatgtatttcactcgaggattccagatgctgggtcccttcaccatcatgatccagaagatgatttttggagacctaatgcgtttctgctggctgatggctgtggtcatcttgggatttgcctccgcgttctatatcattttccagacagaggacccaaccagtctggggcaattctatgactaccccatggcactgttcaccacctttgagctttttctcactgttattgatgcacctgccaactacgacgtggacttgcccttcatgttcagcattgtcaacttcgccttcgccatcattgccacactgctcatgctcaacttgttcatcgccatgatgggcgacacccactggagggtggcccaggagagggatgagctctggagggcccaggtcgtggccaccacagtgatgctggagcggaagctgcctcgctgcctgtggcctcgctccgggatctgtgggtgcgaattcgggctgggggaccgctggttcctgcgggttgagaaccacaatgatcagaatcctctgcgagtgcttcgctatgtggaagtgttcaagaactcagacaaggaggatgaccaggagcatccatctgagaaacagccctctggggctgagagtgggactctagccagagcctctttggctcttccaacttcctccctgtcccggaccgcgtcccagagcagcagtcaccgaggctgggagatccttcgtcaaaacaccctggggcacttgaatcttggactgaaccttagtgagggggatggagaggaggtctaccatttttgattaacatcgctatcactcttgaccttactcccggttggcctgggggcggggacagagacggagacctctgcctatgcaagtgtctaacttctgtgcctgttaatcatgggagggtgagacagaacaatccctaaagggtcatgcctcacacttcacatcagaatttctggcaatgggcaatggtcatcgattgtctcacgtattttctgggctcttgcaagtcacccatctcaggaaaaaggaggttggcaactaaagacatgaggcagggatgctagattaatgtcaggaccatttctcttctgccccacgcagcccctagaaagtagtaagctgtgaggctattctggctccccagggcttacgtgggaagagccaggcatggcatagaggttgtggcccttctttttttc

SEQ ID NO: 32220 - DNA, 2120 bp, Homo sapiens
  source 1..2120: mol_type = unassigned DNA
cacacacaccacctcacaaccacacactgcatgcacacacatacaccacagccacacactgtgcatacacgcacaccccacaacccacatactgcatgcacacacacacacctacaagctgcatgctgcatacacaagtcatacaggagataaactcagagtcccagccccaaatagaccccatctcttgctcagttgctgtcatcctagacctgtttctttcgccacatttctataatctgccagtgtctgcaaggagaagacatggggggttttctacctaaggcagaagggcccgggagccaactccagaaacttctgccctcctttctggtcagagaacaagactgggaccagcacctggacaagcttcatatgctgcagcagaagaggattctagagtctccactgcttcgagcatccaaggaaaatgacctgtctgttcttaggcaacttctactggactgcacctgtgacgttcgacaaagaggagccctgggggagacggcgctgcacatagcagccctctatgacaacttggaggcggccttggtgctgatggaggctgccccagagctggtctttgagcccaccacatgtgaggcttttgcaggtcagactgcactgcacatcgctgttgtgaaccagaatgtgaacctggtgcgtgccctgctcacccgcagggccagtgtctctgccagagccacaggcactgccttccgccgtagtccccgcaacctcatctactttggggagcaccctttgtcctttgctgcctgtgtgaacagcgaggagatcgtgcggctgctcattgagcatggagctgacatcagggcccaggactccctgggaaacacagtattacacatcctcatcctccagcccaacaaaacctttgcctgccagatgtacaacctgctgctgtcctacgatggacatggggaccacctgcagcccctggaccttgtgcccaatcaccagggtctcacccccttcaagctggctggagtggagggtaacactgtgatgttccagcacctgatgcagaagcggaggcacatccagtggacgtatggacccctgacctccattctctacgacctcacagagatcgactcctggggagaggagctgtccttcctggagcttgtggtctcctctgataaacgagaggctcgccaaattctggaacagaccccagtgaaggagctggtgagcttcaagtggaacaagtatggccggccgtacttctgcatcctggctgccttgtacctgctctacatgatctgctttaccacgtgctgcgtctaccgcccccttaagtttcgtggtggcaaccgcactcattctcgagacatcaccatcctccagcaaaaactactacaggtgattctcctcagaaggggatgagagagaattgcatcaaggggtgatggtgctggaaacgaagccatgctactcagggacgatgccacgctctgggttccagcaggtgtaggctcctaaacacccaggtagaaattagacatgagaccaggaggccacagatggggtttaatgagcacaagagcatttgtccagggagctgtggattttctcacacaaactttgaaagagtgcttggcatgagtaagcctgtgcttttgtgaaattttttggtaatttacaaaaagtatcagggttttgtagtgggatgttcaaggtaaactctattgctcaaaaggaggaaaattgtgctccaagtccatttctgagtccatttttgttgtatttgggcaacacagacagccctgctggcctgcaccctcttctgtgtgctgtctatatgggcccatgggaataatgtgtcagctgtctgactgcctgtcagacactctgcagaaggatgtctggattgggtatcaggctgaagtaaatactctctgaggctccatttagtgttgtgggcctgccattctgtgttgtggtggccaagggaaaactagggttaggaagaggactgattcgaggtacacagtaaatatagaaatctgctgttgaagaaagtaaacctcctttttgtgcaacagaaagggtagactctaatgagcacttctgaatatatatatttaacaactgta

SEQ ID NO: 32221 - DNA, 2174 bp, Homo sapiens
  source 1..2174: mol_type = unassigned DNA
atgggtttgtcactgcccaaggagaaagggctaattctctgcctatggagcaagttctgcagatggttccaggactccctgggaaacacagtgttacacatcctcatcctccagcccaacaaaacctttgcctgccagatgtacaacctgttgctgtcctacgacagacatggggaccacctgcagcccctggacctcgtgcccaatcaccagggtctcacccctttcaagctggctggagtggagggtaacactgtgatgtttcagcacctgatgcagaagcggaagcacacccagtggacgtatggaccactgacctcgactctctatgacctcacagagatcgactcctcaggggatgagcagtccctgctggaacttatcatcaccaccaagaagcgggaggctcgccagatcctggaccagacgccggtgaaggagctggtgagcctcaagtggaagcggtacgggcggccgtacttctgcatgctgggtgccatatatctgctgtacatcatctgcttcaccatgtgctgcatctaccgccccctcaagcccaggaccaataaccgcacgagcccccgggacaacaccctcttacagcagaagctacttcaggaagcctacatgacccctaaggacgatatccggctggtcggggagctggtgactgtcattggggctatcatcatcctgctggtagaggttccagacatcttcagaatgggggtcactcgcttctttggacagaccatccttgggggcccattccatgtcctcatcatcacctatgccttcatggtgctggtgaccatggtgatgcggctcatcagtgccagcggggaggtggtacccatgtcctttgcactcgtgctgggctggtgcaacgtcatgtacttcgcccgaggattccagatgctaggccccttcaccatcatgattcagaagatgatttttggcgacctgatgcgattctgctggctgatggctgtggtcatcctgggctttgcttcagccttctatatcatcttccagacagaggaccccgaggagctaggccacttctacgactaccccatggccctgttcagcaccttcgagctgttccttaccatcatcgatggcccagccaactacaacgtggacctgcccttcatgtacagcatcacctatgctgcctttgccatcatcgccacactgctcatgctcaacctcctcattgccatgatgggcgacactcactggcgagtggcccatgagcgggatgagctgtggagggcccagattgtggccaccacggtgatgctggagcggaagctgcctcgctgcctgtggcctcgctccgggatctgcggacgggagtatggcctgggagaccgctggttcctgcgggtggaagacaggcaagatctcaaccggcagcggatccaacgctacgcacaggccttccacacccggggctctgaggatttggacaaagactcagtggaaaaactagagctgggctgtcccttcagcccccacctgtcccttcctatgccctcagtgtctcgaagtacctcccgcagcagtgccaattgggaaaggcttcggcaagggaccctgaggagagacctgcgtgggataatcaacaggggtctggaggacggggagagctgggaatatcagatctgactgcgtgttctcacttcgcttcctggaacttgctctcattttcctgggtgcatcaaacaaaacaaaaaccaaacacccagaggtctcatctcccaggccccaggggagaaagaggagtagcatgaacgccaaggaatgtacgttgagaatcactgctccaggcctgcattactccttcagctctggggcagaggaagcccagcccaagcacggggctggcagggcgtgaggaactctcctgtggcctgctcatcacccttccgacaggagcactgcatgtcagagcactttaaaaacaggccagcctgcttgggcgctcggtctccaccccagggtcataagtggggagagagcccttcccagggcacccaggcaggtgcagggaagtgcagagcttgtggaaagcgtgtgagtgagggagacaggaacggctctgggggtgggaagtggggctaggtcttgccaactccatcttcaataaagtcgttttcggatccctg

SEQ ID NO: 32222 - DNA, 2928 bp, Homo sapiens
  source 1..2928: mol_type = unassigned DNA
agacaggccagccctgcagagtcctggctggctctgccaagtgtaacaaactcacagccctctccaaactggctggggctgctgggagactcccaaggaactcgtcaggaaggcaggagacaggagacgggacctctacagggagacggtgggccggcccttgggggggctgatgtgtccccaaggctgagtcccgtcagggtctggcctcggcctcaggcccccaaggagccggccctacaccccatgggtttgtcactgcccaaggagaaagggctaattctctgcctatggagcaagttctgcagatggttccagagacgggagtcctgggcccagagccgagatgagcagaacctgctgcagcagaagaggatctgggagtctcctctccttctagctgccaaagataatgatgtccaggccctgaacaagttgctcaagtatgaggattgcaaggtgcaccagagaggagccatgggggaaacagcgctacacatagcagccctctatgacaacctggaggccgccatggtgctgatggaggctgccccggagctggtctttgagcccatgacatctgagctctatgagggtcagactgcactgcacatcgctgttgtgaaccagaacatgaacctggtgcgagccctgcttgcccgcagggccagtgtctctgccagagccacaggcactgccttccgccgtagtccctgcaacctcatctactttggggagcaccctttgtcctttgctgcctgtgtgaacagtgaggagatcgtgcggctgctcattgagcatggagctgacatccgggcccaggactccctgggaaacacagtgttacacatcctcatcctccagcccaacaaaacctttgcctgccagatgtacaacctgttgctgtcctacgacagacatggggaccacctgcagcccctggacctcgtgcccaatcaccagggtctcacccctttcaagctggctggagtggagggtaacactgtgatgtttcagcacctgatgcagaagcggaagcacacccagtggacgtatggaccactgacctcgactctctatgacctcacagagatcgactcctcaggggatgagcagtccctgctggaacttatcatcaccaccaagaagcgggaggctcgccagatcctggaccagacgccggtgaaggagctggtgagcctcaagtggaagcggtacgggcggccgtacttctgcatgctgggtgccatatatctgctgtacatcatctgcttcaccatgtgctgcatctaccgccccctcaagcccaggaccaataaccgcacgagcccccgggacaacaccctcttacagcagaagctacttcaggaagcctacatgacccctaaggacgatatccggctggtcggggagctggtgactgtcattggggctatcatcatcctgctggtagaggttccagacatcttcagaatgggggtcactcgcttctttggacagaccatccttgggggcccattccatgtcctcatcatcacctatgccttcatggtgctggtgaccatggtgatgcggctcatcagtgccagcggggaggtggtacccatgtcctttgcactcgtgctgggctggtgcaacgtcatgtacttcgcccgaggattccagatgctaggccccttcaccatcatgattcagaagatgatttttggcgacctgatgcgattctgctggctgatggctgtggtcatcctgggctttgcttcagccttctatatcatcttccagacagaggaccccgaggagctaggccacttctacgactaccccatggccctgttcagcaccttcgagctgttccttaccatcatcgatggcccagccaactacaacgtggacctgcccttcatgtacagcatcacctatgctgcctttgccatcatcgccacactgctcatgctcaacctcctcattgccatgatgggcgacactcactggcgagtggcccatgagcgggatgagctgtggagggcccagattgtggccaccacggtgatgctggagcggaagctgcctcgctgcctgtggcctcgctccgggatctgcggacgggagtatggcctgggagaccgctggttcctgcgggtggaagacaggcaagatctcaaccggcagcggatccaacgctacgcacaggccttccacacccggggctctgaggatttggacaaagactcagtggaaaaactagagctgggctgtcccttcagcccccacctgtcccttcctatgccctcagtgtctcgaagtacctcccgcagcagtgccaattgggaaaggcttcggcaagggaccctgaggagagacctgcgtgggataatcaacaggggtctggaggacggggagagctgggaatatcagatctgactgcgtgttctcacttcgcttcctggaacttgctctcattttcctgggtgcatcaaacaaaacaaaaaccaaacacccagaggtctcatctcccaggccccaggggagaaagaggagtagcatgaacgccaaggaatgtacgttgagaatcactgctccaggcctgcattactccttcagctctggggcagaggaagcccagcccaagcacggggctggcagggcgtgaggaactctcctgtggcctgctcatcacccttccgacaggagcactgcatgtcagagcactttaaaaacaggccagcctgcttgggcgctcggtctccaccccagggtcataagtggggagagagcccttcccagggcacccaggcaggtgcagggaagtgcagagcttgtggaaagcgtgtgagtgagggagacaggaacggctctgggggtgggaagtggggctaggtcttgccaactccatcttcaataaagtcgttttcggatccctgccca

SEQ ID NO: 32223 - DNA, 407 bp, Homo sapiens
  source 1..407: mol_type = unassigned DNA
gcaaagcccctcattttggcagaacttaccatgtcgaccagccgcaaattaaagagtcatggcatgaggaggagcaagagccgatctcctcacaagggagtcaagagaggtggcagcaaaagaaaataccgtaagggcaacctgaaaagtaggaaacggggcgatgacgccaatcgcaattaccgctcccacttgtgagcccccagcgggctctgccctggtgcgcttcacacagcaccaagcagcaacaagaacagcagaaggggaactgccaaggagacctgatgttagatcaaagccagagaggagcctatggaatgtggatcaaatgccagttgtgacgaaatgaggaatgtatatgttggctgtttttccccaacatctcaataaaactttgaaagcagaaa

SEQ ID NO: 32224 - DNA, 626 bp, Homo sapiens
  source 1..626: mol_type = unassigned DNA
ggcctctgtaaagctaggcctgctgggagaggatgaggaggaggccctgcccctccaaacgtggcctcctatggacacccagactcacagccttcctatcacccacactcagctccatagcaactctcagccccaaagccgcacctgcacccgccattgccaaaccttcagccagagttgcagacagagccatcgtggcagccggagccagagctccagccagagcccggccagccaccgcaacccaactggagcccacagctcatccggccaccagagccagagtcccaacactagtccaccaccaaagcgccacaaaaagactatgaactcccaccactctcccatgcggcccaccatcctgcactgccgctgccccaagaacagaaagaacttggaaggcaagctgaaaaagaaaaaaatggccaagaggatccagcaggtgtacaaaaccaagacgcggagctcaggatggaaatccaactaatgagaccgcactccttggcttgttcctgcgtgtttcacccaaaggagaaaatgctaggatgaagtcaatcttcttgcaggaacatgttactatggtgatttctacgcaacactaattaaagcttgtacctggaagacta

SEQ ID NO: 32225 - DNA, 2008 bp, Homo sapiens
  source 1..2008: mol_type = unassigned DNA
ctcggcagccgcctgtcgccgcgggagcagccgctatctctgtgtgtccgcgtgtgcgcccggtccccgcctgccgcaccatggagagacacggccaaccgcctacgtatcagctccatccaggccaccactgcggcgggctctggccaccccacgtcatgctgcagcgccgcagagatcatggctgtcctctttttccacaccatgcgctacaagtcccaggacccccggaatccgcacaatgaccgctttgtgctctccaagggccatgcagctcccatcctctacgcggtctgggctgaagctggtttcctggccgaggcggagctgctgaacctgaggaagatcagctccgacttggacgggcacccggtcccgaaacaagctttcaccgacgtggccactggctccctgggccagggcctcggggccgcttgtgggatggcctacaccggcaaatacttcgacaaggccagctaccgagtctattgcttgctgggagacggggagctgtcagagggctctgtatgggaggccatggccttcgccagcatctataagctggacaaccttgtggccattctagacatcaatcgcctgggccagagtgacccggccccactgcagcaccagatggacatctaccagaagcggtgcgaggccttcggttggcatgccatcatcgtggatggacacagcgtggaggagctgtgcaaggcctttggccaggccaagcaccagccaacagccatcattgccaagaccttcaagggccgagggatcacgggggtagaagataaggagtcttggcatgggaagcccctccccaaaaacatggctgagcagatcatccaggagatctacagccagatccagagcaaaaagaagatcctggcaacccctccacaggaggacgcaccctcagtggacattgccaacatccgcatgcccagcctgcccagctacaaagttggggacaagatagccacccgcaaggcctacgggcaggcactggccaagctgggccatgccagtgaccgcatcatcgccctggatggggacaccaaaaattccaccttctcggagatcttcaaaaaggagcacccggaccgcttcatcgagtgctacattgctgagcagaacatggtgagcatcgcggtgggctgtgccacccgcaacaggacggtgcccttctgcagcacttttgcagccttcttcacgcgggcctttgaccagattcgcatggccgccatctccgagagcaacatcaacctctgcggctcccactgcggcgtttccatcggggaagacgggccctcccagatggccctagaagatctggctatgtttcggtcagtccccacatcaactgtcttttacccaagtgatggcgttgctacagagaaggcagtggaactagccgccaatacaaagggtatctgcttcatccggaccagccgcccagaaaatgccatcatctataacaacaatgaggacttccaggtcggacaagccaaggtggtcctgaagagcaaggatgaccaggtgaccgttatcggggctggggtgaccctgcacgaggccttggccgctgccgaactgctgaagaaagaaaagatcaacatccgcgtgctggaccccttcaccatcaagcccctggacagaaaactcattctcgacagcgctcgtgccaccaagggcaggatcctcaccgtggaggaccattattatgaaggtggcattggtgaggctgtgtccagtgcagtagtgggcgagcctggcatcactgtcacccacctggcagttaaccgggtaccaagaagtgggaagccggctgagctgctgaagatgtttggtatcgacagggatgccattgcacaagctgtgaggggcctcatcaccaaggcctagggcgggtatgaagtgtggggcgggggtctatacattcctgagattctgggaaaggtgctcaaagatgtactgagaggaggggtaaatatatgttttg

SEQ ID NO: 32226 - DNA, 1931 bp, Homo sapiens
  source 1..1931: mol_type = unassigned DNA
cgcctgtcgccgcgggagcagccgctatctctgtgtgtccgcgtgtgcgcccggtccccgcctgccgcaccatggagagctaccacaagcctgaccagcagaagctgcaggccttgaaggacacggccaaccgcctacgtatcagctccatccaggccaccactgcggcgggctctggccaccccacgtcatgctgcagcgccgcagagatcatggctgtcctctttttccacaccatgcgctacaagtcccaggacccccggaatccgcacaatgaccgctttgtgctctccaagggccatgcagctcccatcctctacgcggtctgggctgaagctggtttcctggccgaggcggagctgctgaacctgaggaagatcagctccgacttgtgggatggcctacaccggcaaatacttcgacaaggccagctaccgagtctattgcttgctgggaggccatggccttcgccagcatctataagctggacaaccttgtggccattctagacatcaatcgcctgggccagagtgacccggccccactgcagcaccagatggacatctaccagaagcggtgcgaggccttcggttggcatgccatcatcgtggatggacacagcgtggaggagctgtgcaaggcctttggccaggccaagcaccagccaacagccatcattgccaagaccttcaagggccgagggatcacgggggtagaagataaggagtcttggcatgggaagcccctccccaaaaacatggctgagcagatcatccaggagatctacagccagatccagagcaaaaagaagatcctggcaacccctccacaggaggacgcaccctcagtggacattgccaacatccgcatgcccagcctgcccagctacaaagttggggacaagatagccacccgcaaggcctacgggcaggcactggccaagctgggccatgccagtgaccgcatcatcgccctggatggggacaccaaaaattccaccttctcggagatcttcaaaaaggagcacccggaccgcttcatcgagtgctacattgctgagcagaacatggtgagcatcgcggtgggctgtgccacccgcaacaggacggtgcccttctgcagcacttttgcagccttcttcacgcgggcctttgaccagattcgcatggccgccatctccgagagcaacatcaacctctgcggctcccactgcggcgtttccatcggggaagacgggccctcccagatggccctagaagatctggctatgtttcggtcagtccccacatcaactgtcttttacccaagtgatggcgttgctacagagaaggcagtggaactagccgccaatacaaagggtatctgcttcatccggaccagccgcccagaaaatgccatcatctataacaacaatgaggacttccaggtcggacaagccaaggtggtcctgaagagcaaggatgaccaggtgaccgttatcggggctggggtgaccctgcacgaggccttggccgctgccgaactgctgaagaaagaaaagatcaacatccgcgtgctggaccccttcaccatcaagcccctggacagaaaactcattctcgacagcgctcgtgccaccaagggcaggatcctcaccgtggaggaccattattatgaaggtggcattggtgaggctgtgtccagtgcagtagtgggcgagcctggcatcactgtcacccacctggcagttaaccgggtaccaagaagtgggaagccggctgagctgctgaagatgtttggtatcgacagggatgccattgcacaagctgtgaggggcctcatcaccaaggcctagggcgggtatgaagtgtggggcgggggtctatacattcctgagattctgggaaaggtgctcaaagatgtactgagaggaggggtaaatatatgttttg

SEQ ID NO: 32227 - DNA, 2831 bp, Homo sapiens
  source 1..2831: mol_type = unassigned DNA
gggagcagccgctatctctgtgtgtccgcgtgtgcgcccggtccccgcctgccgcaccatggagagctaccacaagcctgaccagcagaagctgcaggccttgaaggacacggccaaccgcctacgtatcagctccatccaggccaccactgcggcgggctctggccaccccacgtcatgctgcagcgccgcagagatcatggctgtcctctttttccacaccatgcgctacaagtcccaggacccccggaatccgcacaatgaccgctttgtgctctccaagggccatgcagctcccatcctctacgcggtctgggctgaagctggtttcctggccgaggcggagctgctgaacctgaggaagatcagctccgacttggacgggcacccggtcccgaaacaagctttcaccgacgtggccactggctccctgggccagggcctcggggccgcttgtgggatggcctacaccggcaaatacttcgacaaggccagctaccgagtctattgcttgctgggagacggggagctgtcagagggctctgtatgggaggccatggccttcgccagcatctataagctggacaaccttgtggccattctagacatcaatcgcctgggccagagtgacccggccccactgcagcaccagatggacatctaccagaagcggtgcgaggccttcggttggcatgccatcatcgtggatggacacagcgtggaggagctgtgcaaggcctttggccaggccaagcaccagccaacagccatcattgccaagaccttcaagggccgagggatcacgggggtagaagataaggagtcttggcatgggaagcccctccccaaaaacatggctgagcagatcatccaggagatctacagccagatccagagcaaaaagaagatcctggcaacccctccacaggaggacgcaccctcagtggacattgccaacatccgcatgcccagcctgcccagctacaaagttggggacaagatagccacccgcaaggcctacgggcaggcactggccaagctgggccatgccagtgaccgcatcatcgccctggatggggacaccaaaaattccaccttctcggagatcttcaaaaaggagcacccggaccgcttcatcgagtgctacattgctgagcagaacatggtgagcatcgcggtgggctgtgccacccgcaacaggacggtgcccttctgcagcacttttgcagccttcttcacgcgggcctttgaccagattcgcatggccgccatctccgagagcaacatcaacctctgcggctcccactgcggcgtttccatcggggaagacgggccctcccagatggccctagaagatctggctatgtttcggtcagtccccacatcaactgtcttttacccaagtgatggcgttgctacagagaaggcagtggaactagccgccaatacaaagggtatctgcttcatccggaccagccgcccagaaaatgccatcatctataacaacaatgaggacttccaggtcggacaagccaaggtggtcctgaagagcaaggatgaccaggtgaccgttatcggggctggggtgaccctgcacgaggccttggccgctgccgaactgctgaagaaagaaaagatcaacatccgcgtgctggaccccttcaccatcaagcccctggacagaaaactcattctcgacagcgctcgtgccaccaagggcaggatcctcaccgtggaggaccattattatgaaggtggcattggtgaggctgtgtccagtgcagtagtgggcgagcctggcatcactgtcacccacctggcagttaaccgggtaccaagaagtgggaagccggctgagctgctgaagatgtttggtatcgacagggatgccattgcacaagctgtgaggggcctcatcaccaaggcctagggcggccagtgcaggttctggggaagaagcgtggagggtgcgctagggaggctggtgtccttggtcctgggccaggacctgggtgtcccaagtccccttggaatcacctgcaactgccctcaacctccagaactatcgctgcctcccattcatcaccaggtgacatttgactgcaacctgccttctagctgagaggctgagacctacatccctcattgtgacctcagtccacctggccctgagcgggctggggaactgcctcagtctggaagctgaccaggcactctcagggccgccccacctcccccaagtccccacagccttgcagtcaggtctcctgggatagggaggttcacttgcttgttgtccctcgtccttgtcatatccttttaactaggcatctcagagaagcagagacagggcagccttcgtcctgggggaaaagggaccctcaggatggcatgagaggtcctcaatcccaagtgtggaactgtccccctcaacttgttaaaatgcagatttctgggtcttgccaatggggcctgggactccatgtgacaactggcccaggagcttctgatgtcacacagaattctgcagtcccaagctccagccccgacctgctctgctgttcctaggtgactgccctcacactgctgaccacagtggatttctccccctgctgctcgggctcagctggggtcagccctgcttataaggtcaactgtgcaaaaccttatactggccaagaacaaactagtgctgggggaggagggctgggtgccccggccactggtggagtccccaggaaatcctcagagctgttgcgaggatgagacacatttgtggacacgtccacctgtcctcctgaccgtctggagagaataaacctgtcaaagcc

SEQ ID NO: 32228 - DNA, 3010 bp, Homo sapiens
  source 1..3010: mol_type = unassigned DNA
gcgcccggcctcggcagccgcctgtcgccgcgggagcagccgctatctctgtgtgtccgcgtgtgcgcccggtccccgcctgccgcaccatggagagctaccacaagcctgaccagcagaagctgcaggccttgaaggacacggccaaccgcctacgtatcagctccatccaggccaccactgcggcgggctctggccaccccacgtcatgctgcagcgccgcagagatcatggctgtcctctttttccacaccatgcgctacaagtcccaggacccccggaatccgcacaatgaccgctttgtgctctccaagggccatgcagctcccatcctctacgcggtctgggctgaagctggtttcctggccgaggcggagctgctgaacctgaggaagatcagctccgacttggacgggcacccggtcccgaaacaagctttcaccgacgtggccactggctccctgggccagggcctcggggccgcttgtgggatggcctacaccggcaaatacttcgacaaggccagctaccgagtctattgcttgctgggagacggggagctgtcagagggctctgtatgggaggccatggccttcgccagcatctataagctggacaaccttgtggccattctagacatcaatcgcctgggccagagtgacccggccccactgcagcaccagatggacatctaccagaagcggtgcgaggccttcggttggcatgccatcatcgtggatggacacagcgtggaggagctgtgcaaggcctttggccaggccaagcaccagccaacagccatcattgccaagaccttcaagggccgagggatcacgggggtagaagataaggagtcttggcatgggaagcccctccccaaaaacatggctgagcagatcatccaggagatctacagccagatccagagcaaaaagaagatcctggcaacccctccacaggaggacgcaccctcagtggacattgccaacatccgcatgcccagcctgcccagctacaaagttggggacaagatagccacccgcaaggcctacgggcaggcactggccaagctgggccatgccagtgaccgcatcatcgccctggatggggacaccaaaaattccaccttctcggagatcttcaaaaaggagcacccggaccgcttcatcgagtgctacattgctgagcagaacatggtgagcatcgcggtgggctgtgccacccgcaacaggacggtgcccttctgcagcacttttgcagccttcttcacgcgggcctttgaccagattcgcatggccgccatctccgagagcaacatcaacctctgcggctcccactgcggcgtttccatcggggaagacgggccctcccagatggccctagaagatctggctatgtttcggtcagtccccacatcaactgtcttttacccaagtgatggcgttgctacagagaaggcagtggaactagccgccaatacaaagggtatctgcttcatccggaccagccgcccagaaaatgccatcatctataacaacaatgaggacttccaggtcggacaagccaaggtggtcctgaagagcaaggatgaccaggtgaccgttatcggggctggggtgaccctgcacgaggccttggccgctgccgaactgctgaagaaagaaaagatcaacatccgcgtgctggaccccttcaccatcaagcccctggacagaaaactcattctcgacagcgctcgtgccaccaagggcaggatcctcaccgtggaggaccattattatgaaggtggcattggtgaggctgtgtccagtgcagtagtgggcgagcctggcatcactgtcacccacctggcagttaaccgggtaccaagaagtgggaagccggctgagctgctgaagatgtttggtatcgacagggatgccattgcacaagctgtgaggggcctcatcaccaaggcctagggcgggtatgaagtgtggggcgggggtctatacattcctgagattctgggaaaggtgctcaaagatgtactgagaggaggggtaaatatatgttttgagaaaaatgaattggccctgaaatgttttcttttttgatgtgtttgcagccagtgcaggttctggggaagaagcgtggagggtgcgctagggaggctggtgtccttggtcctgggccaggacctgggtgtcccaagtccccttggaatcacctgcaactgccctcaacctccagaactatcgctgcctcccattcatcaccaggtgacatttgactgcaacctgccttctagctgagaggctgagacctacatccctcattgtgacctcagtccacctggccctgagcgggctggggaactgcctcagtctggaagctgaccaggcactctcagggccgccccacctcccccaagtccccacagccttgcagtcaggtctcctgggatagggaggttcacttgcttgttgtccctcgtccttgtcatatccttttaactaggcatctcagagaagcagagacagggcagccttcgtcctgggggaaaagggaccctcaggatggcatgagaggtcctcaatcccaagtgtggaactgtccccctcaacttgttaaaatgcagatttctgggtcttgccaatggggcctgggactccatgtgacaactggcccaggagcttctgatgtcacacagaattctgcagtcccaagctccagccccgacctgctctgctgttcctaggtgactgccctcacactgctgaccacagtggatttctccccctgctgctcgggctcagctggggtcagccctgcttataaggtcaactgtgcaaaaccttatactggccaagaacaaactagtgctgggggaggagggctgggtgccccggccactggtggagtccccaggaaatcctcagagctgttgcgaggatgagacacatttgtggacacgtccacctgtcctcctgaccgtctggagagaataaacctgtcaaagccaaggtca

SEQ ID NO: 32229 - DNA, 2075 bp, Homo sapiens
  source 1..2075: mol_type = unassigned DNA
ctcggcagccgcctgtcgccgcgggagcagccgctatctctgtgtgtccgcgtgtgcgcccggtccccgcctgccgcaccatggagagctaccacaagcctgaccagcagaagctgcaggccttgaaggacacggccaaccgcctacgtatcagctccatccaggccaccactgcggcgggctctggccaccccacgtcatgctgcagcgccgcagagatcatggctgtcctctttttccacaccatgcgctacaagtcccaggacccccggaatccgcacaatgaccgctttgtgctctccaagggccatgcagctcccatcctctacgcggtctgggctgaagctggtttcctggccgaggcggagctgctgaacctgaggaagatcagctccgacttggacgggcacccggtcccgaaacaagctttcaccgacgtggccactggctccctgggccagggcctcggggccgcttgtgggatggcctacaccggcaaatacttcgacaaggccagcctcccgagtagctgggactacagctaccgagtctattgcttgctgggagacggggagctgtcagagggctctgtatgggaggccatggccttcgccagcatctataagctggacaaccttgtggccattctagacatcaatcgcctgggccagagtgacccggccccactgcagcaccagatggacatctaccagaagcggtgcgaggccttcggttggcatgccatcatcgtggatggacacagcgtggaggagctgtgcaaggcctttggccaggccaagcaccagccaacagccatcattgccaagaccttcaagggccgagggatcacgggggtagaagataaggagtcttggcatgggaagcccctccccaaaaacatggctgagcagatcatccaggagatctacagccagatccagagcaaaaagaagatcctggcaacccctccacaggaggacgcaccctcagtggacattgccaacatccgcatgcccagcctgcccagctacaaagttggggacaagatagccacccgcaaggcctacgggcaggcactggccaagctgggccatgccagtgaccgcatcatcgccctggatggggacaccaaaaattccaccttctcggagatcttcaaaaaggagcacccggaccgcttcatcgagtgctacattgctgagcagaacatggtgagcatcgcggtgggctgtgccacccgcaacaggacggtgcccttctgcagcacttttgcagccttcttcacgcgggcctttgaccagattcgcatggccgccatctccgagagcaacatcaacctctgcggctcccactgcggcgtttccatcggggaagacgggccctcccagatggccctagaagatctggctatgtttcggtcagtccccacatcaactgtcttttacccaagtgatggcgttgctacagagaaggcagtggaactagccgccaatacaaagggtatctgcttcatccggaccagccgcccagaaaatgccatcatctataacaacaatgaggacttccaggtcggacaagccaaggtggtcctgaagagcaaggatgaccaggtgaccgttatcggggctggggtgaccctgcacgaggccttggccgctgccgaactgctgaagaaagaaaagatcaacatccgcgtgctggaccccttcaccatcaagcccctggacagaaaactcattctcgacagcgctcgtgccaccaagggcaggatcctcaccgtggaggaccattattatgaaggtggcattggtgaggctgtgtccagtgcagtagtgggcgagcctggcatcactgtcacccacctggcagttaaccgggtaccaagaagtgggaagccggctgagctgctgaagatgtttggtatcgacagggatgccattgcacaagctgtgaggggcctcatcaccaaggcctagggcgggtatgaagtgtggggcgggggtctatacattcctgagattctgggaaaggtgctcaaagatgtactgagaggaggggtaaatatatgttttgag

SEQ ID NO: 32230 - DNA, 1278 bp, Homo sapiens
  source 1..1278: mol_type = unassigned DNA
ttcgctcttcagacgccggagacgtaggagtgggtcttcagactccaaaggggttggactaatggcggatgctgaggcgagggctgagttcccggaggaggccagacctgacaggggcaccttgcaggtgttgcaagatatggccagccgcttgcgaatccattccatcagggccacatgctccacgagctccggccaccctacatcatgtagcagttcttctgagatcatgtctgtgctgttcttctacatcatgaggtacaagcagtcagatccagagaatccggacaacgaccgatttgtcctcgcaaagatagctactcggaaagcatgcggtctggctctggctaagctgggctacgcgaacaacagagtcgttgtgctggatggtgacaccaggtactctactttctctgagatattcaacaaggagtaccctgagcgcttcatcgagtgctttatggctgaacaaaacatggtgagcgtggctctgggctgtgcctcccgtggacggaccattgcttttgctagcacctttgctgcctttctgactcgagcatttgatcacatccggataggaggcctcgctgagagcaacatcaacattattggttcccactgtggggtatctgttggtgacgatggtgcttcccagatggccctggaggatatagccatgttccgaaccattcccaagtgcacgatcttctacccaactgatgccgtctccacggagcatgctgttgctctggcagccaatgccaaggggatgtgcttcattcggaccacccgaccagaaactatggttatttacaccccacaagaacgctttgagatcggacaggccaaggtcctccgccactgtgtcagtgacaaggtcacagttattggagctggaattactgtgtatgaagccttagcagctgctgatgagctttcgaaacaagatatttttatccgtgtcatcgacctgtttaccattaaacctctggatgtcgccaccatcgtctccagtgcaaaagccacagagggccggatcattacagtggaggatcactacccgcaaggtggcatcggggaagctgtctgcgcagccgtctccatggatcctgacattcaggttcattcgctggcagtgtcgggagtgccccagagtgggaagtccgaggaattgctggatatgtatggaattagtgccagacatatcatagtggccgtgaaatgcatgttgctgaactaaaatagctgttagctttggtcttttggcctctttaccct

SEQ ID NO: 32231 - DNA, 2642 bp, Homo sapiens
  source 1..2642: mol_type = unassigned DNA
agatcccttgacttgcttgcggagggagcggccggcggagggagcggcaggtggagggagtggcacgaggcatgcggagggagctgcaccgacatcacataaacgcactgggcagctcgcaggcgccattcgctcttcagacgccggagacgtaggagtgggtcttcagactccaaaggggttggactaatggcggatgctgaggcgagggctgagttcccggaggaggccagacctgacaggggcaccttgcaggtgttgcaagatatggccagccgcttgcgaatccattccatcagggccacatgctccacgagctccggccaccctacatcatgtagcagttcttctgagatcatgtctgtgctgttcttctacatcatgaggtacaagcagtcagatccagagaatccggacaacgaccgatttgtcctcgcaaagagactgtcgtttgtggatgtggcaacaggatggctcggacaaggactgggagttgcatgtggaatggcatatactggcaagtacttcgacagggccagctaccgggtgttctgcctcatgagtgatggcgagtcctcagaaggctctgtctgggaggcaatggcctttgcttcctactacagtctggacaatcttgtggcaatctttgatgtgaaccgcctgggacacagtggtgcattgcccgccgagcactgcataaacatctatcagaggcgctgcgaagcctttgggtggaacacttatgtggtggacggccgggacgtggaggcactgtgccaggtattctggcaggcttctcaggtgaagcacaagcccactgctgtggtggccaagaccttcaagggccggggcaccccaagtattgaggatgcagaaagttggcatgcaaagccaatgccgagagaaagagcagatgccattatcaaattaattgagagccagatacagaccagcaggaatcttgacccacagccccccattgaggactcacctgaagtcaacatcacagatgtaaggatgacctctccacctgattacagagttggtgacaagatagctactcggaaagcatgcggtctggctctggctaagctgggctacgcgaacaacagagtcgttgtgctggatggtgacaccaggtactctactttctctgagatattcaacaaggagtaccctgagcgcttcatcgagtgctttatggctgaacaaaacatggtgagcgtggctctgggctgtgcctcccgtggacggaccattgcttttgctagcacctttgctgcctttctgactcgagcatttgatcacatccggataggaggcctcgctgagagcaacatcaacattattggttcccactgtggggtatctgttggtgacgatggtgcttcccagatggccctggaggatatagccatgttccgaaccattcccaagtgcacgatcttctacccaactgatgccgtctccacggagcatgctgttgctctggcagccaatgccaaggggatgtgcttcattcggaccacccgaccagaaactatggttatttacaccccacaagaacgctttgagatcggacaggccaaggtcctccgccactgtgtcagtgacaaggtcacagttattggagctggaattactgtgtatgaagccttagcagctgctgatgagctttcgaaacaagatatttttatccgtgtcatcgacctgtttaccattaaacctctggatgtcgccaccatcgtctccagtgcaaaagccacagagggccggatcattacagtggaggatcactacccgcaaggtggcatcggggaagctgtctgcgcagccgtctccatggatcctgacattcaggttcattcgctggcagtgtcgggagtgccccagagtgggaagtccgaggaattgctggatatgtatggaattagtgccagacatatcatagtggccgtgaaatgcatgttgctgaactaaaatagctgttagctttggtcttttggcctctttaccctgtgtttatgtttgttccaaaaccatcatttaaatctctactgtcacattttgtttcttaaaagcaaagccagctaacaccttcattcatccctagttcggaaattcaagctaactacttaccctttaaactgtcactgcatatgcaagtaccgctctaatttttggatcattaaagggagttacacaacttttaagtgaaaaaaataggtaacaaaacaaccacctgatagtaagttttctgataagactatagataagtggtagaggtaatcaattcttccgaagtgtttccttcgtgaataactggtagaggtaatagttttttcaatgtatttccttcatgagtaaagaaaatgtggattgaagtatagattccagtagcctagtttccacagcacgataacaccatgacgcctactgctgttcccaccttgggattctgtgtgctgccatcccacctgcagctgccctggaattcccttcgctgtttgccttcatctccctccacgtttgagaggctgtcaggcagcagcgaaagcttgttaggatgtcctgtgctgcttgtgatgagagcctccacactgtactgttcaagtcaatgttaataaagcatttcaaaacca

SEQ ID NO: 32232 - DNA, 2703 bp, Homo sapiens
  source 1..2703: mol_type = unassigned DNA
tcccttgacttgcttgcggagggagcggccggcggagggagcggcaggtggagggagtggcacgaggcatgcggagggagctgcaccgacatcacataaacgcactgggcagctcgcaggcgccattcgctcttcagacgccggagacgtaggagtgggtcttcagactccaaaggggttggactaatggcggatgctgaggcgagggctgagttcccggaggaggccagacctgacaggggcaccttgcaggtgttgcaagatatggccagccgcttgcgaatccattccatcagggccacatgctccacgagctccggccaccctacatcatgtagcagttcttctgagatcatgtctgtgctgttcttctacatcatgaggtacaagcagtcagatccagagaatccggacaacgaccgatttgtcctcgcaaagagactgtcgtttgtggatgtggcaacaggatggctcggacaaggactgggagttgcatgtggaatggcatatactggcaagtacttcgacagggccagctaccgggtgttctgcctcatgagtgatggcgagtcctcagaaggctctgtctgggaggcaatggcctttgcttcctactacagtctggacaatcttgtggcaatctttgatgtgaaccgcctgggacacagtggtgcattgcccgccgagcactgcataaacatctatcagaggcgctgcgaagcctttgggtggaacacttatgtggtggacggccgggacgtggaggcactgtgccaggtattctggcaggcttctcaggtgaagcacaagcccactgctgtggtggccaagaccttcaagggccggggcaccccaagtattgaggatgcagaaagttggcatgcaaagccaatgccgagagaaagagcagatgccattatcaaattaattgagagccagatacagaccagcaggaatcttgacccacagccccccattgaggactcacctgaagtcaacatcacagatgtaaggatgacctctccacctgattacagagttggtgacaagatagctactcggaaagcatgcggtctggctctggctaagctgggctacgcgaacaacagagtcgttgtgctggatggtgacaccaggtactctactttctctgagatattcaacaaggagtaccctgagcgcttcatcgagtgctttatggctgaacaaaacatggtgagcgtggctctgggctgtgcctcccgtggacggaccattgcttttgctagcacctttgctgcctttctgactcgagcatttgatcacatccggataggaggcctcgctgagagcaacatcaacattattggttcccactgtggggtatctgttggtgacgatggtgcttcccagatggccctggaggatatagccatgttccgaaccattcccaagtgcacgatcttctacccaactgatgccgtctccacggagcatgctgttgctctggcagccaatgccaaggggatgtgcttcattcggaccacccgaccagaaactatggttatttacaccccacaagaacgctttgagatcggacaggccaagggcgtatccatgctccaggacagctggagcagtgtaatttcctatcaaaaagtcctccgccactgtgtcagtgacaaggtcacagttattggagctggaattactgtgtatgaagccttagcagctgctgatgagctttcgaaacaagatatttttatccgtgtcatcgacctgtttaccattaaacctctggatgtcgccaccatcgtctccagtgcaaaagccacagagggccggatcattacagtggaggatcactacccgcaaggtggcatcggggaagctgtctgcgcagccgtctccatggatcctgacattcaggttcattcgctggcagtgtcgggagtgccccagagtgggaagtccgaggaattgctggatatgtatggaattagtgccagacatatcatagtggccgtgaaatgcatgttgctgaactaaaatagctgttagctttggtcttttggcctctttaccctgtgtttatgtttgttccaaaaccatcatttaaatctctactgtcacattttgtttcttaaaagcaaagccagctaacaccttcattcatccctagttcggaaattcaagctaactacttaccctttaaactgtcactgcatatgcaagtaccgctctaatttttggatcattaaagggagttacacaacttttaagtgaaaaaaataggtaacaaaacaaccacctgatagtaagttttctgataagactatagataagtggtagaggtaatcaattcttccgaagtgtttccttcgtgaataactggtagaggtaatagttttttcaatgtatttccttcatgagtaaagaaaatgtggattgaagtatagattccagtagcctagtttccacagcacgataacaccatgacgcctactgctgttcccaccttgggattctgtgtgctgccatcccacctgcagctgccctggaattcccttcgctgtttgccttcatctccctccacgtttgagaggctgtcaggcagcagcgaaagcttgttaggatgtcctgtgctgcttgtgatgagagcctccacactgtactgttcaagtcaatgttaataaagcatttcaaaaccagctgctttattca

SEQ ID NO: 32233 - DNA, 2566 bp, Homo sapiens
  source 1..2566: mol_type = unassigned DNA
aaacttgccccgagtccacggtgctctgcggttaggagctggcctcactgtgcacagggggaggggtggtgagcttaccgggctttaaagcgcccttccaacctgtgagccctgcattccttacccttggttggattcttcccgggctgggagaaatgaccgcttctatgaggagaccatgtgccgaggtcgtgtgctaggaagccagttgctgtgagaaatgaccagtgtcatgtctgtctttcagccaccctacatcatgtagcagttcttctgagatcatgtctgtgctgttcttctacatcatgaggtacaagcagtcagatccagagaatccggacaacgaccgatttgtcctcgcaaagagactgtcgtttgtggatgtggcaacaggatggctcggacaaggactgggagttgcatgtggaatggcatatactggcaagtacttcgacagggccagctaccgggtgttctgcctcatgagtgatggcgagtcctcagaaggctctgtctgggaggcaatggcctttgcttcctactacagtctggacaatcttgtggcaatctttgatgtgaaccgcctgggacacagtggtgcattgcccgccgagcactgcataaacatctatcagaggcgctgcgaagcctttgggtggaacacttatgtggtggacggccgggacgtggaggcactgtgccaggtattctggcaggcttctcaggtgaagcacaagcccactgctgtggtggccaagaccttcaagggccggggcaccccaagtattgaggatgcagaaagttggcatgcaaagccaatgccgagagaaagagcagatgccattatcaaattaattgagagccagatacagaccagcaggaatcttgacccacagccccccattgaggactcacctgaagtcaacatcacagatgtaaggatgacctctccacctgattacagagttggtgacaagatagctactcggaaagcatgcggtctggctctggctaagctgggctacgcgaacaacagagtcgttgtgctggatggtgacaccaggtactctactttctctgagatattcaacaaggagtaccctgagcgcttcatcgagtgctttatggctgaacaaaacatggtgagcgtggctctgggctgtgcctcccgtggacggaccattgcttttgctagcacctttgctgcctttctgactcgagcatttgatcacatccggataggaggcctcgctgagagcaacatcaacattattggttcccactgtggggtatctgttggtgacgatggtgcttcccagatggccctggaggatatagccatgttccgaaccattcccaagtgcacgatcttctacccaactgatgccgtctccacggagcatgctgttgctctggcagccaatgccaaggggatgtgcttcattcggaccacccgaccagaaactatggttatttacaccccacaagaacgctttgagatcggacaggccaaggtcctccgccactgtgtcagtgacaaggtcacagttattggagctggaattactgtgtatgaagccttagcagctgctgatgagctttcgaaacaagatatttttatccgtgtcatcgacctgtttaccattaaacctctggatgtcgccaccatcgtctccagtgcaaaagccacagagggccggatcattacagtggaggatcactacccgcaaggtggcatcggggaagctgtctgcgcagccgtctccatggatcctgacattcaggttcattcgctggcagtgtcgggagtgccccagagtgggaagtccgaggaattgctggatatgtatggaattagtgccagacatatcatagtggccgtgaaatgcatgttgctgaactaaaatagctgttagctttggtcttttggcctctttaccctgtgtttatgtttgttccaaaaccatcatttaaatctctactgtcacattttgtttcttaaaagcaaagccagctaacaccttcattcatccctagttcggaaattcaagctaactacttaccctttaaactgtcactgcatatgcaagtaccgctctaatttttggatcattaaagggagttacacaacttttaagtgaaaaaaataggtaacaaaacaaccacctgatagtaagttttctgataagactatagataagtggtagaggtaatcaattcttccgaagtgtttccttcgtgaataactggtagaggtaatagttttttcaatgtatttccttcatgagtaaagaaaatgtggattgaagtatagattccagtagcctagtttccacagcacgataacaccatgacgcctactgctgttcccaccttgggattctgtgtgctgccatcccacctgcagctgccctggaattcccttcgctgtttgccttcatctccctccacgtttgagaggctgtcaggcagcagcgaaagcttgttaggatgtcctgtgctgcttgtgatgagagcctccacactgtactgttcaagtcaatgttaataaagcatttcaaaacca

SEQ ID NO: 32234 - DNA, 1468 bp, Homo sapiens
  source 1..1468: mol_type = unassigned DNA
gtgctacgccatcaagggcccccagtcccgggtgccgcggggacagtgtagggtcattagctgttgagccgccccgggcgggcccaagcctttggatctcaggtgaccggcacaggcggccgcggggtccggaactgcttgttccggcagtggaagagacgcgccggcgttggccgctgctgctagcagcttgaaccccagggtcgggaccgatgtcggcttgggctgctgccagcctaagcagggccgctgcccgatgcttgctggcacgaggccccggggtcagggcggctcctccgcgcgacccccggccctcccaccccgagccccggggctgcggtgccgctccgggcaggacgctgcactttaccgcggctgtccccgccgggcacaacaagtggtccaaagtcaggcacatcaagggtccgaaggacgtcgaaaggagtcgcatcttctccaaactctgtttgaacatccgcctggcagtgaaagaaggaggccccaaccctgagcacaacagcaacctggccaatatcttagaggtgtgtcgcagcaaacatatgcccaagtcaacgattgagacagcactgaaaatggagaaatccaaggacacttatttgctgtatgagggtcgaggccctggtggctcttctctgctcatcgaggcattatctaacagtagccacaagtgccaagcagacattagacatatcctgaataagaatggaggagtgatggctgtaggagctcgtcactcttttgacaaaaagggggtgattgtggttgaagtggaggacagagagaagaaggctgtgaacctagagcgtgccctggagatggcaatcgaagcaggagctgaggatgtcaaggaaactgaagatgaagaagaaaggaacgtttttaaatttatttgtgatgcctcttcactgcaccaagtgaggaagaagctggactccctgggcctgtgttctgtgtcctgtgcactagagttcatccccaactcaaaggtgcagctggctgagcccgacctggaacaggccgcacatctcattcaggctctcagcaaccacgaggatgtgattcacgtctatgataacattgaataaccaggctacatgtgcccccgggttccttcctagaaatgtggcagcccattccagcacacaggcttctgcagcaatctctgagggtaaagccggtgggaggctcagcaggccaggaggcccaaggacaggacttgcgaccttgaagccaaaggaatctcacttgtggggcctccttgtcagctctgctgctgtctcagagccatctggatgagtgtcccgacaccctctcggatgcagggcaggaccacccagctggtcagactctgatgttgggtagctggcctctgtggggattgtaagtgccctgaggcgctctgtactagaaactgctcttaataataacggtgattattggttgctgc

SEQ ID NO: 32235 - DNA, 3420 bp, Homo sapiens
  source 1..3420: mol_type = unassigned DNA
cctctcctctgccctttggacgcgcgcctcggttccgaacgcagcggacggcgcctcaggcagcgcggcggacagcccgtcctccggcgcgccgcgagcctcggaggaccctagcgacggtcgtggcgtaagaccggggggacgcggcggtagcggcggccgttgcgattgattgcgctggttgcctgcggcgtccacttccttggccgcccttgctacactggctgattgttgtgcagccggcgccatgtctgtgagcgagatcttcgtggagctgcagggctttttggctgccgagcaggacatccgagaggaaatcagaaaagttgtacagagtttagaacaaacagctcgagagattttaactctactgcaaggggtccatcagggtgctgggtttcaggacattccaaagaggtgtttgaaagctcgagaacattttggtacagtaaaaacacatctaacatctttgaagaccaaatttcctgctgaacagtattacagatttcatgagcactggaggtttgtgttgcagcgcttggtcttcttggcagcatttgttgtgtatttggaaacagaaacactagtgactcgagaagcagttacagaaattcttggcattgagccagatcgggagaaaggatttcatctggatgtagaagattatctctcaggagttctaattcttgccagtgaactgtcgaggctgtctgtcaacagcgtgactgctggagactactcccgacccctccacatctccaccttcatcaatgagctggattccggttttcgccttctcaacctgaaaaatgactccctgaggaagcgctacgacggattgaaatatgacgtgaagaaagtagaggaagtggtctatgatctctccatccggggctttaataaggagacggcagcagcttgtgttgaaaaataggaggctctccttgctcctggccttgctgacctcagcggttgccaggaaggggtgagcacagagtgcctcttacggtagttaggatgctcagttgctaaacactgcgctttattttcttaaccagttgtggtgtgagtatcagaattgaaacacttttttgggggtaaaaaatatagcctttacatggacagaattttttttgttgtttcagtgaatatgcctgtaattcagtgtatttcagttccgtcagaaagtgtaaatgttagtttcttggtaaagtccttttcttgcttaccttgactgttgatgtactgattgagaagttcattgtctcgtttgtgattcttccagatgtgatgcttgatattttctatatgcgagttagccatccacacccaggcatagcctggatacagtataaaaatagataattaaaaagatggttgccaagcaaggaaaacttattttatattttcccttccttattttaagcattgtgagtaaatcagatgttgaattcttttgccaagggaattatagctgcaggttctctctcactgccatcaaactgtaaaagattaaactgcgaagtcaagctcaacagattattttggaaagtttttgtattaagggatttagtaacatcattttgttttccaccaggcagggagtagggcttagtgttttaaaacacctctgctttctgatgttgccttaatattctgctattgcagcaattaaaaattgtcttcatgtacatttggaactaacacgtgatgtgatatattcctaaactatgaaacctttttcctagtagtcagctagatcatttgttctgggagtataaagccacccacgtaagttaataagcaaaatcctgactattatgttgttagagaaaaatgctttgctttgtctggaagaaagataaaatagtgaattataaataagtcaggccgggcgtggtggctcacacctgtaatcccagcacactgggaggccgaggcagggggactgcttgagctcaggagttcgagaccagcctgggcaacaaagtgagactccatctctatataaaaacaaaaaccacgaaagcacacacaaaataaatcagtgggatttggtaatgtgttttagagtaagaaatttcaggttgttggtgactatcccaacagtcatgttttaaatgtacagtttggggcaagtcatgtaaatactgttggtggtcttccccacacgccccaattttcaggtagtactaagagtatgtgccaggaaactcttgctattgaattgagatgattaaaatggtgacttaatccgtagttattttgcacccactgaaaggaaagtgctttccagaataatatgaagtatctaaaagtgtcaccttttcttgcctgatcaacaatttgggcttcctgtttgtacaaggggccatttggcatacctttcacagcttttatcaggccaagttaaaggctgactacattttttcatcatgaggaaagcagttgaaatgaggcatgagttactgtgcattgggattttagaacaattttcttgtgacagctctttttgtgaagttaggttcttaaaagtgcccatgatggtcacttaaaatgtgcagtaatagcactgccaggatcaagcatgaaaggcttttaaattagatcatcccacagacaatacgtttgataatagttttttcttttaacctctttaagtattgattctgcttgagaatattgaagtacttgccagaagttgtggatttcagttttaacaaatgctattaaagtggagaagcacactctggtcttggaattccatttgaggatttagaagtgtcatgtttataactattcagttgtgtttgttgctggcttgttgtaaagcaataaaatttttttggtctttttgtaagtgagtgtgctgctgtaagaaatctcccatgtgcataacaaattctgaatattttttgaggctaaagaagaccggggtgacaagcagatactgctgtgtaatggttacactaaccaaaagacaccagccactcagagttctatactgtaaagcgcagataacatttgtgtgttataccttgattggggaattaaaagtcatttaactgaagatgttgagaaacctgggctctggttttagtataccggaattacttttttccaattttagaaaatcaagcaggttagagaaaatagagatgaattaggggacactgtcttatggattcatttataagaagagaaccagccatatacacttggggagatttgccacatcttaaacttgaataatagtatgagtaatgcttaagggagtttaatagagaaggaaagctttggcagtgttttgagaacttaagtggctaaagagatgagacaaacatgcaggtcgctactggcatagtttcataattgtgtactcggaaattaaagtttgcttgtttcttggtctggattaaa

SEQ ID NO: 32236 - DNA, 1089 bp, Homo sapiens
  source 1..1089: mol_type = unassigned DNA
agcggcggccgttgcgattgattgcgctggttgcctgcggcgtccacttccttggccgcccttgctacactggctgattgttgtgcagccggcgccatgtctgtgagcgagatcttcgtggagctgcagggctttttggctgccgagcaggacatcccaaagaggtgtttgaaagctcgagaacattttggtacagtaaaaacacatctaacatctttgaagaccaaatttcctgctgaacagtattacagatttcatgagcactggaggtttgtgttgcagcgcttggtcttcttggcagcatttgttgtgtatttggaaacagaaacactagtgactcgagaagcagttacagaaattcttggcattgagccagatcgggagaaaggatttcatctggatgtagaagattatctctcaggagttctaattcttgccagtgaactgtcgaggctgtctgtcaacagcgtgactgctggagactactcccgacccctccacatctccaccttcatcaatgagctggattccggttttcgccttctcaacctgaaaaatgactccctgaggaagcgctacgacggattgaaatatgacgtgaagaaagtagaggaagtggtctatgatctctccatccggggctttaataaggagacggcagcagcttgtgttgaaaaataggaggctctccttgctcctggccttgctgacctcagcggttgccaggaaggggtgagcacagagtgcctcttacggtagttaggatgctcagttgctaaacactgcgctttattttcttaaccagttgtggtgtgagtatcagaattgaaacacttttttgggggtaaaaaatatagcctttacatggacagaattttttttgttgtttcagtgaatatgcctgtaattcagtgtatttcagttccgtcagaaagtgtaaatgttagtttcttggtaaagtccttttcttgcttaccttgactgttgatgtactgattgagaagttcattgtctcgtttgtgattcttccagatgtgatgcttgatattttctatatgcgagttagccatccacacccaggcatagcct

SEQ ID NO: 32237 - DNA, 1088 bp, Homo sapiens
  source 1..1088: mol_type = unassigned DNA
ggtagcggcggccgttgcgattgattgcgctggttgcctgcggcgtccacttccttggccgcccttgctacactggctgattgttgtgcagccggcgccatgtctgtgagcgagatcttcgtggagctgcagggctttttggctgccgagcaggacatccgagaggaaatcagaaaagttgtacagagtttagaacaaacagctcgagagattttaactctactgcaaggggtccatcagggtgctgggtttcaggacattccaaagaggtgtttgaaagctcgagaacattttggtacagtaaaaacacatctaacatctttgaagaccaaatttcctgctgaacagtattacagatttcatgagcactggaggtttgtgttgcagcgcttggtcttcttggcagcatttgttgtgtatttggaaacagaaacactagtgactcgagaagcagttacagaaattcttggcatcgaggctgtctgtcaacagcgtgactgctggagactactcccgacccctccacatctccaccttcatcaatgagctggattccggttttcgccttctcaacctgaaaaatgactccctgaggaagcgctacgacggattgaaatatgacgtgaagaaagtagaggaagtggtctatgatctctccatccggggctttaataaggagacggcagcagcttgtgttgaaaaataggaggctctccttgctcctggccttgctgacctcagcggttgccaggaaggggtgagcacagagtgcctcttacggtagttaggatgctcagttgctaaacactgcgctttattttcttaaccagttgtggtgtgagtatcagaattgaaacacttttttgggggtaaaaaatatagcctttacatggacagaattttttttgttgtttcagtgaatatgcctgtaattcagtgtatttcagttccgtcagaaagtgtaaatgttagtttcttggtaaagtccttttcttgcttaccttgactgttgatgtactgattgagaagttcattgtctcgtttgtgattcttccagatgtgatgcttgatattttctatatgcgagt

SEQ ID NO: 32238 - DNA, 2762 bp, Homo sapiens
  source 1..2762: mol_type = unassigned DNA
gcggccgcaatagtacgctcgcgcggcggtggcgggtggtggtccttggaccacgcggtgggcggagccagcggcgacggcctcccctcccctccggacgcaggccggaagtacgtgagaggagacttccggccactgcgttgtagtcggcccggctgcaaagcgtttttctgcaggctgttttcccaggttccctcggcctgtacctcgcgcactcctcttgctccaggtccttcagtctccgctcgtctcaccgtaggctgtgacgacatgagcaacaaagaaggatcaggagggttcaggaaaaggaagcatgacaatttcccacataaccaaagaagagaagggaaggatgttaattcatcttcacccgtgatgttggcctttaaatcatttcagcaggaacttgatgcaaggcatgacaaatatgagagacttgtgaaacttagtcgggatataactgttgaaagtaaaaggacaatttttctcctccataggattacaagtgctcctgatatggaagatatattgactgaatcagaaattaaattggatggtgtcagacaaaagatattccaggtagcccaagagctatcaggggaagatatgcatcagttccatcgagccattactacaggactacaggaatatgtggaagctgtctcttttcaacacttcatcaaaacacgatcattaattagtatggatgaaattaataaacaattgatatttacgactgaagacaatgggaaagaaaataaaactccctcctctgatgcacaggataagcagtttggtacttggagactgagagtcacacctgtcgattaccttctgggagtggctgacttaactggagaattgatgcggatgtgtattaacagtgtggggaatggggacattgataccccctttgaagtgagccagtttttacgtcaggtttatgatgggttttcattcattggcaacactggaccttacgaggtttctaagaagctgtataccttgaaacaaagtttggccaaagtggagaatgcttgttatgccttgaaagtcagagggtcagaaattccaaaacatatgttggcagatgtgttttcagttaaaacagaaatgatagatcaagaagagggcatttcttagaatctaacgttactcagttactaattcttttgagaactcctaagagaccaatttgtaagacttatttagtatttcatttaactttattgtggcttttacatagaaacatattcagttgtacttgttttaaattgtatacaagctgtacataaaattagccaaatgaatcatttcttatatcttattcatgaaagtttgcatacagatgtttgcatatatgcctttttgaatttttgctggttaacctttatcatttatctttgtaatgtgaacatgcttcagagtgtaccttttgccataacctattttaatttactttttctgaagtttggagtgataatttttagtggaagcaatttgtaatttaagttggtagttatattatatatagaaaagattttttagttaaacttctggacatgagcgtcctgtttaaatttcttgttaatatcgtgccaagcctcaaaaataggcttattccatggaacaagaattaaaaatgaataagctatcaatatataatttaagtacaagtttaggctgggcgtggtggctcacgcctgtaatcccagcactttgggaggccgaggtaggcagatcacgaggtcaagagatcaagaccagcctgaccaacgtggcgaaacctcgtctctactagaaatacaaaaattagctggatatggtggtatgtgcctgtaatcccagctacttgggaggctgaggcaggagactcgcttgaacctgggaggcagaggttgcagtgagccgagattgcgccactgcactccagcctgggtaacagagcaagactccatctcaaaaaaagaaagaaagaaaaaagaaagtacaagtttataaagtattatagtgaaaaattcgcattctggctgattttaagccatttaaaatttatataaaacaaccttccataaaaatttgacaggtgcccagatgttgctttctccatttattttttgtttttttttaatcacagtaggtctgatagagaattggagctaaattataatatttttgttggtaaagttgagttatatacttgtacatacaatggaaatgcttttagtagtgattatttagcaatttttgtttttgttatattaggcatgtttggaggctttcctattctagcatttaaatttaaattttattaaaattaaataatttaaatctagcatttaaatttaaataatttaagtctagcatttacttttaaataattataatgaagttttgaaatactaagttaatccagacctttagttgtcccatggtgttaataaagttgccaaagaagatgtattatgaacaattcagcaataagacaattgtcaacacagttgagaataacaatggtaatcgttagtaatatttagaattggaatttgcctactgaaatagttatagatgattacttgtgatgtgaaactgaattgagcatgacaaccagacatttccagttggttttgtaagttttgagaatctagatactgggttttattttttgaaagattagctctgtttgtaagggctgattccttgaaaatgtaattttccagaaaaacacctaaagaaaataaaacatggacatgcctagtaaa

SEQ ID NO: 32239 - DNA, 644 bp, Homo sapiens
  source 1..644: mol_type = unassigned DNA
gagaggagacttccggccactgcgttgtagtcggcccggctgcaaagcgtttttctgcaggctgttttcccaggttccctcggcctgtacctcgcgcactcctcttgctccaggtccttcagtctccgctcgtctcaccgtaggctgtgacgacatgagcaacaaagaaggatcaggagggttcaggaaaaggaagcatgacaatttcccacataaccaaagaagagaagggaaggatgttaattcatcttcacccgtgatgttggcctttaaatcatttcagcaggaacttgatgcaaggcatgacaaatatgagagacttgtgaaacttagtcgggatataactgttgaaagtaaaaggacaatttttctcctccataggattacaagttcccaatatcttgatcatagtgctcctgatatggaagatatattgactgaatcagaaattaaattggatggtgtcagacaaaagatattccaggtagcccaagagctatcaggggaagatatgcatcagttccatcgagccattactacaggactacaggaatatgtggaagctgtctcttttcaacacttcatcaaaacacgatcattaattagtatggatgaaattaataaacaattgatatttacgactg

SEQ ID NO: 32240 - DNA, 680 bp, Homo sapiens
  source 1..680: mol_type = unassigned DNA
ggaagtaacccacgtgcttccgctggagcctctcgggaggcgggtaacgttatagtatttgtcagaagttggggtctccgtgggcattgtgatccgtcccaggcagtggattaggaggccagaaggagatcccttccacggtgctaggctgagatggatcctctcagggcccaacagctggctgcggagctggaggtggagatgatggccgatatgtacaacagaatgaccagtgcctgccaccggaagtgtgtgcctcctcactacaaggaagcagagctctccaagggcgagtctgtgtgcctggaccgatgtgtctctaagtacctggacatccatgagcggatgggcaaaaagttgacagagttgtctatgcaggatgaagagctgatgaagagggtgcagcagagctctgggcctgcatgaggtccctgtcagtatacaccctggggtgtaccccaccccttcccactttaataaacgtgctccctgttgggtgtcatctgtgaagactgccaggcctaggctctctgtagagagtcttcaagatcccggagtggtagcgctgtctcctggtgaaggagtatttgtcacactggaatgtgactgtgtgtgtatgtatgtgtatatatatatatatatatatatatatatatataaacaagtttgttgacacctac

SEQ ID NO: 32241 - DNA, 530 bp, Homo sapiens
  source 1..530: mol_type = unassigned DNA
ctcgggaggcgggtaacgttatagtatttgtcagaagttggggtctccgtgggcattgtgatccgtcccaggcagtgccccaggggtaggagagtgaacggcggcggtgggtgctgatggtgatgtctgctcccaggattaggaggccagaaggagatcccttccacggtgctaggctgagatggatcctctcagggcccaacagctggctgcggagctggaggtggagatgatggccgatatgtacaacagaatgaccagtgcctgccaccggaagtgtgtgcctcctcactacaaggaagcagagctctccaagggcgagtctgtgtgcctggaccgatgtgtctctaagtacctggacatccatgagcggatgggcaaaaagttgacagagttgtctatgcaggatgaagagctgatgaagagggtgcagcagagctctgggcctgcatgaggtccctgtcagtatacaccctggggtgtaccccaccccttcccactttaataaacgtgctccctgttgggtgtca

SEQ ID NO: 32242 - DNA, 486 bp, Homo sapiens
  source 1..486: mol_type = unassigned DNA
gcgagtttgaatcaaagaagaggcgggactttcctcccggaagtaacccacgtgcttccgctggagcctctcgggaggattaggaggccagaaggagatcccttccacggtgctaggctgagatggatcctctcagggcccaacagctggctgcggagctggaggtggagatgatggccgatatgtacaacagaatgaccagtgcctgccaccggaagtgtgtgcctcctcactacaaggaagcagagctctccaagggcgagtctgtgtgcctggaccgatgtgtctctaagtacctggacatccatgagcggatgggcaaaaagttgacagagttgtctatgcaggatgaagagctgatgaagagggtgcagcagagctctgggcctgcatgaggtccctgtcagtatacaccctggggtgtaccccaccccttcccactttaataaacgtgctccctgttgggtgtcatctgtgaagactgcc

SEQ ID NO: 32243 - DNA, 1948 bp, Homo sapiens
  source 1..1948: mol_type = unassigned DNA
gcccttcgggacgagctggaggcagagcgtgagtacaaagtgatcggcctcggccgcacgtagtagcccccctactccccggccaagtcagggcctccctcttcccgcggagtcgcaaccacgggtagctcgtgtaggtaacggcaggtccaggcctccgcatgagcggagggccccccgcgcgaccttgaatggcccgggcgcgcgcggtcgtgtgggagttgtagtcctccgtccccgtccgcgcggactccgtttcccgtggtgccccgggcggcccgcttccggcgcagttagttacgagtcggcgcacgcggcctcggtccggttgactttgcggagccatggagggcggcttcggctccgatttcgggggctccggcagcgggaagctggacccagggctcataatggagcaggtgaaagtgcagatcgccgtggccaacgcgcaggagctgctgcagaggatgacggacaagtgtttccggaagtgtatagggaaacctgggggctccctggacaactccgagcagaagtgcatcgccatgtgcatggaccgctacatggacgcctggaacaccgtgtctcgcgcctacaactcgcggctgcagcgggaacgagccaacatgtgaccggcgagcgcgggccaccccaccctgttcatttccataaacgtgctttgagaggcggggtccgcatgtacgtactgcctgcccggggcttaggagggtggcaccggtgctgggacacacgggactgtgtcctcgccaccccccgccctgccccctgccagccagtgcagcttggatctcgggggtgtggggccctgtgccttcctgaagtgctggcagcccagtggcacctccttcaggcctttggggtattcccctagtgtgcccaagtcagcctcatattctgggcggacagcttgtctggacttcggagttgggggtggtcagacaccacaggagctgtcacctcctgcggatgggcaaataaattggtggaggacggagagaaacctctttatttccctcctgaggggtctctgggaagaggtgacgcgtgtccctggaaccccagctcggagggtctcagcctcccctgggttgggagaagtccatctttccccttagtgccaccgggctgctgagtcacgaggaatgtgttgctgctgccacccctgccccaaaggctaagggggacagccttccccttgtcagggcttgctttgaccctgcttcgttccaccccgggtcctggtggagcaccaggcaggtggtcctcgctgtgacactgaggtgctgagccagtgagctagggtggaggggctgtgtttattggaacaaagggtggtaccaaaatgcatccccatgacccacagcccccccacacccgtccttgggtagggtacggtggggtggggtgttgggtggcctgctgctcctgttgctttcacgtagagtctcggcctgggcagtcacgtggtggtcactcctggatgtgctgtcctatccagcctctcacagctgccacccgggtatagacacctgggaagtggggccggccacagccatagccccagctagtgaccccagttagcacccaccgtccagagggctccctgcaggccaggggtcccccagcgtcaccctgttggggagagaagaaagggggttcagaggccggtacctcccctacagcagcccttgggtcattggcccctctaggagtgaccctagtgacttcccctgggagccgcattttcactatctggaaaatgggctcaatgcaaaggtggcagacatttatggacacccgccacgtggtcccggagtggaacggtgcctcccactgcagcctctgcctgctctgccgccgaggcccggggatgggatgcggtgggttgcccaataaacggctgtggagtggaaattcctccagagcc

SEQ ID NO: 32244 - DNA, 1659 bp, Homo sapiens
  source 1..1659: mol_type = unassigned DNA
agcttgcccggcatcactcgcggcattggagtcaagatggaggagtacgcgcgagagccttgcccatggcgaattgtggatgactgtggtggggcctttacgatgggtaccattggtggtggtatctttcaagcaatcaaaggttttcgcaattctccagtgggagtaaaccacagactacgagggagtttgacagctattaaaaccagggctccacagttaggaggtagctttgcagtttggggagggctgttttccatgattgactgtagtatggttcaagtcagaggaaaggaagatccctggaactccatcacaagtggtgccttaacgggagccatactggcagcaagaaatggaccagtggccatggttgggtcagccgcaatgggtggcattctcctagctttaattgaaggagctggtatcttgttgacaagatttgcctctgcacagtttcccaatggtcctcagtttgcagaagacccctcccagttgccttcaactcagttaccttcctcaccttttggagactatcgacaatatcagtaggacttctttcctaggatttctttaacagaacgagttgtggttcgagaaggatttcagaagatcaagttacagtctgtttttaaaaccataggtgggacagctatggccaataggctataaagagacatttagcacttttttctatttaaaggaacaagcggggaagggtgctaaaagataatacgtttatttattcacacttgaattgcatttgtgatcaaaataaatgtttaaatcgctaaaggaaaatacagtaagtgcttgaaagatgaaggaccaaaaggccaaaaaacagtgaaatatgatcatcatctccttgcggacttctctgcctggttttgtgtgttctgttattcaaacaataaaaagctggtggaacttactctttcttttaagataagttgtagacttcgatgtttcatgctcatgtacttcaaataatgcatgttttatagttagtccctcatcacttgaagtgacttctgagaattatgcagagtcaacatggatcatttcacagtgagatgctttatggattgaaggatatggtaaaatgtttatagtttactttgaaagtaaaatatactatgtcttggttttgaggatattggatacaaaactctcttcctttagggctactgagtcttgattcctgatcatcagaaatttcaccagaaacaacttgcttccaatatacccaattctatatgaagaattcatggagagtgtactggcactggaagagtttagtgtttcttgtatgcttgaaaataaagtatgtactgttttgaatgtgttccaagtcctctgcataaacgatgtattttggggtctggttgggcctggaaaatggatgagcacttcagaacaggtcattttcctgatattggaagtgacatgtggccctataggaggcatgatgttagttaattacacatttgcctacatctgtgggaaatggagaacaaagccatgtgggtactgtaaacacacgtttatcttttggcccaatgccatacatatggtaggcatttaattactgattgtgtttggataatttgggaattttcgactgtggtaaaatatacataaaataatacttattaa

SEQ ID NO: 32245 - DNA, 950 bp, Homo sapiens
  source 1..950: mol_type = unassigned DNA
tgggggagcagagggcagcacttcctccagctccaaaagagtgcacccaccccaacgttaccaatacactcgtgcaggcggaaagctccgacgccggtgtgcgtctacgctgggggcgtggcctgactgcgcggccagacgccagcgccatggaggagtacgctcgggagccctgcccatggcgaattgtggatgattgcggtggagccttcactatgggtgtcatcggtggcggagtcttccaggccatcaagggtttccgcaatgcccctgttggaattcggcaccggttgagaggtagtgccaatgctgtgaggatccgagccccccagattggaggtagcttcgcagtgtgggggggcctgttctccaccattgactgtggcctggtgcggcttcggggcaaggaggatccctggaactctatcaccagtggagcattgaccggggctgtgctggctgcccgcagtggcccactggccatggtgggctcagcaatgatggggggcatcctgttggccctcattgagggcgttggcatcctcctcactcgctacacagcccagcagttccgaaatgcgcccccattcctggaggaccccagccagctgccccctaaggatggcaccccggccccaggctaccccagctatcagcagtaccactgaggaagccactgccaccatgggagctacttctcggttccctccccgatggtctacctcgaagggagggctggctcccagttagccctgggaccctccagagagggtttctactctgctccctagtcccagggtgggggtggggcaccccagctgccctgacagatgggtcccctttttctctctcagggcaccccagccccacactcacatgtacgaagttctcaccccagctcctttgtgtggcaccctgatgagtatttaaagcccgttttgaaatgccta

SEQ ID NO: 32246 - DNA, 1099 bp, Homo sapiens
  source 1..1099: mol_type = unassigned DNA
tgggggagcagagggcagcacttcctccagctccaaaagagtgcacccaccccaacgttaccaatacactcgtgcaggcggaaagctccgacgccggtgtgcgtctacgctgggggcgtggcctgactgcgcggccagacgccagcgccatggaggagtacgctcgggagccctgcccatggcgaattgtggatgattgcggtggagccttcactatgggtgtcatcggtggcggagtcttccaggccatcaagggtttccgcaatgcccctgtttgcagattgctgtctgaagctcccttgtttatctactcttgctcaagatctgtgtctcccaccgttaatgtgagctctgagagggcagagagcagacctaccttgttcatggctgtatccctgcatatggcatggtgcttggcacatataggaattcggcaccggttgagaggtagtgccaatgctgtgaggatccgagccccccagattggaggtagcttcgcagtgtgggggggcctgttctccaccattgactgtggcctggtgcggcttcggggcaaggaggatccctggaactctatcaccagtggagcattgaccggggctgtgctggctgcccgcagtggcccactggccatggtgggctcagcaatgatggggggcatcctgttggccctcattgagggcgttggcatcctcctcactcgctacacagcccagcagttccgaaatgcgcccccattcctggaggaccccagccagctgccccctaaggatggcaccccggccccaggctaccccagctatcagcagtaccactgaggaagccactgccaccatgggagctacttctcggttccctccccgatggtctacctcgaagggagggctggctcccagttagccctgggaccctccagagagggtttctactctgctccctagtcccagggtgggggtggggcaccccagctgccctgacagatgggtcccctttttctctctcagggcaccccagccccacactcacatgtacgaagttctcaccccagctcctttgtgtggcaccctgatgagtatttaaagcccgttttgaaatgcct

SEQ ID NO: 32247 - DNA, 1671 bp, Homo sapiens
  source 1..1671: mol_type = unassigned DNA
cgagggttgcttgggcagcgactgtcatggcggcggccgcccccaatgccggaggctcggcccctgagacagcgggttccgccgaagctccgctgcagtacagcctgctcctgcagtacctggtgggtgacaagcgtcagccccggctcctggagcctgggagcctgggcgggatcccaagtccagccaagagtgaggagcagaagatgatcgagaaggcgatggaaagctgcgctttcaaggctgcgctggcctgcgtgggaggatttgtcttaggaggtgcatttggggtgtttaccgctggcatcgataccaacgtgggctttgaccctaaggatccttaccgtacaccgactgcaaaagaagtgctgaaagacatggggcagagaggaatgtcctatgccaaaaatttcgccattgtgggagccatgttttcttgtactgagtgtttgatagaatcttaccggggaacatcagactggaagaacagtgtcatcagtggctgcatcacgggaggagctattggtttcagagctggcttaaaggctggggccattggttgtggaggttttgctgctttctctgctgcgattgattattacctccggtgagagtaattgcctgcagggaaggatgatgccagccccggatccgggctgctctctggaggacagtttctgtaccacaccagggccttgcttcagggcctgaagacattcattttccctcatgtcgttggtattctgagggagctgcctggcttctctgcctccagcctttggggtagccacactttgctgctcctggactccagccagccttcacagaggacgtcccgtgccagattctctcacagcagatcgggagacaggatgttgacatataggaattcagctccacaaagcttcaggcctgaccacagctggccctctaggttgtttggtgttgtgggcacagaggtgacagtgtctctgcaggcactcaggaagctgttctaccttggaactccatgcaactatccgtctcgaataccagggcagggcaaggcggactgatgccgtccaaccaattatctcacttgttttgtgttctgtcatccttgttttttttttaaaaatacactcccctcccccaccgccacacaccttacagttcaaaaggttggtttatttgtattttattttcaaattccctattccaaaaatagtgccgggtggcccaaagataacatctgaagggaaagaatgagaaagctcccagggaagcgggggatggggcgctgaggcagggttgttagaggactgtgtcatcctcaccaagctcattacatctgccagggcctgcctcaagaagcccagcccagccttttcctgggatgcagtgaaatcccatccatgaactcgatgggcccctcctgtgccggccgagaggcacacactgccttcacgacgtgactgctggacctggccgagcttgaggccacatgtgaagggtcctgctgtggtcatcttggtgactcggtcacagcagctactggccaagatcagacgtcgctgaggggctgttcaccaccatcctcgttctccagggtcaaggaagtgttttaacatgtcgtgttttcgacttgaccttgtggtatttttcttggcctagttgtgtgccatggatatt

SEQ ID NO: 32248 - DNA, 1178 bp, Homo sapiens
  source 1..1178: mol_type = unassigned DNA
gaaggtcagcgtgtgaagtaggcgctggcaacgcggggttacccgctgttattgaggagtaacggcccagcggaccacccaggcttgaggcagcggcgggaaccactcggtttgctgcgataccatggaaggaggcgggggaagcggcaacaaaaccacagggggattggccggctttttcggagccggcggagcaggttactcgcacgcggatttggctggcgtcccgctaactggtatgaaccctctgtctccttatttaaatgtggatccacgatacctcgtgcaggatacagatgagtttattttacctaccggagctaataaaacccggggcagatttgagctggccttctttacgattggaggatgttgcatgacaggggctgcgtttggtgcaatgaatggtcttcggctaggattgaaggaaacccagaacatggcctggtccaaaccaagaaatgtacagattttgaatatggtgactaggcaaggggcactttgggctaatactctaggttctctggctttgctctatagtgcatttggtgtcatcattgagaaaacacgaggtgcagaagatgaccttaacacagtagcagctggaaccatgacaggcatgttgtataaatgtacaggtggtcttcgagggatagcacgaggtggtctgacaggactaacacttaccagcctctatgcactatataataactgggagcacatgaaaggctccttgctccaacagtcactctgaagattttgccaactcatgaatggaggacacttcagtagtcatctagatccttttataagacagtttggagttattctctctcttctacctacaattagtttgaaaaattggagattttgatttgctgtgatgaaaatcctggatggctgaccaagactggcacttgttccagccattagtgagttgaagccaaagccctttggtgactcactgagtaccatggttctgttctcctctggagatcttgcacgtatctgttttcctcccccatgaactagaaaaccacttactcccagaattcaggtcgtgcttgttagtactatatcaccaagtccattcatttaatgatccaaaactgtaatgttgcactgtattccaaataaagggtaaaaacagaaccaaagttataactccaacacacaaa

SEQ ID NO: 32249 - DNA, 1022 bp, Homo sapiens
  source 1..1022: mol_type = unassigned DNA
aggtcagcgtgtgaagtaggcgctggcaacgcggggttacccgctgttattgaggagtaacggcccagcggaccacccaggcttgaggcagcggcgggaaccactcggtttgctgcgataccatggaaggaggcgggggaagcggcaacaaaaccacagggggattggccggctttttcggagccggcggagcaggttactcgcacgcggatttggctggcgtcccgctaactggtatgaaccctctgtctccttatttaaatgtggatccacgatacctcgtgcaggatacagatgagtttattttacctaccggagctaataaaacccggggcagatttgagctggccttctttacgattggaggatgttgcatgacagctttgctctatagtgcatttggtgtcatcattgagaaaacacgaggtgcagaagatgaccttaacacagtagcagctggaaccatgacaggcatgttgtataaatgtacaggtggtcttcgagggatagcacgaggtggtctgacaggactaacacttaccagcctctatgcactatataataactgggagcacatgaaaggctccttgctccaacagtcactctgaagattttgccaactcatgaatggaggacacttcagtagtcatctagatccttttataagacagtttggagttattctctctcttctacctacaattagtttgaaaaattggagattttgatttgctgtgatgaaaatcctggatggctgaccaagactggcacttgttccagccattagtgagttgaagccaaagccctttggtgactcactgagtaccatggttctgttctcctctggagatcttgcacgtatctgttttcctcccccatgaactagaaaaccacttactcccagaattcaggtcgtgcttgttagtactatatcaccaagtccattcatttaatgatccaaaactgtaatgttgcactgtattccaaataaagggtaaaaacagaaccaaagttataactcc

SEQ ID NO: 32250 - DNA, 848 bp, Homo sapiens
  source 1..848: mol_type = unassigned DNA
aggcgctggcaacgcggggttacccgctgttattgaggagtaacggcccagcggaccacccaggcttgaggcagcggcgggaaccactcggtttgctgcgataccatggaaggaggcgggggaagcggcaacaaaaccacagggggattggccggctttttcggagccggcggagcaggttactcgcacgcggatttggctggcgtcccgctaactggtatgaaccctctgtctccttatttaaatgtggatccacgatacctcgtgcaggatacagatgagtttattttacctaccggagctaataaaacccggggcagatttgagctggccttctttacgattggaggatgttgcatgacaggggcactttgggctaatactctaggttctctggctttgctctatagtgcatttggtgtcatcattgagaaaacacgaggtgcagaagatgaccttaacacagtagcagctggaaccatgacaggcatgttgtataaatgtacaggtggtcttcgagggatagcacgaggtggtctgacaggactaacacttaccagcctctatgcactatataataactgggagcacatgaaaggctccttgctccaacagtcactctgaagattttgccaactcatgaatggaggacacttcagtagtcatctagatccttttataagacagtttggagttattctctctcttctacctacaattagtttgaaaaattggagattttgatttgctgtgatgaaaatcctggatggctgaccaagactggcacttgttccagccattagtgagttgaagccaaagccctttggtgactcactgagtaccatggt

SEQ ID NO: 32251 - DNA, 752 bp, Homo sapiens
  source 1..752: mol_type = unassigned DNA
aggtcagcgtgtgaagtaggcgctggcaacgcggggttacccgctgttattgaggagtaacggcccagcggaccacccaggcttgaggcagcggcgggaaccactcggtttgctgcgataccatggaaggaggcgggggaagcggcaacaaaaccacagggggattggccggctttttcggagccggcggagcaggttactcgcacgcggatttggctggcgtcccgctaactggtatgaaccctctgtctccttatttaaatgtggatccacgatacctcgtgcaggatacagatgagtttattttacctaccggagctaataaaacccggggcagatttgagctggccttctttacgattggaggatgttgcatgacaggggctgcgtttggtgcaatgaatggtcttcggctaggattgaaggaaacccagaacatggcctggtccaaaccaagaaatgtacagattttgaatatggtgactaggcaaggggcactttgggctaatactctaggttctctggctttgctctatagtgcatttggtgtcatcattgagaaaacacgaggtgcagaagatgaccttaacacagtagcagctggaaccatgacaggcatgttgtataaatgtacagcctcagcctcccaaagtgctaggattgcagatggtcttatttttacggagttttgctctgtcgccaggctgcagggcagtggcacaatcttggctcattacaacctccacctcccg

SEQ ID NO: 32252 - DNA, 746 bp, Homo sapiens
  source 1..746: mol_type = unassigned DNA
cgggggaagcggcaacaaaaccacagggggattggccggctttttcggagccggcggagcaggttactcgcacgcggatttggctggcgtcccgcctttgctctatagtgcatttggtgtcatcattgagaaaacacgaggtgcagaagatgaccttaacacagtagcagctggaaccatgacaggcatgttgtataaatgtacaggtggtcttcgagggatagcacgaggtggtctgacaggactaacacttaccagcctctatgcactatataataactgggagcacatgaaaggctccttgctccaacagtcactctgaagattttgccaactcatgaatggaggacacttcagtagtcatctagatccttttataagacagtttggagttattctctctcttctacctacaattagtttgaaaaattggagattttgatttgctgtgatgaaaatcctggatggctgaccaagactggcacttgttccagccattagtgagttgaagccaaagccctttggtgactcactgagtaccatggttctgttctcctctggagatcttgcacgtatctgttttcctcccccatgaactagaaaaccacttactcccagaattcaggtcgtgcttgttagtactatatcaccaagtccattcatttaatgatccaaaactgtaatgttgcactgtattccaaataaagggtaaaaacagaaccaaagttataactccaacacacaaa

SEQ ID NO: 32253 - DNA, 1999 bp, Homo sapiens
  source 1..1999: mol_type = unassigned DNA
aggcattccctacccttttaatgccccgccctatgacggacccaatcggagggctctccctacccgaaaccccgctcctggagcggcttttctcaggcttgcgcggctctaggccgaagcggcggatgacgcaaccgggccgcgccgcgagaaggtcacacgattctccaacatggcggcggcggccctgcggagtggctggtgccgctgtccacggagatgcctcggcagtggaatccaatttctttccagccacaacctaccccatgggtcgacctatcagatgcgccggccgggcggagagctgccactgtccaaatcatattcttctggaaacagaaaaggctttctgtccggcttgctagataatgtcaaacaagaattagccaaaaacaaagaaatgaaagaaagtataaaaaaattccgtgacgaggccagaaggctagaagaatcagacgtgctccaggaggccagaaggaaatacaaaaccatcgagtcagaaaccgtgcggacgagcgaggtgctacggaagaagcttggggagctgacgggcaccgtgaaggagagccttcacgaagtcagtaaaagtgatctcggccggaaaatcaaggagggcgtggaggaagcagccaagacggccaagcagtcggccgagtcggtatccaaaggcggggagaagctgggcaggacagcggccttcagagccctctcccagggggtggagtccgtgaagaaggaaattgacgacagcgtcctgggacagaccgggccctaccggaggccccagcgactccggaagagaacggagtttgcgggagataagttcaaggaggagaaagtgtttgagccaaacgaggaggccctgggggtcgtgctgcacaaggactccaagtggtaccagcagtggaaggacttcaaggagaacaacgtggtgtttaaccggttcttcgagatgaagatgaagtatgacgaaagcgacaacgcgttcatccgggcatcccgggcccttacggacaaggtcaccgacttgctggggggcctgttctccaagacagagatgtcggaggtgctcacggagatcctccgggtggacccggcctttgacaaggaccggtttctgaaacagtgcgagaacgacatcatccccaatgtcctggaggccatgatttctggagagcttgacattctcaaagactggtgctatgaagctacttacagccagctggcccaccccatccagcaggccaaggcactgggtctccagttccattctcgcatcctagacattgacaacgtcgacctggccatgggcaagatgatggagcaggggccggtgctgatcatcaccttccaggcacagctggtgatggtggtcaggaaccccaaaggcgaggtggtggagggtgacccggacaaggtgctgcggatgctgtacgtgtgggcgctctgccgagaccaggacgagctcaacccctacgcggcctggcggctcctggacatctcggcctccagcaccgagcagattctctgagtgtggtgccggagccaggtagccccggcctgggtcatcaggcacagaggcaccgcaacaccacctgcggcaactccagacctctgggaacaagactgcgggctctgcccccagctctgccaggacggctgcaagaccagctggcccgggaggggacaacgggctgttgcgggtgcgcggcagctggagacactcccccgcagggccaacccctgccctgttgctctgccctgcaggggtcccggcgcctggtcacctggggtgcacacaggtcacacagtgccaagaggccccagggcccagggactccccccacagcagggtgggacccgggacccgcggctcagtggcccgctagccacgtcagccaagccactttaggtccattttttaattttaacagtgctcttccatcttgtgcataagcctgagatttggaaagaataaaacaccgaattgcagaagagc

SEQ ID NO: 32254 - DNA, 1664 bp, Homo sapiens
  source 1..1664: mol_type = unassigned DNA
ttccctacgtcgggagaggaaaactccatcaaaaaacgaaagccaggggcccaggatagccaactaatcgacccagtcaactaactgacccagtgcacaactctggtagctcagaaaacgcgggctaatttggaagtggacaggggcggagctgtggggccagcacggaatggatcacgtggtctgaagtaacttccttttctcctttcttttctttttggagtaacatctcaacggcacctcggctctgggctgtaagccctgcgatctcaaggcgcaaggctgggcgcaacggcagggttgcggggttacgggattgcggggtccggggagtggaacccgccgactccgggaacgaagcaccggcgccaaggtgtgggaggcggcggggtggagttggacgcctgcctcgcgccgacgcagtgcactcacgggggcggtcccagaggcagctagctgtggttccggttccgtcgcggagacacgtgaaggtcggtgcggagttcgtctctgcaagcttggtcgccctgggatggattcctcctcctcttcctccgcggcgggtttgggtgcagtggacccgcagttgcagcatttcatcgaggtagagactcaaaagcagcgcttccagcagctggtgcaccagatgactgaactttgttgggagaagtgcatggacaagcctgggccaaagttggacagtcgggctgaggcctgttttgtgaactgcgttgagcgcttcattgatacaagccagttcatcttgaatcgactggaacagacccagaaatccaagccagttttctcagaaagcctttctgactgatctcagcattacctctttggaaaaggaaggtagttcaagaaatgaagagctgttgatgggatgattgaagaaacagctatgagaggattggctcccatcttttgttactcttgggacatcctgtcatctgagaatgaacaaagaccaattttttgtgtgtgaagcttaagggtcatatgtttgcttgtattttttaatgctaatcttgtgaaaataattgacaggcgaaagaaaactctatttagatgcatattactgtacatgggactatgcttttctcaaagccccattaactgcttcctataattttgatagtgggaccacatacgtaaaaatctctcatttgtgtggagtcatttctgatttcaggggagatccttgtgtttatcagaaagggcagaagtaggggaagaataatttggtatccttatctagtgtttgattgtcaatgctggagaaaaatatctgtaagagtgtttatacagtacacttcagttatcttgatctccctttcctatatgatgatttgcttaaatatccatattaagtaagtctcaaggtagggtaggcagcctgagagtctagaggcctttagttataaaggaatctagccagtgaacataattcttattactagactgccacaaggaagaaattaacttaccctgtatatcagggtacaaaaaattcagtgatgtgcctaaataagttataaagatttaggccaatcagaagctaacagcagtttcaggtagaggtgcatgcctaatgttagttagtgtagattccatttactgcattcttctgatcactgaaataaaagctatataagattcaa

SEQ ID NO: 32255 - DNA, 1336 bp, Homo sapiens
  source 1..1336: mol_type = unassigned DNA
aagcgctctctggtgctcttccattcctctccgggtggaaacaaactccggacataacaggggtttatttatttatttattttaaggtagcacattgccgcacaagaccgctctacagtctcatccaagacttgaagagctcccgacttgtaatactacttgtgtttaccagggactgttgacactgcttcgcttccgaagaccgttagggacgtgggattagatttcctcgcgttataacgaatcggcgtctaagggtttaagtgtcacttgacattactgctcccacgtgttctttcccatctggcggccgcggctcctgtccagaccctgaccctccctcccaaggctcaaccgtcccccaacaacccccagccttgtactgatgtcggatgcgagagcctgtgcttaagtaagaatcaggccttattggagacattcaagcaaaggttggacaactacttttccagaacagaaaggaaactcatgcatcagaaaaggtgactaataaaggtaccagaagaatatggctgcacaaataccagaatctgatcagataaaacagtttaaggaatttctggggacctacaataaacttacagagacctgctttttggactgtgttaaagacttcacaacaagagaagtaaaacctgaagagaccacctgttcagaacattgcttacagaaatatttaaaaatgacacaaagaatatccatgagatttcaggaatatcatattcagcagaatgaagccctggcagccaaagcaggactccttggccaaccacgatagagaagtcctgatggatgaacttttgatgaaagattgccaacagctgctttattggaaatgaggactcatctgatagaatcccctgaaagcagtagccaccatgttcaaccatctgtcatgactgtttggcaaatggaaaccgctggagaaacaaaattgctatttaccaggaataatcacaatagaaggtcttattgttcagtgaaataataagatgcaacatttgttgaggccttatgattcagcagcttggtcacttgattagaaaaataaaccattgtttcttcaattgtgactgttaattttaaagcaacttatgtgttcgatcatgtatgagatagaaaaatttttattactcaaagtaaaataaatggaaatatcactgagcagttgtttatactgtatggtaccatagtattctcactggactgtggatacgttgaaatgtttttcaatcaggatcatcctccaagcagtcctgttcattcatgtctgcctcaaattgctggtgaatacataaaatagttacttgctaatcat

SEQ ID NO: 32256 - DNA, 598 bp, Homo sapiens
  source 1..598: mol_type = unassigned DNA
taatgatctgagaaattgggggtggtggcatacaattacatacacagatttataaaatacgagcagtgattccctaactcttcagttagactaaaaacatttgtttatagattgacaaacttgttttgaatttttaaattaggtgactaataaaggtaccagaagaatatggctgcacaaataccagaatctgatcagataaaacagtttaaggaatttctggggacctacaataaacttacagagacctgctttttggactgtgttaaagacttcacaacaagagaagtaaaacctgaagagaccacctgttcagaacattgcttacagaaatatttaaaaatgacacaaagaatatccatgagatttcaggaatatcatattcagcagaatgaagccctggcagccaaagcaggactccttggccaaccacgatagagaagtcctgatggatgaacttttgatgaaagattgccaacagctgctttattggaaatgaggactcatctgatagaatcccctgaaagcagtagccaccatgttcaaccatctgtcatgactgtttggcaaatggaaaccgctggagaaacaaaattgc

SEQ ID NO: 32257 - DNA, 377 bp, Homo sapiens
  source 1..377: mol_type = unassigned DNA
tggcggccgcggctcctgtccagaccctgaccctccctcccaaggctcaaccgtcccccaacaacccccagccttgtactgatgtcggatgcgagagcctgtgcttaagtaagaatcaggccttattggagacattcaagcaaaggttggacaactacttttccagaacagaaaggaaactcatgcatcagaaaaggtttcagggatataatcagaaggtgactaataaaggtaccagaagaatatggctgcacaaataccagaatctgatcagataaaacagtttaaggaatttctggggacctacaataaacttacagagacctgctttttggactgtgttaaagacttcacaacaagagaagtaaaacctgaag

SEQ ID NO: 32258 - DNA, 430 bp, Homo sapiens
  source 1..430: mol_type = unassigned DNA
actgctcccacgtgttctttcccatctggcggccgcggctcctgtccagaccctgaccctccctcccaaggctcaaccgtcccccaacaacccccagccttgtactgatgtcggatgcgagagcctgtgcttaagtgactaataaaggtaccagaagaatatggctgcacaaataccagaatctgatcagataaaacagtttaaggaatttctggggacctacaataaacttacagagacctgctttttggactgtgttaaagacttcacaacaagagaagtaaaacctgaagagaccacctgttcagaacattgcttacagaaatatttaaaaatgacacaaagaatatccatgagatttcaggaatatcatattcagcagaatgaagccctggcagccaaagcaggactccttggccaaccacgatag

SEQ ID NO: 32259 - DNA, 796 bp, Homo sapiens
  source 1..796: mol_type = unassigned DNA
gctctacagtctcatccaagacttgaagagctcccgacttgtaatactacttgtgtttaccagggactgttgacactgcttcgcttccgaagaccgttagggacgtgggattaggtgactaataaaggtaccagaagaatatggctgcacaaataccagaatctgatcagataaaacagtttaaggaatttctggggacctacaataaacttacagagacctgctttttggactgtgttaaagacttcacaacaagagaagtaaaacctgaagagaccacctgttcagaacattgcttacagaaatatttaaaaatgacacaaagaatatccatgagatttcaggaatatcatattcagcagaatgaagccctggcagccaaagcaggactccttggccaaccacgatagagaagtcctgatggatgaacttttgatgaaagattgccaacagctgctttattggaaatgaggactcatctgatagaatcccctgaaagcagtagccaccatgttcaaccatctgtcatgactgtttggcaaatggaaaccgctggagaaacaaaattgctatttaccaggaataatcacaatagaaggtcttattgttcagtgaaataataagatgcaacatttgttgaggccttatgattcagcagcttggtcacttgattagaaaaataaaccattgtttcttcaattgtgactgttaattttaaagcaacttatgtgttcgatcatgtatgagatagaaaaatttttattactcaaagtaaaataaatggaaatatcactga

SEQ ID NO: 32260 - DNA, 1432 bp, Homo sapiens
  source 1..1432: mol_type = unassigned DNA
ctcctttccgcttccggtgtcccctacagtcatggctgccgccgtcgctgctgccggtgcaggggaaccccagtccccggacgaattgctcccgaaaggcgacgcggagaagcctgaggaggagctggaggaggacgacgatgaggagctagatgagaccctgtcggagagactatggggcctgacggagatgtttccggagagggtccggtccgcggccggagccacttttgatctttccctctttgtggctcagaaaatgtacaggttttccagggcagccttgtggattgggaccacttcctttatgatcctggttcttcccgttgtctttgagacggagaagttgcaaatggagcaacagcagcaactgcagcagcggcagatacttctaggacctaacacagggctctcaggaggaatgccaggggctctaccctcacttcctggaaagatctagattgttattgctgtttgagctgtctcagtgggataagtttgaaattcaagtgtttgaactgctgataatttggatttttttttttttttaactttggcacattgatctatctaaacctggtggggagaattatccccacattgtctcatggaaagactcaacttgcaactgtgccctccacactatccttacttctgtctccactctgataccagagtgcagccatgcagatggttattccagctctggtcacccgactcctttcaccaaattgctcctaactggaagatctcactttccccttgtggggtaggaaccgatgccagtgggagggatgtgcccctgaccattaacgactgttttttttttttttttttaaagaatggagttgttggggcaggacatgcacacaatgtgaaacagacaaaatgcattacacctgtagtgtaaagtggccactatgaatccctatgtatgagaggagggaggcaggctgcagcttcagccacagaatggggactatggaagacagcaggagctcatttcctctgcacattttggctgttagacctgtgtgtgtgtttaaaaaaagagaagtcagtgctcactttttgtatttaaatattaaaaatgattccaactgaaagtgtcatcctaagtaccttgaaatgagaccacgtcagagacatgtactgcccctcacattttctcacctaaaccagcagcacctccatcttaacagccataggcccaaattgtttccaagtgaaaattcatttttagccaagtacttcatagcaatctttgccctgaatttaggcagtcactttgagatccatcagcctaaaacaaaggattgggtctatgtacttctttagtctataatgacactgtgtaattataaagtatttgtagggaataacatagtactgatttctggggaataggggagggggacagaatttttttttt

SEQ ID NO: 32261 - DNA, 1696 bp, Homo sapiens
  source 1..1696: mol_type = unassigned DNA
ggggcgacggtggtggcggcggcggcagcgggttcggttgcgcgtggcgcacggggtgggagcggagcccaggccgggagcaggcgccgccgccagcgaccatggggaacgtgttggctgccagctcgccgcccgcagggccgccaccgccgcctgcgccggccctcgtggggctgccgccacctccgccctcgccgccgggcttcacgctgccgccgctgggaggcagcctgggcgccggcaccagtacgagtcgaagttcggaacggacccccggggctgcaaccgccagcgcctcaggggccgccgaggatggggcctgcggctgcctgcccaacccgggcacattcgaggagtgccaccggaagtgcaaggagctgtttcccattcagatggagggtgtcaagctcacagtcaacaaagggttgagtaaccattttcaggtcaaccacacagtagccctcagcacaatcggggagtccaactaccacttcggggtcacatatgtggggacaaagcagctgagtcccacagaggcgttccctgtactggtgggtgacatggacaacagtggcagtctcaacgctcaggtcattcaccagctgggccccggtctcaggtccaagatggccatccagacccagcagtcgaagtttgtgaactggcaggtggacggggagtatcggggctctgacttcacagcagccgtcaccctggggaacccagacgtcctcgtgggttcaggaatcctcgtagcccactacctccagagcatcacgccttgcctggccctgggtggagagctggtctaccaccggcggcctggagaggagggcactgtcatgtctctagctgggaaatacacattgaacaactggttggcaacggtaacgttgggccaggcgggcatgcacgcaacatactaccacaaagccagtgaccagctgcaggtgggtgtggagtttgaggccagcacaaggatgcaggacaccagcgtctccttcgggtaccagctggacctgcccaaggccaacctcctcttcaaaggctctgtggatagcaactggatcgtgggtgccacgctggagaagaagctcccacccctgcccctgacactggcccttggggccttcctgaatcaccgcaagaacaagtttcagtgtggctttggcctcaccatcggctgagccctcctggcccccgccttccacgcccttccgattccacctccacctccacctccccctgccacagaggggagacctgagcccccctcccttccctccccccttgggggtcgggggggacattggaaaggagggaccccgccaccccagcagctgaggaggggattctggaactgaatggcgcttcgggattctgagtagcaggggcagcatgcccagtgggcctggggtcccgggagggattccggaattgaggggcacgcaggattctgagcaccaggggcagaggcggccagacaacctcagggaggagtgtcctggcgtccccatcctccaaagggcctgggcccgccccgagggggcagcgagaggagcttccccatccccggtcagtccaccctgccccgtccactttcccatctcctcggtataaatcatgtttataagttatggaagaaccgggacattttacagaaaaaaaacaaaaaacaacaaaaaatatacgtggg

SEQ ID NO: 32262 - DNA, 1699 bp, Homo sapiens
  source 1..1699: mol_type = unassigned DNA
ggggcgacggtggtggcggcggcggcagcgggttcggttgcgcgtggcgcacggggtgggagcggagcccaggccgggagcaggcgccgccgccacaggcgaccatggggaacgtgttggctgccagctcgccgcccgcagggccgccaccgccgcctgcgccggccctcgtggggctgccgccacctccgccctcgccgccgggcttcacgctgccgccgctgggaggcagcctgggcgccggcaccagtacgagtcgaagttcggaacggacccccggggctgcaaccgccagcgcctcaggggccgccgaggatggggcctgcggctgcctgcccaacccgggcacattcgaggagtgccaccggaagtgcaaggagctgtttcccattcagatggagggtgtcaagctcacagtcaacaaagggttgagtaaccattttcaggtcaaccacacagtagccctcagcacaatcggggagtccaactaccacttcggggtcacatatgtggggacaaagcagctgagtcccacagaggcgttccctgtactggtgggtgacatggacaacagtggcagtctcaacgctcaggtcattcaccagctgggccccggtctcaggtccaagatggccatccagacccagcagtcgaagtttgtgaactggcaggtggacggggagtatcggggctctgacttcacagcagccgtcaccctggggaacccagacgtcctcgtgggttcaggaatcctcgtagcccactacctccagagcatcacgccttgcctggccctgggtggagagctggtctaccaccggcggcctggagaggagggcactgtcatgtctctagctgggaaatacacattgaacaactggttggcaacggtaacgttgggccaggcgggcatgcacgcaacatactaccacaaagccagtgaccagctgcaggtgggtgtggagtttgaggccagcacaaggatgcaggacaccagcgtctccttcgggtaccagctggacctgcccaaggccaacctcctcttcaaaggctctgtggatagcaactggatcgtgggtgccacgctggagaagaagctcccacccctgcccctgacactggcccttggggccttcctgaatcaccgcaagaacaagtttcagtgtggctttggcctcaccatcggctgagccctcctggcccccgccttccacgcccttccgattccacctccacctccacctccccctgccacagaggggagacctgagcccccctcccttccctccccccttgggggtcgggggggacattggaaaggagggaccccgccaccccagcagctgaggaggggattctggaactgaatggcgcttcgggattctgagtagcaggggcagcatgcccagtgggcctggggtcccgggagggattccggaattgaggggcacgcaggattctgagcaccaggggcagaggcggccagacaacctcagggaggagtgtcctggcgtccccatcctccaaagggcctgggcccgccccgagggggcagcgagaggagcttccccatccccggtcagtccaccctgccccgtccactttcccatctcctcggtataaatcatgtttataagttatggaagaaccgggacattttacagaaaaaaaacaaaaaacaacaaaaaatatacgtggg

SEQ ID NO: 32263 - DNA, 1791 bp, Homo sapiens
  source 1..1791: mol_type = unassigned DNA
ggggcgacggtggtggcggcggcggcagcgggttcggttgcgcgtggcgcacggggtgggagcggagcccaggccgggagcaggcgccgccgccagtgagaaccggggccggagccgggtgcggatttgctggggctgagtcgggggcgcgcgggccctgacctctgccctctgacctctcccctagcaggcgaccatggggaacgtgttggctgccagctcgccgcccgcagggccgccaccgccgcctgcgccggccctcgtggggctgccgccacctccgccctcgccgccgggcttcacgctgccgccgctgggaggcagcctgggcgccggcaccagtacgagtcgaagttcggaacggacccccggggctgcaaccgccagcgcctcaggggccgccgaggatggggcctgcggctgcctgcccaacccgggcacattcgaggagtgccaccggaagtgcaaggagctgtttcccattcagatggagggtgtcaagctcacagtcaacaaagggttgagtaaccattttcaggtcaaccacacagtagccctcagcacaatcggggagtccaactaccacttcggggtcacatatgtggggacaaagcagctgagtcccacagaggcgttccctgtactggtgggtgacatggacaacagtggcagtctcaacgctcaggtcattcaccagctgggccccggtctcaggtccaagatggccatccagacccagcagtcgaagtttgtgaactggcaggtggacggggagtatcggggctctgacttcacagcagccgtcaccctggggaacccagacgtcctcgtgggttcaggaatcctcgtagcccactacctccagagcatcacgccttgcctggccctgggtggagagctggtctaccaccggcggcctggagaggagggcactgtcatgtctctagctgggaaatacacattgaacaactggttggcaacggtaacgttgggccaggcgggcatgcacgcaacatactaccacaaagccagtgaccagctgcaggtgggtgtggagtttgaggccagcacaaggatgcaggacaccagcgtctccttcgggtaccagctggacctgcccaaggccaacctcctcttcaaaggctctgtggatagcaactggatcgtgggtgccacgctggagaagaagctcccacccctgcccctgacactggcccttggggccttcctgaatcaccgcaagaacaagtttcagtgtggctttggcctcaccatcggctgagccctcctggcccccgccttccacgcccttccgattccacctccacctccacctccccctgccacagaggggagacctgagcccccctcccttccctccccccttgggggtcgggggggacattggaaaggagggaccccgccaccccagcagctgaggaggggattctggaactgaatggcgcttcgggattctgagtagcaggggcagcatgcccagtgggcctggggtcccgggagggattccggaattgaggggcacgcaggattctgagcaccaggggcagaggcggccagacaacctcagggaggagtgtcctggcgtccccatcctccaaagggcctgggcccgccccgagggggcagcgagaggagcttccccatccccggtcagtccaccctgccccgtccactttcccatctcctcggtataaatcatgtttataagttatggaagaaccgggacattttacagaaaaaaaacaaaaaacaacaaaaaatatacgtggg

SEQ ID NO: 32264 - DNA, 2272 bp, Homo sapiens
  source 1..2272: mol_type = unassigned DNA
atgccctctagtggctcagtgtccagaagccgccaacgaggacgatccatggcatcccggggctttgacgggtcccgccgcgggagtctccggcgggcgggcgcgcgcgagccaccgagcgaggtgatagaggcggcggcccaggcgtctgggtcctgctggtcttcgcctttcttctccgcttctaccccgtcggccgctgccactggggtccctggccccaccgacatggcggcggtgttgcagcaagtcctggagcgcacggagctgaacaagctgcccaagtctgtccagaacaaacttgaaaagttccttgctgatcagcaatccgagatcgatggcctgaaggggcggcatgagaaatttaaggtggagagcgaacaacagtattttgaaatagaaaagaggttgtcccacagtcaggagagacttgtgaatgaaacccgagagtgtcaaagcttgcggcttgagctagagaaactcaacaatcaactgaaggcactaactgagaaaaacaaagaacttgaaattgctcaggatcgcaatattgccattcagagccaatttacaagaacaaaggaagaattagaagctgagaaaagagacttaattagaaccaatgagagactatctcaagaacttgaatacttaacagaggatgttaaacgtctgaatgaaaaacttaaagaaagcaatacaacaaagggtgaacttcagttaaaattggatgaacttcaagcttctgatgtttctgttaagtatcgagaaaaacgcttggagcaagaaaaggaattgctacatagtcagaatacatggctgaatacagagttgaaaaccaaaactgatgaacttctggctcttggaagagaaaaagggaatgagattctagagcttaaatgtaatcttgaaaataaaaaagaagaggtttctagactggaagaacaaatgaatggcttaaaaacatcaaatgaacatcttcaaaagcatgtggaggatctgttgaccaaattaaaagaggccaaggaacaacaggccagtatggaagagaaattccacaatgaattaaatgcccacataaaactttctaatttgtacaagagtgccgctgatgactcagaagcaaagagcaatgaactaacccgggcagtagaggaactacacaaacttttgaaagaagctggtgaagccaacaaagcaatacaagatcatcttctagaggtggagcaatccaaagatcaaatggaaaaagaaatgcttgagaaaatagggagattggagaaggaattagagaatgcaaatgaccttctttctgccacaaaacgtaaaggagccatattgtctgaagaagagcttgccgccatgtctcctactgcagcagctgtagctaagatagtgaaacctgggatgaaactaactgagctctataatgcttatgtggaaactcaggatcagttgcttttggagaaactagagaacaaaagaattaataagtacctagatgaaatagtgaaagaagtggaagccaaagcaccaattttgaaacgccagcgtgaggaatatgaacgtgcacagaaagctgtagcaagtttatctgttaagcttgaacaagctatgaaggagattcagcgattgcaggaggacactgataaagccaacaagcaatcatctgtacttgagagagataatcgaagaatggaaatacaagtaaaagatctttcacaacagattagagtgcttttgatggaacttgaagaagcaaggggtaaccacgtaattcgtgatgaggaagtaagctctgctgatataagtagttcatctgaggtaatatcacagcatctagtatcttacagaaatattgaagagcttcaacaacaaaatcaacgtctcttagtggcccttagagagcttggggaaaccagagaaagagaagaacaagaaacaacttcatccaaaatcactgagcttcagctcaaacttgagagtgcccttactgaactagaacaactccgcaaatcacgacagcatcaaatgcagcttgttgattccatagttcgtcagcgtgatatgtaccgtattttattgtcacaaacaacaggagttgccattccattacatgcttcaagcttagatgatgtttctcttgcatcaactccaaaacgtccaagtacatcacagactgtttccactcctgctccagtacctgttattgaatcaacagaggctatagaggctaaggctgcccttaaacagttgcaggaaatttttgagaact

SEQ ID NO: 32265 - DNA, 7538 bp, Homo sapiens
  source 1..7538: mol_type = unassigned DNA
gcgcaagaggatcagggatagcctctgagctcgggttcccagggttcgtagcttccaacggctgcgcgcgcacttcggtcgcgggcggtgaggtgctgttgctgaaacgctgccgctgagggtggactcgatttcccagggtcccgccgcgggagtctccggcgggcgggcgcgcgcgagccaccgagcgaggtgatagaggcggcggcccaggcgtctgggtcctgctggtcttcgcctttcttctccgcttctaccccgtcggccgctgccactggggtccctggccccaccgacatggcggcggtgttgcagcaagtcctggagcgcacggagctgaacaagctgcccaagtctgtccagaacaaacttgaaaagttccttgctgatcagcaatccgagatcgatggcctgaaggggcggcatgagaaatttaaggtggagagcgaacaacagtattttgaaatagaaaagaggttgtcccacagtcaggagagacttgtgaatgaaacccgagagtgtcaaagcttgcggcttgagctagagaaactcaacaatcaactgaaggcactaactgagaaaaacaaagaacttgaaattgctcaggatcgcaatattgccattcagagccaatttacaagaacaaaggaagaattagaagctgagaaaagagacttaattagaaccaatgagagactatctcaagaacttgaatacttaacagaggatgttaaacgtctgaatgaaaaacttaaagaaagcaatacaacaaagggtgaacttcagttaaaattggatgaacttcaagcttctgatgtttctgttaagtatcgagaaaaacgcttggagcaagaaaaggaattgctacatagtcagaatacatggctgaatacagagttgaaaaccaaaactgatgaacttctggctcttggaagagaaaaagggaatgagattctagagcttaaatgtaatcttgaaaataaaaaagaagaggtttctagactggaagaacaaatgaatggcttaaaaacatcaaatgaacatcttcaaaagcatgtggaggatctgttgaccaaattaaaagaggccaaggaacaacaggccagtatggaagagaaattccacaatgaattaaatgcccacataaaactttctaatttgtacaagagtgccgctgatgactcagaagcaaagagcaatgaactaacccgggcagtagaggaactacacaaacttttgaaagaagctggtgaagccaacaaagcaatacaagatcatcttctagaggtggagcaatccaaagatcaaatggaaaaagaaatgcttgagaaaatagggagattggagaaggaattagagaatgcaaatgaccttctttctgccacaaaacgtaaaggagccatattgtctgaagaagagcttgccgccatgtctcctactgcagcagctgtagctaagatagtgaaacctgggatgaaactaactgagctctataatgcttatgtggaaactcaggatcagttgcttttggagaaactagagaacaaaagaattaataagtacctagatgaaatagtgaaagaagtggaagccaaagcaccaattttgaaacgccagcgtgaggaatatgaacgtgcacagaaagctgtagcaagtttatctgttaagcttgaacaagctatgaaggagattcagcgattgcaggaggacactgataaagccaacaagcaatcatctgtacttgagagagataatcgaagaatggaaatacaagtaaaagatctttcacaacagattagagtgcttttgatggaacttgaagaagcaaggggtaaccacgtaattcgtgatgaggaagtaagctctgctgatataagtagttcatctgaggtaatatcacagcatctagtatcttacagaaatattgaagagcttcaacaacaaaatcaacgtctcttagtggcccttagagagcttggggaaaccagagaaagagaagaacaagaaacaacttcatccaaaatcactgagcttcagctcaaacttgagagtgcccttactgaactagaacaactccgcaaatcacgacagcatcaaatgcagcttgttgattccatagttcgtcagcgtgatatgtaccgtattttattgtcacaaacaacaggagttgccattccattacatgcttcaagcttagatgatgtttctcttgcatcaactccaaaacgtccaagtacatcacagactgtttccactcctgctccagtacctgttattgaatcaacagaggctatagaggctaaggctgcccttaaacagttgcaggaaatttttgagaactacaaaaaagaaaaagcagaaaatgaaaaaatacaaaatgagcagcttgagaaacttcaagaacaagttacagatttgcgatcacaaaataccaaaatttctacccagctagattttgcttctaaacgttatgaaatgctgcaagataatgttgaaggatatcgtcgagaaataacatcacttcatgagagaaatcagaaactcactgccacaactcaaaagcaagaacagattatcaatacgatgactcaagatttgagaggagcaaatgagaagctagctgtcgcagaagtaagagcagaaaatttgaagaaggaaaaggaaatgcttaaattgtctgaagttcgtctttctcagcaaagagagtctttgttagctgaacaaagggggcaaaacttactgctaactaatctgcaaacaattcagggaatactggagcgatctgaaacagaaaccaaacaaaggcttagtagccagatagaaaaactggaacatgagatctctcatctaaagaagaagttggaaaatgaggtggaacaaaggcatacacttactagaaatctagatgttcaacttttagatacaaagagacaactggatacagagacaaatcttcatcttaacacaaaagaactattaaaaaatgctcaaaaagaaattgccacattgaaacagcacctcagtaatatggaagtccaagttgcttctcagtcttcacagagaactggtaaaggtcagcctagcaacaaagaagatgtggatgatcttgtgagtcagctaagacagacagaagagcaggtgaatgacttaaaggagagactcaaaacaagtacgagcaatgtggaacaatatcaagcaatggttactagtttagaagaatccctgaacaaggaaaaacaggtgacagaagaagtgcgtaagaatattgaagttcgtttaaaagagtcagctgaatttcagacacagttggaaaagaagttgatggaagtagagaaggaaaaacaagaacttcaggatgataaaagaagagccatagagagcatggaacaacagttatctgaattgaagaaaacactttctagtgttcagaatgaagtacaagaagctcttcagagagcaagcacagctttaagtaatgagcagcaagccagacgtgactgtcaggaacaagctaaaatagctgtggaagctcagaataagtatgagagagaattgatgctgcatgctgctgatgttgaagctctacaagctgcgaaggagcaggtttcaaaaatggcatcagtccgtcagcatttggaagaaacaacacagaaagcagaatcacagttgttggagtgtaaagcatcttgggaggaaagagagagaatgttaaaggatgaagtttccaaatgtgtatgtcgctgtgaagatctggagaaacaaaacagattacttcatgatcagatcgaaaaattaagtgacaaggtcgttgcctctgtgaaggaaggtgtacaaggtccactgaatgtatctctcagtgaagaaggaaaatctcaagaacaaattttggaaattctcagatttatacgacgagaaaaagaaattgctgaaactaggtttgaggtggctcaggttgagagtctgcgttatcgacaaagggttgaacttttagaaagagagctgcaggaactgcaagatagtctaaatgctgaaagggagaaagtccaggtaactgcaaaaacaatggctcagcatgaagaactgatgaagaaaactgaaacaatgaatgtagttatggagaccaataaaatgctaagagaagagaaggagagactagaacaggatctacagcaaatgcaagcaaaggtgaggaaactggagttagatattttacccttacaagaagcaaatgctgagctgagtgagaaaagcggtatgttgcaggcagagaagaagctcttagaagaggatgtcaaacgttggaaagcacgtaaccagcatctagtaagtcaacagaaagatccagatacagaagaatatcggaagctcctttctgaaaaggaagttcatactaagcgtattcaacaattgacagaagaaattggtagacttaaagctgaaattgcaagatcaaatgcatctttgactaacaaccagaacttaattcagagtctgaaggaagatctaaataaagtaagaactgaaaaggaaaccatccagaaggacttagatgccaaaataattgatatccaagaaaaagtcaaaactattactcaagttaagaaaattggacgtaggtacaagactcaatatgaagaacttaaagcacaacaggataaggttatggagacatcggctcagtcctctggagaccatcaggagcagcatgtttcagtccaggaaatgcaggaactcaaagaaacgctcaaccaagctgaaacaaaatcaaaatcacttgaaagtcaagtagagaatctgcagaagacattatctgaaaaagagacagaagcaagaaatctccaggaacagactgtgcaacttcagtctgaactttcacgacttcgtcaggatcttcaagatagaaccacacaggaggagcagctccgacaacagataactgaaaaggaagaaaaaaccagaaaggctattgtagcagcaaagtcaaaaattgcacacttagctggtgtaaaagatcagctaactaaagaaaatgaggagcttaaacaaaggaatggagccttagatcagcagaaagatgaattggatgttcgcattactgcgctaaagtcccaatatgaaggtcgaattagtcgcttggaaagagaactcagggagcatcaagagagacaccttgagcagagagatgagcctcaagaaccttctaataaggtccctgaacagcagagacagatcacattgaaaacaactccagcttctggtgaaagaggaattgccagcacatcagacccaccaacagccaatatcaagccaactcctgttgtgtctactccaagtaaagtgacagctgcagctatggctggaaataagtcaacacccagggctagtatccgcccaatggttacacctgcaactgttacaaatcccactactaccccaacagctacagtgatgcccactacacaagtggaatcacaggaagctatgcagtcagaagggcctgtggaacatgttccagtttttggaagcacaagtggatccgttcgttctactagtcctaatgtccagccttctatctctcaacctattttaactgttcagcaacaaacacaggctacagcttttgtgcaacccactcaacagagtcatcctcagattgagcctgccaatcaagagttatcttcaaacatagtagaggttgttcagagttcaccagttgagcggccttctacttccacagcagtatttggcacagtttcggctacccccagttcttctttgccaaagcgtacacgtgaagaggaagaggatagcaccatagaagcatcagaccaagtctctgatgatacagtggaaatgcctcttccaaagaagttgaaaagtgtcacacctgtaggaactgaggaagaagttatggcagaagaaagtactgatggagaggtagagactcaggtatacaaccaggattctcaagattccattggagaaggagttacccagggagattatacacctatggaagacagtgaagaaacctctcagtctctacaaatagatcttgggccacttcaatcagatcagcagacgacaacttcatcccaggatggtcaaggcaaaggagatgatgtcattgtaattgacagtgatgatgaagaagaggatgatgatgaaaatgatggagaacatgaggattatgaagaggatgaggaagatgatgatgatgatgaagatgacacagggatgggagatgagggtgaagatagtaatgaaggaactggtagtgccgatggcaatgatggttatgaagctgatgatgctgagggtggtgatgggactgatccaggtacagaaacagaagaaagtatgggtggaggtgaaggtaatcacagagctgctgattctcaaaacagtggtgaaggaaatacaggtgctgcagaatcttctttttctcaggaggtttctagagaacaacagccatcatcagcatctgaaagacaggcccctcgagcacctcagtcaccgagacgcccaccacatccacttcccccaagactgaccattcatgccccacctcaggagttgggaccaccagttcagagaattcagatgacccgaaggcagtctgtaggacgtggccttcagttgactccaggaataggtggcatgcaacagcatttttttgatgatgaagacagaacagttccaagtactccaactcttgtggtgccacatcgtactgatggatttgctgaagcaattcattcgccgcaggttgctggtgtccctagattccggtttgggccacctgaagatatgccacaaacaagttctagtcactctgatcttggccagcttgcttctcaaggaggtttaggaatgtatgaaacacccctgttcctagctcatgaagaagagtcaggtggccgaagtgttcccactactccactacaagtagcagccccagtgactgtatttactgagagcaccacctctgatgcttcggaacatgcctctcaatctgttccaatggtgactacatccactggcactttatctacaacaaatgaaacagcaacaggtgatgatggagatgaagtatttgtggaggcagaatctgaaggtattagttcagaagcaggcctagaaattgatagccagcaggaagaagagccggttcaagcatctgatgagtcagatctcccctccaccagccaggatcctccttctagctcatctgtagatactagtagtagtcaaccaaagcctttcagacgagtaagacttcagacaacattgagacaaggtgtccgtggtcgtcagtttaacagacagagaggtgtgagccatgcaatgggagggagaggaggaataaacagaggaaatattaattaaatggtctgtaaacaataacaactgtgaataagattatcaaatctgttttagtgtaatgattgtcaagtttaaaaacatttttatatataaactggtatactcatgtcaatattctttattaataaaatgtttttcagtgtcaaaattta

SEQ ID NO: 32266 - DNA, 515 bp, Homo sapiens
  source 1..515: mol_type = unassigned DNA
ccttctgggcgccatagagagcgtggcggtatcccggagcctgccgtccggccctaccgggaccgatgccctctagtggctcagtgtccagaagccgccaacgaggacgatccatggcatcccggggctttgacgggtcccgccgcgggagtctccggcgggcgggcgcgcgcgagccaccgagcgaggtgatagaggcggcggcccaggcgtctgggtcctgctggtcttcgcctttcttctccgcttctaccccgtcggccgctgccactggggtccctggccccaccgacatggcggcggtgttgcagcaagtcctggagcgcacggagctgaacaagctgcccaagtctgtccagaacaaacttgaaaagttccttgctgatcagcaatccgagatcgatggcctgaaggggcggcatgagaaatttaaggtggagagcgaacaacagtattttgaaatagaaaagaggttgtcccacagtcaggagagacttgtgaatgaaacccgagag

SEQ ID NO: 32267 - DNA, 955 bp, Homo sapiens
  source 1..955: mol_type = unassigned DNA
ccctctcctgcccattccgcggatgggcaatcccaggcggaactcccttgagggtctcagaatatctgggagacctcgggctcttgatctccgagacaccccgtttcgtagtggagaacagtccagatcggggaagtttattttgcccaaagccggttagaggccccctggccctcgattcccagtgcggggctcagagctcccctgaacagcagctgcagcagccatggccccgccctgggtgcccgccatgggcttcacgctggcgcccagcctggggtgcttcgtgggctcccgctttgtccacggcgagggtctccgctggtacgccggcctgcagaagccctcgtggcacccgccccactgggtgctgggccctgtctggggcacgctctactcagccatggggtacggctcctacctggtctggaaagagctgggaggcttcacagagaaggctgtggttcccctgggcctctacactgggcagctggccctgaactgggcatggccccccatcttctttggtgcccgacaaatgggctgggccttggtggatctcctgctggtcagtggggcggcggcagccactaccgtggcctggtaccaggtgagcccgctggccgcccgcctgctctacccctacctggcctggctggccttcacgaccacactcaactactgcgtatggcgggacaaccatggctggcgtgggggacggcggctgccagagtgagtgcccggcccaccagggactgcagctgcaccagcaggtgccatcacgcttgtgatgtggtggccgtcacgctttcatgaccactgggcctgctagtctgtcagggccttggcccaggggtcagcagagcttcagaggtggccccacctgagcccccacccgggagcagtgtcctgtgctttctgcatgcttagagcatgttcttggaacatggaattt

SEQ ID NO: 32268 - DNA, 881 bp, Homo sapiens
  source 1..881: mol_type = unassigned DNA
ggcggctgggaggggcggggcggatgcggggacagcggcctggctaactcctgccaggcagtgcccttcccggagcgtgccctcgccgctgagctcccctgaacagcagctgcagcagccatggccccgccctgggtgcccgccatgggcttcacgctggcgcccagcctggggtgcttcgtgggctcccgctttgtccacggcgagggtctccgctggtacgccggcctgcagaagccctcgtggcacccgccccactgggtgctgggccctgtctggggcacgctctactcagccatggggtacggctcctacctggtctggaaagagctgggaggcttcacagagaaggctgtggttcccctgggcctctacactgggcagctggccctgaactgggcatggccccccatcttctttggtgcccgacaaatgggctgggccttggtggatctcctgctggtcagtggggcggcggcagccactaccgtggcctggtaccaggtgagcccgctggccgcccgcctgctctacccctacctggcctggctggccttcacgaccacactcaactactgcgtatggcgggacaaccatggctggcgtgggggacggcggctgccagagtgagtgcccggcccaccagggactgcagctgcaccagcaggtgccatcacgcttgtgatgtggtggccgtcacgctttcatgaccactgggcctgctagtctgtcagggccttggcccaggggtcagcagagcttcagaggtggccccacctgagcccccacccgggagcagtgtcctgtgctttctgcatgcttagagcatgttcttggaacatggaattttataagctgaataaagtttttgacttccttta

SEQ ID NO: 32269 - DNA, 636 bp, Homo sapiens
  source 1..636: mol_type = unassigned DNA
agcggcctggctaactcctgccaggcagtgcccttcccggagcgtgccctcgccgctggtacggctcctacctggtctggaaagagctgggaggcttcacagagaaggctgtggttcccctgggcctctacactgggcagctggccctgaactgggcatggccccccatcttctttggtgcccgacaaatgggctgggccttggtggatctcctgctggtcagtggggcggcggcagccactaccgtggcctggtaccaggtgagcccgctggccgcccgcctgctctacccctacctggcctggctggccttcacgaccacactcaactactgcgtatggcgggacaaccatggctggcgtgggggacggcggctgccagagtgagtgcccggcccaccagggactgcagctgcaccagcaggtgccatcacgcttgtgatgtggtggccgtcacgctttcatgaccactgggcctgctagtctgtcagggccttggcccaggggtcagcagagcttcagaggtggccccacctgagcccccacccgggagcagtgtcctgtgctttctgcatgcttagagcatgttcttggaacatggaattttataagctgaataaagtttttgacttccttt

SEQ ID NO: 32270 - DNA, 672 bp, Homo sapiens
  source 1..672: mol_type = unassigned DNA
caggaagcgcggtcccaggagtggccgacgctccctctcctgcccattccgcggatgggcaatcccaggcggaactcccttgagggtctcagaatatctgggagacctcgggctcttgatctccgagacaccccgtttcgtagtggagaacagtccagatcggggaagtttattttgcccaaagccggttagaggccccctggccctcgattcccagtgcggggctcaggtgcgttgcagcctagacgggtcttactgtgagccgagcagcctctgggacctgtctgcttcccctaccccttgcaaagaagccggagcccagagctcccctgaacagcagctgcagcagccatggccccgccctgggtgcccgccatgggcttcacgctggcgcccagcctggggtgcttcgtgggctcccgctttgtccacggcgagggtctccgctggtacgccggcctgcagaagccctcgtggcacccgccccactgggtgctgggccctgtctggggcacgctctactcagccatggggtacggctcctacctggtctggaaagagctgggaggcttcacagagaaggctgtggttcccctgggcctctacactgggcagctggccctgaactgggcatggccccccatcttctttggtgcccgacaaatgggctgg

SEQ ID NO: 32271 - DNA, 1771 bp, Homo sapiens
  source 1..1771: mol_type = unassigned DNA
attaatcattttccctgttgcctatgactgaggctgtttctcacatcctgcccctggttttgcctgtcccaaggatttcgtctgaagggcgggacattccccctgcctcttcgcaccacagccagagcctgccattaggaccaatgaaagcaaagtacctcatcccctcagtgactaagaatcgcagtatttaagaggtagcaggaatgggctgagagtggtgtttgctttctccaccagaagggcacactttcatctaatttggggtatcactgagctgaagacaaagagaagggggagaaaacctagcagaccaccatgtgctatgggaagtgtgcacgatgcatcggacattctctggtggggctcgccctcctgtgcatcgcggctaatattttgctttactttcccaatggggaaacaaagtatgcctccgaaaaccacctcagccgcttcgtgtggttcttttctggcatcgtaggaggtggcctgctgatgctcctgccagcatttgtcttcattgggctggaacaggatgactgctgtggctgctgtggccatgaaaactgtggcaaacgatgtgcgatgctttcttctgtattggctgctctcattggaattgcaggatctggctactgtgtcattgtggcagcccttggcttagcagaaggaccactatgtcttgattccctcggccagtggaactacacctttgccagcactgagggccagtaccttctggatacctccacatggtccgagtgcactgaacccaagcacattgtggaatggaatgtatctctgttttctatcctcttggctcttggtggaattgaattcatcttgtgtcttattcaagtaataaatggagtgcttggaggcatatgtggcttttgctgctctcaccaacagcaatatgactgctaaaagaaccaacccaggacagagccacaatcttcctctatttcattgtaatttatatatttcacttgtattcatttgtaaaactttgtattagtgtaacatactccccacagtctacttttacaaacgcctgtaaagactggcatcttcacaggatgtcagtgtttaaatttagtaaacttcttttttgtttgtttatttgtttttgtttttttttaaggaatgaggaaacaaaccaccctctgggggtaatttacagactgagtgacagtactcagtatatctgagataaactctataatgttttggataaaaataacattccaatcactattgtatatatgtgcatgtattttttaaattaaagatgtctagttgctttttataagaccaagaaggagaaaatccgacaacctggaaagatttttgttttcactgcttgtatgatgtttcccattcatacacctataaatctctaacaagaggccctttgaactgccttgtgttctgtgagaaacaaatatttacttagagtggaaggactgattgagaatgttccaatccaaatgaatgcatcacaacttacaatgctgctcattgttgtgagtactatgagattcaaatttttctaacatatggaaagccttttgtcctccaaagatgagtactagggatcatgtgtttaaaaaaagaaaggctacgatgactgggcaagaagaaagatgggaaactgaataaagcagttgatcagcatcattggaacatggggacgagtgacggcaggaggaccacgaggaaataccctcaaaactaacttgtttacaacaaaataaagtattcactacca

SEQ ID NO: 32272 - DNA, 1646 bp, Homo sapiens
  source 1..1646: mol_type = unassigned DNA
agagcctgccattaggaccaatgaaagcaaagtacctcatcccctcagtgactaagaatcgcagtatttaagaggtagcaggaatgggctgagagtggtgtttgctttctccaccagaagggcacactttcatctaatttggggtatcactgagctgaagacaaagagaagggggagaaaacctagcagaccaccatgtgctatgggaagtgtgcacgatgcatcggacattctctggtggggctcgccctcctgtgcatcgcggctaatattttgctttactttcccaatggggaaacaaagtatgcctccgaaaaccacctcagccgcttcgtgtggttcttttctggcatcgtaggaggtggcctgctgatgctcctgccagcatttgtcttcattgggctggaacaggatgactgctgtggctgctgtggccatgaaaactgtggcaaacgatgtgcgatgctttcttctgtattggctgctctcattggaattgcaggatctggctactgtgtcattgtggcagcccttggcttagcagaaggaccactatgtcttgattccctcggccagtggaactacacctttgccagcactgagggccagtaccttctggatacctccacatggtccgagtgcactgaacccaagcacattgtggaatggaatgtatctctgttttctatcctcttggctcttggtggaattgaattcatcttgtgtcttattcaagtaataaatggagtgcttggaggcatatgtggcttttgctgctctcaccaacagcaaatgactgctaaaagaaccaacccaggacagagccacaatcttcctctatttcattgtaatttatatatttcacttgtattcatttgtaaaactttgtattagtgtaacatactccccacagtctacttttacaaacgcctgtaaagactggcatcttcacaggatgtcagtgtttaaatttagtaaacttcttttttgtttgtttatttgtttttgtttttttttaaggaatgaggaaacaaaccaccctctgggggtaatttacagactgagtgacagtactcagtatatctgagataaactctataatgttttggataaaaataacattccaatcactattgtatatatgtgcatgtattttttaaattaaagatgtctagttgctttttataagaccaagaaggagaaaatccgacaacctggaaagatttttgttttcactgcttgtatgatgtttcccattcatacacctataaatctctaacaagaggccctttgaactgccttgtgttctgtgagaaacaaatatttacttagagtggaaggactgattgagaatgttccaatccaaatgaatgcatcacaacttacaatgctgctcattgttgtgagtactatgagattcaaatttttctaacatatggaaagccttttgtcctccaaagatgagtactagggatcatgtgtttaaaaaaagaaaggctacgatgactgggcaagaagaaagatgggaaactgaataaagcagttgatcagcatcattggaacatggggacgagtgacggcaggaggaccacgaggaaataccctcaaaactaacttgtttacaacaaaataaagtattcactacc

SEQ ID NO: 32273 - DNA, 2101 bp, Homo sapiens
  source 1..2101: mol_type = unassigned DNA
gtcaactcatcaggaccttttctctccctctctaccaatgctgaccttcctttccccttagccttagtggatgatggtttctttattcctatatggaagacatagctgagaaagttgattaggaaaactgtttttgctaattccatcacatcgtgtagggaaaagatagaacttaattacttaattgcgtaacaagtagagaaacacagcaatcagacaataaaatgaacagtagctttttgccttaaacaattcttttaagtctgagctcaatgatacacaactagaccatcaaattattttgatattgaggaaaacagaagctcttttggataaccctgaattccaggctttcagtggaaaagacaaagacacgcactgtacaccattaagtacttgggagacatgattttaaccaggatgtaactcaattatattagtgatttataaagagtctggagaaaatatttctttatttgggcatgggcactgtcagattaaaggtgcagtggttctaaatgctgtttgttccagccctgtcttcgattgcaacaatgtgagtgtcttgtctgtgctggtggattattaacagaggttattggtctccatggcaaaacgattgaatgattgctctgaacgtaatctcatttatgggggtgcaaaaaacaaagcacttcaggtcagggagaatgtataaatgtccattgccatcgaggttctgctatttttgagaagctgaagcaactccaaggacacagttcacagaaatttggttctcagccccaaaatactgattgaattggagacaattacaaggactctctggccaaaaacccttgaagaggccccgtgaaggaggcagtgaggagcttttgattgctgacctgtgtcgtaccaccccagaatgtgcactgggggctgtgccagatgcctgggggggaccctcattccccttgctttttttggcttcctggctaacatcctgttattttttcctggaggaaaagtgatagatgacaacgaccacctttcccaagagatctggtttttcggaggaatattaggaagcggtgtcttgatgatcttccctgcgctggtgttcttgggcctgaagaacaatgactgctgtgggtgctgcggcaacgagggctgtgggaagcgatttgcgatgttcacctccacgatatttgctgtggttggattcttgggagctggatactcgtttatcatctcagccatttcaatcaacaagggtcctaaatgcctcatggccaatagtacatggggctaccccttccacgacggggattatctcaatgatgaggccttatggaacaagtgccgagagcctctcaatgtggttccctggaatctgaccctcttctccatcctgctggtcgtaggaggaatccagatggttctctgcgccatccaggtggtcaatggcctcctggggaccctctgtggggactgccagtgttgtggctgctgtgggggagatggacccgtttaaacctccgagatgagctgctcagactctacagcatgacgactacaatttcttttcataaaacttcttctcttcttggaattattaattcctatctgcttcctagctgataaagcttagaaaaggcagttattccttctttccaaccagctttgctcgagttagaattttgttattttcaaataaaaaatagtttggccacttaacaaatttgatttataaatctttcaaattagttcctttttagaatttaccaacaggttcaaagcatacttttcatgatttttttattacaaatgtaaaatgtataaagtcacatgtactgccatactacttctttgtatataaagatgtttatatctttggaagttttacataaatcaaaggaagaaagcacatttaaaatgagaaactaagaccaatttctgtttttaagaggaaaaagaatgattgatgtatcctaagtattgttatttgttgtctttttttgctgccttgcttgagttgcttgtgactgatcttttgaggctgtcatcatggctagggttcttttatgtatgttaaattaaaacctgaattcagaggtaacgt

SEQ ID NO: 32274 - DNA, 710 bp, Homo sapiens
  source 1..710: mol_type = unassigned DNA
actcaccgcctgtccttcctgacacctcaccatgtgtacgggaaaatgtgcccgctgtgtggggctctccctcattaccctctgcctcgtctgcattgtggccaacgccctcctgctggtacctaatggggagacctcctggaccaacaccaaccatctcagcttgcaagtctggctcatgggcggcttcattggcgggggcctaatggtactgtgtccggggattgcagccgttcgggcagggggcaagggctgctgtggtgctgggtgctgtggaaaccgctgcaggatgctgcgctcggtcttctcctcggcgttcggggtgcttggtgccatctactgcctctcggtgtctggagctgggctccgaaatggacccagatgcttaatgaacggcgagtggggctaccacttcgaagacaccgcgggagcttacttgctcaaccgcactctatgggatcggtgcgaggcgccccctcgcgtggtcccctggaatgtgacgctcttctcgctgctggtggccgcctcctgcctggagatagtactgtgtgggatccagctggtgaacgcgaccattggtgtcttctgcggcgattgcaggaaaaaacaggacacacctcactgaggctccactgaccgccgggttacacctgctccttcctggacgctcactcccttgctcgctagaataaactgctttgcgctctctt

SEQ ID NO: 32275 - DNA, 1419 bp, Homo sapiens
  source 1..1419: mol_type = unassigned DNA
gggcgagcggcgcggcggctgcgatgagtgcctctgcggccaccggggtcttcgtgctgtccctctcggccatcccggtcacctatgtcttcaaccacctggcggcccagcatgattcctggactattgtaggggttgctgccctcatcctgttcctggtagcactgctggctcgtgtcctcgtcaaaagaaaaccaccccgggacccactgttctatgtgtatgcagtttttggatttaccagcgtggtgaacctcatcataggactggagcaagatggaatcattgacgggttcatgacacactacttgagagagggtgaaccgtatctgaacaccgcatatgggcacatgatctgctactgggatggctctgctcattatctgatgtacctggtgatggtggcagccatagcatgggaatgctggcatatatgttctattctgttccttactttgtgactgcactgtatggcttagtggttcctggatgttcctggatgcctgacatcacattgatacatgctggaggtctggctcaggctcagttttctcacattggtgcatctcttcatgctagaactgcttatgtctacagagtccctgaagaagcaaaaatcctttttttagcattaaacatagcatatggagttcttcctcagctcttggcctatcgttgtatctacaaaccagagttcttcataaaaacaaaggcagaagaaaaagtggaataaaaatattacttcatgttcctcctttctaaattactaacttttgttatactggtactgatattttgtcccatttcactctcttctcatacgtgagtacttaagaatatgtacattcttgctctgcactgtatgtgtgagctatatggtattgtgtaaattttttttgaaggaaaatggaaattcttgagaaacagtttgtttaaagaaatatattcaaaatcatttgtgaataaacttgatcatccatctcaatattgtttgacatataaaataattataagtgtaaaaaattacaatttagtgccaacagtagtgagcatgaaatgaaactattcaaaagagaatatggcctgtgcatattaaaaaattcaaaacagtgaatgcagactggaggagtaacttttgcaaataagatgaatatgcttcattattaaactcaatataaaaggcaaatcatcagaatatttttaaatgttgtttgaaaaatgttttcccaaggaaagtttattatttgctgctgtttcaagaaaattacttttactaaatttttttgtgtgaatttaaacagctaaatagggatcagtaactttatctctatccttaatgaacatttgttttattggtggctggaaatatttctattgtatttctgtgtatatttttaataaaattatttttggcctctt

SEQ ID NO: 32276 - DNA, 2074 bp, Homo sapiens
  source 1..2074: mol_type = unassigned DNA
gtggcgcccctggcaggagcactgcaaggacgcctcccgggactgcaccgcggccctgcgcacttggggcgacggggccaggcgcgggggacggctgcgggctgggagggcgcgcggaggagacaccgctgaggggacgccgctgagggcgccacgcggggggcgcggctgaggcgcctcgaagggcaagcgccaagggggcgcgggcgccgccggaagctggggcggggcgcccagcgggatgcggtgaagggcgagcggcgcggcggctgcgatgagtgcctctgcggccaccggggtcttcgtgctgtccctctcggccatcccggtcacctatgtcttcaaccacctggcggcccagcatgattcctggactattgtaggggttgctgccctcatcctgttcctggtagcactgctggctcgtgtcctcgtcaaaagaaaaccaccccgggacccactgttctatgtgtatgcagtttttggatttaccagcgtggtgaacctcatcataggactggagcaagatggaatcattgacgggttcatgacacactacttgagagagggtgaaccgtatctgaacaccgcatatgggcacatgatctgctactgggatggctctgctcattatctgatgtacctggtgatggtggcagccatagcatgggaggaaacttatagaaccattggcctatattgggttggatctattattatgagtgttgttgtttttgtgccaggaaacattgtagggaagtatggaacacgaatttgccctgcttttttcttaagcataccatatacttgtcttcctgtctgggctggtttcagaatctataatcagccatcagaaaattataattacccctcaaaggttattcaagaagcccaagcgaaagacctgctgagaagaccatttgatttaatgttggttgtgtgtctcctcctggcaactggattttgcctgttcagaggtttgattgctttggattgcccatctgagctctgccgattatatacgcaatttcaagagccctatctaaaggatcctgctgcttatcctaaaattcagatgctggcatatatgttctattctgttccttactttgtgactgcactgtatggcttagtggttcctggatgttcctggatgcctgacatcacattgatacatgctggaggtctggctcaggctcagttttctcacattggtgcatctcttcatgctagaactgcttatgtctacagagtccctgaagaagcaaaaatcctttttttagcattaaacatagcatatggagttcttcctcagctcttggcctatcgttgtatctacaaaccagagttcttcataaaaacaaaggcagaagaaaaagtggaataaaaatattacttcatgttcctcctttctaaattactaacttttgttatactggtactgatattttgtcccatttcactctcttctcatacgtgagtacttaagaatatgtacattcttgctctgcactgtatgtgtgagctatatggtattgtgtaaattttttttgaaggaaaatggaaattcttgagaaacagtttgtttaaagaaatatattcaaaatcatttgtgaataaacttgatcatccatctcaatattgtttgacatataaaataattataagtgtaaaaaattacaatttagtgccaacagtagtgagcatgaaatgaaactattcaaaagagaatatggcctgtgcatattaaaaaattcaaaacagtgaatgcagactggaggagtaacttttgcaaataagatgaatatgcttcattattaaactcaatataaaaggcaaatcatcagaatatttttaaatgttgtttgaaaaatgttttcccaaggaaagtttattatttgctgctgtttcaagaaaattacttttactaaatttttttgtgtgaatttaaacagctaaatagggatcagtaactttatctctatccttaatgaacatttgttttattggtggctggaaatatttctattgtatttctgtgtatatttttaataaaattatttttggcctctta

SEQ ID NO: 32277 - DNA, 1816 bp, Homo sapiens
  source 1..1816: mol_type = unassigned DNA
cggctgaggcgcctcgaagggcaagcgccaagggggcgcgggcgccgccggaagctggggcggggcgcccagcgggatgcggtgaagggcgagcggcgcggcggctgcgatgagtgcctctgcggccaccggggtcttcgtgctgtccctctcggccatcccggtcacctatgtcttcaaccacctggcggcccagcatgattcctggactattgtaggggttgctgccctcatcctgttcctggtagcactgctggctcgtgtcctcgtcaaaagaaaaccaccccgggacccactgttctatgtgtatgcagtttttggatttaccagcgtggtgaacctcatcataggactggagcaagatggaatcattgacgggttcatgacacactacttgagagagggtgaaccgtatctgaacaccgcatatgggcacatgatctgctactgggatggctctgctcattatctgatgtacctggtgatggtggcagccatagcatgggaggaaacttatagaaccattggcctatattgggttggatctattattatgagtgttgttgtttttgtgccaggaaacattgtagggaagtatggaacacgaatttgccctgcttttttcttaagcataccatatacttgtcttcctgtctgggctggtttcagaatctataatcagccatcagaaaattataattacccctcaaaggttattcaagaagcccaagcgaaagacctgctgagaagaccatttgatttaatgttggttgtgtgtctcctcctggcaactggattttgcctgttcagaggtttgatgctggcatatatgttctattctgttccttactttgtgactgcactgtatggcttagtggttcctggatgttcctggatgcctgacatcacattgatacatgctggaggtctggctcaggctcagttttctcacattggtgcatctcttcatgctagaactgcttatgtctacagagtccctgaagaagcaaaaatcctttttttagcattaaacatagcatatggagttcttcctcagctcttggcctatcgttgtatctacaaaccagagttcttcataaaaacaaaggcagaagaaaaagtggaataaaaatattacttcatgttcctcctttctaaattactaacttttgttatactggtactgatattttgtcccatttcactctcttctcatacgtgagtacttaagaatatgtacattcttgctctgcactgtatgtgtgagctatatggtattgtgtaaattttttttgaaggaaaatggaaattcttgagaaacagtttgtttaaagaaatatattcaaaatcatttgtgaataaacttgatcatccatctcaatattgtttgacatataaaataattataagtgtaaaaaattacaatttagtgccaacagtagtgagcatgaaatgaaactattcaaaagagaatatggcctgtgcatattaaaaaattcaaaacagtgaatgcagactggaggagtaacttttgcaaataagatgaatatgcttcattattaaactcaatataaaaggcaaatcatcagaatatttttaaatgttgtttgaaaaatgttttcccaaggaaagtttattatttgctgctgtttcaagaaaattacttttactaaatttttttgtgtgaatttaaacagctaaatagggatcagtaactttatctctatccttaatgaacatttgttttattggtggctggaaatatttctattgtatttctgtgtatatttttaataaaattatttttggcctctta

SEQ ID NO: 32278 - DNA, 1918 bp, Homo sapiens
  source 1..1918: mol_type = unassigned DNA
cggctgaggcgcctcgaagggcaagcgccaagggggcgcgggcgccgccggaagctggggcggggcgcccagcgggatgcggtgaagggcgagcggcgcggcggctgcgatgagtgcctctgcggccaccggggtcttcgtgctgtccctctcggccatcccggtcacctatgtcttcaaccacctggcggcccagcatgattcctggactattgtaggggttgctgccctcatcctgttcctggtagcactgctggctcgtgtcctcgtcaaaagaaaaccaccccgggacccactgttctatgtgtatgcagtttttggatttaccagcgtggtgaacctcatcataggactggagcaagatggaatcattgacgggttcatgacacactacttgagagagggtgaaccgtatctgaacaccgcatatgggcacatgatctgctactgggatggctctgctcattatctgatgtacctggtgatggtggcagccatagcatgggattgttacagggaaacttatagaaccattggcctatattgggttggatctattattatgagtgttgttgtttttgtgccaggaaacattatagggaagtatggaacacgaatttgccctgcttttttcttaagcataccatatacttgtcttcctgtctgggctggtttcagaatctataatcagccatcagaaaattataattacccctcaaaggttattcaagaagcccaagcgaaagacctgctgagaagaccatttgatttaatgttggttgtgtgtctcctcctggcaactggattttgcctgttcagaggtttgattgctttggattgcccatctgagctctgccgattatatacgcaatttcaagagccctatctaaaggatcctgctgcttatcctaaaattcagatgctggcatatatgttctattctgttccttactttgtgactgcactgtatggcttagtggttcctggatgttcctggatgcctgacatcacattgatacatgctggaggtctggctcaggctcagttttctcacattggtgcatctcttcatgctagaactgcttatgtctacagagtccctgaagaagcaaaaatcctttttttagcattaaacatagcatatggagttcttcctcagctcttggcctatcgttgtatctacaaaccagagttcttcataaaaacaaaggcagaagaaaaagtggaataaaaatattacttcatgttcctcctttctaaattactaacttttgttatactggtactgatattttgtcccatttcactctcttctcatacgtgagtacttaagaatatgtacattcttgctctgcactgtatgtgtgagctatatggtattgtgtaaattttttttgaaggaaaatggaaattcttgagaaacagtttgtttaaagaaatatattcaaaatcatttgtgaataaacttgatcatccatctcaatattgtttgacatataaaataattataagtgtaaaaaattacaatttagtgccaacagtagtgagcatgaaatgaaactattcaaaagagaatatggcctgtgcatattaaaaaattcaaaacagtgaatgcagactggaggagtaacttttgcaaataagatgaatatgcttcattattaaactcaatataaaaggcaaatcatcagaatatttttaaatgttgtttgaaaaatgttttcccaaggaaagtttattatttgctgctgtttcaagaaaattacttttactaaatttttttgtgtgaatttaaacagctaaatagggatcagtaactttatctctatccttaatgaacatttgttttattggtggctggaaatatttctattgtatttctgtgtatatttttaataaaattatttttggcctctta

SEQ ID NO: 32279 - DNA, 1588 bp, Homo sapiens
  source 1..1588: mol_type = unassigned DNA
cggctgaggcgcctcgaagggcaagcgccaagggggcgcgggcgccgccggaagctggggcggggcgcccagcgggatgcggtgaagggcgagcggcgcggcggctgcgatgagtgcctctgcggccaccggggtcttcgtgctgtccctctcggccatcccggtcacctatgtcttcaaccacctggcggcccagcatgattcctggactattgtaggggttgctgccctcatcctgttcctggtagcactgctggctcgtgtcctcgtcaaaagaaaaccaccccgggacccactgttctatgtgtatgcagtttttggatttaccagcgtggtgaacctcatcataggactggagcaagatggaatcattgacgggttcatgacacactacttgagagagggtgaaccgtatctgaacaccgcatatgggcacatgatctgctactgggatggctctgctcattatctgatgtacctggtgatggtggcagccatagcatgggaggaaacttatagaaccattggcctatattgggttggatctattattatgagtgttgttgtttttgtgccaggaaacattgtagatgctggcatatatgttctattctgttccttactttgtgactgcactgtatggcttagtggttcctggatgttcctggatgcctgacatcacattgatacatgctggaggtctggctcaggctcagttttctcacattggtgcatctcttcatgctagaactgcttatgtctacagagtccctgaagaagcaaaaatcctttttttagcattaaacatagcatatggagttcttcctcagctcttggcctatcgttgtatctacaaaccagagttcttcataaaaacaaaggcagaagaaaaagtggaataaaaatattacttcatgttcctcctttctaaattactaacttttgttatactggtactgatattttgtcccatttcactctcttctcatacgtgagtacttaagaatatgtacattcttgctctgcactgtatgtgtgagctatatggtattgtgtaaattttttttgaaggaaaatggaaattcttgagaaacagtttgtttaaagaaatatattcaaaatcatttgtgaataaacttgatcatccatctcaatattgtttgacatataaaataattataagtgtaaaaaattacaatttagtgccaacagtagtgagcatgaaatgaaactattcaaaagagaatatggcctgtgcatattaaaaaattcaaaacagtgaatgcagactggaggagtaacttttgcaaataagatgaatatgcttcattattaaactcaatataaaaggcaaatcatcagaatatttttaaatgttgtttgaaaaatgttttcccaaggaaagtttattatttgctgctgtttcaagaaaattacttttactaaatttttttgtgtgaatttaaacagctaaatagggatcagtaactttatctctatccttaatgaacatttgttttattggtggctggaaatatttctattgtatttctgtgtatatttttaataaaattatttttggcctctt

SEQ ID NO: 32280 - DNA, 1020 bp, Homo sapiens
  source 1..1020: mol_type = unassigned DNA
atgagtgcctctgcggccaccggggtcttcgtgctgtccctctcggccatcccggtcacctatgtcttcaaccacctggcggcccagcatgattcctggactattgtaggggttgctgccctcatcctgttcctggtagcactgctggctcgtgtcctcgtcaaaagaaaaccaccccgggacccactgttctatgtgtatgcagtttttggatttaccagcgtggtgaacctcatcataggactggagcaagatggaatcattgacgggttcatgacacactacttgagagagggtgaaccgtatctgaacaccgcatatgggcacatgatctgctactgggatggctctgctcattatctgatgtacctggtgatggtggcagccatagcatgggaggaaacttatagaaccattggcctatattgggttggatctattattatgagtgttgttgtttttgtgccaggaaacattgtagggaagtatggaacacgaatttgccctgcttttttcttaagcataccatatacttgtcttcctgtctgggctggtttcagaatctataatcagccatcagaaaattataattacccctcaaaggttattcaagaagcccaagcgaaagacctgctgagaagaccatttgatttaatgttggttgtgtgtctcctcctggcaactggattttgcctgttcagaggtttgatgctggcatatatgttctattctgttccttactttgtgactgcactgtatggcttagtggttcctggatgttcctggatgcctgacatcacattgatacatgctggaggtctggctcaggctcagttttctcacattggtgcatctcttcatgctagaactgcttatgtctacagagtccctgaagaagcaaaaatcctttttttagcattaaacatagcatatggagttcttcctcagctcttggcctatcgttgtatctacaaaccagagttcttcataaaaacaaaggcagaagaaaaagtggaataa

SEQ ID NO: 32281 - DNA, 1106 bp, Homo sapiens
  source 1..1106: mol_type = unassigned DNA
gcgccctggagaacgcgtcggggctgagccggggtccagcagccgccgctatggacatcccgccgctggccggcaagatcgcggcgctgtcgctgagcgccctcccggtgtcctacgcgctcaaccacgtctcggcgctctcgcaccccctgtgggtggcattgatgagcgccctaatcctgggtctgcttttcgtggcggtctacagcttgtcccatggcgaggtctcctatgacccactctatgctgtcttcgctgtcttcgccttcacctcggttgtggacctcatcatcgctcttcaggaagacagctatgtggtgggcttcatggagttctacaccaaggagggagagccatacctgcgcacagcgcacggagtcttcatctgctactgggatggcactgttcactacctcctctacctggccatggccggcgccatctgcagaaggaagagataccggaattttggactctactggctgggttccttcgccatgagcatcctggtgttccttacaggaaacattcttggcaaatacagctccgagatcaggcctgccttcttcctcaccatcccctacctgctggtgccatgctgggctggcatgaaggtcttcagccagccccgggcgctaacccgctgcaccgccaacatggtgcaagaggaacaaagaaagggactcctgcagcgtccggctgacctggcccttgtcatatatctcatccttgctggcttcttcactctgttccggggcctggtggtgcttgattgccccacagatgcctgctttgtctatatctaccagtatgagccatacctgcgggaccctgtggcctaccctaaggtgcagatgctgatgtacatgttttatgtcctgcctttctgcggcctggctgcctatgctctcaccttccctggttgctcctggcttccagactgggccttggtgtttgctggaggcatcggccaggcacagttctcgcacatgggggcttccatgcacctgcgcacacccttcacctaccgttgccttcagtggcccgcattcttccaccagccaccaccctccgaccccctagccctccacaagaagcagcattga

SEQ ID NO: 32282 - DNA, 1483 bp, Homo sapiens
  source 1..1483: mol_type = unassigned DNA
gcgccctggagaacgcgtcggggctgagccggggtccagcagccgccgctatggacatcccgccgctggccggcaagatcgcggcgctgtcgctgagcgccctcccggtgtcctacgcgctcaaccacgtctcggcgctctcgcaccccctgtgggtggcattgatgagcgccctaatcctgggtctgcttttcgtggcggtctacagcttgtcccatggcgaggtctcctatgacccactctatgctgtcttcgctgtcttcgccttcacctcggttgtggacctcatcatcgctcttcaggaagacagctatgtggtgggcttcatggagttctacaccaaggagggagagccatacctgcgcacagcgcacggagtcttcatctgctactgggatggcactgttcactacctcctctacctggccatggccggcgccatctgcagaaggaagagataccggaattttggactctactggctgggttccttcgccatgagcatcctggtgttccttacaggaaacattcttggcaaatacagctccgagatcaggcctgccttcttcctcaccatcccctacctgctggtgccatgctgggctggcatgaaggtcttcagccagccccgggcgctaacccgctgcaccgccaacatggtgcaagaggaacaaagaaagggactcctgcagcgtccggctgacctggcccttgtcatatatctcatccttgctggcttcttcactctgttccggggcctggtggtgcttgattgccccacagatgcctgctttgtctatatctaccagtatgagccatacctgcgggaccctgtggcctaccctaaggtgcagatgctgatgtacatgttttatgtcctgcctttctgcggcctggctgcctatgctctcaccttccctggttgctcctggcttccagactgggccttggtgtttgctggaggcatcggccaggcacagttctcgcacatgggggcttccatgcacctgcgcacacccttcacctaccgtgtgcctgaggacacctggggctgcttcttcgtgtgcaatctgctgtatgcgctgggcccccacctgctggcctaccgttgccttcagtggcccgcattcttccaccagccaccaccctccgaccccctagccctccacaagaagcagcattgagagagctgtggactcaggacccaggactctgtttacgtgcccagtcagccctacctggggaagcgggggttgggtgttttagagacaggagggacatctccgggtgtctttagtcttggctatggtagtttcagtccagtgggtgggatggagaccaacgaccaagtgttcctgcaaggagagcctcccacagctgtcaccatgctccaactcccacacaaacgcttctaccccttccagaacttacccatcatccccccatggatcctttcagtaaaaaccctttcaatttccaaaat

SEQ ID NO: 32283 - DNA, 1829 bp, Homo sapiens
  source 1..1829: mol_type = unassigned DNA
gcgccctggagaacgcgtcggggctgagccggggtccagcagccgccgctatggacatcccgccgctggccggcaagatcgcggcgctgtcgctgagcgccctcccggtgtcctacgcgctcaaccacgtctcggcgctctcgcaccccctgtgggtggcattgatgagcgccctaatcctgggtctgcttttcgtggcggtctacagcttgtcccatggcgaggtctcctatgacccactctatgctgtcttcgctgtcttcgccttcacctcggttgtggacctcatcatcgctcttcaggaagacagctatgtggtgggcttcatggagttctacaccaaggaggtacttgggggacgaccagggagccccctaccgcactgcccgtctgagtctcccacctgcccccacagggagagccatacctgcgcacagcgcacggagtcttcatctgctactgggatggcactgttcactacctcctctacctggccatggccggcgccatctgcagaaggtgcaggaggcagggagagggtggcccctgaccctgggagagaagttgcatcctcagatggggtcccagggcagggtggagccagaagtgtctgtaggagaaatcaggacgcctctctagggctccagccaggggtggccaggagaaggttccagggaacgtctcaggtgtaggtggtggcctagcattgcttacatccaccctgtgcctgggcagccacttctgttcttggacagagggtctcactgttatttccccgttcaactccctgttgtcccttccatcctgggcaaaactgaaagggacccggagctgggaaacccacggtggtctccaggccctggctggggctctgagattacggagtgactacctgctggtcacccctccatcccctgctcaggaagagataccggaattttggactctactggctgggttccttcgccatgagcatcctggtgttccttacaggaaacattcttggtgcaagaggaacaaagaaagggactcctgcagcgtccggctgacctggcccttgtcatatatctcatccttgctggcttcttcactctgttccggggcctggtggtgcttgattgccccacagatgcctgctttgtctatatctaccagtatgagccatacctgcgggaccctgtggcctaccctaaggtgcagatgctgatgtacatgttttatgtcctgcctttctgcggcctggctgcctatgctctcaccttccctggttgctcctggcttccagactgggccttggtgtttgctggaggcatcggccaggcacagttctcgcacatgggggcttccatgcacctgcgcacacccttcacctaccgtgtgcctgaggacacctggggctgcttcttcgtgtgcaatctgctgtatgcgctgggcccccacctgctggcctaccgttgccttcagtggcccgcattcttccaccagccaccaccctccgaccccctagccctccacaagaagcagcattgagagagctgtggactcaggacccaggactctgtttacgtgcccagtcagccctacctggggaagcgggggttgggtgttttagagacaggagggacatctccgggtgtctttagtcttggctatggtagtttcagtccagtgggtgggatggagaccaacgaccaagtgttcctgcaaggagagcctcccacagctgtcaccatgctccaactcccacacaaacgcttctaccccttccagaacttacccatcatccccccatggatcctttcagtaaaaaccctttcaatttccaaaat

SEQ ID NO: 32284 - DNA, 1722 bp, Homo sapiens
  source 1..1722: mol_type = unassigned DNA
gggacgagagcggtccttgtctgcgttccgtgtccaggcaggtgcaggcgccgcggggccggatcctccgcgcggccgagtccatctcctgggaaatggggcggacagtgtttccttgactgactattgtgagcgccctctctctccggcggagcggagaccatggcccccactcagggcccccgggccccgctggaattcggagggcccctgggcgccgcggctctgctactgctgctgcccgccaccatgttccacctgctcctggcggcccgttcgggccccgcgcgcctgctgggtccacccgcgtccctgccggggctggaggtgctgtggagcccacgggcgctgctgctgtggctcgcctggctcggcctgcaggcggcgctctacctactgccggcgcgcaaggtggccgaggggcaggaattgaaggacaagagtcgcctgcgctatcctattaacggcttccaggccctggtgctgacagccctgttggtggggctggggatgtcagcggggctgcctctgggggcgctcccggaaatgctcctgcccttggcgtttgtcgccaccctcaccgctttcatcttcagcctctttctctacatgaaggcgcaggtagccccagtttcggccctggcacctggggggaactcaggcaatccgatttacgacttttttctgggacgagagctcaaccctcgtatctgtttcttcgacttcaaatatttctgtgaactgcgacccggcctcatcggctgggtcctcatcaacctggccctgttgatgaaggaggcagagcttcgaggcagtccctcactggccatgtggctggtcaatggcttccagttgctctacgtgggtgatgccctctggcacgaggaggccgtcctcaccaccatggatatcacacatgacgggtttggcttcatgctggcgtttggggacatggcctgggtgcccttcacctacagcctgcaggcccagttcctgctgcaccacccgcagcccctggggttgcccatggcctctgtcatctgcctcatcaatgctactggttactacatcttccgtggggcgaattcccagaaaaacactttccgaaagaatccttctgaccccagagtggctgggcttgagaccatctctacagccacagggcggaaactgctggtgtctgggtggtggggtatggtccgccatcccaactatcttggagacctcatcatggctctggcttggtccttgccctgcggggtgtcacacctgctgccctacttctacctcctctacttcaccgcgctgctggtgcaccgtgaggcccgggatgagcggcagtgcctgcagaagtacggcctggcctggcaggagtactgccggcgtgtgccttaccgcatcatgccctacatctactgaagcggctccaccaccccaggtgggggcatgtgcccactcatccaccagcacacccaggaccaggagcctcgacacacttgggactcaagggcttgcaccccacccagccctgaggatgaacaacctcagagaagaggtggtttagagcaaggaaaaaaatgaaaccagtgaccaaaatcggagatgctcttcctcctttggataaacactgggaacccttggtgcacttctctcccctaggactggctgggtcagcactgatcagggagaagctgagcagtggcttgtgggcccaggaatctg

SEQ ID NO: 32285 - DNA, 1490 bp, Homo sapiens
  source 1..1490: mol_type = unassigned DNA
tgtccaggcaggtgcaggcgccgcggggccggatcctccgcgcggccgagtccatctcctgggaaatggggcggacagtgtttccttgactgactattgtgagcgccctctctctccggcggagcggagaccatggcccccactcagggcccccgggccccgctggaattcggagggcccctgggcgccgcggctctgctactgctgctgcccgccaccatgttccacctgctcctggcggcccgttcgggccccgcgcgcctgctgggtccacccgcgtccctgccggggctggaggtgctgtggagcccacgggcgctgctgctgtggctcgcctggctcggcctgcaggcggcgctctacctactgccggcgcgcaaggtggccgaggggcaggaattgaaggacaagagtcgcctgcgctatcctattaacggcttccaggccctggtgctgacagccctgttggtggggctggggatgtcagcggggctgcctctgggggcgctcccggaaatgctcctgcccttggcgtttgtcgccaccctcaccgctttcatcttcagcctctttctctacatgaaggcgcaggtagccccagtttcggccctggcacctggggggaactcaggcaatccgatttacgacttttttctgggacgagagctcaaccctcgtatctgtttcttcgacttcaaatatttctgtgaactgcgacccggcctcatcggctgggtcctcatcaacctggccctgttgatgaaggaggcagagcttcgaggcagtccctcactggccatgtggctggtcaatggcttccagttgctctacgtgggtgatgccctctggcacgaggaggccgtcctcaccaccatggatatcacacatgacgggtttggcttcatgctggcgtttggggacatggcctgggtgcccttcacctacagcctgcaggcccagttcctgctgcaccacccgcagcccctggggttgcccatggcctctgtcatctgcctcatcaatgggcttgagaccatctctacagccacagggcggaaactgctggtgtctgggtggtggggtatggtccgccatcccaactatcttggagacctcatcatggctctggcttggtccttgccctgcggggtgtcacacctgctgccctacttctacctcctctacttcaccgcgctgctggtgcaccgtgaggcccgggatgagcggcagtgcctgcagaagtacggcctggcctggcaggagtactgccggcgtgtgccttaccgcatcatgccctacatctactgaagcggctccaccaccccaggtgggggcatgtgcccactcatccaccagcacacccaggaccaggagcctcgacacacttgggactcaagggcttgcaccccacccagccctgaggatgaacaacctcagagaagaggtggtttagagcaaggaaaaaaatgaaaccagtgaccaaaatcgga

SEQ ID NO: 32286 - DNA, 1671 bp, Homo sapiens
  source 1..1671: mol_type = unassigned DNA
gttccgtgtccaggcaggtgcaggcgccgcggggccggatcctccgcgcggccgagtccatctcctgggaaatggggcggacagtgtttccttgactgactattgtgagcgccctctctctccggcggagcggagaccatggcccccactcagggcccccgggccccgctggaattcggagggcccctgggcgccgcggctctgctactgctgctgcccgccaccatgttccacctgctcctggcggcccgttcgggccccgcgcgcctgctgggtccacccgcgtccctgccggggctggaggtgctgtggagcccacgggcgctgctgctgtggctcgcctggctcggcctgcaggcggcgctctacctactgccggcgcgcaaggcttccaggccctggtgctgacagccctgttggtggggctggggatgtcagcggggctgcctctgggggcgctcccggaaatgctcctgcccttggcgtttgtcgccaccctcaccgctttcatcttcagcctctttctctacatgaaggcgcaggtagccccagtttcggccctggcacctggggggaactcaggcaatccgatttacgacttttttctgggacgagagctcaaccctcgtatctgtttcttcgacttcaaatatttctgtgaactgcgacccggcctcatcggctgggtcctcatcaacctggccctgttgatgaaggaggcagagcttcgaggcagtccctcactggccatgtggctggtcaatggcttccagttgctctacgtgggtgatgccctctggcacgaggaggccgtcctcaccaccatggatatcacacatgacgggtttggcttcatgctggcgtttggggacatggcctgggtgcccttcacctacagcctgcaggcccagttcctgctgcaccacccgcagcccctggggttgcccatggcctctgtcatctgcctcatcaatgctactggttactacatcttccgtggggcgaattcccagaaaaacactttccgaaagaatccttctgaccccagagtggctgggcttgagaccatctctacagccacagggcggaaactgctggtgtctgggtggtggggtatggtccgccatcccaactatcttggagacctcatcatggctctggcttggtccttgccctgcggggtgtcacacctgctgccctacttctacctcctctacttcaccgcgctgctggtgcaccgtgaggcccgggatgagcggcagtgcctgcagaagtacggcctggcctggcaggagtactgccggcgtgtgccttaccgcatcatgccctacatctactgaagcggctccaccaccccaggtgggggcatgtgcccactcatccaccagcacacccaggaccaggagcctcgacacacttgggactcaagggcttgcaccccacccagccctgaggatgaacaacctcagagaagaggtggtttagagcaaggaaaaaaatgaaaccagtgaccaaaatcggagatgctcttcctcctttggataaacactgggaacccttggtgcacttctctcccctaggactggctgggtcagcactgatcagggagaagctgagcagtggcttgtgggcccaggaatctggggtctggtgggacaatagctatccctc

SEQ ID NO: 32287 - DNA, 2709 bp, Homo sapiens
  source 1..2709: mol_type = unassigned DNA
gttgggggtcaggtgccggaagaggaaacctctcgctggggctaggagttcggcggggcgcgcgccggcggctgcggagctggcaggtgcgaagcgtctgcacctggcgggcgatggcgcccgatgcgggcgccccgggatagcgtgggcgaggctgcggggccccggcgcgcacgcccgcacctctccccagccctggcgtgggcccagcccggcccaggcagcaatggggttcctgcagctgctggtcgtagcggtgctggcatccgaacaccgggtggctggtgcagccgaggtcttcgggaattccagcgagggtcttattgaattttctgtggggaaatttagatacttcgagctcaataggccctttccagaggaagctattttgcatgatatttcaagcaatgtgacttttcttattttccaaatacactcacagtatcagaatacaactgtttccttttctccgactctcctttccaattcctcggaaacaggcactgccagtggactggttttcatccttagaccagagcagagtacatgcacttggtacttggggacttcaggcatacagcctgtccagaatatggctatcctactctcctactcagaaagagatcctgtccctggaggctgtaatttggagttcgatttagatattgatcccaacatttacttggagtataatttctttgaaacgactatcaagtttgccccagcaaacctaggctatgcgagaggcgtagatcccccaccatgtgacgctgggacagaccaggactccaggtggaggttgcagtatgatgtctatcagtattttctgcctgagaatgacctcactgaggagatgttgctgaagcatctgcagaggatggtcagtgtgccccaggtgaaggccagtgctctcaaggtggttaccctaacagctaatgataagacaagtgtttccttctcctccctcccgggacaaggtgtcatatacaatgtcattgtttgggacccgtttctaaatacatctgctgcctacattcctgctcacacatacgcttgcagctttgaggcaggagagggtagttgtgcttccctaggaagagtgtcttccaaagtgttcttcactctttttgccctgcttggtttcttcatttgtttctttggacacagattctggaaaacagaattattcttcataggctttatcatcatgggattcttcttttatatactgattacaagactgacacctatcaagtatgatgtgaatctgattctgacagctgtcactggaagcgtcggtggaatgttcttggtagctgtgtggtggcgatttggaatcctctcgatctgcatgctctgtgttggactagtgctggggttcctcatctcgtcagtgactttctttactccactgggaaacctaaagatttttcatgatgatggtgtattctgggtcactttctcttgcatagctatcctcattccagtagttttcatgggctgcctaagaatactgaacatactgacttgtggagtcattggctcctattcggtggttttagccattgacagttactggtccacaagcctttcctacatcactttgaacgtactcaagagagcgctcaacaaggatttccacagagctttcacaaatgtgccttttcaaactaatgacttcattatcctggcagtatggggcatgctggctgtaagtggaattacgttacagattcgaagagagagaggacgaccgttcttccctccccacccatacaagttatggaagcaagagagagagcgccgagtgacaaacattctggaccctagctaccacattcctccattgagagagaggctctatggccgattaacccagattaaagggctcttccagaaggagcagccagctggagagagaacgcctttgcttctgtagatgcccaggggcttggtcagtgtgcctcagctttggagttcatgcctggagtggttcaacagtctctggtgcaagtctaataagagatcaggcatatatatctgttctttgcataatattatggtgcccttattgatatatggtaagggtgtactaggggattaggatgattgtaagagaatgagaaagatgaccaaaaggttggtggtagggaggctttttcttatttccaaatacttgagaaattaccttttggtttacaaatctatgatcaacttattccattaaatagatacattaaaaaaattaaaaactgattcttctgcagagcactggtgtttctttttataaccccttgaaacaagtctctcacctgagcctgtctaaactttcggagggagtttattattgagtctttatctgtgacagtatttggagatttagggatttgatacttaggcctttgaattttagaatacaaaaagagaagcaagccagacatggtggctcacacctgtaatcccaatactgggaagccaaggtgggagtatcgcttgagcccaggagtttgagaccgacatgggcaacatgacaagaccccatctctacaaaaaaattaaaaaattagccaggcatggtggcacatgcctactcccagctcccaaggagactgagatgggaggatccctggagccctgaagattgaggctacagtgagccttgattgtgtcactgcactccagcttgggtgacagagaccctgtctcgag

SEQ ID NO: 32288 - DNA, 579 bp, Homo sapiens
  source 1..579: mol_type = unassigned DNA
gcgcgttgggggtcaggtgccggaagaggaaacctctcgctggggctaggagttcggcggggcgcgcgccggcggctgcggagctggcaggtgcgaagcgtctgcacctggcgggcgatggcgcccgatgcgggcgccccgggatagcgtgggcgaggctgcggggccccggcgcgcacgcccgcacctctccccagccctggcgtgggcccagcccggcccaggcagcaatggggttcctgcagctgctggtcgtagcggtgctggcatccgaacaccgggtggctggtgcagccgaggtcttcgggaattccagcgaggtttatctcgttgtaggtcttattgaattttctgtggggaaatttagatacttcgagctcaataggccctttccagaggaagctattttgcatgatatttcaagcaatgtgacttttcttattttccaaatacactcacagtatcagaatacaactgtttccttttctccgactctcctttccaattcctcggaaacaggcactgccagtggactggttttcatccttagaccagagcagagtacatgcacttggtact

SEQ ID NO: 32289 - DNA, 1953 bp, Homo sapiens
  source 1..1953: mol_type = unassigned DNA
gcatttctgcattcgaagaagaatctgagagaaacctgacgcagggagcatgggtatctggacctcaggcactgatatcttcctaagtctttgggagatttacgtgtctccaagaagccccggatggatggactttatccagcatttgggagtttgctgtttggttgctcttatttcagtgggcctcctgtctgtggccgcctgctggtttctgccatcaatcatagcggccgctgcctcctggattatcacgtgtgttctgctgtgttgctccaagcatgcacgatgttttattcttcttgtctttctctcttgtggcctgcgtgaaggcaggaatgctttgattgcagctggcacagggatcgtcatcttgggacacgtagaaaatatttttcacaactttaaaggtctcctagatggtatgacttgcaacctaagggcaaagagcttttccatacattttccacttttgaaaaaatatattgaggcaattcagtggatttatggccttgccactccactaagtgtatttgatgaccttgtttcttggaaccagaccctggcagtctctcttttcagtcccagccatgtcctggaggcacagctaaatgacagcaaaggggaagtcctgagcgtcttgtaccagatggcaacaaccacagaggtgttgtcctccctgggtcagaagctacttgcctttgcagggctttcgctcgtcctgcttggcactggcctcttcatgaagcgatttttgggcccttgtggttggaagtatgaaaacatctacatcaccagacaatttgttcagtttgatgaaagggagagacatcaacagaggccctgtgtgctcccgctgaataaggaggaaaggaggaagtatgtcatcatcccgactttctggccgactcctaaagaaaggaaaaacctggggctgtttttcctccccatacttatccatctctgcatctgggtgctgtttgcagctgtagattatctgctgtatcggctcattttctcagtgagcaagcagtttcaaagcttgccagggtttgaggttcacttgaaactgcacggagagaaacaaggaactcaagatattatccatgattcttcctttaatatatctgtgtttgaacccaactgtatcccaaaaccaaaattccttctatctgagacctgggttcctctcagtgttattcttttgatattagtgatgctgggactgttgtcctctatccttatgcaacttaaaatcctggtgtcagcatctttctaccccagcgtggagaggaagcgcatccaatatctgcatgcaaagctgcttaaaaaaagatcaaagcagccgctgggagaagtcaaaagacggctgagtctctatcttacaaagattcatttctggcttccagtcctgaaaatgattaggaagaagcaaatggacatggcaagtgcagacaagtcatgagagaccccgactactcctcagccacatcgcaccaacaattctcttcaggtctaggatggcagtcactattcatgccggataatagagaactatgtgacgcagtcctctcaggagtctgagtttacagagccaacttgcagcacctggttatgcctcctttcatctcaaagccaaagagctgccaggtaaatggttatgtggtctatgttccaaacaaaccacatgatcttgcctgtgtcacaatgtaacaagactctagctgggtcccctggtgatgagtttcagcatagaataatgttcaaggaaaagaaaacgaaaacagtttaaatctctaccacagcctcacaagcaaatgctaaggggaacatacatgtaaaaagccagcaaactatcttcaaactcttccgtccttaatgtcttccatggctattgcccccacaatggtctcttttctccctgctcccttattaaagaactctttctgaaaccca

SEQ ID NO: 32290 - DNA, 2224 bp, Homo sapiens
  source 1..2224: mol_type = unassigned DNA
ctaatattacgaccacagaagttgggctgaggtagaagtcaagactatcccaataactggattctggccgagaaaaaggcgcgcgccagcaccccagtcagtaaaatctaccgggcaaagttcgccgccgccactatcctcctctggctctgaaatagttccaattctcgcgagattcggcctgactaccagcccttcagctccagtgagttgcgggttggtttcctctagactctcgtggccacaccgttctccgatacgagcctttccggtgctatgccccggaagcggaagtgcgatcttcgggctgtcagagttggtctgttactcggtggtggcggagtctacggaagccgttttcgcttcacttttcctggctgtagagcgctttccccctggcgggtgagagtgcagagacgaaggtgcgagatgagcactatgttcgcggacactctcctcatcgtttttatctctgtgtgcacggctctgctcgcagagggcataacctgggtcctggtttacaggacagacaagtacaagagactgaaggcagaagtggaaaaacagagtaaaaaattggaaaagaagaaggaaacaataacagagtcagctggtcgacaacagaaaaagaaaatagagagacaagaagagaaactgaagaataacaacagagatctatcaatggttcgaatgaaatccatgtttgctattggcttttgttttactgccctaatgggaatgttcaattccatatttgatggtagagtggtggcaaagcttccttttacccctctttcttacatccaaggactgtctcatcgaaatctgctgggagatgacaccacagactgttccttcattttcctgtatattctctgtactatgtcgattcgacagaacattcagaagattctcggccttgccccttcacgagccgccaccaagcaggcaggtggatttcttggcccaccacctccttctgggaagttctcttgaactcaagaactctttattttctatcattctttctagacacacacacatcagactggcaactgttttgtagcaagagccataggtagccttactacttgggcctctttctagttttgaattatttctaagccttttgggtatgattagagtgaaaatggcagccagcaaacttgatagtgcttttggtcctagatgatttttatcaaataagtggattgattagttaagttcaggtaatgtttatgtaatgaaaaacaaatagcatccttcttgtttcatttacataagtattttctgtgggaccgactctcaaggcactgtgtatgccctgcaagttggctgtctatgagcatttagagatttagaagaaaaatttagtttgtttaacccttgtaactgtttgttttgttgttgtttttttttcaagccaaatacatgacataagatcaataaagaggccaaatttttagctgttttatgtacaaggagagatctgtttcattttgttttgccgtatttctagatataagttttagcatgggccaggaaggactaaaataaaagtttttaaggtactgtactttttgccatacttgactcatatactcaaaatacagagttgtcttggtgtaggaattggaaagcaagagtggaaaggaacgtaataactcgttggagtttaaaaatgagggtcttggcaagtaacactgatgtctgaaaaaaaattaaatataaataaataaataaaaatgagggtcctcagctgttctcttcatatcctattacagtctctcagattcttgtgggggcactcttagatctcccttggagacaaggttatagttatatgttgttaatctcgcagagcttccttttagtcacaatagccttcattttctgccatgccccttcataagggagaaggatgtttgtaccatgatcctccccgcataatctatggaattaggagtcctgtgtggagtcttatcaataaatatgcacattcatcaaatgtctacttaaatgtgagtattctaccagtgagaaaaaacacataattttcaaggtaatcattgttaaaccaacagcaaacttctttcttatcagcaccataaagtccagaagacagtagaaaagtatcttcaaagtgctgaggaaaataagtatcaacttagaattttatgtacaatattggaggcaaaataaagacatgtttagacatacaaaa

SEQ ID NO: 32291 - DNA, 1129 bp, Homo sapiens
  source 1..1129: mol_type = unassigned DNA
aagtgcgatcttcgggctgtcagagttggtctgttactcggtggtggcggagtctacggaagccgttttcgcttcacttttcctggctgtagagcgctttccccctggcgggtgagagtgcagagacgaaggtgcgagatgagcactatgttcgcggacactctcctcatcgtttttatctctgtgtgcacggctctgctcgcagagggcataacctgggtcctggtttacaggacagacaagtacaagagactgaaggcagaagtggaaaaacagagtaaaaaattggaaaagaagaaggaaacaataacagagtcagctggtcgacaacagaaagttcgaatgaaatccatgtttgctattggcttttgttttactgccctaatgggaatgttcaattccatatttgatggtagagtggtggcaaagcttccttttacccctctttcttacatccaaggactgtctcatcgaaatctgctgggagatgacaccacagactgttccttcattttcctgtatattctctgtactatgtcgattcgacagaacattcagaagattctcggccttgccccttcacgagccgccaccaagcaggcaggtggatttcttggcccaccacctccttctgggaagttctcttgaactcaagaactctttattttctatcattctttctagacacacacacatcagactggcaactgttttgtagcaagagccataggtagccttactacttgggcctctttctagttttgaattatttctaagccttttgggtatgattagagtgaaaatggcagccagcaaacttgatagtgcttttggtcctagatgatttttatcaaataagtggattgattagttaagttcaggtaatgtttatgtaatgaaaaacaaatagcatccttcttgtttcatttacataagtattttctgtgggaccgactctcaaggcactgtgtatgccctgcaagttggctgtctatgagcatttagagatttagaagaaaaatttagtttgtttaacccttgtaactgtttgttttgttgttgtttttttttcaagccaaatacatgacataagatcaataaagaggccaaatttttagctgttttatgt

SEQ ID NO: 32292 - DNA, 1016 bp, Homo sapiens
  source 1..1016: mol_type = unassigned DNA
tttgaagggtgtcattttggtaatctgctattttatgatgcactatgttgactactccatgatgtaccacctgataagggggcagtccgtcatcaagctctacatcatctacaacatgctggaggtagctgatcgtctgttttcatcttttggacaagacatattagatgctctctattggacagcaacagagcctaaagaaagaaaaagagcccacattgggtttgttgaaattaaaggaagtgttttcaagaagtttgaaaagaacaatctctttcaaatgtcaaatagcgatattaaggaacgattcacaaattatgtgcttttactgatagtgtgtctaagaaacatggaacagttttcttggaatccagatcatctctgggtgttgtttccagatgtctgtatggtaattgcatcagaaattgccgtggatattgtaaaacatgcctttattactaaattcaatgacattactgcagatgtctacagtgaatatagagccagtcttgcttttgaccttgttagcagccgacagaaaaatgcatacactgattacagtgactctgtagcacggaggatgggctttattcctctcccactagctgttttagttgatatccctgaaagtacttaatagcatcgtgctgttggggaaatcgtgccagtatgtgaaggaagccaaaatggaagagaagctgtcgaatcctcccgcaacctgcactccaggcaagccgtccagtaaatcacagaacaaatgtaaaccctctcaaggcctttccacagaagaaaacctgtctgcctccatcaccaaacaacctattcatcaaaaggaaaatatcataccattacttgtgacaagcaattctgatcagtttttgacaactccagatggtgacgagaaggacataacgcaggacaattctgaattaaaacacagatcctcaaagaaagatttgttagagatagacaggttcacaatttgtggaaaccgaattgactgaatctgtggcttc

SEQ ID NO: 32293 - DNA, 1634 bp, Homo sapiens
  source 1..1634: mol_type = unassigned DNA
gttgtgctcggaacatggcgggcgtcggcgacgcggccgctccgggagaaggcggcggtggcggcgtggacggcccgcagcgggacggccgcggcgaggcggagcagccgggcggcagcggcggacaggggcccccgccggcgcctcagctcacagagacgctgggcttctacgagagcgaccggcggcgggagaggcgccggggccgcacagctgatggtttttggaatctttctgtgcctggatgcgtttttgtatgtgttcaccctgcttcctttaagagttttcctggcactattcaggctcctcactttgccttgctatggcttaagggacagacgtttgcttcagcctgcccaggtgtgtgacattttgaagggtgtcattttggtaatctgctattttatgatgcactatgttgactactccatgatgtaccacctgataagggggcagtccgtcatcaagctctacatcatctacaacatgctggaggtagctgatcgtctgttttcatcttttggacaagacatattagatgctctctattggacagcaacagagcctaaagaaagaaaaagagcccacattggggtgattcctcactttttcatggctgttctctatgtctttttgcatgcaattcttataatggttcaagcaacaactctcaatgtagcttttaactcacacaacaagtctttgcttactatcatgatgtctaataattttgttgaaattaaaggaagtgttttcaagaagtttgaaaagaacaatctctttcaaatgtcaaatagcgatattaaggaacgattcacaaattatgtgcttttactgatagtgtgtctaagaaacatggaacagttttcttggaatccagatcatctctgggtgttgtttccagatgtctgtatggtaattgcatcagaaattgccgtggatattgtaaaacatgcctttattactaaattcaatgacattactgcagatgtctacagtgaatatagagccagtcttgcttttgaccttgttagcagccgacagaaaaatgcatacactgattacagtgactctgtagcacggaggatgggctttattcctctcccactagctgttttactcatcagagttgtaacaagctcaattaaagtgcaaggaatcctgtcttatgcctgtgtcatactcttctattttgggttgatatccctgaaagtacttaatagcatcgtgctgttggggaaatcgtgccagtatgtgaaggaagccaaaatggaagagaagctgtcgaatcctcccgcaacctgcactccaggcaagccgtccagtaaatcacagaacaaatgtaaaccctctcaaggcctttccacagaagaaaacctgtctgcctccatcaccaaacaacctattcatcaaaaggaaaatatcataccattacttgtgacaagcaattctgatcagtttttgacaactccagatggtgacgagaaggacataacgcaggacaattctgaattaaaacacagatcctcaaagaaagatttgttagagatagacaggttcacaatttgtggaaaccgaattgactgaatctgtggcttcatgcgctgaagaagctgggtcctggggcaacaagt

SEQ ID NO: 32294 - DNA, 4591 bp, Homo sapiens
  source 1..4591: mol_type = unassigned DNA
gaggggcggggcgaggcggggagggggccggccggaggcagaggctggagggaggcggcggggacagtttgttgtgctcggaacatggcgggcgtcggcgacgcggccgctccgggagaaggcggcggtggcggcgtggacggcccgcagcgggacggccgcggcgaggcggagcagccgggcggcagcggcggacaggggcccccgccggcgcctcagctcacagagacgctgggcttctacgagagcgaccggcggcgggagaggcgccggggccgcacagagctttcattgttgaggttcctcagtgctgaactaacaagagggtacttccttgaacataatgaggccaagtatacagaaagaagagaaagagtatacacttgtttgcgaataccaagagaattggaaaagctgatggtttttggaatctttctgtgcctggatgcgtttttgtatgtgttcaccctgcttcctttaagagttttcctggcactattcaggctcctcactttgccttgctatggcttaagggacagacgtttgcttcagcctgcccaggtgtgtgacattttgaagggtgtcattttggtaatctgctattttatgatgcactatgttgactactccatgatgtaccacctgataagggggcagtccgtcatcaagctctacatcatctacaacatgctggaggtagctgatcgtctgttttcatcttttggacaagacatattagatgctctctattggacagcaacagagcctaaagaaagaaaaagagcccacattggggtgattcctcactttttcatggctgttctctatgtctttttgcatgcaattcttataatggttcaagcaacaactctcaatgtagcttttaactcacacaacaagtctttgcttactatcatgatgtctaataattttgttgaaattaaaggaagtgttttcaagaagtttgaaaagaacaatctctttcaaatgtcaaatagcgatattaaggaacgattcacaaattatgtgcttttactgatagtgtgtctaagaaacatggaacagttttcttggaatccagatcatctctgggtgttgtttccagatgtctgtatggtaattgcatcagaaattgccgtggatattgtaaaacatgcctttattactaaattcaatgacattactgcagatgtctacagtgaatatagagccagtcttgcttttgaccttgttagcagccgacagaaaaatgcatacactgattacagtgactctgtagcacggaggatgggctttattcctctcccactagctgttttactcatcagagttgtaacaagctcaattaaagtgcaaggaatcctgtcttatgcctgtgtcatactcttctattttgggttgatatccctgaaagtacttaatagcatcgtgctgttggggaaatcgtgccagtatgtgaaggaagccaaaatggaagagaagctgtcgaatcctcccgcaacctgcactccaggcaagccgtccagtaaatcacagaacaaatgtaaaccctctcaaggcctttccacagaagaaaacctgtctgcctccatcaccaaacaacctattcatcaaaaggaaaatatcataccattacttgtgacaagcaattctgatcagtttttgacaactccagatggtgacgagaaggacataacgcaggacaattctgaattaaaacacagatcctcaaagaaagatttgttagagatagacaggttcacaatttgtggaaaccgaattgactgaatctgtggcttcatgcgctgaagaagctgggtcctggggcaacaagtgctgtgttgccaggacaaatagatgctaaacatggcacttaaatatttatttaaaaacttaaattattattggcaagcaaatcttagtatctttcttccagtaatatggcctggctgagggtcagaccacaggacaggagcgacctccggccttgactgtctgggaagcttgatggattataaaacttcctcctgcctggccaagcagcagcatcatttccaggacccaacaaaggcaacatcaaaatctgttttgctttgtcagtctgggcttccagaatgttgaatttgcctcaaggcctcttcagtataaggaaatacctggaaaactgtgaaacttttaccacgacgtaatctttccagtctcatactattttcacaaacagttttcaaacgttacttcatctgccaaagcattaaaaaaattaaacataagtcaagataaatgttcttaccaccagaataacccttaaagatgtatcttaattaatcagaataaaaggctaccttaaataagacatgatgaatagtagcattttgtagggttaaaaaaaaatgctaaactagtttatttattaaaaaaataattaatgaaggctatgcattactgggaaaaatccttcataatttttcagtttactctttaaagcaaaatgtgagctgtatgtcatttaattggtggataaaacaaatttccttacaaaagggcactttttacaccaaggaagcagagcagtgttaactttaaggtatacttaactgattttgctttaaaactaattacttcataaattattacagctaaaaggattcgatgttgaacaggctgaaaaattgtcaatgtacaaaattcaaaactgtcaactttaactgtaaagtaaatgctccaagtgtgttagacagcatcatcttgcttgggcttaccaaatgcattagtctttgtgtttgggtcgacagcgagtgtgcctgtgctggggcagggtgtgtgttctgtgggagggtgtctgtggggatgtgactatcagggtgggcctgtgctggggatggggcaggcctgggtctggagaggattttgtgtgaaagtaaatggggtgtttgaggcgtatgggtggctgttggtgtggggaggcatctgtgtatggctgttgggaacagcaaccaaaaggtgctttttggttttatttgagatgaagattgtgtttccgcttaattactagtttgtggtctatatcatagaagttatttcccaccccattttatcttgacaaccgtgtttgcatttctgtaaaacttctacaacttctggtgtcagaactgtccagaagatggtactgttaactgttatttcctttgatgttttgattttgaagtttagctctcatgcaaatgtttcaggcgtacatacataggcagaaagcaatttttaggtgatttgtctgtttcttggatgaaatataaagcaagctttaatgttctgacttgttcatttgaaatacaaaaaagtaagtgaattttaatgttttgcattaactaaagaaatctgaagattaatgttgaggaaattgtatggacatgcctttgtgaaaccaggaagtattttaagttaaaaatgaaaaaggttttaattgctttgtgtgtgttttaatggagccccattttagaattattttttccatctccctttaccaacaaaaggaacaatgccaccgtgaatggaatagtttggggaaagctttgccaaacacaaccctgatttcagagcaggaacatggtttggatagatcttcagttccgcttgaattattctgttactgcgctgtcattttcagaagatttccattcctttgcagatgctgttgggagttcgggattatgttcatttcttctgttttaatggcattcagtactaattttataagtgcatcttgtgtgaatctcaataaattcagttttgtaatcttttttaaaaaggtcactgaatttattttaatatttactattgtatttggtagagtgaatttcccactgtataataagtatttatttgtaattcacaagtgatagagctatcttaatttgaattattgctttggtcttaatggtggcaaaatgtttaattttgtctttggaaaaaataggctcggccttgattatagaccatttaatatttctcagcaaatgaaggtatttgcattttacaagtgttttgaatgtcacacaaaatatttttcacatctgggagtcaagttcaagacagtgctttggttttaaaaaaatctaatgaaggcacaggataggccagacccttattaggttttcctttagaataagtgtaaagaccaagtgtcactgatacgcttgtccagattttcttgtggactttggccagtatttagagtttatattcatgttacataaagtgaaagaaacttgctataattaggccatcaaaatatatcctgccactcctggtaactcagcagaggaggagataaatttacaaaataatgtaatatctctacattgttacatgttttcaactattttttatcaacaaagatttgttaatcacttcctatgtgtcagaaactgttctaagtggtgggatcagcaatgagcaagataagtccctgttcgtctgtggaagactgataggaacaagtcgatgaaataatgtctgctggtcacagagtgtccactgaccaaatgatctctcaggcttatttcagctctaaaatatagttctttaaaacgtt

SEQ ID NO: 32295 - DNA, 1770 bp, Homo sapiens
  source 1..1770: mol_type = unassigned DNA
gggcggggcgaggcggggagggggccggccggaggcagaggctggagggaggcggcggggacagtttgttgtgctcggaacatggcgggcgtcggcgacgcggccgctccgggagaaggcggcggtggcggcgtggacggcccgcagcgggacggccgcggcgaggcggagcagccgggcggcagcggcggacaggggcccccgccggcgcctcagctcacagagacgctgggcttctacgagagcgaccggcggcgggagaggcgccggggccgcacagagctttcattgttgaggttcctcagtgctgaactaacaagagggtacttccttgaacataatgaggccaagtatacagaaagaagagaaagagtatacacttgtttgcgaataccaagagaattggaaaagctgatggtttttggaatctttctgtgcctggatgcgtttttgtatgtgttcaccctgcttcctttaagagttttcctggcactattcaggctcctcactttgccttgctatggcttaagggacagacgtttgcttcagcctgcccaggtgtgtgacattttgaagggtgtcattttggtaatctgctattttatgatgcactatgttgactactccatgatgtaccacctgataagggggcagtccgtcatcaagctctacatcatctacaacatgctggaggtagctgatcgtctgttttcatcttttggacaagacatattagatgctctctattggacagcaacagagcctaaagaaagaaaaagagcccacattggggtgattcctcactttttcatggctgttctctatgtctttttgcatgcaattcttataatggttcaagcaacaactctcaatgtagcttttaactcacacaacaagtctttgcttactatcatgatgtctaataattttgttgaaattaaaggaagtgttttcaagaagtttgaaaagaacaatctctttcaaatgtcaaatagcgatattaaggaacgattcacaaattatgtgcttttactgatagtgtgtctaagaaacatggaacagttttcttggaatccagatcatctctgggtgttgtttccagatgtctgtatggtaattgcatcagaaattgccgtggatattgtaaaacatgcctttattactaaattcaatgacattactgcagatgtctacagtgaatatagagccagtcttgcttttgaccttgttagcagccgacagaaaaatgcatacactgattacagtgactctgtagcacggaggatgggctttattcctctcccactagctgttttactcatcagagttgtaacaagctcaattaaagtgcaaggaatcctgtcttatgcctgtgtcatactcttctattttgggttgatatccctgaaagtacttaatagcatcgtgctgttggggaaatcgtgccagtatgtgaaggaagccaaaatggaagagaagctgtcgaatcctcccgcaacctgcactccaggcaagccgtccagtaaatcacagaacaaatgtaaaccctctcaaggcctttccacagaagaaaacctgtctgcctccatcaccaaacaacctattcatcaaaaggaaaatatcataccattacttgtgacaagcaattctgatcagtttttgacaactccagatggtgacgagaaggacataacgcaggacaattctgaattaaaacacagatcctcaaaatctgttttgctttgtcagtctgggcttccagaatgttga

SEQ ID NO: 32296 - DNA, 3201 bp, Homo sapiens
  source 1..3201: mol_type = unassigned DNA
cagaaactatgagggcagaacccagcaatctgtgctttctttcacaagccctccaggagttgctgaaatttaggaatcattgccccaaaaagtggccctcataatgatgccagatgggatcttactctgttgcccaggctggagtgcagtggtgcgatctcggctctctgcaacctccgcctcccaggttcaagtgattctcctgcctcggcctcctgagtagctgggatttcaggccatgaaagatcactgttttagtctgcgtggtgcagtggaacagatagacctcggtttgaatctcagctctactgtttactagacatgaaatggggaaatctaaaatgagatgccagaagcctcaaaaatggaaaaccccctgtgcttcacatctgaaaatctctgctgggggcagcaactttgagcctgtggggaaggaactgtccacgtggagtggtctggtgaatgcttaaggagctgcagaagggaagtccctctccaaactagccagccactgagaccttctgacaggacacccccaggatgtcacccaaaaaagtacaaatcaaagtggaggaaaaagaagacgagactgaggaaagctcaagtgaagaggaagaggaggtggaagataagctacctcgaagagagagcttgagaccaaagaggaaacggaccagagatgttatcaatgaggatgacccagaacctgaaccagaggatgaagaaacaaggaaggcaagagaaaaagagaggaggaggaggctaaagagaggagcagaagaagaagaaattgatgaagaggaattggaaagattgaaggcagagttagatgagaaaagacaaataattgctactgtcaaatgcaaaccatggaagatggagaagaaaattgaagttctcaaggaggcaaaaaaatttgtgagtgaaaatgaaggggctcttgggaaaggaaaaggaaaacggtggtttgcatttaagatgatgatggccaagaaatgggcaaaattcctccgtgattttgagaacttcaaagctgcgtgtgtcccatgggaaaataaaatcaaggctattgaaagtcagtttggctcctcagtggcctcatacttcctcttcttgagatggatgtatggagtcaatatggttctctttatcctgacatttagcctcatcatgttgccagagtacctctggggtttgccatatggcagtttacctaggaaaaccgttcccagagccgaagaggcatcggcagcaaactttggtgtgttgtacgacttcaatggtttggcacaatattccgttctcttttatggctattatgacaataaacgaacaattggatggatgaatttcaggttgccgctctcctattttctagtggggattatgtgcattggatacagctttctggttgtcctcaaagcaatgaccaaaaacattggtgatgatggaggtggagatgacaacactttcaatttcagctggaaggtctttaccagctgggactacctgatcggcaatcctgaaacagcagacaacaaatttaattctatcacaatgaactttaaggaagctatcacagaagaaaaagcagcccaagtagaagaaaacgtccacttgatcagattcctgaggtttctggctaacttcttcgtgtttctaacacttggagggagtggatacctcatcttttgggctgtgaagcgatcccaggaatttgcacagcaagatcctgacacccttgggtggtgggaaaaaaatgaaatgaacatggttatgtccctcctagggatgttctgtccaacattgtttgacttatttgctgaattagaagactaccatcctctcatcgctttgaaatggctactgggacgcatttttgctcttcttttaggcaatttatacgtatttattcttgcattaatggatgagattaacaacaagattgaagaggagaagctagtaaaggccaatattaccctttgggaagccaatatgatcaaggcctacaatgcatcattctctgaaaatagcactggaccacccttttttgttcaccctgcagatgtacctcgaggaccttgctgggaaacaatggtgggacaggagtttgtgaggctgacagtctctgatgttctgaccacctacgtcacaatcctcattggggactttctaagggcatgttttgtgaggttttgcaattattgctggtgctgggacttggagtatggatatccttcatacaccgaattcgacatcagtggcaacgtcctcgctctgatcttcaaccaaggcatgatctggatgggctccttctttgctcccagcctcccaggcatcaatatccttcgactccatacatccatgtacttccagtgctgggccgttatgtgctgcaatgttcctgaggccagggtcttcaaagcttccagatcaaataacttctacctgggcatgctactgctcatcctcttcctgtccacaatgcctgtcttgtacatgatcgtgtccctcccaccatcttttgattgtggtccattcagtggcaaaaatagaatgtttgaagtcattggagagaccctggagcacgatttcccaagctggatggcgaagatcttgagacagctttcaaaccctgggctggtcattgctgtcattttggtgatggttttggccatctattatctcaatgctactgccaagggccagaaggcagcgaatctggatctcaaaaagaagatgaaaatgcaagctttggagaacaaaatgcgaaacaagaaaatggcagctgcacgagcagctgcagctgctggtcgccagtaataagtatcctgagagcccagaaaaggtacactttgccttgctgtttaaaagtaatgcaatatgtgaacgcccagagaacaagcactgtggaactgctattttcctgttctacccttgatggattttcaaggtcatgctggccaattaaggcatcatcagtcctacctgagcaacaagaatctaaactttattccaagtcagaaactgtttctgcagagccactctctcccctgctccatttcgtgactttttttttttttttaacaaattgagtttagaagtgagtgtaatccagcaatacagtttactggtttagttggtgggttaattaaaaaaaatttgctcatatgaactttcattttatatgtttcttttgcc

SEQ ID NO: 32297 - DNA, 3090 bp, Homo sapiens
  source 1..3090: mol_type = unassigned DNA
agacagagtcttgctctgttgcccaggccagaatgcagtggcgtgatctcggttcactgtaaccaccgcctcccaggttcaagtgattcttgtgtctcagcctcctgagtagctgggattacaggccatgaaagatcactgttttagtctgcgtggtgcagtggaacagatagacctcggtttgaatctcagctctactgtttactagacatgaaatggggaaatctaaaatgagatgccagaagcctcaaaaatggaaaaccccctgtgcttcacatctgaaaatctctgctgggggcagcaactttgagcctgtggggaaggaactgtccacgtggagtggtctggtgaatgcttaaggagctgcagaagggaagtccctctccaaactagccagccactgagaccttctgacaggacacccccaggatgtcacccaaaaaagtacaaatcaaagtggaggaaaaagaagacgagactgaggaaagctcaagtgaagaggaagaggaggtggaagataagctacctcgaagagagagcttgagaccaaagaggaaacggaccagagatgttatcaatgaggatgacccagaacctgaaccagaggatgaagaaacaaggaaggcaagagaaaaagagaggaggaggaggctaaagagaggagcagaagaagaagaaattgatgaagaggaattggaaagattgaaggcagagttagatgagaaaagacaaataattgctactgtcaaatgcaaaccatggaagatggagaagaaaattgaagttctcaaggaggcaaaaaaatttgtgagtgaaaatgaaggggctcttgggaaaggaaaaggaaaacggtggtttgcatttaagatgatgatggccaagaaatgggcaaaattcctccgtgattttgagaacttcaaagctgcgtgtgtcccatgggaaaataaaatcaaggctattgaaagtcagtttggctcctcagtggcctcatacttcctcttcttgagatggatgtatggagtcaatatggttctctttatcctgacatttagcctcatcatgttgccagagtacctctggggtttgccatatggcagtttacctaggaaaaccgttcccagagccgaagaggcatcggcagcaaactttggtgtgttgtacgacttcaatggtttggcacaatattccgttctcttttatggctattatgacaataaacgaacaattggatggatgaatttcaggttgccgctctcctattttctagtggggattatgtgcattggatacagctttctggttgtcctcaaagcaatgaccaaaaacattggtgatgatggaggtggagatgacaacactttcaatttcagctggaaggtctttaccagctgggactacctgatcggcaatcctgaaacagcagacaacaaatttaattctatcacaatgaactttaaggaagctatcacagaagaaaaagcagcccaagtagaagaaaacgtccacttgatcagattcctgaggtttctggctaacttcttcgtgtttctaacacttggagggagtggatacctcatcttttgggctgtgaagcgatcccaggaatttgcacagcaagatcctgacacccttgggtggtgggaaaaaaatgaaatgaacatggttatgtccctcctagggatgttctgtccaacattgtttgacttatttgctgaattagaagactaccatcctctcatcgctttgaaatggctactgggacgcatttttgctcttcttttaggcaatttatacgtatttattcttgcattaatggatgagattaacaacaagattgaagaggagaagctagtaaaggccaatattaccctttgggaagccaatatgatcaaggcctacaatgcatcattctctgaaaatagcactggaccacccttttttgttcaccctgcagatgtacctcgaggaccttgctgggaaacaatggtgggacaggagtttgtgaggctgacagtctctgatgttctgaccacctacgtcacaatcctcattggggactttctaagggcatgttttgtgaggttttgcaattattgctggtgctgggacttggagtatggatatccttcatacaccgaattcgacatcagtggcaacgtcctcgctctgatcttcaaccaaggcatgatctggatgggctccttctttgctcccagcctcccaggcatcaatatccttcgactccatacatccatgtacttccagtgctgggccgttatgtgctgcaatgttcctgaggccagggtcttcaaagcttccagatcaaataacttctacctgggcatgctactgctcatcctcttcctgtccacaatgcctgtcttgtacatgatcgtgtccctcccaccatcttttgattgtggtccattcagtggcaaaaatagaatgtttgaagtcattggagagaccctggagcacgatttcccaagctggatggcgaagatcttgagacagctttcaaaccctgggctggtcattgctgtcattttggtgatggttttggccatctattatctcaatgctactgccaagggccagaaggcagcgaatctggatctcaaaaagaagatgaaaatgcaagctttggagaacaaaatgcgaaacaagaaaatggcagctgcacgagcagctgcagctgctggtcgccagtaataagtatcctgagagcccagaaaaggtacactttgccttgctgtttaaaagtaatgcaatatgtgaacgcccagagaacaagcactgtggaactgctattttcctgttctacccttgatggattttcaaggtcatgctggccaattaaggcatcatcagtcctacctgagcaacaagaatctaaactttattccaagtcagaaactgtttctgcagagccactctctcccctgctccatttcgtgactttttttttttttttaacaaattgagtttagaagtgagtgtaatccagcaatacagtttactggtttagttggtgggttaattaaaaaaaatttgctcatatgaactttcattttatatgtttcttttgcc

SEQ ID NO: 32298 - DNA, 2221 bp, Homo sapiens
  source 1..2221: mol_type = unassigned DNA
cgtggagtggtctggtgaatgcttaaggagctgcagaagggaagtacaaatcaaagtggaggaaaaagaagacgagactgaggaaagctcaagtgaagaggaagaggaggtggaagataagctacctcgaagagagagcttgagaccaaagaggaaacggaccagagatgttatcaatgaggatgacccagaacctgaaccagaggatgaagaaacaaggaaggcaagagaaaaagagaggaggaggaggctaaagagaggagcggaggcaaaaaaatttgtgagtgaaaatgaaggggctcttgggaaaggaaaaggaaaacggtggtttgcatttaagatgatgatggccaagaaatgggcaaaattcctccgtgattttgagaacttcaaagctgcgtgtgtcccatgggaaaataaaatcaaggctattgaaagtcagtttggctcctcagtggcctcatacttcctcttcttgagatggatgtatggagtcaatatggttctctttatcctgacatttagcctcatcatgttgccagagtacctctggggtttgccatatggcagtttacctaggaaaaccgttcccagagccgaagaggcatcggcagcaaactttggtgtgttgtacgacttcaatggtttggcacaatattccgttctcttttatggctattatgacaataaacgaacaattggatggatgaatttcaggttgccgctctcctattttctagtggggattatgtgcattggatacagctttctggttgtcctcaaagcaatgaccaaaaacattggtgatgatggaggtggagatgacaacactttcaatttcagctggaaggtctttaccagctgggactacctgatcggcaatcctgaaacagcagacaacaaatttaattctatcacaatgaactttaaggaagctatcacagaagaaaaagcagcccaagtagaagaaaacgtccacttgatcagattcctgaggtttctggctaacttcttcgtgtttctaacacttggagggagtggatacctcatcttttgggctgtgaagcgatcccaggaatttgcacagcaagatcctgacacccttgggtggtgggaaaaaaatgaaatgaacatggttatgtccctcctagggatgttctgtccaacattgtttgacttatttgctgaattagaagactaccatcctctcatcgctttgaaatggctactgggacgcatttttgctcttcttttaggcaatttatacgtatttattcttgcattaatggatgagattaacaacaagattgaagaggagaagctagtaaaggccaatattaccctttgggaagccaatatgatcaaggcctacaatgcatcattctctgaaaatagcactggaccacccttttttgttcaccctgcagatgtacctcgaggaccttgctgggaaacaatggtgggacaggagtttgtgaggctgacagtctctgatgttctgaccacctacgtcacaatcctcattggggactttctaagggcatgttttgtgaggttttgcaattattgctggtgctgggacttggagtatggatatccttcatacaccgaattcgacatcagtggcaacgtcctcgctctgatcttcaaccaaggcatgatctggatgggctccttctttgctcccagcctcccaggcatcaatatccttcgactccatacatccatgtacttccagtgctgggccgttatgtgctgcaatgttcctgaggccagggtcttcaaagcttccagatcaaataacttctacctgggcatgctactgctcatcctcttcctgtccacaatgcctgtcttgtacatgatcgtgtccctcccaccatcttttgattgtggtccattcagtggcaaaaatagaatgtttgaagtcattggagagaccctggagcacgatttcccaagctggatggcgaagatcttgagacagctttcaaaccctgggctggtcattgctgtcattttggtgatggttttggccatctattatctcaatgctactgccaagggccagaaggcagcgaatctggatctcaaaaagaagatgaaaatgctgcagctgctggtcgccagtaataagtatcctgagagcccagaaaaggtacactttgccttgctgtttaaaagtaatgcaatatgtgaacgcccagagaacaagcactgt

SEQ ID NO: 32299 - DNA, 2371 bp, Homo sapiens
  source 1..2371: mol_type = unassigned DNA
atgtcacccaaaaaagtacaaatcaaagtggaggaaaaagaagacgagactgaggaaagctcaagtgaagaggaagaggaggtggaagataagctacctcgaagagagagcttgagaccaaagaggaaacggaccagagatgttatcaatgaggatgacccagaacctgaaccagaggatgaagaaacaaggaaggcaagagaaaaagagaggaggaggaggctaaagagaggagcagaagaagaagaaattgatgaagaggaattggaaagattgaaggcagagttagatgagaaaagacaaataattgctactgtcaaatgcaaaccatggaagatggagaagaaaattgaagttctcaaggaggcaaaaaaatttgtgagtgaaaatgaaggggctcttgggaaaggaaaaggaaaacggtggtttgcatttaagatgatgatggccaagaaatgggcaaaattcctccgtgattttgagaacttcaaagctgcgtgtgtcccatgggaaaataaaatcaaggctattgaaagtcagtttggctcctcagtggcctcatacttcctcttcttgagatggatgtatggagtcaatatggttctctttatcctgacatttagcctcatcatgttgccagagtacctctggggtttgccatatggcagtttacctaggaaaaccgttcccagagccgaagaggcatcggcagcaaactttggtgtgttgtacgacttcaatggtttggcacaatattccgttctcttttatggctattatgacaataaacgaacaattggatggatgaatttcaggttgccgctctcctattttctagtggggattatgtgcattggatacagctttctggttgtcctcaaagcaatgaccaaaaacattggtgatgatggaggtggagatgacaacactttcaatttcagctggaaggtctttaccagctgggactacctgatcggcaatcctgaaacagcagacaacaaatttaattctatcacaatgaactttaaggaagctatcacagaagaaaaagcagcccaagtagaagaaaacgtccacttgatcagattcctgaggtttctggctaacttcttcgtgtttctaacacttggagggagtggatacctcatcttttgggctgtgaagcgatcccaggaatttgcacagcaagatcctgacacccttgggtggtgggaaaaaaatgaaatgaacatggttatgtccctcctagggatgttctgtccaacattgtttgacttatttgctgaattagaagactaccatcctctcatcgctttgaaatggctactgggacgcatttttgctcttcttttaggcaatttatacgtatttattcttgcattaatggatgagattaacaacaagattgaagaggagaagctagtaaaggccaatattaccctttgggaagccaatatgatcaaggcctacaatgcatcattctctgaaaatagcactggaccacccttttttgttcaccctgcagatgtacctcgaggaccttgctgggaaacaatggtgggacaggagtttgtgaggctgacagtctctgatgttctgaccacctacgtcacaatcctcattggggactttctaagggcatgttttgtgaggttttgcaattattgctggtgctgggacttggagtatggatatccttcatacaccgaattcgacatcagtggcaacgtcctcgctctgatcttcaaccaaggcatgatctggatgggctccttctttgctcccagcctcccaggcatcaatatccttcgactccatacatccatgtacttccagtgctgggccgttatgtgctgcaatgttcctgaggccagggtcttcaaagcttccagatcaaataacttctacctgggcatgctactgctcatcctcttcctgtccacaatgcctgtcttgtacatgatcgtgtccctcccaccatcttttgattgtggtccattcagtggcaaaaatagaatgtttgaagtcattggagagaccctggagcacgatttcccaagctggatggcgaagatcttgagacagctttcaaaccctgggctggtcattgctgtcattttggtgatggttttggccatctattatctcaatgctactgccaagggccagaaggcagcgaatctggatctcaaaaagaagatgaaaatgcaagctttggagaacaaaatgcgaaacaagaaaatggcagctgcacgagcagctgcagctgctggtcgccagtaataagtatcctgagagcccagaaaaggtacactttgccttgctgtttaaaagtaatgcaatatgtgaacgcccagagaacaagcactgt

SEQ ID NO: 32300 - DNA, 2273 bp, Homo sapiens
  source 1..2273: mol_type = unassigned DNA
cgtggagtggtctggtgaatgcttaaggagctgcagaagggaagtacaaatcaaagtggaggaaaaagaagacgagactgaggaaagctcaagtgaagaggaagaggaggtggaagataagctacctcgaagagagagcttgagaccaaagaggaaacggaccagagatgttatcaatgaggatgacccagaacctgaaccagaggatgaagaaacaaggaaggcaagagaaaaagagaggaggaggaggctaaagagaggagcggaggcaaaaaaatttgtgagtgaaaatgaaggggctcttgggaaaggaaaaggaaaacggtggtttgcatttaagatgatgatggccaagaaatgggcaaaattcctccgtgattttgagaacttcaaagctgcgtgtgtcccatgggaaaataaaatcaaggctattgaaagtcagtttggctcctcagtggcctcatacttcctcttcttgagatggatgtatggagtcaatatggttctctttatcctgacatttagcctcatcatgttgccagagtacctctggggtttgccatatggcagtttacctaggaaaaccgttcccagagccgaagaggcatcggcagcaaactttggtgtgttgtacgacttcaatggtttggcacaatattccgttctcttttatggctattatgacaataaacgaacaattggatggatgaatttcaggttgccgctctcctattttctagtggggattatgtgcattggatacagctttctggttgtcctcaaagcaatgaccaaaaacattggtgatgatggaggtggagatgacaacactttcaatttcagctggaaggtctttaccagctgggactacctgatcggcaatcctgaaacagcagacaacaaatttaattctatcacaatgaactttaaggaagctatcacagaagaaaaagcagcccaagtagaagaaaacgtccacttgatcagattcctgaggtttctggctaacttcttcgtgtttctaacacttggagggagtggatacctcatcttttgggctgtgaagcgatcccaggaatttgcacagcaagatcctgacacccttgggtggtgggaaaaaaatgaaatgaacatggttatgtccctcctagggatgttctgtccaacattgtttgacttatttgctgaattagaagactaccatcctctcatcgctttgaaatggctactgggacgcatttttgctcttcttttaggcaatttatacgtatttattcttgcattaatggatgagattaacaacaagattgaagaggagaagctagtaaaggccaatattaccctttgggaagccaatatgatcaaggcctacaatgcatcattctctgaaaatagcactggaccacccttttttgttcaccctgcagatgtacctcgaggaccttgctgggaaacaatggtgggacaggagtttgtgaggctgacagtctctgatgttctgaccacctacgtcacaatcctcattggggactttctaagggcatgttttgtgaggttttgcaattattgctggtgctgggacttggagtatggatatccttcatacaccgaattcgacatcagtggcaacgtcctcgctctgatcttcaaccaaggcatgatctggatgggctccttctttgctcccagcctcccaggcatcaatatccttcgactccatacatccatgtacttccagtgctgggccgttatgtgctgcaatgttcctgaggccagggtcttcaaagcttccagatcaaataacttctacctgggcatgctactgctcatcctcttcctgtccacaatgcctgtcttgtacatgatcgtgtccctcccaccatcttttgattgtggtccattcagtggcaaaaatagaatgtttgaagtcattggagagaccctggagcacgatttcccaagctggatggcgaagatcttgagacagctttcaaaccctgggctggtcattgctgtcattttggtgatggttttggccatctattatctcaatgctactgccaagggccagaaggcagcgaatctggatctcaaaaagaagatgaaaatgcaagctttggagaacaaaatgcgaaacaagaaaatggcagctgcacgagcagctgcagctgctggtcgccagtaataagtatcctgagagcccagaaaaggtacactttgccttgctgtttaaaagtaatgcaatatgtgaacgcccagagaacaagcactgt

SEQ ID NO: 32301 - DNA, 2477 bp, Homo sapiens
  source 1..2477: mol_type = unassigned DNA
cgtggagtggtctggtgaatgcttaaggagctgcagaagggaagtacaaatcaaagtggaggaaaaagaagacgagactgaggaaagctcaagtgaagaggaagaggaggtggaagataagctacctcgaagagagagcttgagaccaaagaggaaacggaccagagatgttatcaatgaggatgacccagaacctgaaccagaggatgaagaaacaaggaaggcaagagaaaaagagaggaggaggaggctaaagagaggagcggaggcaaaaaaatttgtgagtgaaaatgaaggggctcttgggaaaggaaaaggaaaacggtggtttgcatttaagatgatgatggccaagaaatgggcaaaattcctccgtgattttgagaacttcaaagctgcgtgtgtcccatgggaaaataaaatcaaggctattgaaagtcagtttggctcctcagtggcctcatacttcctcttcttgagatggatgtatggagtcaatatggttctctttatcctgacatttagcctcatcatgttgccagagtacctctggggtttgccatatggcagtttacctaggaaaaccgttcccagagccgaagaggcatcggcagcaaactttggtgtgttgtacgacttcaatggtttggcacaatattccgttctcttttatggctattatgacaataaacgaacaattggatggatgaatttcaggttgccgctctcctattttctagtggggattatgtgcattggatacagctttctggttgtcctcaaagcaatgaccaaaaacattggtgatgatggaggtggagatgacaacactttcaatttcagctggaaggtctttaccagctgggactacctgatcggcaatcctgaaacagcagacaacaaatttaattctatcacaatgaactttaaggaagctatcacagaagaaaaagcagcccaagtagaagaaaacgtccacttgatcagattcctgaggtttctggctaacttcttcgtgtttctaacacttggagggagtggatacctcatcttttgggctgtgaagcgatcccaggaatttgcacagcaagatcctgacacccttgggtggtgggaaaaaaatgaaatgaacatggttatgtccctcctagggatgttctgtccaacattgtttgacttatttgctgaattagaagactaccatcctctcatcgctttgaaatggctactgggacgcatttttgctcttcttttaggcaatttatacgtatttattcttgcattaatggatgagattaacaacaagattgaagaggagaagctagtaaaggccaatattaccctttgggaagccaatatgatcaaggcctacaatgcatcattctctgaaaatagcactggaccacccttttttgttcaccctgcagatgtacctcgaggaccttgctgggaaacaatggtgggacaggagtttgtgaggctgacagtctctgatgttctgaccacctacgtcacaatcctcattggggactttctaagggcatgttttgtgaggttttgcaattattgctggtgctgggacttggagtatggatatccttcatacaccgaattcgacatcagtggcaacgtcctcgctctgatcttcaaccaaggcatgatctgatctgtcctgaattattaaacctttgggtgctgacagacaccggacccctctgcaaatgctaaaaccgtcttgcttctgtcacacaaagacaactctccagggctccatcgtcctgccatgggatgactgttaaattcctgtgcctgactaggtgaatcaatatggaaaagatattataaaaatattgtttcctcctttgtcaggatgggctccttctttgctcccagcctcccaggcatcaatatccttcgactccatacatccatgtacttccagtgctgggccgttatgtgctgcaatgttcctgaggccagggtcttcaaagcttccagatcaaataacttctacctgggcatgctactgctcatcctcttcctgtccacaatgcctgtcttgtacatgatcgtgtccctcccaccatcttttgattgtggtccattcagtggcaaaaatagaatgtttgaagtcattggagagaccctggagcacgatttcccaagctggatggcgaagatcttgagacagctttcaaaccctgggctggtcattgctgtcattttggtgatggttttggccatctattatctcaatgctactgccaagggccagaaggcagcgaatctggatctcaaaaagaagatgaaaatgcaagctttggagaacaaaatgcgaaacaagaaaatggcagctgcacgagcagctgcagctgctggtcgccagtaataagtatcctgagagcccagaaaaggtacactttgccttgctgtttaaaagtaatgcaatatgtgaacgcccagagaacaagcactgt

SEQ ID NO: 32302 - DNA, 2308 bp, Homo sapiens
  source 1..2308: mol_type = unassigned DNA
cgtggagtggtctggtgaatgcttaaggagctgcagaagggaagtacaaatcaaagtggaggaaaaagaagacgagactgaggaaagctcaagtgaagaggaagaggaggtggaagataagctacctcgaagagagagcttgagaccaaagaggaaacggaccagagatgttatcaatgaggatgacccagaacctgaaccagaggatgaagaaacaaggaaggcaagagaaaaagagaggaggaggaggctaaagagaggagcagaagaagaagaaattgatgaagaggaattggaaagattgaaggcagagttagatgagaaaagacaaataattgctactgtcaaatgcaaaccatggaagatggagaagaaaattgaagttctcaaggaggcaaaaaaatttgtgagtgaaaatgaaggggctcttgggaaaggaaaaggaaaacggtggtttgcatttaagatgatgatggccaagaaatgggcaaaattcctccgtgattttgagaacttcaaagctgcgtgtgtcccatgggaaaataaaatcaaggctattgaaagtcagtttggctcctcagtggcctcatacttcctcttcttgagatggatgtatggagtcaatatggttctctttatcctgacatttagcctcatcatgttgccagagtacctctggggtttgccatatggcagtttacctaggaaaaccgttcccagagccgaagaggcatcggcagcaaactttggtgtgttgtacgacttcaatggtttggcacaatattccgttctcttttatggctattatgacaataaacgaacaattggatggatgaatttcaggttgccgctctcctattttctagtggggattatgtgcattggatacagctttctggttgtcctcaaagcaatgaccaaaaacattggtgatgatggaggtggagatgacaacactttcaatttcagctggaaggtctttaccagctgggactacctgatcggcaatcctgaaacagcagacaacaaatttaattctatcacaatgaactttaaggaagctatcacagaagaaaaagcagcccaagtagaagaaaacgtccacttgatcagattcctgaggtttctggctaacttcttcgtgtttctaacacttggagggagtggatacctcatcttttgggctgtgaagcgatcccaggaatttgcacagcaagatcctgacacccttgggtggtgggaaaaaaatgaaatgaacatggttatgtccctcctagggatgttctgtccaacattgtttgacttatttgctgaattagaagactaccatcctctcatcgctttgaaatggctactgggacgcatttttgctcttcttttaggcaatttatacgtatttattcttgcattaatggatgagattaacaacaagattgaagaggagaagctagtaaaggccaatattaccctttgggaagccaatatgatcaaggcctacaatgcatcattctctgaaaatagcactggaccacccttttttgttcaccctgcagatgtacctcgaggaccttgctgggaaacaatggtgggacaggagtttgtgaggctgacagtctctgatgttctgaccacctacgtcacaatcctcattggggactttctaagggcatgttttgtgaggttttgcaattattgctggtgctgggacttggagtatggatatccttcatacaccgaattcgacatcagtggcaacgtcctcgctctgatcttcaaccaaggcatgatctggatgggctccttctttgctcccagcctcccaggcatcaatatccttcgactccatacatccatgtacttccagtgctgggccgttatgtgctgcaatgttcctgaggccagggtcttcaaagcttccagatcaaataacttctacctgggcatgctactgctcatcctcttcctgtccacaatgcctgtcttgtacatgatcgtgtccctcccaccatcttttgattgtggtccattcagtggcaaaaatagaatgtttgaagtcattggagagaccctggagcacgatttcccaagctggatggcgaagatcttgagacagctttcaaaccctgggctggtcattgctgtcattttggtgatggttttggccatctattatctcaatgctactgccaagggccagaaggcagcgaatctggatctcaaaaagaagatgaaaatgcaagctttggagaacaaaatgcgaaacaagaaaatggcagctgcacgagcagatggggcggctggccgggcg

SEQ ID NO: 32303 - DNA, 3169 bp, Homo sapiens
  source 1..3169: mol_type = unassigned DNA
gcagtgctgctgaccatgagccaccaggtaaagggcctgaaagaggaagcacgaggcggagtgaaagggcgggtgaagagcggctctccacacacaggtgacaggctgggaaggagatcctcaagcaagcgggctctcaaagccgaggggaccccaggcaggcgcggagctcagcgaagccagaaggagcgcgccgggggcagcccaagcccggggtctccccggaggaagcaaacagggcgcaggagacacagagaagagctgggggagcaggagcggggcgaggcagagaggacctgcgagggcaggagaaagcgcgacgagagggcctccttccaggagcggacagcagccccaaagagggaaaaggagattccgaggagggaggagaagtcgaagcggcagaagaaacccaggtcatcctccttggcctccagtgcctctggtggggagtccctgtccgaggaggaactggcccagatcctggagcaggtggaagaaaaaaagaagctcattgccaccatgcggagcaagccctggcccatggcgaagaagctgacagagctcagggaggcccaggaatttgtggagaagtatgaaggtgccttgggaaaggggaaaggcaagcaactatatgcctacaagatgctgatggccaagaaatgggtcaaatttaagagagactttgataatttcaagactcaatgtatcccctgggaaatgaagatcaaggacattgaaagtcactttggttcttcagtggcatcgtatttcatctttctccgatggatgtatggagttaaccttgtcctttttggcttaatatttggtctagtcataatcccagaggtactgatgggcatgccctatgggagtattcccagaaagacagtgcctcgggctgaggaagaaaaggccatggatttttctgtcctttgggattttgagggctatatcaagtactctgcactcttctatggctactacaacaaccagaggaccatcgggtggctgaggtaccggctgcctatggcttactttatggtgggggtcagcgtgttcggctacagcctgattattgtcattcgatcgatggccagcaatacccaaggaagcacaggcgaaggggagagtgacaacttcacattcagcttcaagatgttcaccagctgggactacctgatcgggaattcagagacagctgataacaaatatgcatccatcaccaccagcttcaaggaatcaatagtggatgaacaagagagtaacaaagaagaaaatatccatctgacaagatttcttcgtgtcctggccaactttctcatcatctgctgtttgtgtggaagtgggtacctcatttactttgtggttaagcgatctcagcaattctccaaaatgcagaatgtcagctggtatgaaaggaatgaggtagagatcgtgatgtccctgcttggaatgttttgtccccctctgtttgaaaccatcgctgccctggagaattaccacccacgcactggactgaagtggcagctgggacgcatctttgcactcttcctggggaacctctacacatttctcttggccctgatggatgacgtccacctcaagcttgctaatgaagagacaataaagaacatcactcactggactctgtttaactattacaactcttctggttggaacgagagtgtcccccgaccacccctgcaccctgcagatgtgccccggggttcttgctgggagacagctgtgggcattgaattcatgaggctgacggtgtctgacatgctggtaacgtacatcaccatcctgctgggggacttcctacgggcttgttttgtgcggttcatgaactactgctggtgctgggacttggaggctggatttccttcatatgctgagtttgatattagtggaaatgtgctgggtttgatcttcaaccaaggaatgatctggatgggctccttctatgctccaggcctggtgggcattaatgtgctgcgcctgctgacctccatgtacttccagtgctgggcggtgatgagcagcaacgtaccccatgaacgcgtgttcaaagcctcccgatccaacaacttctacatgggcctcctgctgctggtgctcttcctcagcctcctgccggtggcctacaccatcatgtccctcccaccctcctttgactgcgggccgttcagtgggaaaaacagaatgtacgatgtcctccaagagaccattgaaaacgatttcccaaccttcctgggcaagatctttgctttcctcgccaatccaggcctgatcatcccagccatcctgctgatgttcttggccatttactacctgaactcagtttccaaaagcctttcccgagctaatgcccagctgaggaagaaaatccaagtgctccgtgaagttgagaagagtcacaaatctgtaaaaggcaaagccacagccagagattcagaggacacacctaaaagcagctccaaaaatgccacccagctccaactcaccaaggaagagaccactcctccctctgccagccaaagccaggccatggacaagaaggcgcagggccctgggacctccaattctgccagcaggaccacactgcctgcctctggacaccttcctatatctcggccccctggaatcggaccagattctggccacgccccatctcagactcatccgtggaggtcagcctctggaaagagtgctcagagacctccccactgatggctaggactccagggagcctcgaccctagggctgatcctcaagtaccccagtttcacacataccaaaccaaggttctctcccctctttcctctcacatacatgctctgtctcctctcttggaatgcatgaactttgattccttcaggcccttgtcagctaccgaaggaggaagacagtggcttcacctgtcctttagggaagctggagccatctctgcactaactgccctcccaaatatcttggttcagacagctctgaaccccacgctcacagtggtcgaccttgcctcccgattttcggagttggggaagggccatgaccaccctcgtagactttttccatgggatacagtttaggacacgggtttctgccagcttccctaaccaggagggggatggagaagggcctacatttctcaatccagaggaag

SEQ ID NO: 32304 - DNA, 1838 bp, Homo sapiens
  source 1..1838: mol_type = unassigned DNA
gtgcggctactcccccggccccggcagacctgcgactggcccagtcgcccctggggccctttgccactcccttggcaaggagagccgagacctcagttcccggcggctcttgcggggcacaggtgagccctggctgcgcgcgcggcccctcctccccggcgcctcccagatgggggctccggaggtggcgcccaggctctgagctaccctaggtctgcagactagcgggcattggccagagacatggcccagccactggccttcatcctcgatgtccctgagaccccaggggaccagggccagggccccagcccctatgatgaaagcgaagtgcacgactccttccagcagctcatccaggagcagagccagtgcacggcccaggaggggctggagctgcagcagagagagcgggaggtgacaggaagtagccagcagacactctggcggcccgagggcacccagagcacggccacactccgcatcctggccagcatgcccagccgcaccattggccgcagccgaggtgccatcatctcccagtactacaaccgcacggtgcagcttcggtgcaggagcagccggcccctgctcgggaactttgtccgctccgcctggcccagcctccgcctgtacgacctggagctggaccccacggccctggaggaggaggagaagcagagcctcctggtgaaggagctccagagcctggcagtggcacagcgggaccacatgcttcgcgggatgcccttaagcctggctgagaaacgcagcctgcgagagaagagcaggaccccgagggggaagtggaggggccagccgggcagcggcggggtctgctcctgctgtggccggctcagatatgcctgcgtgctggccttgcacagcctgggcctggcgctgctctccgccctgcaggccctgatgccgtggcgctacgccctgaagcgcatcgggggccagttcggctccagcgtgctctcctacttcctctttctcaagaccctgctggctttcaatgccctcctgctgctgctgctggtggccttcatcatgggccctcaggtcgccttcccacccgccctgccgggccctgcccccgtctgcacaggcctggagctcctcacaggcgcgggttgcttcacccacaccgtcatgtactacggccactacagtaacgccacgctgaaccagccgtgtggcagccccctggatggcagccagtgcacacccagggtgggtggcctgccctacaacatgcccctggcctacctctccactgtgggcgtgagcttctttatcacctgcatcaccctggtgtacagcatggctcactctttcggggagagctaccgggtgggcagcacctctggcatccacgccatcaccgtcttctgctcctgggactacaaggtgacgcagaagcgggcctcccgcctccagcaggacaatattcgcacccggctgaagggtgaggacaaaatcttcttaatcaacaagcttcactccatctacgagaggaaggagagggaggagaggagcagggttgggacaaccgaggaggctgcggcaccccctgccctgctcacagatgaacaggatgcctagggggacggcgatgggcctcacgggcccgcccagcaccctgagaccacactgttgcctcccagtgaccctgctgggacaccaggacaaggaagacagtttcgcctctcgaaagccgcagctgcgcctaggctggagctggaagggtgggtgaatccggcttgggcatccccaatgaactctgccctgcctgggactctatttattctgattaaaggggttttgcaaatggg

SEQ ID NO: 32305 - DNA, 2789 bp, Homo sapiens
  source 1..2789: mol_type = unassigned DNA
aggaagcggaggaaggtgaagtaggaccgaattcctgtgccgaagaggcctgcagtgggagagcaggatgggggctccggaggtggcgcccaggctctgagctaccctaggtctgcagactagcgggcattggccagagacatggcccagccactggccttcatcctcgatgtccctgagaccccaggggaccagggccagggccccagcccctatgatgaaagcgaagtgcacgactccttccagcagctcatccaggagcagagccagtgcacggcccaggaggggctggagctgcagcagagagagcgggaggtgacaggaagtagccagcagacactctggcggcccgagggcacccagagcacggccacactccgcatcctggccagcatgcccagccgcaccattggccgcagccgaggtgccatcatctcccagtactacaaccgcacggtgcagcttcggtgcaggagcagccggcccctgctcgggaactttgtccgctccgcctggcccagcctccgcctgtacgacctggagctggaccccacggccctggaggaggaggagaagcagagcctcctggtgaaggagctccagagcctggcagtggcacagcgggaccacatgcttcgcgggatgcccttaagcctggctgagaaacgcagcctgcgagagaagagcaggaccccgagggggaagtggaggggccagccgggcagcggcggggtctgctcctgctgtggccggctcagatatgcctgcgtgctggccttgcacagcctgggcctggcgctgctctccgccctgcaggccctgatgccgtggcgctacgccctgaagcgcatcgggggccagttcggctccagcgtgctctcctacttcctctttctcaagaccctgctggctttcaatgccctcctgctgctgctgctggtggccttcatcatgggccctcaggtcgccttcccacccgccctgccgggccctgcccccgtctgcacaggcctggagctcctcacaggcgcgggttgcttcacccacaccgtcatgtactacggccactacagtaacgccacgctgaaccagccgtgtggcagccccctggatggcagccagtgcacacccagggtgggtggcctgccctacaacatgcccctggcctacctctccactgtgggcgtgagcttctttatcacctgcatcaccctggtgtacagcatggctcactctttcggggagagctaccgggtgggcagcacctctggcatccacgccatcaccgtcttctgctcctgggactacaaggtgacgcagaagcgggcctcccgcctccagcaggacaatattcgcacccggctgaaggagctgctggccgagtggcagctgcggcacagccccaggagcgtgtgcgggaggctgcggcaggcggctgtgctggggcttgtgtggctgctgtgtctggggaccgcgctgggctgcgccgtggccgtccacgtcttctcggagttcatgatccagagtccagaggctgctggccaggaggctgtgctgctggtcctgcccctggtggttggcctcctcaacctgggggccccctacctgtgccgtgtcctggccgccctggagccgcatgactccccggtactggaggtgtacgtggccatctgcaggaacctcatcctcaagctggccatcctggggacactgtgctaccactggctgggccgcagggtgggcgtcctgcagggccagtgctgggaggattttgtgggccaggagctgtaccggttcctggtgatggacttcgtcctcatgttgctggacacgctttttggggaactggtgtggaggattatctccgagaagaagctgaagaggaggcggaagccggagtttgacattgcccggaatgtcctggagctgatttatgggcagactctgacctggctgggggtgctcttctcgcccctcctccccgccgtgcagatcatcaagctgctgctcgtcttctatgtcaagaagaccagccttctggccaactgccaggcgccgcgccggccctggctggcctcacacatgagcaccgtcttcctcacgctgctctgcttccccgccttcctgggcgccgctgtcttcctctgctacgccgtctggcaggtgaagccctcgagcacctgcggccccttccggaccctggacaccatgtacgaggccggcagggtgtgggtgcgccacctggaggcggcaggccccagggtctcctggctgccctgggtgcaccggtacctgatggaaaacaccttctttgtcttcctggtgtcagccctgctgctggccgtgatctacctcaacatccaggtggtgcggggccagcgcaaggtcatctgcctgctcaaggagcagatcagcaatgagggtgaggacaaaatcttcttaatcaacaagcttcactccatctacgagaggaaggagagggaggagaggagcagggttgggacaaccgaggaggctgcggcaccccctgccctgctcacagatgaacaggatgcctagggggacggcgatgggcctcacgggcccgcccagcaccctgagaccacactgttgcctcccagtgaccctgctgggacaccaggacaaggaagacagtttcgcctctcgaaagccgcagctgcgcctaggctggagctggaagggtgggtgaatccggcttgggcatccccaatgaactctgccctgcctgggactctatttattctgattaaaggggttttgcaaatggg

SEQ ID NO: 32306 - DNA, 2711 bp, Homo sapiens
  source 1..2711: mol_type = unassigned DNA
gtgcggctactcccccggccccggcagacctgcgactggcccagtcgcccctggggccctttgccactcccttggcaaggagagccgagacctcagttcccggcggctcttgcggggcacaggtgagccctggctgcgcgcgcggcccctcctccccggcgcctcccagatgggggctccggaggtggcgcccaggctctgagctaccctaggtctgcagactagcgggcattggccagagacatggcccagccactggccttcatcctcgatgtccctgagaccccaggggaccagggccagggccccagcccctatgatgaaagcgaagtgcacgactccttccagcagctcatccaggagcagagccagtgcacggcccaggaggggctggagctgcagcagagagagcgggaggtgacaggaagtagccagcagacactctggcggcccgagggcacccagagcacggccacactccgcatcctggccagcatgcccagccgcaccattggccgcagccgaggtgccatcatctcccagtactacaaccgcacggtgcagcttcggtgcaggagcagccggcccctgctcgggaactttgtccgctccgcctggcccagcctccgcctgtacgacctggagctggaccccacggccctggaggaggaggagaagcagagcctcctggtgaaggagctccagagcctggcagtggcacagcgggaccacatgcttcgcgggatgcccttaagcctggctgagaaacgcagcctgcgagagaagagcaggaccccgagggggaagtggaggggccagccgggcagcggcggggtctgctcctgctgtggccggctcagatatgcctgcgtgctggccttgcacagcctgggcctggcgctgctctccgccctgcaggccctgatgccgtggcgctacgccctgaagcgcatcgggggccagttcggctccagcgtgctctcctacttcctctttctcaagaccctgctggctttcaatgccctcctgctgctgctgctggtggccttcatcatgggccctcaggtcgccttcccacccgccctgccgggccctgcccccgtctgcacaggcctggagctcctcacaggcgcgggttgcttcacccacaccgtcatgtactacggccactacagtaacgccacgctgaaccagccgtgtggcagccccctggatggcagccagtgcacacccagggtgggtggcctgccctacaacatgcccctggcctacctctccactgtgggcgtgagcttctttatcacctgcatcaccctggtgtacagcatggctcactctttcggggagagctaccgggtgggcagcacctctggcatccacgccatcaccgtcttctgctcctgggactacaaggtgacgcagaagcgggcctcccgcctccagcaggacaatattcgcacccggctgaaggagctgctggccgagtggcagctgcggcacagccccaggagcgtgtgcgggaggctgcggcaggcggctgtgctggggcttgtgtggctgctgtgtctggggaccgcgctgggctgcgccgtggccgtccacgtcttctcggagttcatgatccagagtccagaggctgctggccaggaggctgtgctgctggtcctgcccctggtggttggcctcctcaacctgggggccccctacctgtgccgtgtcctggccgccctggagccgcatgactccccggtactggaggtgtacgtggccatctgcaggattatctccgagaagaagctgaagaggaggcggaagccggagtttgacattgcccggaatgtcctggagctgatttatgggcagactctgacctggctgggggtgctcttctcgcccctcctccccgccgtgcagatcatcaagctgctgctcgtcttctatgtcaagaagaccagccttctggccaactgccaggcgccgcgccggccctggctggcctcacacatgagcaccgtcttcctcacgctgctctgcttccccgccttcctgggcgccgctgtcttcctctgctacgccgtctggcaggtgaagccctcgagcacctgcggccccttccggaccctggacaccatgtacgaggccggcagggtgtgggtgcgccacctggaggcggcaggccccagggtctcctggctgccctgggtgcaccggtacctgatggaaaacaccttctttgtcttcctggtgtcagccctgctgctggccgtgatctacctcaacatccaggtggtgcggggccagcgcaaggtcatctgcctgctcaaggagcagatcagcaatgagggtgaggacaaaatcttcttaatcaacaagcttcactccatctacgagaggaaggagagggaggagaggagcagggttgggacaaccgaggaggctgcggcaccccctgccctgctcacagatgaacaggatgcctagggggacggcgatgggcctcacgggcccgcccagcaccctgagaccacactgttgcctcccagtgaccctgctgggacaccaggacaaggaagacagtttcgcctctcgaaagccgcagctgcgcctaggctggagctggaagggtgggtgaatccggcttgggcatccccaatgaactctgccctgcctgggactctatttattctgattaaaggggttttgcaaatggg

SEQ ID NO: 32307 - DNA, 1046 bp, Homo sapiens
  source 1..1046: mol_type = unassigned DNA
cagtgctgggaggattttgtgggccaggagctgtaccggttcctggtgatggacttcgtcctcatgttgctggacacgctttttggggaactggaaaacaggtttcaaagtgatgtgttttcttcgagaatctgggcctggtggcggaagccggagtttgacattgcccggaatgtcctggagctgatttatgggcagactctgacctggctgggggtgctcttctcgcccctcctccccgccgtgcagatcatcaagctgctgctcgtcttctatgtcaagaagaccagccttctggccaactgccaggcgccgcgccggccctggctggcctcacacatgagcaccgtcttcctcacgctgctctgcttccccgccttcctgggcgccgctgtcttcctctgctacgccgtctggcaggtgaagccctcgagcacctgcggccccttccggaccctggacaccatgtacgaggccggcagggtgtgggtgcgccacctggaggcggcaggccccagggtctcctggctgccctgggtgcaccggtacctgatggaaaacaccttctttgtcttcctggtgtcagccctgctgctggccgtgatctacctcaacatccaggtggtgcggggccagcgcaaggtcatctgcctgctcaaggagcagatcagcaatgagggtgaggacaaaatcttcttaatcaacaagcttcactccatctacgagaggaaggagagggaggagaggagcagggttgggacaaccgaggaggctgcggcaccccctgccctgctcacagatgaacaggatgcctagggggacggcgatgggcctcacgggcccgcccagcaccctgagaccacactgttgcctcccagtgaccctgctgggacaccaggacaaggaagacagtttcgcctctcgaaagccgcagctgcgcctaggctggagctggaagggtgggtgaatccggcttgggcatccccaatgaactctgccctgcctgggactctatttattctgattaaaggggttttgcaaatggg

SEQ ID NO: 32308 - DNA, 2891 bp, Homo sapiens
  source 1..2891: mol_type = unassigned DNA
gtgcggctactcccccggccccggcagacctgcgactggcccagtcgcccctggggccctttgccactcccttggcaaggagagccgagacctcagttcccggcggctcttgcggggcacaggtgagccctggctgcgcgcgcggcccctcctccccggcgcctcccagatgggggctccggaggtggcgcccaggctctgagctaccctaggtctgcagactagcgggcattggccagagacatggcccagccactggccttcatcctcgatgtccctgagaccccaggggaccagggccagggccccagcccctatgatgaaagcgaagtgcacgactccttccagcagctcatccaggagcagagccagtgcacggcccaggaggggctggagctgcagcagagagagcgggaggtgacaggaagtagccagcagacactctggcggcccgagggcacccagagcacggccacactccgcatcctggccagcatgcccagccgcaccattggccgcagccgaggtgccatcatctcccagtactacaaccgcacggtgcagcttcggtgcaggagcagccggcccctgctcgggaactttgtccgctccgcctggcccagcctccgcctgtacgacctggagctggaccccacggccctggaggaggaggagaagcagagcctcctggtgaaggagctccagagcctggcagtggcacagcgggaccacatgcttcgcgggatgcccttaagcctggctgagaaacgcagcctgcgagagaagagcaggaccccgagggggaagtggaggggccagccgggcagcggcggggtctgctcctgctgtggccggctcagatatgcctgcgtgctggccttgcacagcctgggcctggcgctgctctccgccctgcaggccctgatgccgtggcgctacgccctgaagcgcatcgggggccagttcggctccagcgtgctctcctacttcctctttctcaagaccctgctggctttcaatgccctcctgctgctgctgctggtggccttcatcatgggccctcaggtcgccttcccacccgccctgccgggccctgcccccgtctgcacaggcctggagctcctcacaggcgcgggttgcttcacccacaccgtcatgtactacggccactacagtaacgccacgctgaaccagccgtgtggcagccccctggatggcagccagtgcacacccagggtgggtggcctgccctacaacatgcccctggcctacctctccactgtgggcgtgagcttctttatcacctgcatcaccctggtgtacagcatggctcactctttcggggagagctaccgggtgggcagcacctctggcatccacgccatcaccgtcttctgctcctgggactacaaggtgacgcagaagcgggcctcccgcctccagcaggacaatattcgcacccggctgaaggagctgctggccgagtggcagctgcggcacagccccaggagcgtgtgcgggaggctgcggcaggcggctgtgctggggcttgtgtggctgctgtgtctggggaccgcgctgggctgcgccgtggccgtccacgtcttctcggagttcatgatccagagtccagaggctgctggccaggaggctgtgctgctggtcctgcccctggtggttggcctcctcaacctgggggccccctacctgtgccgtgtcctggccgccctggagccgcatgactccccggtactggaggtgtacgtggccatctgcaggaacctcatcctcaagctggccatcctggggacactgtgctaccactggctgggccgcagggtgggcgtcctgcagggccagtgctgggaggattttgtgggccaggagctgtaccggttcctggtgatggacttcgtcctcatgttgctggacacgctttttggggaactggtgtggaggattatctccgagaagaagctgaagaggaggcggaagccggagtttgacattgcccggaatgtcctggagctgatttatgggcagactctgacctggctgggggtgctcttctcgcccctcctccccgccgtgcagatcatcaagctgctgctcgtcttctatgtcaagaagaccagccttctggccaactgccaggcgccgcgccggccctggctggcctcacacatgagcaccgtcttcctcacgctgctctgcttccccgccttcctgggcgccgctgtcttcctctgctacgccgtctggcaggtgaagccctcgagcacctgcggccccttccggaccctggacaccatgtacgaggccggcagggtgtgggtgcgccacctggaggcggcaggccccagggtctcctggctgccctgggtgcaccggtacctgatggaaaacaccttctttgtcttcctggtgtcagccctgctgctggccgtgatctacctcaacatccaggtggtgcggggccagcgcaaggtcatctgcctgctcaaggagcagatcagcaatgagggtgaggacaaaatcttcttaatcaacaagcttcactccatctacgagaggaaggagagggaggagaggagcagggttgggacaaccgaggaggctgcggcaccccctgccctgctcacagatgaacaggatgcctagggggacggcgatgggcctcacgggcccgcccagcaccctgagaccacactgttgcctcccagtgaccctgctgggacaccaggacaaggaagacagtttcgcctctcgaaagccgcagctgcgcctaggctggagctggaagggtgggtgaatccggcttgggcatccccaatgaactctgccctgcctgggactctatttattctgattaaaggggttttgcaaatggg

SEQ ID NO: 32309 - DNA, 1356 bp, Homo sapiens
  source 1..1356: mol_type = unassigned DNA
ctctggttacggacaacatacagaagccactgccaatgagctccgccgagtagcaccggggcagggctagcgcttaaaggagccgcgacccctttgcagaccagagggtgacccggatgatggcggccggcgcggccctagccctggccttgtggctactaatgccaccagtggaggtgggaggggcggggcccccgccaatccaggacggtgagttcacgttcctgttgccggcggggaggaagcagtgtttctaccagtccgcgccggccaacgcaagcctcgagaccgaataccaggtgatcggaggtgctggactggacgtggacttcacgctggagagccctcagggcgtgctgttggtcagcgagtcccgcaaggctgatggggtacacacggtggagccaacggaggccggggactacaagctgtgctttgacaactccttcagcaccatctccgagaagctggtgttctttgaactgatctttgacagcctccaggatgacgaggaggtcgaaggatgggcagaggctgtggagcccgaggagatgctggatgttaaaatggaggacatcaaggagtccattgagaccatgcggacccggctggagcgcagcatccagatgctcacgctactgcgggccttcgaggcacgtgaccgcaacctgcaagagggcaacttggagcgggtcaacttctggtcagctgtcaacgtggcggtgctgctgctggtggctgtgctgcaggtctgcacgctcaagcgcttcttccaggacaagcgcccggtgcccacgtagcccctgccatggaaggaagaacgggacaaaggaggggcagcagggtgtgtgcatatgagacttgggggtccctccccaattttagtttcctgccaaaacgggagtgtgcagtcagggcctgcggtctggccccatgagtctccttccgtcctcagcgggcagggaacacctctggcttgtagaagggacggctcagtggctgcaccgacggtcctggaaatctcacatggtgggcactgcagcgttggaacgtgagcctcggatttcctggcccctctactgtaaatgtgccttagcctaagcctcccatcctgtgttagcgttgcctggtgcggggcagggcctaacaaggaaacctgggccctccaagccaggttgaggtctggtaacagaatgccaggaagggggcctggaagaccacctgccccggcccctctcctgcaggggccccacacaggcatgagggatggcccggccaaagtctaggcagaagcctcctataacaaagggtggtgtggcctgggcattggagtcaataaattatggtcagaaaatc

SEQ ID NO: 32310 - DNA, 1826 bp, Homo sapiens
  source 1..1826: mol_type = unassigned DNA
ggcgcttaggggctgaggcgcgatggcaggtgtcggggctgggcctctgcgggcgatggggcggcaggccctgctgcttctcgcgctgtgcgccacaggcgcccaggggctctacttccacatcggcgagaccgagaagcgctgtttcatcgaggaaatccccgacgagaccatggtcatcggcaactatcgtacccagggcatgcacgtggaagtgaaggaccccgacggcaaggtggtgctgtcccggcagtacggctcggagggccgcttcacgttcacctcccacacgcccggtgaccatcaaatctgtctgcactccaattctaccaggatggctctcttcgctggtggcaaactgcgggtgcatctcgacatccaggttggggagcatgccaacaactaccctgagattgctgcaaaagataagctgacggagctacagctccgcgcccgccagttgcttgatcaggtggaacagattcagaaggagcaggattaccaaaggtatcgtgaagagcgcttccgactgacgagcgagagcaccaaccagagggtcctatggtggtccattgctcagactgtcatcctcatcctcactggcatctggcagatgcgtcacctcaagagcttctttgaggccaagaagctggtgtagtgccctctttgtatgacccttcctttttacctcatttatttggtactttccccacacagtcctttatccacctggatttttagggaaaaaaatgaaaaagaataagtcacattggttccatggccacaaaccattcagatcagccacttgctgaccctggttcttaaggacacatgacattagtccaatctttcaaaatcttgtcttagggcttgtgaggaatcagaactaacccaggactcagtcctgcttcttttgcctcgagtgattttcctctgtttttcactaaataagcaaatgaaaactctctccattaccttctgctttctctttgtccacttacgcagtaggtgactggcatgtgccacagagcaggccctgcctcactgtctgctggtcagttctgggttcacttaatggctttgtgaatgtaaataaggggcaggtcttggccctagaggattgagatgtttttctaaatcttagaactatttttggataaattatatattttccttcctagtagaagtgttactgcctgtaactagctcaaaataccaatgcagtttctgcattctgggttttgtttttccttttttttttttttttttttttttgagttttgctcttgtcgcccaggctggagtgcaatggcgtgatctcagctcactggcaacatctgcctcccgggttcaaatgattctcctgcctcagtctcctgagtagctgggattacaggtgcccgccaccacgctcagctaatttttgtatttttagtagagatggggttttaccatgttggccaggctggtcttagactcctgacctcagttgatccacctgcctcagcctctgcattcagtttattcacatatttttggtaactcccatggcagctcctaggatttcagcggtctgtgggccagaaagcaggcaccagggctgacctcaaggccgtatcagagggccaagcagagttcttttggatacctgcttttcatcccacagggccttagagtcagaggtaaggtagcaacagagctagaatggggcaatgcactcttaccctccttctcaacttttatttaagctgtgctaaatgttttcttcaagggaaccagatttagttctttacagaattttccagtgaaataaaacatgttgtaat

SEQ ID NO: 32311 - DNA, 2322 bp, Homo sapiens
  source 1..2322: mol_type = unassigned DNA
gcaggcgcagagcgatgcgcaaatgtgcgcaggcgcttaggggctgaggcgcgatggcaggtgtcggggctgggcctctgcgggcgatggggcggcaggccctgctgcttctcgcgctgtgcgccacaggcgcccaggggctctacttccacatcggcgagaccgagaagcgctgtttcatcgaggaaatccccgacgagaccatggtcatcggcaactatcgtacccagatgtgggataagcagaaggaggtcttcctgccctcgacccctggcctgggcatgcacgtggaagtgaaggaccccgacggcaaggtggtgctgtcccggcagtacggctcggagggccgcttcacgttcacctcccacacgcccggtgaccatcaaatctgtctgcactccaattctaccaggatggctctcttcgctggtggcaaactgcgggtgcatctcgacatccaggttggggagcatgccaacaactaccctgagattgctgcaaaagataagctgacggagctacagctccgcgcccgccagttgcttgatcaggtggaacagattcagaaggagcaggattaccaaaggtatcgtgaagagcgcttccgactgacgagcgagagcaccaaccagagggtcctatggtggtccattgctcagactgtcatcctcatcctcactggcatctggcagatgcgtcacctcaagagcttctttgaggccaagaagctggtgtagtgccctctttgtatgacccttcctttttacctcatttatttggtactttccccacacagtcctttatccacctggatttttagggaaaaaaatgaaaaagaataagtcacattggttccatggccacaaaccattcagatcagccacttgctgaccctggttcttaaggacacatgacattagtccaatctttcaaaatcttgtcttagggcttgtgaggaatcagaactaacccaggactcagtcctgcttcttttgcctcgagtgattttcctctgtttttcactaaataagcaaatgaaaactctctccattaccttctgctttctctttgtccacttacgcagtaggtgactggcatgtgccacagagcaggccctgcctcactgtctgctggtcagttctgggttcacttaatggctttgtgaatgtaaataaggggcaggtcttggccctagaggattgagatgtttttctaaatcttagaactatttttggataaattatatattttccttcctagtagaagtgttactgcctgtaactagctcaaaataccaatgcagtttctgcattctgggttttgtttttccttttttttttttttttttttttttgagttttgctcttgtcgcccaggctggagtgcaatggcgtgatctcagctcactggcaacatctgcctcccgggttcaaatgattctcctgcctcagtctcctgagtagctgggattacaggtgcccgccaccacgctcagctaatttttgtatttttagtagagatggggttttaccatgttggccaggctggtcttagactcctgacctcagttgatccacctgcctcagcctctgcattcagtttattcacatatttttggtaactcccatggcagctcctaggatttcagcggtctgtgggccagaaagcaggcaccagggctgacctcaaggccgtatcagagggccaagcagagttcttttggatacctgcttttcatcccacagggccttagagtcagaggtaaggtagcaacagagctagaatggggcaatgcactcttaccctccttctcaacttttatttaagctgtgctaaatgttttcttcaagggaaccagatttagttctttacagaattttccagtgaaataaaacatgttgtaatagctgtgtttgagatgaaataagaggttgtgggtagaggggaggcacctaaaggaaaagaggaaaggtgcctgggctacctatgcagataacctggagtggacttcactgtggactcgtggtactaaggcttggcctggacaggcagtctagggggtatgggaatacacggtgtggttgttcaactatttgcaaaggtcaaccaaatagaccacatgttcgcaaagtatcatctgaggaaattaagtaccttcttagccctctcagtcataaatttgaacaaattttaatacacttccctcatgcccttctatataaaacttaataccattagttccccattcttgacattttatttcagtttttattatatatttatttgaaatatttattaaattatctgacctacagaactaaa

SEQ ID NO: 32312 - DNA, 4127 bp, Homo sapiens
  source 1..4127: mol_type = unassigned DNA
ccccggttccggcgcggttgaggccttcggtggtgaacgagtctccagcaccatgtctggtttgtctggcccaccagcccggcgcggcccttttccgttagcgttgctgcttttgttcctgctcggccccagattggtccttgccatctccttccatctgcccattaactctcgcaagtgcctccgtgaggagattcacaaggacctgctagtgactggcgcgtacgagatctccgaccagtctgggggcgctggcggcctgcgcagccacctcaagatcacagattctgctggccatattctctactccaaagaggatgcaaccaaggggaaatttgcctttaccactgaagattatgacatgtttgaagtgtgttttgagagcaagggaacagggcggatacctgaccaactcgtgatcctagacatgaagcatggagtggaggcgaaaaattacgaagagattgcaaaagttgagaagctcaaaccattagaggtagagctgcgacgcctagaagacctttcagaatctattgttaatgattttgcctacatgaagaagagagaagaggagatgcgtgataccaacgagtcaacaaacactcgggtcctatacttcagcatcttttcaatgttctgtctcattggactagctacctggcaggtcttctacctgcgacgcttcttcaaggccaagaaattgattgagtaatgaatgaggcatattctcctcccaccttgtacctcagccagcagaacatcgctgggacgtgcctggcctaaggcatcctaccaacagcaccatcaaggcacgttggagctttcttgccagaactgatctcttttggtgtgggaggacatggggtaccacctacacccaacaagtcaatgagggacttctttttaatttggtaggattttgactggttttgcaacaataggtctattattagagtcacctatgacaaaaaataggggttacctagataatgccaaagtcagcatttgtcctgggttcccttgtgtgatctgtttggactatgttttcttttcttctcccacttgctcagcagcttgggcttccattctagttcttttaccaagatttttgtgtgaccatgttgacttcatttggattgccctctttcaatttccttgtgaaaacacccttaactttctctttacccttagctgaaatgtttacatagcttctggtgatatcttttcatgattttatatctcttaaaatggtgatggatgtgacacctcataaaagtgagctttgaactgtagataactcttaaagaaaatgtcattttagacaattaaaatatttgtgctcaactgcttgaacttttttcgtgtatgtgtatttaattctatgcaatattatcacatgtgtagattcatgtgaccaccatcacaagagacagaacagttctgtcacatggatcccttgcactgcccttttacagccgcagccacatccctttcttataccctcaccccaacctgtggctaccactgttctgtcctccatctctgtaattttgtcatttcaagaatgttgtatgaatggaatcatacagaatgtaatcttacgaggctgatcttttttcattcagcataattcccttgaaatccatccaagttgttgcatgtatgaatagtttcttcctttttttcttttaaaaatgttttatatatttagggggtataagtacagatttcttacatgcatatattgcatcgtggtgaagtgggggcagttccttttgattgctgagtagtattccatggtatggatgtaccacagtttgcttaaccattcacccactaaaggacataagagttgttttcagttttttgccctaataaagctgctgtgaacattcatgtacaggtttttatgtgaacatacattttcattttctgggataaatgctcaaaagggcaactgttgggttgtatggtaaacacatatatttttgtaagaaactaccctactctttttccagagtggctctactttttacatacagccactcatacaattcagacagcaatgtatgattgatccagtttcttcacatcctcaccagcatttggtattactactattttttatcttaaccattcacatagatgtgtgtaatgataccacatgtggttttaatttgcatttccaatggctaatgatgttgagtatctttttgtgtgctaatttgccatctatgtatcctcttcggtgaaatgtcttcatgtcttttgtctattttctatttaggtcatttgttctttttactattgagttttgagaggttttttatatatcctagataaaattcctctgttagatatgtggttgcttgaatttttaacataacttctaccaaggaaaaataagtaaaatttccaacccttgcatggccagtcacttacttaattcctgtccttcagtgttccatctagagaattaagagatatgatgtataaaatagacatcgagggccattaagagagtaaatacttaaaaatacatgttatgaaagcaaagccaataatcactgtaggagtatgagttgcctaagggccaaaactaatgtaaataagagaaagtgtggatataaatgaccattgtttataaacagttatgaaaaatgctgtgacttgaaatctttcccacatctcccaagaaagtaggtaggagtttatcctttccgtaatctctttttaaccctgctgactattacagggcttgtttaatcacagtggcaagaattacatgtatcttacagtaaagaaacagaatactggaatcgttagagaaccctgatgtgttgacctggataaagtacaaaggtggaagagggaatgagttatgctgttaaaatctcaggctattctgttaatgttcctgctactatgaacccaaactttttttttcccccttttgactccttgtgtcttcctctcctgtggcataaaagtagttctgtcgttaacttgtacaacattgccatctgctgttgagaattggtaggtactgcttctgagaacctggctgcagatccttagcataggcagcaaatgttgagaaagtctatctgtagtattacatatactaagttacagaggatgcatccaagtagagaaaataatatgtgggttaagatacatccttaaacttttttttttttggggggggggggacggagtcttgctgcaacgcccaggctggagtgcaatggcactatctcagctcgctgcaaccttcacctcctgggttcaagcaattctcctgcctcagcctcctgagtagctgggaatataggtgcacaccaccatgcctggctaatttttgtattttcagtagaagcagagtttcaccatattggccaggttggtctcgaactcctgacctcaagtgatctgcctgcctcagcctcccaaagtgctgggattacacgcgtgagccaccacacccagcctccatctttaaacttttaaatgtgaaatttctatcatgtaccgttagcctaacaagattttctttcctatttctgactggtgcctttcccctttttaggagcaacgaaagctactctcttagttatgttcttgtgatgtgacaaaatgtcaagaagataggagaagagaatattttatttcgttgatgcttttgttcccaagtgtgaccctaaacttaagctttgtaggagttgacattctttcatgtcccttccctttactcatgccgaaactatcaactgggacattttgtgcttttggtttaaaagttaattgatattatactttggttttatctaaaaagtaaatgtatttgcctttgacaaaagactgacacaagagcaaataagctttaaaatcgggtgttatgtgctttcctccatttttgagcatattatccaaaatggtctgtataatataaatgagaatgatgcagtttaagtaagccttgttataccattgtcatggacccctgtcataaagccatttcttggtttgtttgggaaagaggcatatgggatttatacagattcacttgtaaatgttggattggggatttttgtgtaaattttctcaaataaaggctagcagaaacc

SEQ ID NO: 32313 - DNA, 1824 bp, Homo sapiens
  source 1..1824: mol_type = unassigned DNA
ggcggcgcgggaacctgacaccgaggatgaataaatgatgctcgctgactacccgtggccaaagcccgtggccaccgagcgccggctggcaggggcagtgaccggcggccggcccgttcgtccctgggctccgcaagcggcgcggtggcacgaagatggcggggtggccgggcgcgggtcccctctgcgtgctgggcggcgccgcactcggggtgtgcctcgcgggggttgccgggcagctggtggagcccagcacggccccacccaagcccaagccgcctccgctgaccaaggagacagtggtgttctgggacatgcgcctgtggcacgtggtgggcatcttttcgctcttcgtgttgtccatcatcatcacgctgtgctgtgtcttcaactgtcgtgtgccacggacccggaaggagatcgaagcccggtacctgcagcgaaaggcagccaagatgtacacagacaagctggagactgtgccacccctcaatgagctcacagaagtcccaggagaggataagaagaagaagaagaagaagaagaaggacagtgtggacacagtggccatcaaagtagaggaggatgagaagaatgaggccaagaagaagaaaggagagaaatgaagacatcctgggcagcttgggctggcgggccctggagctcaagccgtggccggggtccaggcatgttggactctgagctcatttggggaccacagaggctgtggtcagagagggaagctgaggcccatggccacatcctcatggcccatcaggggcaggaaccagacaatctcgtaggtgtcctgccccccagcctaggcttggctcctttcaccccatccacatgggtactgtctcggcagaggtggtctggtgccaccgtccctctgcagatacactgctctccccacccagacctgcctgtctcccaccctttctgccagggatggcagtggctgtgaaggagtaatgggatatggggttacttcagccaccctttctggcacgaaatggctgaagtgcatgggtcagggtgtgaggccacacccagagtagccatgaggaggcagagagggtcactgggggacactgtggcagcaggagggactctgtctggccagggaggagccccagtggtgagaagacttccccaagcctggcaggggatccagctcaagggagtaagtagaggtggcttcagaaatggaacccccagcccagcagacatcaagctcaaggcaatgggctaccctcatttcacacgttgtgatgaagctgaggctgctgccaggcccggcatgaggccccgaggctcgagctcggggctgggggctgcagggctgggtcaggggtacacagagctaaggccaatgggctagagggtgccggaaagagagctggagtctgggctcctcttgggaatcagagtatatttaagaagccaagggggacctcgggctgttctggtggccccttctatgcccagctgtgctgggaggtcccagggccctagaagatcacagcagggccttctgcctgctgaccataacagtgccagcttctttgcagcttcctcttctaccatttcccactacgggcacctaaaagaagcatctctgaccagaagacaaaggcccaaatagcacctgggggagggaagatgcacagaggcacttccagatggcatcgaacagactaaggctctgaaacctaggcctgaacactaaggtctcgagacaccagaggtttctgagccaggagagcctgctggaaaagcagcctgcagagatttgtgaataaagctgattgccttctcaga

SEQ ID NO: 32314 - DNA, 2674 bp, Homo sapiens
  source 1..2674: mol_type = unassigned DNA
aaggcagggggcggggcgtctccgagcggcggggccaagggagggcacaacagctgctacctgaacagtttctgacccaacagttacccagcgccggactcgctgcgccccggcggctctagggacccccggcgcctacacttagctccgcgcccgagagaatgttggaccgacgacacaagacctcagacttgtgttattctagcagctgaacacaccccaggctcttctgcccggcagtggctctggaagcagtctggtgtatagagttatggattcactaccagattctactgtatgctcttgacaactatgaccacaatggtccacccacaaatgaattatcaggagtgaacccagaggcacgtatgaatgaaagtcctgatccgactgacctggcgggagtcatcattgagctcggccccaatgacagtccacagacaagtgaatttaaaggagcaaccgaggaggcacctgcgaaagaaagtgtgttagcacgactttccaagtttgaagttgaagatgctgaaaatgttgcttcatatgacagcaagattaagaaaattgtgcattcaattgtatcatcctttgcatttggactatttggagttttcctggtcttactggatgtcactctcatccttgccgacctaattttcactgacagcaaactttatattcctttggagtatcgttctatttctctagctattgccttattttttctcatggatgttcttcttcgagtatttgtagaaaggagacagcagtatttttctgacttatttaacattttagatactgccattattgtgattcttctgctggttgatgtcgtttacattttttttgacattaagttgcttaggaatattcccagatggacacatttacttcgacttctacgacttattattctgttaagaatttttcatctgtttcatcaaaaaagacaacttgaaaagctgataagaaggcgggtttcagaaaacaaaaggcgatacacaagggatggatttgacctagacctcacttacgttacagaacgtattattgctatgtcatttccatcttctggaaggcagtctttctatagaaatccaatcaaggaagttgtgcggtttctagataagaaacaccgaaaccactatcgagtctacaatctatgcagtgaaagagcttacgatcctaagcacttccataatagggtcgttagaatcatgattgatgatcataatgtccccactctacatcagatggtggttttcaccaaggaagtaaatgagtggatggctcaagatcttgaaaacatcgtagcgattcactgtaaaggaggcacagatagaacaggaactatggtttgtgccttccttattgcctctgaaatatgttcaactgcaaaggaaagcctgtattattttggagaaaggcgaacagataaaacccacagcgaaaaatttcagggagtaaaaactccttctcagaagagatatgttgcatattttgcacaagtgaaacatctctacaactggaatctccctccaagacggatactctttataaaacacttcattatttattcgattcctcgttatgtacgtgatctaaaaatccaaatagaaatggagaaaaaggttgtcttttccactatttcattaggaaaatgttcggtacttgataacattacaacagacaaaatattaattgatgtattcgacggtctacctctgtatgatgatgtgaaagtgcagtttttctattcgaatcttcctacatactatgacaattgctcattttacttctggttgcacacatcttttattgaaaataacaggctttatctaccaaaaaatgaattggataatctacataaacaaaaagcacggagaatttatccatcagattttgccgtggagatactttttggcgagaaaatgacttccagtgatgttgtagctggatccgattaagtatagctcccccttccccttctgggaaagaattatgttctttccaaccctgccacatgttcatatatcctaaatctatcctaaatgttccttgaagtatttatttatgtttatatatgtttatatatgttcttcataaatctattacatatatatagataaaatgtcagtgtctttcttcttttttgaaggtacatacttcacagtttccatcttgtatttacctaaatttggaacacagtatgcaggaacatcaggcatcattttgaagaactttgaaatagaactttcaaagcaaaaacttgagatattcaaaaattgtgattccccaacacccacttacttacatatttttggtcaagtatttattccctgctttggttcacatttgtaatttcagatttattagaaagctaatttatatatttttcttccccttcatttacaaactgtctgttaacagattggcaaccaagactaagttttaaatccagaagagagaaatgtttcacgcaagcagtcccccaactcccaacacacactccctttcattccgagcactaaataggtagcttacttgacaagcttcctttaattacacacagacatggaggttggggtaagaagatggtggtaaatatgaagataagtaatctttaataacttctgcttttgtataaaattgtaagtgaagtgaaaagaaa

SEQ ID NO: 32315 - DNA, 2036 bp, Homo sapiens
  source 1..2036: mol_type = unassigned DNA
gggagggcacaacagctgctacctgaacagtttctgacccaacagttacccagcgccggactcgctgcgccccggcggctctagggacccccggcgcctacacttagctccgcgcccgagagaatgttggaccgacgacacaagacctcagacttgtgttattctagcagctgaacacaccccaggctcttctgcccggcagtggctctggaagcagtctggtgtatagagttatggattcactaccagattctactgtatgctcttgacaactatgaccacaatggtccacccacaaatgaattatcaggagtgaacccagaggcacgtatgaatgaaagtcctgatccgactgacctggcgggagtcatcattgagctcggccccaatgacagtccacagacaagtgaatttaaaggagcaaccgaggaggcacctgcgaaagaaagcagcaagattaagaaaattgtgcattcaattgtatcatcctttgcatttggactatttggagttttcctggtcttactggatgtcactctcatccttgccgacctaattttcactgacagcaaactttatattcctttggagtatcgttctatttctctagctattgccttattttttctcatggatgttcttcttcgagtatttgtagaaaggagacagcagtatttttctgacttatttaacattttagatactgccattattgtgattcttctgctggttgatgtcgtttacattttttttgacattaagttgcttaggaatattcccagatggacacatttacttcgacttctacgacttattattctgttaagaatttttcatctgtttcatcaaaaaagacaacttgaaaagctgataagaaggcgggtttcagaaaacaaaaggcgatacacaagggatggatttgacctagacctcacttacgttacagaacgtattattgctatgtcatttccatcttctggaaggcagtctttctatagaaatccaatcaaggaagttgtgcggtttctagataagaaacaccgaaaccactatcgagtctacaatctatgcagtgaaagagcttacgatcctaagcacttccataatagggtcgttagaatcatgattgatgatcataatgtccccactctacatcagatggtggttttcaccaaggaagtaaatgagtggatggctcaagatcttgaaaacatcgtagcgattcactgtaaaggaggcacagatagaacaggaactatggtttgtgccttccttattgcctctgaaatatgttcaactgcaaaggaaagcctgtattattttggagaaaggcgaacagataaaacccacagcgaaaaatttcagggagtaaaaactccttctcagaagagatatgttgcatattttgcacaagtgaaacatctctacaactggaatctccctccaagacggatactctttataaaacacttcattatttattcgattcctcgttatgtacgtgatctaaaaatccaaatagaaatggagaaaaaggttgtcttttccactatttcattaggaaaatgttcggtacttgataacattacaacagacaaaatattaattgatgtattcgacggtctacctctgtatgatgatgtgaaagtgcagtttttctattcgaatcttcctacatactatgacaattgctcattttacttctggttgcacacatcttttattgaaaataacaggctttatctaccaaaaaatgaattggataatctacataaacaaaaagcacggagaatttatccatcagattttgccgtggagatactttttggcgagaaaatgacttccagtgatgttgtagctggatccgattaagtatagctcccccttccccttctgggaaagaattatgttctttccaaccctgccacatgttcatatatcctaaatctatcctaaatgttccttgaagtatttatttatgtttatatatgtttatatatgttcttcataaatctattacatatatatagataaaa

SEQ ID NO: 32316 - DNA, 2150 bp, Homo sapiens
  source 1..2150: mol_type = unassigned DNA
gggagggcacaacagctgctacctgaacagtttctgacccaacagttacccagcgccggactcgctgcgccccggcggctctagggacccccggcgcctacacttagctccgcgcccgagagaatgttggaccgacgacacaagacctcagacttgtgttattctagcagctgaacacaccccaggctcttctgcccggcagtggctctggaagcagtctggtgtatagagttatggattcactaccagattctactgtatgctcttgacaactatgaccacaatggtccacccacaaatgaattatcaggagtgaacccagaggcacgtatgaatgaaagtcctgatccgactgacctggcgggagtcatcattgagctcggccccaatgacagtccacagacaagtgaatttaaaggagcaaccgaggaggcacctgcgaaagaaagcccacacacaagtgaatttaaaggagcagcccgggtgtcacctatcagtgaaagtgtgttagcacgactttccaagtttgaagttgaagatgctgaaaatgttgcttcatatgacagcaagattaagaaaattgtgcattcaattgtatcatcctttgcatttggactatttggagttttcctggtcttactggatgtcactctcatccttgccgacctaattttcactgacagcaaactttatattcctttggagtatcgttctatttctctagctattgccttattttttctcatggatgttcttcttcgagtatttgtagaaaggagacagcagtatttttctgacttatttaacattttagatactgccattattgtgattcttctgctggttgatgtcgtttacattttttttgacattaagttgcttaggaatattcccagatggacacatttacttcgacttctacgacttattattctgttaagaatttttcatctgtttcatcaaaaaagacaacttgaaaagctgataagaaggcgggtttcagaaaacaaaaggcgatacacaagggatggatttgacctagacctcacttacgttacagaacgtattattgctatgtcatttccatcttctggaaggcagtctttctatagaaatccaatcaaggaagttgtgcggtttctagataagaaacaccgaaaccactatcgagtctacaatctatgcagtgaaagagcttacgatcctaagcacttccataatagggtcgttagaatcatgattgatgatcataatgtccccactctacatcagatggtggttttcaccaaggaagtaaatgagtggatggctcaagatcttgaaaacatcgtagcgattcactgtaaaggaggcacagatagaacaggaactatggtttgtgccttccttattgcctctgaaatatgttcaactgcaaaggaaagcctgtattattttggagaaaggcgaacagataaaacccacagcgaaaaatttcagggagtaaaaactccttctcagaagagatatgttgcatattttgcacaagtgaaacatctctacaactggaatctccctccaagacggatactctttataaaacacttcattatttattcgattcctcgttatgtacgtgatctaaaaatccaaatagaaatggagaaaaaggttgtcttttccactatttcattaggaaaatgttcggtacttgataacattacaacagacaaaatattaattgatgtattcgacggtctacctctgtatgatgatgtgaaagtgcagtttttctattcgaatcttcctacatactatgacaattgctcattttacttctggttgcacacatcttttattgaaaataacaggctttatctaccaaaaaatgaattggataatctacataaacaaaaagcacggagaatttatccatcagattttgccgtggagatactttttggcgagaaaatgacttccagtgatgttgtagctggatccgattaagtatagctcccccttccccttctgggaaagaattatgttctttccaaccctgccacatgttcatatatcctaaatctatcctaaatgttccttgaagtatttatttatgtttatatatgtttatatatgttcttcataaatctattacatatatatagataaaa

SEQ ID NO: 32317 - DNA, 2175 bp, Homo sapiens
  source 1..2175: mol_type = unassigned DNA
ttaccctacatgcctgagaagccagggaccaagatggatcttctcctcgacatcagctaagcctggaggactcttcccctcagagaccatggagagggacagccacgggaatgcatctccagcaagaacaccttcagctggagcatctccagcccaggcatctccagctgggacacctccaggccgggcatctccagcccaggcatctccagcccaggcatctccagctgggacacctccgggccgggcatctccagcccaggcatctccagctggtacacctccaggccgggcatctccaggccgggcatctccagcccaggcatctccagcccaggcatctccagcccgggcatctccggctctggcatcactttccaggtcctcatccggcaggtcatcatccgccaggtcagcctcggtgacaacctccccaaccagagtgtaccttgttagagcaacaccagtgggggctgtacccatccgatcatctcctgccaggtcagcaccagcaaccagggccaccagggagagcccaggtacgagcctgcccaagttcacctggcgggagggccagaagcagctaccgctcatcgggtgcgtgctcctcctcattgccctggtggtttcgctcatcatcctcttccagttctggcagggccacacagggatcaggtacaaggagcagagggagagctgtcccaagcacgctgttcgctgtgacggggtggtggactgcaagctgaagagtgacgagctgggctgcgtgaggtttgactgggacaagtctctgcttaaaatctactctgggtcctcccatcagtggcttcccatctgtagcagcaactggaatgactcctactcagagaagacctgccagcagctgggtttcgagagtgctcaccggacaaccgaggttgcccacagggattttgccaacagcttctcaatcttgagatacaactccaccatccaggaaagcctccacaggtctgaatgcccttcccagcggtatatctctctccagtgttcccactgcggactgagggccatgaccgggcggatcgtgggaggggcgctggcctcggatagcaagtggccttggcaagtgagtctgcacttcggcaccacccacatctgtggaggcacgctcattgacgcccagtgggtgctcactgccgcccactgcttcttcgtgacccgggagaaggtcctggagggctggaaggtgtacgcgggcaccagcaacctgcaccagttgcctgaggcagcctccattgccgagatcatcatcaacagcaattacaccgatgaggaggacgactatgacatcgccctcatgcggctgtccaagcccctgaccctgtccgctcacatccaccctgcttgcctccccatgcatggacagacctttagcctcaatgagacctgctggatcacaggctttggcaagaccagggagacagatgacaagacatcccccttcctccgggaggtgcaggtcaatctcatcgacttcaagaaatgcaatgactacttggtctatgacagttaccttaccccaaggatgatgtgtgctggggaccttcgtgggggcagagactcctgccagggagacagcggggggcctcttgtctgtgagcagaacaaccgctggtacctggcaggtgtcaccagctggggcacaggctgtggccagagaaacaaacctggtgtgtacaccaaagtgacagaagttcttccctggatttacagcaagatggagagctcagcgggttgaaaaagggtggacctacaggccaggcaggcagttgctgggcagatgttctcccagaagtatttttttgtgtaaggttgcaatggactttgaaaacgtttcagtttctgcagaggattttgtgatagtttttgttatcaagcatttatgcatgggaatccgctcttcatggcctttcccagctctgtttgttttagtctttttgattttctttttgttgttgttgttgtctttttttaaaaacacaagtgactccattttaactctgacaactttcacagctgtcaccagaatgctccctgagaactaccattctttccctttcccacttaaaatatttcatcagaacctcactactatcataaaagagtataaagtaataaaataataaaaagtta

SEQ ID NO: 32318 - DNA, 1689 bp, Homo sapiens
  source 1..1689: mol_type = unassigned DNA
cactcctggaatacacagagagaggcagcagcttgctcagcggacaaggatgctgggcgtgagggaccaaggcctgccctgcactcgggcctcctccagccagtgctgaccagggacttctgacctgctggccagccaggacctgtgtggggaggccctcctgctgccttggggtgacaatctcagctccaggctacagggagaccgggaggatcacagagccagcatggatcctgacagtgatcaacctctgaacagcctcgtcaaggtgattctggataaatactacttcctctgcgggcagcctctccacttcatcccgaggaagcagctgtgtgacggagagctggactgtcccttgggggaggacgaggagcactgtgtcaagagcttccccgaagggcctgcagtggcagtccgcctctccaaggaccgatccacactgcaggtgctggactcggccacagggaactggttctctgcctgtttcgacaacttcacagaagctctcgctgagacagcctgtaggcagatgggctacagcagcaaacccactttcagagctgtggagattggcccagaccaggatctggatgttgttgaaatcacagaaaacagccaggagcttcgcatgcggaactcaagtgggccctgtctctcaggctccctggtctccctgcactgtcttgcctgtgggaagagcctgaagaccccccgtgtggtgggtgtggaggaggcctctgtggattcttggccttggcaggtcagcatccagtacgacaaacagcacgtctgtggagggagcatcctggacccccactgggtcctcacggcagcccactgcttcaggaaacataccgatgtgttcaactggaaggtgcgggcaggctcagacaaactgggcagcttcccatccctggctgtggccaagatcatcatcattgaattcaaccccatgtaccccaaagacaatgacatcgccctcatgaagctgcagttcccactcactttctcaggcacagtcaggcccatctgtctgcccttctttgatgaggagctcactccagccaccccactctggatcattggatggggctttacgaagcagaatggagggaagatgtctgacatactgctgcaggcgtcagtccaggtcattgacagcacacggtgcaatgcagacgatgcgtaccagggggaagtcaccgagaagatgatgtgtgcaggcatcccggaagggggtgtggacacctgccagggtgacagtggtgggcccctgatgtaccaatctgaccagtggcatgtggtgggcatcgttagttggggctatggctgcgggggcccgagcaccccaggagtatacaccaaggtctcagcctatctcaactggatctacaatgtctggaaggctgagctgtaatgctgctgcccctttgcagtgctgggagccgcttccttcctgccctgcccacctggggatcccccaaagtcagacacagagcaagagtccccttgggtacacccctctgcccacagcctcagcatttcttggagcagcaaagggcctcaattcctataagagaccctcgcagcccagaggcgcccagaggaagtcagcagccctagctcggccacacttggtgctcccagcatcccagggagagacacagcccactgaacaaggtctca

SEQ ID NO: 32319 - DNA, 3054 bp, Homo sapiens
  source 1..3054: mol_type = unassigned DNA
ctgagggagaaggaaagggaccaagagtaggacattgtcaaacatggttttagtctcattttttacaaagaacatgtattaatatgttgtttgtctaattgaaaatgtttatttcttctctttttttcattctgataaatgtctgtcaatgttttatcacattaagtcatttggggaaacatatagttttatattaatttatttgcctgtactctcagaagtgggtatttaaaaaaactattatgtattagtaaattcactatgcttctgtaagatacctgctgttcaacatgaatttatggaatatttcttgagttatatttttattatgtatttagattttaagatctgtttgtttttatctagagcttttatgtgacagtttctttaaaatacttatatacctaccataatcttctttaaattcttaattctagtacattcctaaggtatttctcattctaatctttgtaaccagtttctcctcctttaacaaaattagtccatactaaaaaaatattgctttcttgttgggactatcctgtctctggctttcttcaaggccttctatgggttgaaacttctctgttcagacttgtcaaactagtttcatttcaactacttgtaatttgtttccttatttctttgagccgtagacttctaatacatctagagatgtcatatagttgattagaaagttgagttcagtgggtgcagacctgcaagatcatattcttcctcctgtacatgatgtatcggacagtgggatttggcacccgaagcagaaatctgaagccatggatgattgccgttctcattgtgttgtccctgacagtggtggcagtgaccataggtctcctggttcacttcctagtatttgaccaaaaaaaggagtactatcatggctcctttaaaattttagatccacaaatcaataacaatttcggacaaagcaacacatatcaacttaaggacttacgagagacgaccgaaaatttggtgagtcaggtggatgagatatttatagattcagcctggaagaaaaattatatcaagaaccaagtagtcagactgactccagaggaagatggtgtgaaagtagatgtcattatggtgttccagttcccctctactgaacaaagggcagtaagagagaagaaaatccaaagcatcttaaatcagaagataaggaatttaagagccttgccaataaatgcctcatcagttcaagttaatgcaatgagctcatcaacaggggagttaactgtccaagcaagttgtggtaaacgagttgttccattaaacgtcaacagaatagcatctggagtcattgcacccaaggcggcctggccttggcaagcttcccttcagtatgataacatccatcagtgtggggccaccttgattagtaacacatggcttgtcactgcagcacactgcttccagaagtataaaaatccacatcaatggactgttagttttggaacaaaaatcaaccctcccttaatgaaaagaaatgtcagaagatttattatccatgagaagtaccgctctgcagcaagagagtacgacattgctgttgtgcaggtctcttccagagtcaccttttcggatgacatacgccagatttgtttgccagaagcctctgcatccttccaaccaaatttgactgtccacatcacaggatttggagcactttactatggtggggaatcccaaaatgatctccgagaagccagagtgaaaatcataagtgatgatgtctgcaagcaaccacaggtgtatggcaatgatataaaacctggaatgttctgtgccggatatatggaaggaatttatgatgcctgcaggggtgattctgggggacctttagtcacaagggatctgaaagatacgtggtatctcattggaattgtaagctggggagataactgtggtcaaaaggacaagcctggagtctacacacaagtgacttattaccgaaactggattgcttcaaaaacaggcatctaattcacgataaaagttaaacaaagaaagctgtatgcaggtcatatatgcatgagaattcaactatttagtgggtgtagtacaacaaagtgatattaaattactggatctagtaacatgaaacacacaacgtaagttatttagaatcactttaatcaaccaataatccttagccaatttataagggacttttatttgtaaagtaatggatctggcttgaaaaatacggtagagatacttagctctttaaatcacgaatgttgaagtaccagtgagactcaatacatatttttgaagatagtccatgggatttttagaatgtcgttgtcaagggtctccttttaactgagaaactttttgaactcacaaagtgttcaagaaacccttgtataattccctacatttctctcgagctcacaaatacttttttttctttttccttattcaatcagattttccaaagtacctttccaccataagaaatgaattttctacttctacacccatttgagagacaccaataaaagaaagtcatatgtaggaaacaaagtctgatagtaaaacaagccagagatcttctaactttttttagttataaaacctctaatttttggtgacttttctacacacacacacacatacagtcacatagatattcttatcctacagatataatcagaaaaatcccgattaatgaattatatatagatagatagagtgattagttaatcaaaactatatatttgttaaaaatttgggagaaggtgatggtaatttcattagtcccaaaacaccggcataagaaatttgacatttcacagatgcacttacatattttgaccacaagggggaaattttgtgcattattattgtagggttaaatgcctgaaaaaaataagcatttactaataccttgaaaaatcaaagaacattatgttcctccgtagcaagaaaaattttatgccctcgcattgctacagccaaatagcttataaggcttatggcaatgtcccaactattgcaatcataaaaccctagttttag

SEQ ID NO: 32320 - DNA, 2419 bp, Homo sapiens
  source 1..2419: mol_type = unassigned DNA
aatttgtttccttatttctttgagccgtagacttctaatacatctagagatgtcatatagttgattagaaagttgagttcagtgggtgcagacctgcaagatcatattcttcctcctgtacatgatgtatcggacagtgggatttggcacccgaagcagaaatctgaagccatggatgattgccgttctcattgtgttgtccctgacagtggtggcagtgaccataggtctcctggttcacttcctagtatttgaccaaaaaaaggagtactatcatggctcctttaaaattttagatccacaaatcaataacaatttcggacaaagcaacacatatcaacttaaggacttacgagagacgaccgaaaatttggtggatgagatatttatagattcagcctggaagaaaaattatatcaagaaccaagtagtcagactgactccagaggaagatggtgtgaaagtagatgtcattatggtgttccagttcccctctactgaacaaagggcagtaagagagaagaaaatccaaagcatcttaaatcagaagataaggaatttaagagccttgccaataaatgcctcatcagttcaagttaatgcaatgagctcatcaacaggggagttaactgtccaagcaagttgtggtaaacgagttgttccattaaacgtcaacagaatagcatctggagtcattgcacccaaggcggcctggccttggcaagcttcccttcagtatgataacatccatcagtgtggggccaccttgattagtaacacatggcttgtcactgcagcacactgcttccagaagtataaaaatccacatcaatggactgttagttttggaacaaaaatcaaccctcccttaatgaaaagaaatgtcagaagatttattatccatgagaagtaccgctctgcagcaagagagtacgacattgctgttgtgcaggtctcttccagagtcaccttttcggatgacatacgccagatttgtttgccagaagcctctgcatccttccaaccaaatttgactgtccacatcacaggatttggagcactttactatggtggggaatcccaaaatgatctccgagaagccagagtgaaaatcataagtgatgatgtctgcaagcaaccacaggtgtatggcaatgatataaaacctggaatgttctgtgccggatatatggaaggaatttatgatgcctgcaggggtgattctgggggacctttagtcacaagggatctgaaagatacgtggtatctcattggaattgtaagctggggagataactgtggtcaaaaggacaagcctggagtctacacacaagtgacttattaccgaaactggattgcttcaaaaacaggcatctaattcacgataaaagttaaacaaagaaagctgtatgcaggtcatatatgcatgagaattcaactatttagtgggtgtagtacaacaaagtgatattaaattactggatctagtaacatgaaacacacaacgtaagttatttagaatcactttaatcaaccaataatccttagccaatttataagggacttttatttgtaaagtaatggatctggcttgaaaaatacggtagagatacttagctctttaaatcacgaatgttgaagtaccagtgagactcaatacatatttttgaagatagtccatgggatttttagaatgtcgttgtcaagggtctccttttaactgagaaactttttgaactcacaaagtgttcaagaaacccttgtataattccctacatttctctcgagctcacaaatacttttttttctttttccttattcaatcagattttccaaagtacctttccaccataagaaatgaattttctacttctacacccatttgagagacaccaataaaagaaagtcatatgtaggaaacaaagtctgatagtaaaacaagccagagatcttctaactttttttagttataaaacctctaatttttggtgacttttctacacacacacacacatacagtcacatagatattcttatcctacagatataatcagaaaaatcccgattaatgaattatatatagatagatagagtgattagttaatcaaaactatatatttgttaaaaatttgggagaaggtgatggtaatttcattagtcccaaaacaccggcataagaaatttgacatttcacagatgcacttacatattttgaccacaagggggaaattttgtgcattattattgtagggttaaatgcctgaaaaaaataagcatttactaataccttgaaaaatcaaagaacattatgttcctccgtagcaagaaaaattttatgccctcgcattgctacagccaaatagcttataaggcttatggcaatgtcccaactattgcaatcataaaaccctagttttag

SEQ ID NO: 32321 - DNA, 3247 bp, Homo sapiens
  source 1..3247: mol_type = unassigned DNA
cagacctgcaagatcatattcttcctcctgtacatgatgtatcggacagtgggatttggcacccgaagcagaaatctgaagccatggatgattgccgttctcattgtgttgtccctgacagtggtggcagtgaccataggtctcctggttcacttcctagtatttgaccaaaaaaaggagtactatcatggctcctttaaaattttagatccacaaatcaataacaatttcggacaaagcaacacatatcaacttaaggacttacgagagacgaccgaaaatttggtggatgagatatttatagattcagcctggaagaaaaattatatcaagaaccaagtagtcagactgactccagaggaagatggtgtgaaagtagatgtcattatggtgttccagttcccctctactgaacaaagggcagtaagagagaagaaaatccaaagcatcttaaatcagaagataaggaatttaagagccttgccaataaatgcctcatcagttcaagttaatgcaatgagctcatcaacaggggagttaactgtccaagcaagttgtggtaaacgagttgttccattaaacgtcaacagaatagcatctggagtcattgcacccaaggcggcctggccttggcaagcttcccttcagtatgataacatccatcagtgtggggccaccttgattagtaacacatggcttgtcactgcagcacactgcttccagaagtataaaaatccacatcaatggactgttagttttggaacaaaaatcaaccctcccttaatgaaaagaaatgtcagaagatttattatccatgagaagtaccgctctgcagcaagagagtacgacattgctgttgtgcaggtctcttccagagtcaccttttcggatgacatacgccagatttgtttgccagaagcctctgcatccttccaaccaaatttgactgtccacatcacaggatttggagcactttactatggtggggaatcccaaaatgatctccgagaagccagagtgaaaatcataagtgatgatgtctgcaagcaaccacaggtgtatggcaatgatataaaacctggaatgttctgtgccggatatatggaaggaatttatgatgcctgcaggggtgattctgggggacctttagtcacaagggatctgaaagatacgtggtatctcattggaattgtaagctggggagataactgtggtcaaaaggacaagcctggagtctacacacaagtgacttattaccgaaactggattgcttcaaaaacaggcatctaattcacgataaaagttaaacaaagaaagctgtatgcaggtcatatatgcatgagaattcaactatttagtgggtgtagtacaacaaagtgatattaaattactggatctagtaacatgaaacacacaacgtaagttatttagaatcactttaatcaaccaataatccttagccaatttataagggacttttatttgtaaagtaatggatctggcttgaaaaatacggtagagatacttagctctttaaatcacgaatgttgaagtaccagtgagactcaatacatatttttgaagatagtccatgggatttttagaatgtcgttgtcaagggtctccttttaactgagaaactttttgaactcacaaagtgttcaagaaacccttgtataattccctacatttctctcgagctcacaaatacttttttttctttttccttattcaatcagattttccaaagtacctttccaccataagaaatgaattttctacttctacacccatttgagagacaccaataaaagaaagtcatatgtaggaaacaaagtctgatagtaaaacaagccagagatcttctaactttttttagttataaaacctctaatttttggtgacttttctacacacacacacacatacagtcacatagatattcttatcctacagatataatcagaaaaatcccgattaatgaattatatatagatagatagagtgattagttaatcaaaactatatatttgttaaaaatttgggagaaggtgatggtaatttcattagtcccaaaacaccggcataagaaatttgacatttcacagatgcacttacatattttgaccacaagggggaaattttgtgcattattattgtagggttaaatgcctgaaaaaaataagcatttactaataccttgaaaaatcaaagaacattatgttcctccgtagcaagaaaaattttatgccctcgcattgctacagccaaatagcttataaggcttatggcaatgtcccaactattgcaatcataaaaccctagttttagaaaaatttgaaaataaatataaaatttgagcacctactgcatataacacatggggctataacatataacatatagtatgttttctcttttggaccactttgttatatgtggtccacaagagaaaacatactccatcagcaacgtgtctcctgaagtcattaggagagtaaggctcatgtatttcgtaatacaattaaattaaggctttatggaagcaattattctgcttggcaatgcctgtgaaatattatggtctgcaggctggggagtcatttactcatttagcccaaatataagacaaatcattggaacgatgaacttgctttataataatttccctcacatgctattgagaaggcatgaaaataatcctaaaatatctaaaagagatatgcagttcactcataaaacacttgattcataatttagactcatagaattttaaagctgagaagagattgcatgtcacataggccaatatacttatgttatgtttaagaatatgagtatattcttaactatttttattgaattcttaactatttttattgaatcatcagatctgtaaaattttaagtgagagctattgaacctgtattaagatagaaaactcttaagataagaattttaaatgacgagattcatttaggcagctggctgccaattctctgaattcacttcaagacaaagtttcttcttcatatataaatatacataggcatataaattattctatattatggtggtaaaacttaatgctgactttggatgttcagattcaggaaatgatcttagaattatgaactttgtatttttaaactatttggtgcagcatttcattttgggtcacatgtaagcagatattgatatgtcatttttaatctaataaagttggtgatcagagcattctacaaac

SEQ ID NO: 32322 - DNA, 3266 bp, Homo sapiens
  source 1..3266: mol_type = unassigned DNA
tgagaagccagggaccaagatggatcttctcctcgacatcagctaagcctggaggactcttcccctcagagaccatggagagggacagccacgggaatgcatctccagcaagaacaccttcagctggagcatctccagcccaggcatctccagctgggacacctccaggccgggcatctccagcccaggcatctccagcccaggcatctccagctgggacacctccgggccgggcatctccagcccaggcatctccagctggtacacctccaggccgggcatctccaggccgggcatctccactccaggcatctccagcccgggcatctccggctctggcatcactttccaggtcctcatccggcaggtcatcatccgccaggtcagcctcggtgacaacctccccaaccagagtgtaccttgttagagcaacaccagtgggggctgtacccatccgatcatctcctgccaggtcagcaccagcaaccagggccaccagggagagcccaggtacgagcctgcccaagttcacctggcgggagggccagaagcagctaccgctcatcgggtgcgtgctcctcctcattgccctggtggtttcgctcatcatcctcttccagttctggcagggccacacagggatcaggtacaaggagcagagggagagctgtcccaagcacgctgttcgctgtgacggggtggtggactgcaagctgaagagtgacgagctgggctgcgtgaggtttgactgggacaagtctctgcttaaaatctactctgggtcctcccatcagtggcttcccatctgtagcagcaactggaatgactcctactcagagaagacctgccagcagctgggtttcgagagtgctcaccggacaaccgaggttgcccacagggattttgccaacagcttctcaatcttgagatacaactccaccatccaggaaagcctccacaggtctgaatgcccttcccagcggtatatctctctccagtgttcccactgcggactgagggccatgaccgggcggatcgtgggaggggcgctggcctcggatagcaagtggccttggcaagtgagtctgcacttcggcaccacccacatctgtggaggcacgctcattgacgcccagtgggtgctcactgccgcccactgcttcttcgtgacccgggagaaggtcctggagggctggaaggtgtacgcgggcaccagcaacctgcaccagttgcctgaggcagcctccattgccgagatcatcatcaacagcaattacaccgatgaggaggacgactatgacatcgccctcatgcggctgtccaagcccctgaccctgtccgctcacatccaccctgcttgcctccccatgcatggacagacctttagcctcaatgagacctgctggatcacaggctttggcaagaccagggagacagatgacaagacatcccccttcctccgggaggtgcaggtcaatctcatcgacttcaagaaatgcaatgactacttggtctatgacagttaccttaccccaaggatgatgtgtgctggggaccttcgtgggggcagagactcctgccagggagacagcggggggcctcttgtctgtgagcagaacaaccgctggtacctggcaggtgtcaccagctggggcacaggctgtggccagagaaacaaacctggtgtgtacaccaaagtgacagaagttcttccctggatttacagcaagatggagagcgaggtgcgattcagaaaatcctaaccagctggcctgctgctctgcacagcaccggctgctgtgaagactctggccatggtgactggccatgtgtggcatcatctgggctaatggccaccgggcaccatcggactcccacctccactgtctgctgcctctgtgtgtgtgtgtgtgtgtgtgtgtgtgtgtgcatatgtgtgcattgccactctcccaagtttttcagaaaccagcagagctgtcaactcttctcaaaatcccaggctggaaattacctggagacaagagttgagtaccgtggatgttcctacaggagtgtccatagatggatggaggaggtggagcccagagcccaaggaagagctgggaattcttgcttctctgaccctcacttacagactagcccagtgtgggcagatgccagcggcccaggtggcgccattgctgtcctgggatggatcgtgggttttggtggatgcagcttcccagggcctggaccgtcttcggtgaaaagctgctcccgttggctttatgagcatcaagtcctcacccagaccccctgctggtgccgtggatgtcaccagtcggactgtgctgtggctaaccaggctgacaactgagatgaggattcactgtactcatttggtcacaagctgctggggcgggttttattttattttatttttatatttaagaaatgaaaatacgggtatttttaaagattctccaaaaagtccagaagccttgacagctggcatcaatcagcccaagacccccaggggattcatgggaaatgtcgtattttagagtcctacagaatatttctggcctcaaggaactggatgaagagactggacaaagtccccaggatgggcatcccccaagtcactacagcatctggagcccctaggagatactcagggaagcaaatccttgtttgggctggcaagcaaatccgacacgacgaggtccacaaactgtttctgcatcccagggctctgacgaaggcgttaagaaacagatgctgttcccgcgtaggctcccaggggccccagggaggtccaggtggactgcctctctcattcccagtagctgtcctgggactttgggatttcttctcagctttctccacctttcagtttctcagttgtttcagaaacatagcaatgacataaaaactgctatggagagaaagctaacatggtcccatgccttccaggcagccctgctgaaggatctaagttggccctgttcctgcaaatcatcaacgtgcctggactcgccagctaaaagcctgggccttccccagccttttttctggggcacctattcctctgccagtcctgctcccctcaccttccttgggcccgtcagagtcttttgtggtgctgtgcttctcagaggcaggatccaagcagatcagcccagcctagcccagctcaggcaggccatggccgctcaagggaaagactgccccagaagagcaagctggagaggctgggcaggggctgatggggctgggtacac

SEQ ID NO: 32323 - DNA, 2361 bp, Homo sapiens
  source 1..2361: mol_type = unassigned DNA
tgagaagccagggaccaagatggatcttctcctcgacatcagctaagcctggaggactcttcccctcagagaccatggagagggacagccacgggaatgcatctccagcaagaacaccttcagctggagcatctccagcccaggcatctccagctgggacacctccaggccgggcatctccagcccaggcatctccagcccaggcatctccagctgggacacctccgggccgggcatctccagcccaggcatctccagctggtacacctccaggccgggcatctccaggccgggcatctccagcccaggcatctccagcccaggcatctccagcccgggcatctccggctctggcatcactttccaggtcctcatccggcaggtcatcatccgccaggtcagcctcggtgacaacctccccaaccagagtgtaccttgttagagcaacaccagtgggggctgtacccatccgatcatctcctgccaggtcagcaccagcaaccagggccaccagggagagcccaggtacgagcctgcccaagttcacctggcgggagggccagaagcagctaccgctcatcgggtgcgtgctcctcctcattgccctggtggtttcgctcatcatcctcttccagttctggcagggccacacagggatcaggtacaaggagcagagggagagctgtcccaagcacgctgttcgctgtgacggggtggtggactgcaagctgaagagtgacgagctgggctgcgtgaggtttgactgggacaagtctctgcttaaaatctactctgggtcctcccatcagtggcttcccatctgtagcagcaactggaatgactcctactcagagaagacctgccagcagctgggtttcgagagtgctcaccggacaaccgaggttgcccacagggattttgccaacagcttctcaatcttgagatacaactccaccatccaggaaagcctccacaggtctgaatgcccttcccagcggtatatctctctccagtgttcccactgcggactgagggccatgaccgggcggatcgtgggaggggcgctggcctcggatagcaagtggccttggcaagtgagtctgcacttcggcaccacccacatctgtggaggcacgctcattgacgcccagtgggtgctcactgccgcccactgcttcttcgtgacccgggagaaggtcctggagggctggaaggtgtacgcgggcaccagcaacctgcaccagttgcctgaggcagcctccattgccgagatcatcatcaacagcaattacaccgatgaggaggacgactatgacatcgccctcatgcggctgtccaagcccctgaccctgtccgctcacatccaccctgcttgcctccccatgcatggacagacctttagcctcaatgagacctgctggatcacaggctttggcaagaccagggagacagatgacaagacatcccccttcctccgggaggtgcaggtcaatctcatcgacttcaagaaatgcaatgactacttggtctatgacagttaccttaccccaaggatgatgtgtgctggggaccttcgtgggggcagagactcctgccagggagacagcggggggcctcttgtctgtgagcagaacaaccgctggtacctggcaggtgtcaccagctggggcacaggctgtggccagagaaacaaacctggtgtgtacaccaaagtgacagaagttcttccctggatttacagcaagatggaggtaagatccctgcagcaggacactgcacccagcaggctgggaacttcctcaggtggggaccctggaggagcacccaggttgtaggcagaggtcccctcagcgtccccatattcggggggtgttctggacagggtcaaatgtgatgcctggggtcaatcccagctgtctgtgtttctttccctgcttttcttccctcagaacagagctcagcgggttgaaaaagggtggacctacaggccaggcaggcagttgctgggcagatgttctcccagaagtatttttttgtgtaaggttgcaatggactttgaaaacgtttcagtttctgcagaggattttgtgatagtttttgttatcaagcatttatgcatgggaatccgctcttcatggcctttcccagctctgtttgttttagtctttttgattttctttttgttgttgttgttgtctttttttaaaaacacaagtgactccattttaactctgacaactttcacagctgtcaccagaatgctccctgagaactaccattctttccctttcccacttaaaatatttcatcagaacctcactactatcataaaagagtataaagtaataaaataataaaaag

SEQ ID NO: 32324 - DNA, 1950 bp, Homo sapiens
  source 1..1950: mol_type = unassigned DNA
aagatggatcttctcctcgacatcagctaagcctggaggactcttcccctcagagaccatggagagggacagccacgggaatgcatctccagcaagaacaccttcagctggagcatctccagcccaggcatctccagctgggacacctccaggccgggcatctccagcccaggcatctccagcccaggcatctccagctgggacacctccgggccgggcatctccagcccaggcatctccagctggtacacctccaggccgggcatctccaggccgggcatctccagcccaggcatctccagcccaggcatctccagcccgggcatctccggctctggcatcactttccaggtcctcatccggcaggtcatcatccgccaggtcagcctcggtgacaacctccccaaccagagtgtaccttgttagagcaacaccagtgggggctgtacccatccgatcatctcctgccaggtcagcaccagcaaccagggccaccagggagagcccaggtacgagcctgcccaagttcacctggcgggagggccagaagcagctaccgctcatcgggtgcgtgctcctcctcattgccctggtggtttcgctcatcatcctcttccagttctggcagggccacacagggatcaggtacaaggagcagagggagagctgtcccaagcacgctgttcgctgtgacggggtggtggactgcaagctgaagagtgacgagctgggctgcgtgaggtttgactgggacaagtctctgcttaaaatctactctgggtcctcccatcagtggcttcccatctgtagcagcaactggaatgactcctactcagagaagacctgccagcagctgggtttcgagagtgctcaccggacaaccgaggttgcccacagggattttgccaacagcttctcaatcttgagatacaactccaccatccaggaaagcctccacaggtctgaatgcccttcccagcggtatatctctctccagtgttcccactgcggactgagggccatgaccgggcggatcgtgggaggggcgctggcctcggatagcaagtggccttggcaagtgagtctgcacttcggcaccacccacatctgtggaggcacgctcattgacgcccagtgggtgctcactgccgcccactgcttcttcgtgacccgggagaaggtcctggagggctggaaggtgtacgcgggcaccagcaacctgcaccagttgcctgaggcagcctccattgccgagatcatcatcaacagcaattacaccgatgaggaggacgactatgacatcgccctcatgcggctgtccaagcccctgaccctgtccgctcacatccaccctgcttgcctccccatgcatggacagacctttagcctcaatgagacctgctggatcacaggctttggcaagaccagggagacagatgacaagacatcccccttcctccgggaggtgcaggtcaatctcatcgacttcaagaaatgcaatgactacttggtctatgacagttaccttaccccaaggatgatgtgtgctggggaccttcgtgggggcagagactcctgccagggagacagcggggggcctcttgtctgtgagcagaacaaccgctggtacctggcaggtgtcaccagctggggcacaggctgtggccagagaaacaaacctggtgtgtacaccaaagtgacagaagttcttccctggatttacagcaagatggagagcgaggtgcgattcagaaaatcctaaccagctggcctgctgctctgcacagcaccggctgctgtgaagactctggccatggtgactggccatgtgtggcatcatctgggctaatggccaccgggcaccatcggactcccacctccactgtctgctgcctctgtgtgtgtgtgtgtgtgtgtgtgtgtgtgtgcatatgtgtgcattgccactct

SEQ ID NO: 32325 - DNA, 2592 bp, Homo sapiens
  source 1..2592: mol_type = unassigned DNA
cacacgtcccaaccggcttccccgccccatttggtgggggctggcccttggccctccaactcctttaccctacatgcctgagaagccagggaccaagatggatcttctcctcgacatcagctaagcctggaggactcttcccctcagagaccatggagagggacagccacgggaatgcatctccagcaagaacaccttcagctggagcatctccagcccaggcatctccagctgggacacctccaggccgggcatctccagcccaggcatctccagcccaggcatctccagctgggacacctccgggccgggcatctccagcccaggcatctccagctggtacacctccaggccgggcatctccaggccgggcatctccagcccaggcatctccagcccaggcatctccagcccgggcatctccggctctggcatcactttccaggtcctcatccggcaggtcatcatccgccaggtcagcctcggtgacaacctccccaaccagagtgtaccttgttagagcaacaccagtgggggctgtacccatccgatcatctcctgccaggtcagcaccagcaaccagggccaccagggagagcccaggtacgagcctgcccaagttcacctggcgggagggccagaagcagctaccgctcatcgggtgcgtgctcctcctcattgccctggtggtttcgctcatcatcctcttccagttctggcagggccacacagggatcaggtacaaggagcagagggagagctgtcccaagcacgctgttcgctgtgacggggtggtggactgcaagctgaagagtgacgagctgggctgcgtgaggtttgactgggacaagtctctgcttaaaatctactctgggtcctcccatcagtggcttcccatctgtagcagcaactggaatgactcctactcagagaagacctgccagcagctgggtttcgagagtgctcaccggacaaccgaggttgcccacagggattttgccaacagcttctcaatcttgagatacaactccaccatccaggaaagcctccacaggtctgaatgcccttcccagcggtatatctctctccagtgttcccactgcggactgagggccatgaccgggcggatcgtgggaggggcgctggcctcggatagcaagtggccttggcaagtgagtctgcacttcggcaccacccacatctgtggaggcacgctcattgacgcccagtgggtgctcactgccgcccactgcttcttcgtgacccgggagaaggtcctggagggctggaaggtgtacgcgggcaccagcaacctgcaccagttgcctgaggcagcctccattgccgagatcatcatcaacagcaattacaccgatgaggaggacgactatgacatcgccctcatgcggctgtccaagcccctgaccctgtccggtgagggaatctgcactccccgctctcctgccccccagccccagcaccctctgcagccctcgcacttgtcagcatctgtcaactcatatccgggccccaaagcttctgcagggcagaagtcaaagactcttaaagatccttacatggaacacttctgttttataattagggaaactgaagcccaagggttataaataagtttgctccaaatgacacatctcacattacaaattgatgacggagtcagggcttgggtactgatcttaatcaatagattgaattctttcactggtattaactgagcacctaggggccaaacgctatggtaggcatttcacacatatgatttcatttactcttcacaaccaaccctgtggagcaggcactattattaacttcatttgacatatgaggaaatggagctttacagagagataattacctgaggccacaagtaataggtggtagctctgggattggaaccaggtcgatctgattcccaagcagtgctctccccacctggctctagactggcaaattgcttaccctgcagtcgagaacttaagctgagtacacattcaaacaactaattgctacaacgttgttgctaaggaccaaaggaggctacacaaaggaaatgctgcagaggttctcagaagatcactgtggacaggggacgtcaaagaagacttcattcattcattcattcattcactcatcattcatccattcactcatttgttcacttatcaaatactatatggccagccctatagtacagttgcaaatagaaataaaatacaccaagacgaccagtagaggccaattatacgatgttttcggggagcagggagctatggtggcataggcgggagcaactaatcatcctggcaggctaggggaagctcagcagaggaaggatagccaaggtgggtcccgaaaagattggagaagacaggtaatgggggctcagggaggaccctgaagaatggagccagagccctctggcataagcatctgtaaaggtgggagagggaggaggagtaccgggatttctggaagcctcggaggactctctggttagtccagccattctcgtgctctgagcctgtgagctggtgtttcctcgcacattaattatggaggcggtgtctatca

SEQ ID NO: 32326 - DNA, 3269 bp, Homo sapiens
  source 1..3269: mol_type = unassigned DNA
tgagaagccagggaccaagatggatcttctcctcgacatcagctaagcctggaggactcttcccctcagagaccatggagagggacagccacgggaatgcatctccagcaagaacaccttcagctggagcatctccagcccaggcatctccagctgggacacctccaggccgggcatctccagcccaggcatctccagcccaggcatctccagctgggacacctccgggccgggcatctccagcccaggcatctccagctggtacacctccaggccgggcatctccaggccgggcatctccagcccaggcatctccagcccaggcatctccagcccgggcatctccggctctggcatcactttccaggtcctcatccggcaggtcatcatccgccaggtcagcctcggtgacaacctccccaaccagagtgtaccttgttagagcaacaccagtgggggctgtacccatccgatcatctcctgccaggtcagcaccagcaaccagggccaccagggagagcccagtccagttctggcagggccacacagggatcaggtacaaggagcagagggagagctgtcccaagcacgctgttcgctgtgacggggtggtggactgcaagctgaagagtgacgagctgggctgcgtgaggtttgactgggacaagtctctgcttaaaatctactctgggtcctcccatcagtggcttcccatctgtagcagcaactggaatgactcctactcagagaagacctgccagcagctgggtttcgagagtgctcaccggacaaccgaggttgcccacagggattttgccaacagcttctcaatcttgagatacaactccaccatccaggaaagcctccacaggtctgaatgcccttcccagcggtatatctctctccagtgttcccactgcggactgagggccatgaccgggcggatcgtgggaggggcgctggcctcggatagcaagtggccttggcaagtgagtctgcacttcggcaccacccacatctgtggaggcacgctcattgacgcccagtgggtgctcactgccgcccactgcttcttcgtgacccgggagaaggtcctggagggctggaaggtgtacgcgggcaccagcaacctgcaccagttgcctgaggcagcctccattgccgagatcatcatcaacagcaattacaccgatgaggaggacgactatgacatcgccctcatgcggctgtccaagcccctgaccctgtccgctcacatccaccctgcttgcctccccatgcatggacagacctttagcctcaatgagacctgctggatcacaggctttggcaagaccagggagacagatgacaagacatcccccttcctccgggaggtgcaggtcaatctcatcgacttcaagaaatgcaatgactacttggtctatgacagttaccttaccccaaggatgatgtgtgctggggaccttcgtgggggcagagactcctgccagggagacagcggggggcctcttgtctgtgagcagaacaaccgctggtacctggcaggtgtcaccagctggggcacaggctgtggccagagaaacaaacctggtgtgtacaccaaagtgacagaagttcttccctggatttacagcaagatggagagcgaggtgcgattcagaaaatcctaaccagctggcctgctgctctgcacagcaccggctgctgtgaagactctggccatggtgactggccatgtgtggcatcatctgggctaatggccaccgggcaccatcggactcccacctccactgtctgctgcctctgtgtgtgtgtgtgtgtgtgtgtgtgtgtgtgcatatgtgtgcattgccactctcccaagtttttcagaaaccagcagagctgtcaactcttctcaaaatcccaggctggaaattacctggagacaagagttgagtaccgtggatgttcctacaggagtgtccatagatggatggaggaggtggagcccagagcccaaggaagagctgggaattcttgcttctctgaccctcacttacagactagcccagtgtgggcagatgccagcggcccaggtggcgccattgctgtcctgggatggatcgtgggttttggtggatgcagcttcccagggcctggaccgtcttcggtgaaaagctgctcccgttggctttatgagcatcaagtcctcacccagaccccctgctggtgccgtggatgtcaccagtcggactgtgctgtggctaaccaggctgacaactgagatgaggattcactgtactcatttggtcacaagctgctggggcgggttttattttattttatttttatatttaagaaatgaaaatacgggtatttttaaagattctccaaaaagtccagaagccttgacagctggcatcaatcagcccaagacccccaggggattcatgggaaatgtcgtattttagagtcctacagaatatttctggcctcaaggaactggatgaagagactggacaaagtccccaggatgggcatcccccaagtcactacagcatctggagcccctaggagatactcagggaagcaaatccttgtttgggctggcaagcaaatccgacacgacgaggtccacaaactgtttctgcatcccagggctctgacgaaggcgttaagaaacagatgctgttcccgcgtaggctcccaggggccccagggaggtccaggtggactgcctctctcattcccagtagctgtcctgggactttgggatttcttctcagctttctccacctttcagtttctcagttgtttcagaaacatagcaatgacataaaaactgctatggagagaaagctaacatggtcccatgccttccaggcagccctgctgaaggatctaagttggccctgttcctgcaaatcatcaacgtgcctggactcgccagctaaaagcctgggccttccccagccttttttctggggcacctattcctctgccagtcctgctcccctcaccttccttgggcccgtcagagtcttttgtggtgctgtgcttctcagaggcaggatccaagcagatcagcccagcctagcccagctcaggcaggccatggccgctcaagggaaagactgccccagaagagcaagctggagaggctgggcaggggctgatggggctgggtacactggggaatgttagcaagactgggaaggaggccacattcctgtctgcagcagccgccagcgatggtcttcagcaataaaagttgtgtgacctga

SEQ ID NO: 32327 - DNA, 3193 bp, Homo sapiens
  source 1..3193: mol_type = unassigned DNA
ttctgcttttaatgatggcagctccagaaatggtgagtaaaatgggtgtgaggagagaagatgcttctcaacacttctcagtgttgtacagcttgccaaccacagcctgtttgggaggggatgttctcacccaggttccatctttcagaagccatttgcccacttattctttttatatggataaacgatgtaatttgctacatgctgataataaacagaggtatcagcaagaatgaaagccagaaaatggcccaacatgaacttcttgcttttctaagttactctttcaagctcttcttgcgatagaaatgaaatgaacatttttggcacagaactcttgtttagattttactatgatcttgggaaacacgggttgcttcaaatggcttactagatccctttggaatttcaaacgttacaacaggtagtcacaaagggaatgaaagcggatgatctgagtgtctgtgctgatgtgcctgctggagcccctgtggattttagcccttggaggaagcaggttcccagagcagccatgcctgatatctgggagagggaactagaatttaattgggaatcttctgctatttccctgcttcctccgccctctcagagttacagggaatgacttagaaaggtctctggtctccttggcattgtgataggtggaattctttcgtaggaaacacagccccggggttattttgatgcaagccgttggtccaaagccactccccactttgctatgtgggggaaggaccgggcaccggacggctcgggtactttcgttcttaattaggtcatgcccgtgtgagccaggaaagggctgtgtttatgggaagccagtaacactgtggcctactatctcttccgtggtgccatctacatttttgggactcgggaattatgaggtagaggtggaggcggagccggatgtcagaggtcctgaaatagtcaccatgggggaaaatgatccgcctgctgttgaagcccccttctcattccgatcgctttttggccttgatgatttgaaaataagtcctgttgcaccagatgcagatgctgttgctgcacagatcctgtcactgctgccattgaagttttttccaatcatcgtcattgggatcattgcattgatattagcactggccattggtctgggcatccacttcgactgctcagggaagtacagatgtcgctcatcctttaagtgtatcgagctgatagctcgatgtgacggagtctcggattgcaaagacggggaggacgagtaccgctgtgtccgggtgggtggtcagaatgccgtgctccaggtgttcacagctgcttcgtggaagaccatgtgctccgatgactggaagggtcactacgcaaatgttgcctgtgcccaactgggtttcccaagctatgtgagttcagataacctcagagtgagctcgctggaggggcagttccgggaggagtttgtgtccatcgatcacctcttgccagatgacaaggtgactgcattacaccactcagtatatgtgagggagggatgtgcctctggccacgtggttaccttgcagtgcacagcctgtggtcatagaaggggctacagctcacgcatcgtgggtggaaacatgtccttgctctcgcagtggccctggcaggccagccttcagttccagggctaccacctgtgcgggggctctgtcatcacgcccctgtggatcatcactgctgcacactgtgtttatgacttgtacctccccaagtcatggaccatccaggtgggtctagtttccctgttggacaatccagccccatcccacttggtggagaagattgtctaccacagcaagtacaagccaaagaggctgggcaatgacatcgcccttatgaagctggccgggccactcacgttcaatgaaatgatccagcctgtgtgcctgcccaactctgaagagaacttccccgatggaaaagtgtgctggacgtcaggatggggggccacagaggatggagcaggtgacgcctcccctgtcctgaaccacgcggccgtccctttgatttccaacaagatctgcaaccacagggacgtgtacggtggcatcatctccccctccatgctctgcgcgggctacctgacgggtggcgtggacagctgccagggggacagcggggggcccctggtgtgtcaagagaggaggctgtggaagttagtgggagcgaccagctttggcatcggctgcgcagaggtgaacaagcctggggtgtacacccgtgtcacctccttcctggactggatccacgagcagatggagagagacctaaaaacctgaagaggaaggggacaagtagccacctgagttcctgaggtgatgaagacagcccgatcctcccctggactcccgtgtaggaacctgcacacgagcagacacccttggagctctgagttccggcaccagtagcaggcccgaaagaggcacccttccatctgattccagcacaaccttcaagctgctttttgttttttgtttttttgagatggagtctcgctctgttgcccaggctggagtgcagtggcgaaatccctgctcactgcagcctccgcttccctggttcaagcgattctcttgcctcagcttccccagtagctgggaccacaggtgcccgccaccacacccaactaatttttgtatttttagtagagacagggtttcaccatgttggccaggctgctctcaaacccctgacctcaaatgatgtgcctgcttcagcctcccacagtgctgggattacaggcatgggccaccacgcctagcctcacgctcctttctgatcttcactaagaacaaaagaagcagcaacttgcaagggcggcctttcccactggtccatctggttttctctccaggggtcttgcaaaattcctgacgagataagcagttatgtgacctcacgtgcaaagccaccaacagccactcagaaaagacgcaccagcccagaagtgcagaactgcagtcactgcacgttttcatctctagggaccagaaccaaacccaccctttctacttccaagacttattttcacatgtggggaggttaatctaggaatgactcgtttaaggcctattttcatgatttctttgtagcatttggtgcttgacgtattattgtcctttgattccaaataatatgtttccttccctca

SEQ ID NO: 32328 - DNA, 3192 bp, Homo sapiens
  source 1..3192: mol_type = unassigned DNA
ttctgcttttaatgatggcagctccagaaatggtgagtaaaatgggtgtgaggagagaagatgcttctcaacacttctcagtgttgtacagcttgccaaccacagcctgtttgggaggggatgttctcacccaggttccatctttcagaagccatttgcccacttattctttttatatggataaacgatgtaatttgctacatgctgataataaacagaggtatcagcaagaatgaaagccagaaaatggcccaacatgaacttcttgcttttctaagttactctttcaagctcttcttgcgatagaaatgaaatgaacatttttggcacagaactcttgtttagattttactatgatcttgggaaacacgggttgcttcaaatggcttactagatccctttggaatttcaaacgttacaacaggtagtcacaaagggaatgaaagcggatgatctgagtgtctgtgctgatgtgcctgctggagcccctgtggattttagcccttggaggaagcaggttcccagagcagccatgcctgatatctgggagagggaactagaatttaattgggaatcttctgctatttccctgcttcctccgccctctcagagttacagggaatgacttagaaaggtctctggtctccttggcattgtgataggtggaattctttcgtaggaaacacagccccggggttattttgatgcaagccgttggtccaaagccactccccactttgctatgtgggggaaggaccgggcaccggacggctcgggtactttcgttcttaattaggtcatgcccgtgtgagccaggaaagggctgtgtttatgggaagccagtaacactgtggcctactatctcttccgtggtgccatctacatttttgggactcgggaattatgaggtagaggtggaggcggagccggatgtcagaggtcctgaaatagtcaccatgggggaaaatgatccgcctgctgttgaagcccccttctcattccgatcgctttttggccttgatgatttgaaaataagtcctgttgcaccagatgcagatgctgttgctgcacagatcctgtcactgctgccattgaagttttttccaatcatcgtcattgggatcattgcattgatattagcactggccattggtctgggcatccacttcgactgctcagggaagtacagatgtcgctcatcctttaagtgtatcgagctgatagctcgatgtgacggagtctcggattgcaaagacggggaggacgagtaccgctgtgtccgggtgggtggtcagaatgccgtgctccaggtgttcacagctgcttcgtggaagaccatgtgctccgatgactggaagggtcactacgcaaatgttgcctgtgcccaactgggtttcccaagctatgtgagttcagataacctcagagtgagctcgctggaggggcagttccgggaggagtttgtgtccatcgatcacctcttgccagatgacaaggtgactgcattacaccactcagtatatgtgagggagggatgtgcctctggccacgtggttaccttgcagtgcacagcctgtggtcatagaaggggctacagctcacgcatcgtgggtggaaacatgtccttgctctcgcagtggccctggcaggccagccttcagttccagggctaccacctgtgcgggggctctgtcatcacgcccctgtggatcatcactgctgcacactgtgtttatgacttgtacctccccaagtcatggaccatccaggtgggtctagtttccctgttggacaatccagccccatcccacttggtggagaagattgtctaccacagcaagtacaagccaaagaggctgggcaatgacatcgcccttatgaagctggccgggccactcacgttcaatgaaatgatccagcctgtgtgcctgcccaactctgaagagaacttccccgatggaaaagtgtgctggacgtcaggatggggggccacagaggatggagcaggtgacgcctcccctgtcctgaaccacgcggccgtccctttgatttccaacaagatctgcaaccacagggacgtgtacggtggcatcatctccccctccatgctctgcgcgggctacctgacgggtggcgtggacagctgccagggggacagcggggggcccctggtgtgtcaagagaggaggctgtggaagttagtgggagcgaccagctttggcatcggctgcgcagaggtgaacaagcctggggtgtacacccgtgtcacctccttcctggactggatccacgagcagatggagagagacctaaaaacctgaagaggaaggggacaagtagccacctgagttcctgaggtgatgaagacagcccgatcctcccctggactcccgtgtaggaacctgcacacgagcagacacccttggagctctgagttccggcaccagtagcaggcccgaaagaggcacccttccatctgattccagcacaaccttcaagctgctttttgttttttgtttttttgagatggagtctcgctctgttgcccaggctggagtgcagtggcgaaatccctgctcactgcagcctccgcttccctggttcaagcgattctcttgcctcagcttccccagtagctgggaccacaggtgcccgccaccacacccaactaatttttgtatttttagtagagacagggtttcaccatgttggccaggctgctctcaaacccctgacctcaaatgatgtgcctgcttcagcctcccacagtgctgggattacaggcatgggccaccacgcctagcctcacgctcctttctgatcttcactaagaacaaaagaagcagcaacttgcaagggcggcctttcccactggtccatctggttttctctccaggggtcttgcaaaattcctgacgagataagcagttatgtgacctcacgtgcaaagccaccaacagccactcagaaaagacgcaccagcccagaagtgcagaactgcagtcactgcacgttttcatctctagggaccagaaccaaacccaccctttctacttccaagacttattttcacatgtggggaggttaatctaggaatgactcgtttaaggcctattttcatgatttctttgtagcatttggtgcttgacgtattattgtcctttgattccaaataatatgtttccttccctc

SEQ ID NO: 32329 - DNA, 1342 bp, Homo sapiens
  source 1..1342: mol_type = unassigned DNA
accgggcaccggacggctcgggtactttcgttcttaattaggtcatgcccgtgtgagccaggaaagggctgtgtttatgggaagccagtaacactgtggcctactatctcttccgtggtgccatctacatttttgggactcgggaattatgaggtagaggtggaggcggagccggatgtcagaggtcctgaaatagtcaccatgggggaaaatgatccgcctgctgttgaagcccccttctcattccgatcgctttttggccttgatgatttgaaaataagtcctgttgcaccagatgcagatgctgttgctgcacagatcctgtcactgctgccattgaagttttttccaatcatcgtcattgggatcattgcattgatattagcactggccattggtctgggcatccacttcgactgctcagggaagtacagatgtcgctcatcctttaagtgtatcgagctgatagctcgatgtgacggagtctcggattgcaaagacggggaggacgagtaccgctgtgtccgggtgggtggtcagaatgccgtgctccaggtgttcacagctgcttcgtggaagaccatgtgctccgatgactggaagggtcactacgcaaatgttgcctgtgcccaactgggtttcccaagctatgtgagttcagataacctcagagtgagctcgctggaggggcagttccgggaggagtttgtgtccatcgatcacctcttgccagatgacaaggtgactgcattacaccactcagtatatgtgagggagggatgtgcctctggccacgtggttaccttgcagtgcacagcctgtggtcatagaaggggctacagctcacgcatcgtgggtggaaacatgtccttgctctcgcagtggccctggcaggccagccttcagttccagggctaccacctgtgcgggggctctgtcatcacgcccctgtggatcatcactgctgcacactgtgtttatgacttgtacctccccaagtcatggaccatccaggtgggtctagtttccctgttggacaatccagccccatcccacttggtggagaagattgtctaccacagcaagtacaagccaaagaggctgggcaatgacatcgcccttatgaagctggccgggccactcacgttcaatggtacatctgggtctctatgtggttctgcagctcttcctttgtttcaagaggatttgcaattgctcattgaagcattcttatgatggctgctttataatccttgtcagatattaataattccaactcctgattcatgttggtgttggcatcagttgattatcttttctcattaaaattgtgatgctccta

SEQ ID NO: 32330 - DNA, 2403 bp, Homo sapiens
  source 1..2403: mol_type = unassigned DNA
cttaattaggtcatgcccgtgtgagccaggaaagggctgtgtttatgggaagccagtaacactgtggcctactatctcttccgtggtgccatctacatttttgggactcgggaattatgaggtagaggtggaggcggagccggatgtcagaggtcctgaaatagtcaccatgggggaaaatgatccgcctgctgttgaagcccccttctcattccgatcgctttttggccttgatgatttgaaaataagtcctgttgcaccagatgcagatgctgttgctgcacagatcctgtcactgctgccattgaagttttttccaatcatcgtcattgggatcattgcattgatattagcactggccattggtctgggcatccacttcgactgctcagggaagtacagatgtcgctcatcctttaagtgtatcgagctgatagctcgatgtgacggagtctcggattgcaaagacggggaggacgagtaccgctgtgtccgggtgggtggtcagaatgccgtgctccaggtgttcacagctgcttcgtggaagaccatgtgctccgatgactggaagggtcactacgcaaatgttgcctgtgcccaactgggtttcccaagctatgtgagttcagataacctcagagtgagctcgctggaggggcagttccgggaggagtttgtgtccatcgatcacctcttgccagatgacaaggtgactgcattacaccactcagtatatgtgagggagggatgtgcctctggccacgtggttaccttgcagtgcacagcctgtggtcatagaaggggctacagctcacgcatcgtgggtggaaacatgtccttgctctcgcagtggccctggcaggccagccttcagttccagggctaccacctgtgcgggggctctgtcatcacgcccctgtggatcatcactgctgcacactgtgtttatgacttgtacctccccaagtcatggaccatccaggtgggtctagtttccctgttggacaatccagccccatcccacttggtggagaagattgtctaccacagcaagtacaagccaaagaggctgggcaatgacatcgcccttatgaagctggccgggccactcacgttcaatgaaatgatccagcctgtgtgcctgcccaactctgaagagaacttccccgatggaaaagtgtgctggacgtcaggatggggggccacagaggatggaggtgacgcctcccctgtcctgaaccacgcggccgtccctttgatttccaacaagatctgcaaccacagggacgtgtacggtggcatcatctccccctccatgctctgcgcgggctacctgacgggtggcgtggacagctgccagggggacagcggggggcccctggtgtgtcaagagaggaggctgtggaagttagtgggagcgaccagctttggcatcggctgcgcagaggtgaacaagcctggggtgtacacccgtgtcacctccttcctggactggatccacgagcagatggagagagacctaaaaacctgaagaggaaggggacaagtagccacctgagttcctgaggtgatgaagacagcccgatcctcccctggactcccgtgtaggaacctgcacacgagcagacacccttggagctctgagttccggcaccagtagcaggcccgaaagaggcacccttccatctgattccagcacaaccttcaagctgctttttgttttttgtttttttgagatggagtctcgctctgttgcccaggctggagtgcagtggcgaaatccctgctcactgcagcctccgcttccctggttcaagcgattctcttgcctcagcttccccagtagctgggaccacaggtgcccgccaccacacccaactaatttttgtatttttagtagagacagggtttcaccatgttggccaggctgctctcaaacccctgacctcaaatgatgtgcctgcttcagcctcccacagtgctgggattacaggcatgggccaccacgcctagcctcacgctcctttctgatcttcactaagaacaaaagaagcagcaacttgcaagggcggcctttcccactggtccatctggttttctctccaggggtcttgcaaaattcctgacgagataagcagttatgtgacctcacgtgcaaagccaccaacagccactcagaaaagacgcaccagcccagaagtgcagaactgcagtcactgcacgttttcatctctagggaccagaaccaaacccaccctttctacttccaagacttattttcacatgtggggaggttaatctaggaatgactcgtttaaggcctattttcatgatttctttgtagcatttggtgcttgacgtattattgtcctttgattccaaataatatgtttccttccctca

SEQ ID NO: 32331 - DNA, 2074 bp, Homo sapiens
  source 1..2074: mol_type = unassigned DNA
acacagagagaggcagcagcttgctcagcggacaaggatgctgggcgtgagggaccaaggcctgccctgcactcgggcctcctccagccagtgctgaccagggacttctgacctgctggccagccaggacctgtgtggggaggccctcctgctgccttggggtgacaatctcagctccaggctacagggagaccgggaggatcacagagccagcatgttacaggatcctgacagtgatcaacctctgaacagcctcgatgtcaaacccctgcgcaaaccccgtatccccatggagaccttcagaaaggtggggatccccatcatcatagcactactgagcctggcgagtatcatcattgtggttgtcctcatcaaggtgattctggataaatactacttcctctgcgggcagcctctccacttcatcccgaggaagcagctgtgtgacggagagctggactgtcccttgggggaggacgaggagcactgtgtcaagagcttccccgaagggcctgcagtggcagtccgcctctccaaggaccgatccacactgcaggtgctggactcggccacagggaactggttctctgcctgtttcgacaacttcacagaagctctcgctgagacagcctgtaggcagatgggctacagcagcaaacccactttcagagctgtggagattggcccagaccaggatctggatgttgttgaaatcacagaaaacagccaggagcttcgcatgcggaactcaagtgggccctgtctctcaggctccctggtctccctgcactgtcttgcctgtgggaagagcctgaagaccccccgtgtggtgggtgtggaggaggcctctgtggattcttggccttggcaggtcagcatccagtacgacaaacagcacgtctgtggagggagcatcctggacccccactgggtcctcacggcagcccactgcttcaggaaacataccgatgtgttcaactggaaggtgcgggcaggctcagacaaactgggcagcttcccatccctggctgtggccaagatcatcatcattgaattcaaccccatgtaccccaaagacaatgacatcgccctcatgaagctgcagttcccactcactttctcaggcacagtcaggcccatctgtctgcccttctttgatgaggagctcactccagccaccccactctggatcattggatggggctttacgaagcagaatggagggaagatgtctgacatactgctgcaggcgtcagtccaggtcattgacagcacacggtgcaatgcagacgatgcgtaccagggggaagtcaccgagaagatgatgtgtgcaggcatcccggaagggggtgtggacacctgccagggtgacagtggtgggcccctgatgtaccaatctgaccagtggcatgtggtgggcatcgttagttggggctatggctgcgggggcccgagcaccccaggagtatacaccaaggtctcagcctatctcaactggatctacaatgtctggaaggctgagctgtaatgctgctgcccctttgcagtgctgggagccgcttccttcctgccctgcccacctggggatcccccaaagtcagacacagagcaagagtccccttgggtacacccctctgcccacagcctcagcatttcttggagcagcaaagggcctcaattcctataagagaccctcgcagcccagaggcgcccagaggaagtcagcagccctagctcggccacacttggtgctcccagcatcccagggagagacacagcccactgaacaaggtctcaggggtattgctaagccaagaaggaactttcccacactactgaatggaagcaggctgtcttgtaaaagcccagatcactgtgggctggagaggagaaggaaagggtctgcgccagccctgtccgtcttcacccatccccaagcctactagagcaagaaaccagttgtaatataaaatgcactgccctactgttggtatgactaccgttacctactgttgtcattgttattacagctatggccactattattaaagagctgtgtaacatctctggcata

SEQ ID NO: 32332 - DNA, 2052 bp, Homo sapiens
  source 1..2052: mol_type = unassigned DNA
gagagaggcagcagcttgctcagcggacaaggatgctgggcgtgagggaccaaggcctgccctgcactcgggcctcctccagccagtgctgaccagggacttctgacctgctggccagccaggacctgtgtggggaggccctcctgctgccttggggtgacaatctcagctccaggctacagggagaccgggaggatcacagagccagcatgttacaggatcctgacagtgatcaacctctgaacagcctcgatgtcaaacccctgcgcaaaccccgtatccccatggagaccttcagaaaggtggggatccccatcatcatagcactactgagcctggcgagtatcatcattgtggttgtcctcatcaaggtgattctggataaatactacttcctctgcgggcagcctctccacttcatcccgaggaagcagctgtgtgacggagagctggactgtcccttgggggaggacgaggagcactgtgtcaagagcttccccgaagggcctgcagtggcagtccgcctctccaaggaccgatccacactgcaggtgctggactcggccacagggaactggttctctgcctgtttcgacaacttcacagaagctctcgctgagacagcctgtaggcagatgggctacagcagagctgtggagattggcccagaccaggatctggatgttgttgaaatcacagaaaacagccaggagcttcgcatgcggaactcaagtgggccctgtctctcaggctccctggtctccctgcactgtcttgcctgtgggaagagcctgaagaccccccgtgtggtgggtgtggaggaggcctctgtggattcttggccttggcaggtcagcatccagtacgacaaacagcacgtctgtggagggagcatcctggacccccactgggtcctcacggcagcccactgcttcaggaaacataccgatgtgttcaactggaaggtgcgggcaggctcagacaaactgggcagcttcccatccctggctgtggccaagatcatcatcattgaattcaaccccatgtaccccaaagacaatgacatcgccctcatgaagctgcagttcccactcactttctcaggcacagtcaggcccatctgtctgcccttctttgatgaggagctcactccagccaccccactctggatcattggatggggctttacgaagcagaatggagggaagatgtctgacatactgctgcaggcgtcagtccaggtcattgacagcacacggtgcaatgcagacgatgcgtaccagggggaagtcaccgagaagatgatgtgtgcaggcatcccggaagggggtgtggacacctgccagggtgacagtggtgggcccctgatgtaccaatctgaccagtggcatgtggtgggcatcgttagttggggctatggctgcgggggcccgagcaccccaggagtatacaccaaggtctcagcctatctcaactggatctacaatgtctggaaggctgagctgtaatgctgctgcccctttgcagtgctgggagccgcttccttcctgccctgcccacctggggatcccccaaagtcagacacagagcaagagtccccttgggtacacccctctgcccacagcctcagcatttcttggagcagcaaagggcctcaattcctataagagaccctcgcagcccagaggcgcccagaggaagtcagcagccctagctcggccacacttggtgctcccagcatcccagggagagacacagcccactgaacaaggtctcaggggtattgctaagccaagaaggaactttcccacactactgaatggaagcaggctgtcttgtaaaagcccagatcactgtgggctggagaggagaaggaaagggtctgcgccagccctgtccgtcttcacccatccccaagcctactagagcaagaaaccagttgtaatataaaatgcactgccctactgttggtatgactaccgttacctactgttgtcattgttattacagctatggccactattattaaagagctgtgtaacatctctggca

SEQ ID NO: 32333 - DNA, 5550 bp, Homo sapiens
  source 1..5550: mol_type = unassigned DNA
gtagggctgttttaatcaagctgcccaaagtcccccaatcactcctggaatacacagagagaggcagcagcttgctcagcggacaaggatgctgggcgtgagggaccaaggcctgccctgcactcgggcctcctccagccagtgctgaccagggacttctgacctgctggccagccaggacctgtgtggggaggccctcctgctgccttggggtgacaatctcagctccaggctacagggagaccgggaggatcacagagccagcatggatcctgacagtgatcaacctctgaacagcctcgatgtcaaacccctgcgcaaaccccgtatccccatggagaccttcagaaaggtggggatccccatcatcatagcactactgagcctggcgagtatcatcattgtggttgtcctcatcaaggtgattctggataaatactacttcctctgcgggcagcctctccacttcatcccgaggaagcagctgtgtgacggagagctggactgtcccttgggggaggacgaggagcactgtgtcaagagcttccccgaagggcctgcagtggcagtccgcctctccaaggaccgatccacactgcaggtgctggactcggccacagggaactggttctctgcctgtttcgacaacttcacagaagctctcgctgagacagcctgtaggcagatgggctacagcagcaaacccactttcagagctgtggagattggcccagaccaggatctggatgttgttgaaatcacagaaaacagccaggagcttcgcatgcggaactcaagtgggccctgtctctcaggctccctggtctccctgcactgtcttgcctgtgggaagagcctgaagaccccccgtgtggtgggtgtggaggaggcctctgtggattcttggccttggcaggtcagcatccagtacgacaaacagcacgtctgtggagggagcatcctggacccccactgggtcctcacggcagcccactgcttcaggaaacataccgatgtgttcaactggaaggtgcgggcaggctcagacaaactgggcagcttcccatccctggctgtggccaagatcatcatcattgaattcaaccccatgtaccccaaagacaatgacatcgccctcatgaagctgcagttcccactcactttctcaggcacagtcaggcccatctgtctgcccttctttgatgaggagctcactccagccaccccactctggatcattggatggggctttacgaagcagaatggagggaagatgtctgacatactgctgcaggcgtcagtccaggtcattgacagcacacggtgcaatgcagacgatgcgtaccagggggaagtcaccgagaagatgatgtgtgcaggcatcccggaagggggtgtggacacctgccagggtgacagtggtgggcccctgatgtaccaatctgaccagtggcatgtggtgggcatcgttagttggggctatggctgcgggggcccgagcaccccaggagtatacaccaaggtctcagcctatctcaactggatctacaatgtctggaaggctgagctgtaatgctgctgcccctttgcagtgctgggagccgcttccttcctgccctgcccacctggggatcccccaaagtcagacacagagcaagagtccccttgggtacacccctctgcccacagcctcagcatttcttggagcagcaaagggcctcaattcctataagagaccctcgcagcccagaggcgcccagaggaagtcagcagccctagctcggccacacttggtgctcccagcatcccagggagagacacagcccactgaacaaggtctcaggggtattgctaagccaagaaggaactttcccacactactgaatggaagcaggctgtcttgtaaaagcccagatcactgtgggctggagaggagaaggaaagggtctgcgccagccctgtccgtcttcacccatccccaagcctactagagcaagaaaccagttgtaatataaaatgcactgccctactgttggtatgactaccgttacctactgttgtcattgttattacagctatggccactattattaaagagctgtgtaacatctctggcataggctagctggaatgcttgataagaactgagctgggatgattgaactttcattctttggcttggggagaaaagaagtcctggggaagcaattgagtctcaaagtagaggcaggggaaaaaagagttagggagaccagatctgctgagtggcagcaagagtgagctgcagattacagaaaccagggtgagcaagtttgagtcccacacagggccttctccctttgcctctttccctccctccctgcctgtgataatcagccaggagccagggataacctatgacttgggaaagagatgagttaggcagtcaagggtgacattcaatcagggatccacaagtggctggaaagaaatgctggtcctgtgtcctaactttttccgcctggagagccctcagtgtggcttcttacatttaaaaaacaaaaaggatcagctgccaggtgtgaggcagtccccaagctgagttgtgaggatgtaagcatgaataagtccctgcactcaaaatggtcaaagaattaaaccccatggacttttttggcatctgtatgaaagcttgggttttctgaggactgtcttgctatagttaagtcagatcctagatgaaatatacttgttcatactgtactaggttcttaggaaacaacagaattcctcaaatgccaaaaacaaagaaaatagaaacccagaaaacaaaacaaaataaaacaaaaccatcagaactgtgagtggaaactaaggtgatgatctgggagcaatacactaaaatcttgggtcgagacctatatgaaggctggcagtggagctaaacctggacacactgaagacaagggagctgaaccagggctcctacatgaagcagggataactgatggcagtaaatgtggtctcaaattgcagatggtctggaggaaaatttcccaaatttagagcctcaggattcccaaagatcctccaaatatgagctcacaatcaaagatcagagacgttgaaaaataaaaaacaccttaagtgggcagcataaaaaacagctaatttagaaccccaaaggcttcagatgtcagaatattagagacttatgataataagcaatatttgcagagtatttgtatgtgccagacactattgtaagtgcttcatcatgtactgattcatttaatactcacagaaatctgtgagatgggtattattcttatcctcactctatggattaaaaaaactaaggcacaaagtggttaagctccttgcctgagattatagactgtaagttgaacgtgagcacttggaatacagagttcatgctgtaaactaccacactatagggcctccaatatgataatttataaaatatttgaataaaaaatgaatactagttccacattttaaaatcatgtttaactgtggtcaaatgcacataacacaagttgccatcttcaccatttttaggtgtatagttcagtggtgttatgtacattcacactattgtgcagtcatcaccaccatccatctccagaacagaaactcagtacccatcaaacaactctccatttccccctcctcccaatctctggcaaccaccattgtgctttcagtctctgtgaactggattactctgggtacctcatttaagtgaagtcatgcagtattggtctttttgtacttgttttatttcacttcacattgtgtcttcaagtttcacccatgttgtagcatgtgtcagaatttcttccctttttagactaaataatattctattgtttatacgaacattcaggttacttctatcttttggctattgtgaattatgctgctgtgaacatgggtgtacaagtatctctttgaggccctgctttcaattctcttgggtatattcccagaagtggaattgctggatcatatggtaattctattttgaattttttgaggaactgatatattgctttccatagagactgcaccattttacattcccatcaacagtttgcaggagttactatttctccatatcccccctaacacttgctattttctgttaaaaatggatatcttaataatcaagcaaaaataacaggcagatttgaaaaagaactgaatacagcttttagaaataaaaactataattataaaaataaaaaactaagtggatggggtaaataacaattaaaacaccaattaagagagaacaaatgaactggaagataaattgaagaagtgactaggcttaacagcagagagagataaggagattaaaaatatgaaaacaaggccaggagcaatgaagcctagaatggtaaattctaacatatccagaatcccagaaagagagaatcaagacaatgagagagagacagtaccaaagagataagagctgagaatgttccagaattgataaaaggtgtgaatccacagaacatacaccaccatagtgtacacgcatacaaccaaggtggaaaaattagaataaatccacacctatgtacattataatgaaactgcagaacaccaaagacaaaaagaaactccttatagcagcagagagaaaacccagaccacccacagtaccacaaatctaccacaattagactgacaacaggctttcccacagcaataaaggagctagaagtcagtggaagtatatctccagcatgccaaaagataacaatcaatcagggattgtgaaccctacaaaactatctttcaagaataaaggcattttcaagaaaacaaaaacagactttaccatcaacaaaccttctctaaaagaatatataaagcatttactttaggaagaaggaaaatgatcctaaaaggaagaaccaagaagcaagtagcaatagtgaggcaattgtgaaaatgtaggtaagtctaaacacactctgtctacttcttcttcttcttcttcttcttcttcttcttattttgagactgagtcttgccctgtcacccagactggagtgcagtggcaggatcttggctcactgctatctccacctcccaggttcaagtgattcttctgcctcagcctcccgagtagctgggattacatgcacatgccaccatatccggctaatttttgaatttttagtagagatggggtttcactgtgttggccaggccggtctcaaactcccgacctcaagtgatccccccgcctcggcctcccaaagtgctgggattacaggcgtgtctacatattattaaaataacaataatatttattttgtgggttaattttttttgaaacagatattgaatttattggttggctatgagtagaaaaatacatcagtaaagaaaaaagaccctgtatataaatataatactagctagttaaaatttgaccaagaagtttccattgtgggttaatttttaaaggcctaactgaaatatggagtaaccacagcatgcagcatgtaaattaaaggggatagctgg

SEQ ID NO: 32334 - DNA, 2232 bp, Homo sapiens
  source 1..2232: mol_type = unassigned DNA
gggatacagggaggggccatgtgcgaaccagggagacctcatcttccaaccaagcttgctgggctagctttaatcaatgctggcctgagaacaggagcggaacattgcctagtagaccctgaggctttacaacagtgccactgacccctatgagcctgatgctggatgaccaaccccctatggaggcccagtatgcagaggagggcccaggacctgggatcttcagagcagagcctggagaccagcagcatcccatttctcaggcagtgtgctggcgttccatgcgacgtggctgtgcagtgctgggagccctggggctgctggccggtgcaggtgttggctcatggctcctagtgctgtatctgtgtcctgctgcctctcagcccatttccgggaccttgcaggatgaggagataactttgagctgctcagaggccagcgctgaggaagctctgctccctgcacttcccaaaacagtatctttcagaataaacagcgaagacttcttgctggaagcgcaagtgagggatcagccacgctggctcctggtctgccatgagggctggagccccgccctggggctgcagatctgctggagccttgggcatctcagactcactcaccacaagggagtaaacctcactgacatcaaactcaacagttcccaggagtttgctcagctctctcctagactgggaggcttcctggaggaggcgtggcagcccaggaacaactgcacttctggtcaagttgtttccctcagatgctctgagtgtggagcgaggcccctggcttcccggatagttggtgggcagtctgtggctcctgggcgctggccgtggcaggccagcgtggccctgggcttccggcacacgtgtgggggctctgtgctagcgccacgctgggtggtgactgctgcacattgtatgcacagtttcaggctggcccgcctgtccagctggcgggttcatgcggggctggtcagccacagtgccgtcaggccccaccaaggggctctggtggagaggattatcccacaccccctctacagtgcccagaatcatgactacgacgtcgccctcctgaggctccagaccgctctcaacttctcagacactgtgggcgctgtgtgcctgccggccaaggaacagcattttccgaagggctcgcggtgctgggtgtctggctggggccacacccaccctagccatacttacagctcggatatgctccaggacacggtggtgcccttgttcagcactcagctctgcaacagctcttgcgtgtacagcggagccctcaccccccgcatgctttgcgctggctacctggacggaagggctgatgcatgccagggagatagcgggggccccctagtgtgcccagatggggacacatggcgcctagtgggggtggtcagctgggggcgtggctgcgcagagcccaatcacccaggtgtctacgccaaggtagctgagtttctggactggatccatgacactgctcaggactccctcctctgagtcctgctgtttcctccagtctcactgcacaccactgcctcatgcttcctggggcctccagcagctccactaatggaggagaggcagtagcctccgacacagaacgcatggacctcctactactgtgtgtgaggaacagtcactacccactggccagccacccagccaacaggtctctcctcttgggccctgatttcagagtcctctttctcactagagactcaatgacagaagagaggctgggacttggttgggcatgctgtggttgctgagggatgagggggaggagagaggtaggagctggagatgaagaggctgctagaagcagcaggaagcctgcccttctgccctctcccctccctgcccctgtgtgagtcttttgggagggtgctgggaggtgccccccgtcccacctttttcctgtgctctaggtgggctaagtgcctccctagaggactccatggctgagaggctcctgggcagatggggtcaaggctgggccagcccagatgaagcctatgggagtcaggaccctctccactctccctctccactccccttcctgttctcacctggctgtggctggccctgtgtggggtgggtacactggaaaacaagaaggttggagttggtctaggacattggttttaaatgacagttctgtgaactggtccaaggagttctgttattaaagtgatatatggtcttg

SEQ ID NO: 32335 - DNA, 3194 bp, Homo sapiens
  source 1..3194: mol_type = unassigned DNA
gttcttgagccagacccagtccagctctggtgcctgccctctggtgcgagctgacctgagatgcacttccctcctctgtgagctgtctcggcacccacttgcagtcactgccgcctgatgttgttactcttccactccaaaaggatgcccgtggccgaggccccccaggtggctggcgggcagggggacggaggtgatggcgaggaagcggagccggaggggatgttcaaggcctgtgaggactccaagagaaaagcccggggctacctccgcctggtgcccctgtttgtgctgctggccctgctcgtgctggcttcggcgggggtgctactctggtatttcctagggtacaaggcggaggtgatggtcagccaggtgtactcaggcagtctgcgtgtactcaatcgccacttctcccaggatcttacccgccgggaatctagtgccttccgcagtgaaaccgccaaagcccagaagatgctcaaggagctcatcaccagcacccgcctgggaacttactacaactccagctccgtctattcctttggggagggacccctcacctgcttcttctggttcattctccaaatccccgagcaccgccggctgatgctgagccccgaggtggtgcaggcactgctggtggaggagctgctgtccacagtcaacagctcggctgccgtcccctacagggccgagtacgaagtggaccccgagggcctagtgatcctggaagccagtgtgaaagacatagctgcattgaattccacgctgggttgttaccgctacagctacgtgggccagggccaggtcctccggctgaaggggcctgaccacctggcctccagctgcctgtggcacctgcagggccccaaggacctcatgctcaaactccggctggagtggacgctggcagagtgccgggaccgactggccatgtatgacgtggccgggcccctggagaagaggctcatcacctcggtgtacggctgcagccgccaggagcccgtggtggaggttctggcgtcgggggccatcatggcggtcgtctggaagaagggcctgcacagctactacgaccccttcgtgctctccgtgcagccggtggtcttccaggcctgtgaagtgaacctgacgctggacaacaggctcgactcccagggcgtcctcagcaccccgtacttccccagctactactcgccccaaacccactgctcctggcacctcacggtgccctctctggactacggcttggccctctggtttgatgcctatgcactgaggaggcagaagtatgatttgccgtgcacccagggccagtggacgatccagaacaggaggctgtgtggcttgcgcatcctgcagccctacgccgagaggatccccgtggtggccacggccgggatcaccatcaacttcacctcccagatctccctcaccgggcccggtgtgcgggtgcactatggcttgtacaaccagtcggacccctgccctggagagttcctctgttctgtgaatggactctgtgtccctgcctgtgatggggtcaaggactgccccaacggcctggatgagagaaactgcgtttgcagagccacattccagtgcaaagaggacagcacatgcatctcactgcccaaggtctgtgatgggcagcctgattgtctcaacggcagcgacgaagagcagtgccaggaaggggtgccatgtgggacattcaccttccagtgtgaggaccggagctgcgtgaagaagcccaacccgcagtgtgatgggcggcccgactgcagggacggctcggatgaggagcactgtgactgtggcctccagggcccctccagccgcattgttggtggagctgtgtcctccgagggtgagtggccatggcaggccagcctccaggttcggggtcgacacatctgtgggggggccctcatcgctgaccgctgggtgataacagctgcccactgcttccaggaggacagcatggcctccacggtgctgtggaccgtgttcctgggcaaggtgtggcagaactcgcgctggcctggagaggtgtccttcaaggtgagccgcctgctcctgcacccgtaccacgaagaggacagccatgactacgacgtggcgctgctgcagctcgaccacccggtggtgcgctcggccgccgtgcgccccgtctgcctgcccgcgcgctcccacttcttcgagcccggcctgcactgctggattacgggctggggcgccttgcgcgagggcggccccatcagcaacgctctgcagaaagtggatgtgcagttgatcccacaggacctgtgcagcgaggtctatcgctaccaggtgacgccacgcatgctgtgtgccggctaccgcaagggcaagaaggatgcctgtcagggtgactcaggtggtccgctggtgtgcaaggcactcagtggccgctggttcctggcggggctggtcagctggggcctgggctgtggccggcctaactacttcggcgtctacacccgcatcacaggtgtgatcagctggatccagcaagtggtgacctgaggaactgcccccctgcaaagcagggcccacctcctggactcagagagcccagggcaactgccaagcagggggacaagtattctggcggggggtgggggagagagcaggccctgtggtggcaggaggtggcatcttgtctcgtccctgatgtctgctccagtgatggcaggaggatggagaagtgccagcagctgggggtcaagacgtcccctgaggacccaggcccacacccagcccttctgcctcccaattctctctcctccgtccccttcctccactgctgcctaatgcaaggcagtggctcagcagcaagaatgctggttctacatcccgaggagtgtctgaggtgcgccccactctgtacagaggctgtttgggcagccttgcctccagagagcagattccagcttcggaagcccctggtctaacttgggatctgggaatggaaggtgctcccatcggaggggaccctcagagccctggagactgccaggtgggcctgctgccactgtaagccaaaaggtggggaagtcctgactccagggtccttgccccacccctgcctgccacctgggccctcacagcccagaccctcactgggaggtgagctcagctgccctttggaataaagctgcctgatc

SEQ ID NO: 32336 - DNA, 3260 bp, Homo sapiens
  source 1..3260: mol_type = unassigned DNA
cttgagccagacccagtccagctctggtgcctgccctctggtgcgagctgacctgagatgcacttccctcctctgtgagctgtctcggcacccacttgcagtcactgccgcctgatgttgttactcttccactccaaaaggatgcccgtggccgaggccccccaggtggctggcgggcagggggacggaggtgatggcgaggaagcggagccggaggggatgttcaaggcctgtgaggactccaagagaaaagcccggggctacctccgcctggtgcccctgtttgtgctgctggccctgctcgtgctggcttcggcgggggtgctactctggtatttcctagggtacaaggcggaggtgatggtcagccaggtgtactcaggcagtctgcgtgtactcaatcgccacttctcccaggatcttacccgccgggaatctagtgccttccgcagtgaaaccgccaaagcccagaagatgctcaaggagctcatcaccagcacccgcctgggaacttactacaactccagctccgtctattcctttggggagggacccctcacctgcttcttctggttcattctccaaatccccgagcaccgccggctgatgctgagccccgaggtggtgcaggcactgctggtggaggagctgctgtccacagtcaacagctcggctgccgtcccctacagggccgagtacgaagtggaccccgagggcctagtgatcctggaagccagtgtgaaagacatagctgcattgaattccacgctgggttgttaccgctacagctacgtgggccagggccaggtcctccggctgaaggggcctgaccacctggcctccagctgcctgtggcacctgcagggccccaaggacctcatgctcaaactccggctggagtggacgctggcagagtgccgggaccgactggccatgtatgacgtggccgggcccctggagaagaggctcatcacctcggtgtacggctgcagccgccaggagcccgtggtggaggttctggcgtcgggggccatcatggcggtcgtctggaagaagggcctgcacagctactacgaccccttcgtgctctccgtgcagccggtggtcttccaggcctgtgaagtgaacctgacgctggacaacaggctcgactcccagggcgtcctcagcaccccgtacttccccagctactactcgccccaaacccactgctcctggcacctcacggtgccctctctggactacggcttggccctctggtttgatgcctatgcactgaggaggcagaagtatgatttgccgtgcacccagggccagtggacgatccagaacaggaggctgtgtggcttgcgcatcctgcagccctacgccgagaggatccccgtggtggccacggccgggatcaccatcaacttcacctcccagatctccctcaccgggcccggtgtgcgggtgcactatggcttgtacaaccagtcggacccctgccctggagagttcctctgttctgtgaatggactctgtgtccctgcctgtgatggggtcaaggactgccccaacggcctggatgagagaaactgcgtttgcagagccacattccagtgcaaagaggacagcacatgcatctcactgcccaaggtctgtgatgggcagcctgattgtctcaacggcagcgacgaagagcagtgccaggaaggggtgccatgtgggacattcaccttccagtgtgaggaccggagctgcgtgaagaagcccaacccgcagtgtgatgggcggcccgactgcagggacggctcggatgaggagcactgtgactgtggcctccagggcccctccagccgcattgttggtggagctgtgtcctccgagggtgagtggccatggcaggccagcctccaggttcggggtcgacacatctgtgggggggccctcatcgctgaccgctgggtgataacagctgcccactgcttccaggaggacagcatggcctccacggtgctgtggaccgtgttcctgggcaaggtgtggcagaactcgcgctggcctggagaggtgtccttcaaggtgagccgcctgctcctgcacccgtaccacgaagaggacagccatgactacgacgtggcgctgctgcagctcgaccacccggtggtgcgctcggccgccgtgcgccccgtctgcctgcccgcgcgctcccacttcttcgagcccggcctgcactgctggattacgggctggggcgccttgcgcgagggcgccctacgggcggatgctgtggccctattttatggatggagaaaccaaggctcagagacatgttgctgccccatcagcaacgctctgcagaaagtggatgtgcagttgatcccacaggacctgtgcagcgaggtctatcgctaccaggtgacgccacgcatgctgtgtgccggctaccgcaagggcaagaaggatgcctgtcagggtgactcaggtggtccgctggtgtgcaaggcactcagtggccgctggttcctggcggggctggtcagctggggcctgggctgtggccggcctaactacttcggcgtctacacccgcatcacaggtgtgatcagctggatccagcaagtggtgacctgaggaactgcccccctgcaaagcagggcccacctcctggactcagagagcccagggcaactgccaagcagggggacaagtattctggcggggggtgggggagagagcaggccctgtggtggcaggaggtggcatcttgtctcgtccctgatgtctgctccagtgatggcaggaggatggagaagtgccagcagctgggggtcaagacgtcccctgaggacccaggcccacacccagcccttctgcctcccaattctctctcctccgtccccttcctccactgctgcctaatgcaaggcagtggctcagcagcaagaatgctggttctacatcccgaggagtgtctgaggtgcgccccactctgtacagaggctgtttgggcagccttgcctccagagagcagattccagcttcggaagcccctggtctaacttgggatctgggaatggaaggtgctcccatcggaggggaccctcagagccctggagactgccaggtgggcctgctgccactgtaagccaaaaggtggggaagtcctgactccagggtccttgccccacccctgcctgccacctgggccctcacagcccagaccctcactgggaggtgagctcagctgccctttggaataaagctgcctgatccaa

SEQ ID NO: 32337 - DNA, 3122 bp, Homo sapiens
  source 1..3122: mol_type = unassigned DNA
gagccacctaccctgctccgaggccaggcctgcagggcctcatcggccagagggtgatcagtgagcagaaggatgcccgtggccgaggccccccaggtggctggcgggcagggggacggaggtgatggcgaggaagcggagccggaggggatgttcaaggcctgtgaggactccaagagaaaagcccggggctacctccgcctggtgcccctgtttgtgctgctggccctgctcgtgctggcttcggcgggggtgctactctggtatttcctagggtacaaggcggaggtgatggtcagccaggtgtactcaggcagtctgcgtgtactcaatcgccacttctcccaggatcttacccgccgggaatctagtgccttccgcagtgaaaccgccaaagcccagaagatgctcaaggagctcatcaccagcacccgcctgggaacttactacaactccagctccgtctattcctttggggagggacccctcacctgcttcttctggttcattctccaaatccccgagcaccgccggctgatgctgagccccgaggtggtgcaggcactgctggtggaggagctgctgtccacagtcaacagctcggctgccgtcccctacagggccgagtacgaagtggaccccgagggcctagtgatcctggaagccagtgtgaaagacatagctgcattgaattccacgctgggttgttaccgctacagctacgtgggccagggccaggtcctccggctgaaggggcctgaccacctggcctccagctgcctgtggcacctgcagggccccaaggacctcatgctcaaactccggctggagtggacgctggcagagtgccgggaccgactggccatgtatgacgtggccgggcccctggagaagaggctcatcacctcggtgtacggctgcagccgccaggagcccgtggtggaggttctggcgtcgggggccatcatggcggtcgtctggaagaagggcctgcacagctactacgaccccttcgtgctctccgtgcagccggtggtcttccaggcctgtgaagtgaacctgacgctggacaacaggctcgactcccagggcgtcctcagcaccccgtacttccccagctactactcgccccaaacccactgctcctggcacctcacggtgccctctctggactacggcttggccctctggtttgatgcctatgcactgaggaggcagaagtatgatttgccgtgcacccagggccagtggacgatccagaacaggaggctgtgtggcttgcgcatcctgcagccctacgccgagaggatccccgtggtggccacggccgggatcaccatcaacttcacctcccagatctccctcaccgggcccggtgtgcgggtgcactatggcttgtacaaccagtcggacccctgccctggagagttcctctgttctgtgaatggactctgtgtccctgcctgtgatggggtcaaggactgccccaacggcctggatgagagaaactgcgtttgcagagccacattccagtgcaaagaggacagcacatgcatctcactgcccaaggtctgtgatgggcagcctgattgtctcaacggcagcgacgaagagcagtgccaggaaggggtgccatgtgggacattcaccttccagtgtgaggaccggagctgcgtgaagaagcccaacccgcagtgtgatgggcggcccgactgcagggacggctcggatgaggagcactgtgactgtggcctccagggcccctccagccgcattgttggtggagctgtgtcctccgagggtgagtggccatggcaggccagcctccaggttcggggtcgacacatctgtgggggggccctcatcgctgaccgctgggtgataacagctgcccactgcttccaggaggacagcatggcctccacggtgctgtggaccgtgttcctgggcaaggtgtggcagaactcgcgctggcctggagaggtgtccttcaaggtgagccgcctgctcctgcacccgtaccacgaagaggacagccatgactacgacgtggcgctgctgcagctcgaccacccggtggtgcgctcggccgccgtgcgccccgtctgcctgcccgcgcgctcccacttcttcgagcccggcctgcactgctggattacgggctggggcgccttgcgcgagggcggccccatcagcaacgctctgcagaaagtggatgtgcagttgatcccacaggacctgtgcagcgaggtctatcgctaccaggtgacgccacgcatgctgtgtgccggctaccgcaagggcaagaaggatgcctgtcagggtgactcaggtggtccgctggtgtgcaaggcactcagtggccgctggttcctggcggggctggtcagctggggcctgggctgtggccggcctaactacttcggcgtctacacccgcatcacaggtgtgatcagctggatccagcaagtggtgacctgaggaactgcccccctgcaaagcagggcccacctcctggactcagagagcccagggcaactgccaagcagggggacaagtattctggcggggggtgggggagagagcaggccctgtggtggcaggaggtggcatcttgtctcgtccctgatgtctgctccagtgatggcaggaggatggagaagtgccagcagctgggggtcaagacgtcccctgaggacccaggcccacacccagcccttctgcctcccaattctctctcctccgtccccttcctccactgctgcctaatgcaaggcagtggctcagcagcaagaatgctggttctacatcccgaggagtgtctgaggtgcgccccactctgtacagaggctgtttgggcagccttgcctccagagagcagattccagcttcggaagcccctggtctaacttgggatctgggaatggaaggtgctcccatcggaggggaccctcagagccctggagactgccaggtgggcctgctgccactgtaagccaaaaggtggggaagtcctgactccagggtccttgccccacccctgcctgccacctgggccctcacagcccagaccctcactgggaggtgagctcagctgccctttggaataaagctgcctgatc

SEQ ID NO: 32338 - DNA, 3178 bp, Homo sapiens
  source 1..3178: mol_type = unassigned DNA
ggacaaacagaggctcctgaggcctgtgtgcaggcccggcacctatctgccgctcccaaaggatgcccgtggccgaggccccccaggtggctggcgggcagggggacggaggtgatggcgaggaagcggagccggaggggatgttcaaggcctgtgaggactccaagagaaaagcccggggctacctccgcctggtgcccctgtttgtgctgctggccctgctcgtgctggcttcggcgggggtgctactctggtatttcctagggtacaaggcggaggtgatggtcagccaggtgtactcaggcagtctgcgtgtactcaatcgccacttctcccaggatcttacccgccgggaatctagtgccttccgcagtgaaaccgccaaagcccagaagatgctcaaggagctcatcaccagcacccgcctgggaacttactacaactccagctccgtctattcctttggggagggacccctcacctgcttcttctggttcattctccaaatccccgagcaccgccggctgatgctgagccccgaggtggtgcaggcactgctggtggaggagctgctgtccacagtcaacagctcggctgccgtcccctacagggccgagtacgaagtggaccccgagggcctagtgatcctggaagccagtgtgaaagacatagctgcattgaattccacgctgggttgttaccgctacagctacgtgggccagggccaggtcctccggctgaaggggcctgaccacctggcctccagctgcctgtggcacctgcagggccccaaggacctcatgctcaaactccggctggagtggacgctggcagagtgccgggaccgactggccatgtatgacgtggccgggcccctggagaagaggctcatcacctcggtgtacggctgcagccgccaggagcccgtggtggaggttctggcgtcgggggccatcatggcggtcgtctggaagaagggcctgcacagctactacgaccccttcgtgctctccgtgcagccggtggtcttccaggcctgtgaagtgaacctgacgctggacaacaggctcgactcccagggcgtcctcagcaccccgtacttccccagctactactcgccccaaacccactgctcctggcacctcacggtgccctctctggactacggcttggccctctggtttgatgcctatgcactgaggaggcagaagtatgatttgccgtgcacccagggccagtggacgatccagaacaggaggctgtgtggcttgcgcatcctgcagccctacgccgagaggatccccgtggtggccacggccgggatcaccatcaacttcacctcccagatctccctcaccgggcccggtgtgcgggtgcactatggcttgtacaaccagtcggacccctgccctggagagttcctctgttctgtgaatggactctgtgtccctgcctgtgatggggtcaaggactgccccaacggcctggatgagagaaactgcgtttgcagagccacattccagtgcaaagaggacagcacatgcatctcactgcccaaggtctgtgatgggcagcctgattgtctcaacggcagcgacgaagagcagtgccaggaaggggtgccatgtgggacattcaccttccagtgtgaggaccggagctgcgtgaagaagcccaacccgcagtgtgatgggcggcccgactgcagggacggctcggatgaggagcactgtgactgtggcctccagggcccctccagccgcattgttggtggagctgtgtcctccgagggtgagtggccatggcaggccagcctccaggttcggggtcgacacatctgtgggggggccctcatcgctgaccgctgggtgataacagctgcccactgcttccaggaggacagcatggcctccacggtgctgtggaccgtgttcctgggcaaggtgtggcagaactcgcgctggcctggagaggtgtccttcaaggtgagccgcctgctcctgcacccgtaccacgaagaggacagccatgactacgacgtggcgctgctgcagctcgaccacccggtggtgcgctcggccgccgtgcgccccgtctgcctgcccgcgcgctcccacttcttcgagcccggcctgcactgctggattacgggctggggcgccttgcgcgagggcgccctacgggcggatgctgtggccctattttatggatggagaaaccaaggctcagagacatgttgctgccccatcagcaacgctctgcagaaagtggatgtgcagttgatcccacaggacctgtgcagcgaggtctatcgctaccaggtgacgccacgcatgctgtgtgccggctaccgcaagggcaagaaggatgcctgtcagggtgactcaggtggtccgctggtgtgcaaggcactcagtggccgctggttcctggcggggctggtcagctggggcctgggctgtggccggcctaactacttcggcgtctacacccgcatcacaggtgtgatcagctggatccagcaagtggtgacctgaggaactgcccccctgcaaagcagggcccacctcctggactcagagagcccagggcaactgccaagcagggggacaagtattctggcggggggtgggggagagagcaggccctgtggtggcaggaggtggcatcttgtctcgtccctgatgtctgctccagtgatggcaggaggatggagaagtgccagcagctgggggtcaagacgtcccctgaggacccaggcccacacccagcccttctgcctcccaattctctctcctccgtccccttcctccactgctgcctaatgcaaggcagtggctcagcagcaagaatgctggttctacatcccgaggagtgtctgaggtgcgccccactctgtacagaggctgtttgggcagccttgcctccagagagcagattccagcttcggaagcccctggtctaacttgggatctgggaatggaaggtgctcccatcggaggggaccctcagagccctggagactgccaggtgggcctgctgccactgtaagccaaaaggtggggaagtcctgactccagggtccttgccccacccctgcctgccacctgggccctcacagcccagaccctcactgggaggtgagctcagctgccctttggaataaagctgcctgatc

SEQ ID NO: 32339 - DNA, 526 bp, Homo sapiens
  source 1..526: mol_type = unassigned DNA
aaaaggcagggaagtcctgcttccgtgccccaccggtgctcagcagaggctcccttgcaaatgcgaggctgtttccaactttggtctgtttccctggcaggatgcccgtggccgaggccccccaggtggctggcgggcagggggacggaggtgatggcgaggaagcggagccggaggggatgttcaaggcctgtgaggactccaagagaaaagcccggggctacctccgcctggtgcccctgtttgtgctgctggccctgctcgtgctggcttcggcgggggtgctactctggtatttcctagggtacaaggcggaggtgatggtcagccaggtgtactcaggcagtctgcgtgtactcaatcgccacttctcccaggatcttacccgccgggaatctagtgccttccgcagtgaaaccgccaaagcccagaagatgctcaaggagctcatcaccagcacccgcctgggaacttactacaactccagctccgtctattcctttggggagggacccctcacctgctt

SEQ ID NO: 32340 - DNA, 1695 bp, Homo sapiens
  source 1..1695: mol_type = unassigned DNA
gttcttgagccagacccagtccagctctggtgcctgccctctggtgcgagctgacctgagatgcacttccctcctctgtgagctgtctcggcacccacttgcagtcactgccgcctgatgttgttactcttccactccaaaaggatgcccgtggccgaggccccccaggtggctggcgggcagggggacggaggtgatggcgaggaagcggagccggaggggatgttcaaggcctgtgaggactccaagagaaaagcccggggctacctccgcctggtgcccctgtttgtgctgctggccctgctcgtgctggcttcggcgggggtgctactctggtatttcctagggtacaaggcggaggtgatggtcagccaggtgtactcaggcagtctgcgtgtactcaatcgccacttctcccaggatcttacccgccgggaatctagtgccttccgcagtgaaaccgccaaagcccagaagatgctcaaggagctcatcaccagcacccgcctgggaacttactacaactccagctccgtctattcctttggggagggacccctcacctgcttcttctggttcattctccaaatccccgagcaccgccggctgatgctgagccccgaggtggtgcaggcactgctggtggaggagctgctgtccacagtcaacagctcggctgccgtcccctacagggccgagtacgaagtggaccccgagggcctagtgatcctggaagccagtgtgaaagacatagctgcattgaattccacgctgggttgttaccgctacagctacgtgggccagggccaggtcctccggctgaaggggcctgaccacctggcctccagctgcctgtggcacctgcagggccccaaggacctcatgctcaaactccggctggagtggacgctggcagagtgccgggaccgactggccatgtatgacgtggccgggcccctggagaagaggctcatcacctcggtgtacggctgcagccgccaggagcccgtggtggaggttctggcgtcgggggccatcatggcggtcgtctggaagaagggcctgcacagctactacgaccccttcgtgctctccgtgcagccggtggtcttccaggcctgtgaagtgaacctgacgctggacaacaggctcgactcccagggcgtcctcagcaccccgtacttccccagctactactcgccccaaacccactgctcctggcacctcacggtgccctctctggactacggcttggccctctggtttgatgcctatgcactgaggaggcagaagtatgatttgccgtgcacccagggccagtggacgatccagaacaggaggtaccacttcctctcctccctctggcttcctttcctccctccccctccctctcttccctcctcaatagtgaccccctcattggaagcccaagtccccaatctcagaggggcagcaaggggagcgagcagaggctggggctggtgtcaggcctgttgcccttgaccttgtcctcgtcccagcctccgccctggccccggcttcccctctggctaccccagaggtctcagacacgtttggtcatcagacaccttggatgtttattctaattacagcaaaattgtctcatcttcttgggtgctgtaaccccctctggcaccctcaatccttcaataaaatgtttccagagccaaagga

SEQ ID NO: 32341 - DNA, 1973 bp, Homo sapiens
  source 1..1973: mol_type = unassigned DNA
gtgggcatcaggaagaagtaacctgttgaatctatttctgctccccacccttactgcttcccataagggggaagccgcagactaataagcctcttccaaaaaagaggtaaagggaggtagacaaggggcggcagcggaggctggctactgcattccgtaggaggagccaacagttactttttacctgctgagtccggtgaaccagttcatgggggcggggacctgcctatgagaaaagggccaggatagaagagcccaaagcgatagaaccgcatggcttccgcagtctgggggagtgccccctggtggggcccgccgcccccggccccagctcggccgctcacggacatcgacttctgctccggggcgcagctgcaggaattgacccagctgatccaggagctgggtgtgcaggagagctggagtgacgggcccaagccgggagccgatctcctccgggccaaggactttgtcttctctttgcttggtctagttcaccgccgggaccctcgctttcctccccaggcagagctcttgctgcttcgtggtgggattcgcgagggctccctggatctggggcatgcacccctgggtccctacgcccggggacctcactacgatgccggcttcacactcctagtgcccatgttttcactggacggcactgaactgcaactggacctggaatcctgttacgcacaggtctgcctcccagagatggtgtgcggaacccccatccgggagatgtggcaggattgcttaggacccccagtcccaggagcacgtgattcgatccaccgaacggagagcgaagaaagttccaaggactggcaaagctctgtagaccagccgcacagctacgtcactgagcacgaggcgccggtgtctttggaaaaatcgcctagtgacgtttcagcgtccgagtcgcctcagcatgacgtcgtcgaccttggctctaccgcacctttgaaaacaatgagtagtgacgtcaccaaggcagccgtcgaaagcccagtcccaaagccgtcggaggctcgggaagcgtggcccacattatgttccgcccaggtggctgcctggttctttgctacgctggcggcggtcgccgagtctctgatccctgtcccgggtgctccgcgtctggtgcacgcagctcgccacgcgggtttcaccaccgtcctcctggctacccctgagccccctcgccgcctcctgctcttcgacctgatcccagtggtgtccgtggcgggctggcccgagggggctcggagccactcgtgggccggtccgctggcctctgagtcggcttccttctacctggtgcccggtggcggcaccgagcggccgtgcgcctccgcctggcagctctgttttgcccgccaggagctggcgctcaaagcgcgcataccagcgccgctgctgcaggcgcacgcggcggcccaggcgctactgcgcccgctggtggccgggacccgggcggcggcgccctacctcctgcggacgctgctgtactgggcgtgcgagcggctgcctgcgctctacctggcgcggccagaaaatgcgggcgcctgctgcctcgggctgctagacgagctcggccgagtgctcgaggccgggacgttgcctcactattttctgaacggccgacagctccgtacgggggacgactccgctgcgctgctcggagaattggcccggctccgcggggacccggcccgggccctccgtgccgcggtggaggaggccaaagtggcccgcaaggggggcggtttggcgggcgtggggggcggggcccattaaagacgctgttcctaccagtggaaagtgcctctgtgggcgagcgggacgtggggggccctgctcgcccctcgccagggggactgactgtgtgccctgggcctgaagccccccttctggaagacctccctgttggttcctcctctacgcccacccgcctgcccccgcacaagttg

SEQ ID NO: 32342 - DNA, 1962 bp, Homo sapiens
  source 1..1962: mol_type = unassigned DNA
gaagaagtaacctgttgaatctatttctgctccccacccttactgcttcccataagggggaagccgcagactaataagcctcttccaaaaaagaggtaaagggaggtagacaaggggcggcagcggaggctggctactgcattccgtaggaggagccaacagttactttttacctgctgagtccggtgaaccagttcatgggggcggggacctgcctatgagaaaagggccaggatagaagaggtatttatttgttcattttgaggactaaatttagaacccatcatctacagacccatttgtaggttgtgtctggggcactcgctcggcctcaggaagagggaagaacggggacgactttgtggcagcaaagccacctcccttccgtgttttccgcagcccaaagcgatagaaccgcatggcttccgcagtctgggggagtgccccctggtggggcccgccgcccccggccccagctcggccgctcacggacatcgacttctgctccggggcgcagctgcaggaattgacccagctgatccaggagctgggtgtgcaggagagctggagtgacgggcccaagccgggagccgatctcctccgggccaaggactttgtcttctctttgcttggtctagttcaccgccgggaccctcgctttcctccccaggcagagctcttgctgcttcgtggtgggattcgcgagggctccctggatctggggcatgcacccctgggtccctacgcccggggacctcactacgatgccggcttcacactcctagtgcccatgttttcactggacggcactgaactgcaactggacctggaatcctgttacgcacaggtctgcctcccagagatggtgtgcggaacccccatccgggagatgtggcaggattgcttaggacccccagtcccaggagcacgtgattcgatccaccgaacggagagcgaagaaagttccaaggactggcaaagctctgtagaccagccgcacagctacgtcactgagcacgaggcgccggtgtctttggaaaaatcgcctagtgacgtttcagcgtccgagtcgcctcagcatgacgtcgtcgaccttggctctaccgcacctttgaaaacaatgagtagtgacgtcaccaaggcagccgtcgaaagcccagtcccaaagccgtcggaggctcgggaagcgtggcccacattatgttccgcccaggtggctgcctggttctttgctacgctggcggcggtcgccgagtctctgatccctgtcccgggtgctccgcgtctggtgcacgcagctcgccacgcgggtttcaccaccgtcctcctggctacccctgagccccctcgccgcctcctgctcttcgacctgatcccagtggtgtccgtggcgggctggcccgagggggctcggagccactcgtgggccggtccgctggcctctgagtcggcttccttctacctggtgcccggtggcggcaccgagcggccgtgcgcctccgcctggcagctctgttttgcccgccaggagctggcgctcaaagcgcgcataccagcgccgctgctgcaggcgcacgcggcggcccaggcgctactgcgcccgctggtggccgggacccgggcggcggcgccctacctcctgcggacgctgctgtactgggcgtgcgagcggctgcctgcgctctacctggcgcggccagaaaatgcgggcgcctgctgcctcgggctgctagacgagctcggccgagtgctcgaggccgggacgttgcctcactattttctgaacggccgacagctccgtacgggggacgactccgctgcgctgctcggagaattggcccggctccgcggggacccggcccgggccctccgtgccgcggtggaggaggccaaagtggcccgcaaggggggcggtttggcgggcgtggggggcggggcccattaaagacgctgttcctacca

SEQ ID NO: 32343 - DNA, 6432 bp, Homo sapiens
  source 1..6432: mol_type = unassigned DNA
acggcggccgcgcgctccaggccggtcgctccaccccccggctcccgggactgtggactccacgaccctgtcctcggccctgtccgcgccgaagcagcccgggactgcgcagcgccccgcgtgccgatcttttcctaattcagcagcgatttaaccaagagcctggaatattttaaggagtaataagagacatttacaaactattctctctgaagcctgctacctggaggcatcatctagataatcagaaccttggcttccacatcctcctcccttgtcttaactacaaacatttctttctgctgacttcaactcctcagacatgggaaagtctctttctcatttgcctttgcattcaagcaaagaagatgcttatgatggagtcacatctgaaaacatgaggaatggactggttaatagtgaagtccataatgaagatggaagaaatggagatgtctctcagtttccatatgtggaatttacaggaagagatagtgtcacctgccctacttgtcagggaacaggaagaattcctagggggcaagaaaaccaactggtggcattgattccatatagtgatcagagattaaggccaagaagaacaaagctgtatgtgatggcttctgtgtttgtctgtctactcctttctggattggctgtgtttttccttttccctcgctctatcgacgtgaaatacattggtgtaaaatcagcctatgtcagttatgatgttcagaagcgtacaatttatttaaatatcacaaacacactaaatataacaaacaataactattactctgtcgaagttgaaaacatcactgcccaagttcaattttcaaaaacagttattggaaaggcacgcttaaacaacataaccattattggtccacttgatatgaaacaaattgattacacagtacctaccgttatagcagaggaaatgagttatatgtatgatttctgtactctgatatccatcaaagtgcataacatagtactcatgatgcaagttactgtgacaacaacatactttggccactctgaacagatatcccaggagaggtatcagtatgtcgactgtggaagaaacacaacttatcagttggggcagtctgaatatttaaatgtacttcagccacaacagtaaaaactggaagagatggatttaaagaagaaatatctattgatatttcctatactctcaatgaagaggtatttcctaataggagaccttaaattgaacaaacctaaagtttacacttctaagagtacagttaaaagtatgtggacctgcagttcttgtaactctccactctgtgttaatgatatatttgtactaggatcttttacttgaatctaaatttactggttgatttccttctccagcctatcccctacagggaaaagctgatacttcccctatagtacaataaataattatttaaaagtcatagctccagtcactactgaaaacataattttggtgataaacataatttgagaaacttaatttctgaatgtttttatagaaaattactgaaagtctattactcatggaagacttttaaagaataaccttttttcctgttttataaattcccattgttatatggtagtatttcagctacacaatattttagcttttagctagacatttatagcttttcatttgttgaaatggtaatcatctgcatgtttttgtcacttatttcaggttagtgattgcctaacacttataagccaaaataatctttgcaaaattccatacctaaaattttgaaagcccctaatgttttcacacatctttctgtattagttatagttttgtgaaatctttgtgtgatcttcaaacattatcatttaatgtacaatactgtaaataaactgtgcatggcttttatacagctttagtaaatgtcaaataaagtggtacagactcattacaacaagtttctcataaaaatacaataaataggaaaatgaaattcagaaacccatagactgggaataggttccagttacagcttggatctggcataaaataaatttgaaataaaatattttgatgctccatttttttatgttgcttttcatactaaagaatggtgtagacatgttttgcaactgttaggtacccagttatcaattttatcaatgttttagaggaggaaattatttttttggtagaaattgttcaagaaatccttaattgaatgtcattaaatgatggtggccaaaataaaacctatttagaaatttaatcactttgcacatcacttggaatatgatgcctctagtagttacttttttatagttttctacttttggttttatttaaaattgttttcaaatatagattattgacttattcaactttgctgttttatattttcagtatcatttttcatttttttttttttttgtcttttcacttaccaagttctagggacatttaaaatatgtactaagtgtaggagtggttatgataccaaaaaatgtagctgggttgagattaatttcgttctgttttctcatgacagaaatcaggtttccctttccccacccctaagtgcctaacttaggtctgaaacagcctgtttattagtctgactctctcaaccataaaacataagctttatttaattctgcctttaaacacactcaggtttccccttaattttcatattattttctgcaagttttcttgagtatcttcaattcgttgaatgtggtttttggtttttttttgttttaacactagtcttcccttaattcattgctaactcaagccatccttactattaaacccaaatcagtcctttaagttcattatggcctttctagtatttaaaaaaaaaaaaatcattttcatttttcttctgctacgtttcctgactactactgcatacttctctgatacaggttctgtttgtattttttatatcattctcattttctcatttgacatgatctatgtctatatatgatataggtccccttttgtctcaaaatttttaattatgtgacttcaaaaatcacctgtatctgtagtagggcttccaaatctgcttctccatatgtgaccagtcacctgtctgctttcacatttagctagtgaactacacatttactaaaatgtgtaaattttacacatttagtgactgtgtaaaataaaaaaaaagttattttatcatatcctttctattatgttcccatcctgtcctcatgtcccatttactttattatcaccattcatttcttcaaaattatcttttagatacgctcatacaaaaatcaatccttgttttcttgcttgtgtcttttaaccttggaaaattacatcgtgtaaattaaacagatttttctgatgatctgtgcttcttatatactattagagtgcatgatagtatctcctgaaaaggatggaaagtagaagcatttgcttttagtcacttaattttgaatcttttttcttcatcttttgaattaattttttttattatatctacttttagtggagtttgagtcagaaaaaaacaagaatttgaaacaagtaaaaagatagaagagaaataaagatggtatgtgactactttcagagagagttaagtaactgtcagaataagcctggaacaaaacaggctgtaaattaataaaactacaaacacacattcaggtgaagcagaagtatagccataaaacatctagaaagagtgaatgaggcttttagcttttcttaggtcaatgtccagtgtgcttttttccatgggaataggataggtattaatacgcttttctaaactgctctcagaccttatccagaggacatggtaaagatatgttacagaaatttttctgatacttcctggaataactttaagttacaccctagtagactggtcattctaataaaatccagtactataacaaacctctgtatgttgatagcacattggccctttttagagttctttcctatgtttttcttacgtgatttcccacagttccatgagtccaacaaaggagagtgataggctccttatcttttagaagaggaaggaaaggcatgaagaagttgagggactggctgaagatcacgtacttactaagtagtacaactggagcaagatcaagtatctctgtctcccatatctgtgttctatcatttaaaatatatattggaaatccctgctgactcagattggtatgattaaaaatgagaggaaagttcaaatagttagtagtgacaaactaatactgctggactaagattttggtagcattgttttctaaaatattttaaatggagaatgaacacttataaaatgctttggaacataatctttagcttaattttctgttaaaatttagtaccccttcatcattccaataaagataagactgatccattgtctaaggaaattatttataaataatagagattaatttatttgagatttgaaataagaatagtatgaaaatattagataccacataaattgtttgaaattactgaataaccatcttaagtatggaacatttaaatggctatattttatttgtgtacagtttttctgtgccttgttaggccagtgaagcaattattttctctaagaaaatgacaataaaatataacacacttcagattgtctgatttacagtttggaaaggacaccgcaatgttcaaataggtaggagaccatcaaaaacacaattaaagtaacatattaggagacttgaaacttcagcctaataaatccttcatggttcttagccttattattgtgatataattctagatattttcttggagggcatgtgcccaactctcccgcaccccattttgtttgtcttttaaagttcttagaataaacagttctttatataataattatattttatttaagaaaatagtttgttaggtactttttaaaagatgtaaatttttaaatttacaaatacatatgggtctttgataagcaataggaattgaattacaagttactagggttataagcaaaaggttgcttaccataatgtcattaggtcacgatttttagctcacatctggaagcagcaactacttggctcaagtacatataagagtaattagttttattctctcttttttataaaatcgggtttcagatgagatgtttatcttagactattttagggaaaaattttacatgtttgagatggtggagtaaaaagactgttaaacatttcttttaaaaaattatttttacattacaacaatatatttatgatgtgttcagatcaaaaatttaacttctgtgtcccagatctactttcaaagtgagattttcacttgtcagcttaaatttctgactagaactaacatttgtgtatttttgtgcttagtcggaatacaaatttcacagtggatttttgaagtttgtccttaaattggataaaatcaagtgattaaagttactaaagagataaaaatggtaatttccatttttaaaagtaatttggttgtgtttatagttatttgtacaagtatttatcacagactctaaattgaaaaatgtagtatgatctatatttgaccctaaaaatgttggattaatttaacaaatatggcagatttttcataactaagtcttaagtcttctaaaaggaagctgttacccttctgtttttaattacattaattgaaatgtgttttaagagatacaatttcagcatattttatatattaaaaaacaaaaaaggattagtattgagccagtggccaaaaggtaatattactaccatgtagactgttatagttcaaattgtcccacttcacccagaattttagaaactagaagtctgggaggtactatatcagctgtagttgggtaattccaagtgctgatagtactattcatcttttttattattgtgtcagatgaaacaaatgccaagttgcaaaatatgcagatttttattatataatggttttaggcataaattattaacaagccatgccttatgtgtttcatcttatatttttctttagaactaaactataacagattttggaaaatgatttgacgtgcttgctcacttgattgacttggtcagatatttgaatgatggtattacctagattctaatccttgattctagttatataataaataatatagaatatgaaaatatgtttgggcatttactgtttatattatgtagtagcctccatcatgacacacttactacatttatgaattgagcagttctgtaattgtaattattattgctgttcatgtaacaaaacatgcttataatagcaaacaaatagaaatgcccccaaaatgctatttttttaattcagttataactgttactcttgtagttgtgtatgacgcaataaaatttgtaaaaaaatttcagcatgaaaaataaaatttgtatcactta

SEQ ID NO: 32344 - DNA, 2126 bp, Homo sapiens
  source 1..2126: mol_type = unassigned DNA
agcagcgcttggcctctgctgatgccgtcgttatcctacccctcccccgtcccagctctacggcggccgcgcgctccaggccggtcgctccaccccccggctcccgggactgtggactccacgaccctgtcctcggccctgtccgcgccgaagcagcccgggactgcgcagcgccccgcgtgccgacatgggaaagtctctttctcatttgcctttgcattcaagcaaagaagatgcttatgatggagtcacatctgaaaacatgaggaatggactggttaatagtgaagtccataatgaagatggaagaaatggagatgtctctcagtttccatatgtggaatttacaggaagagatagtgtcacctgccctacttgtcagggaacaggaagaattcctagggggcaagaaaaccaactggtggcattgattccatatagtgatcagagattaaggccaagaagaacaaagctgtatgtgatggcttctgtgtttgtctgtctactcctttctggattggctgtgtttttccttttccctcgctctatcgacgtgaaatacattggtgtaaaatcagcctatgtcagttatgatgttcagaagcgtacaatttatttaaatatcacaaacacactaaatataacaaacaataactattactctgtcgaagttgaaaacatcactgcccaagttcaattttcaaaaacagttattggaaaggcacgcttaaacaacataaccattattggtccacttgatatgaaacaaattgattacacagtacctaccgttatagcagaggaaatgagttatatgtatgatttctgtactctgatatccatcaaagtgcataacatagtactcatgatgcaagttactgtgacaacaacatactttggccactctgaacagatatcccaggagaggtatcagtatgtcgactgtggaagaaacacaacttatcagttggggcagtctgaatatttaaatgtacttcagccacaacagtaaaaactggaagagatggatttaaagaagaaatatctattgatatttcctatactctcaatgaagaggtatttcctaataggagaccttaaattgaacaaacctaaagtttacacttctaagagtacagttaaaagtatgtggacctgcagttcttgtaactctccactctgtgttaatgatatatttgtactaggatcttttacttgaatctaaatttactggttgatttccttctccagcctatcccctacagggaaaagctgatacttcccctatagtacaataaataattatttaaaagtcatagctccagtcactactgaaaacataattttggtgataaacataatttgagaaacttaatttctgaatgtttttatagaaaattactgaaagtctattactcatggaagacttttaaagaataaccttttttcctgttttataaattcccattgttatatggtagtatttcagctacacaatattttagcttttagctagacatttatagcttttcatttgttgaaatggtaatcatctgcatgtttttgtcacttatttcaggttagtgattgcctaacacttataagccaaaataatctttgcaaaattccatacctaaaattttgaaagcccctaatgttttcacacatctttctgtattagttatagttttgtgaaatctttgtgtgatcttcaaacattatcatttaatgtacaatactgtaaataaactgtgcatggcttttatacagctttagtaaatgtcaaataaagtggtacagactcattacaacaagtttctcataaaaatacaataaataggaaaatgaaattcagaaacccatagactgggaataggttccagttacagcttggatctggcataaaataaatttgaaataaaatattttgatgctccatttttttatgttgcttttcatactaaagaatggtgtagacatgttttgcaactgttaggtacccagttatcaattttatcaatgttttagaggaggaaattatttttttggtagaaattgttcaagaaatccttaattgaatgtcattaaatgatggtggccaaaataaaacctatttagaaatttaa

SEQ ID NO: 32345 - DNA, 496 bp, Homo sapiens
  source 1..496: mol_type = unassigned DNA
ggtcgctccaccccccggctcccgggactgtggactccacgaccctgtcctcggccctgtccgcgccgaagcagcccgggactgcgcagcgccccgcgtgccggtgagcgaccccggacgtgcagtccccaggtccccttccggagcgaggctgagcggctgcgccgcggcttgagccgggcctgacaaggaggggaggccgctggggtgctgggccagccgcagatcttttcctaattcagcagcgatttaaccaagagcctggaatattttaaggagtaataagagacatttacaaactattctctctgaagcctgctacctggaggcatcatctagataatcagaaccttggcttccacatcctcctcccttgtcttaactacaaacatttctttctgctgacttcaactcctcagacatgggaaagtctctttctcatttgcctttgcattcaagcaaagaagatgcttatgatggagtcacatctgaaaac

SEQ ID NO: 32346 - DNA, 584 bp, Homo sapiens
  source 1..584: mol_type = unassigned DNA
ctctacggcggccgcgcgctccaggccggtcgctccaccccccggctcccgggactgtggactccacgaccctgtcctcggccctgtccgcgccgaagcagcccgggactgcgcagcgccccgcgtgccggtgagcgaccccggacgtgcagtccccaggtccccttccggagcgaggctgagcggctgcgccgcggcttgagccgggcctgacaaggaggggaggccgctggggtgctgggccagccgcagacatgggaaagtctctttctcatttgcctttgcattcaagcaaagaagatgcttatgatggagtcacatctgaaaacatgaggaatggactggttaatagtgaagtccataatgaagatggaagaaatggagatgtctctcagtttccatatgtggaatttacaggaagagatagtgtcacctgccctacttgtcagggaacaggaagaattcctagggggcaagaaaaccaactggtggcattgattccatatagtgatcagagattaaggccaagaagaacaaagctgtatgtgatggcttctgtgtttgtctgtctactcctttctgga

SEQ ID NO: 32347 - DNA, 516 bp, Homo sapiens
  source 1..516: mol_type = unassigned DNA
gctcgggaagtgtttgttgattgaatgaaggatgttagtaactgtcctctgcctggtatcctctctgtctcttctaagccatgcatgggacatttgtgattctgctgccgctcagcctgatcctgatggtttttggggggatgacggggtttctgagcttcctcctccaagcctacctcctcctcctgctcactggaattctcttcctctttggagccatggtgaccctcgctgggatcagcgtctacatagcgtattcagccgccgccttccgggaggcgctgtgtctcttggaggagaaggccctcctggaccaggtggacatcagcttcggctggtccctggccctgggctggatcagcttcatcgccgagctgctcaccggggcagccttcctggcagcagcccgcgagctcagcctgagacggaggcaggaccaggccatatgagcctgggcgctgggtcgtggaggggagggaggggcttggccccggagcttcaccgaccgatctccat

SEQ ID NO: 32348 - DNA, 3321 bp, Homo sapiens
  source 1..3321: mol_type = unassigned DNA
cccagcccggccccgccgccccggctgcgcacgcgacgccccctccaggccccgctcctgcgccctatttggtcattcggggggcaagcggcgggaggggaaacgtgcgcggccgaaggggaagcggagccggcgccggctgcgcagaggagccgctctcgccgccgccacctcggctgggagcccacgaggctgccgcatcctgccctcggaacaatgggactcggcgcgcgaggtgcttgggccgcgctgctcctggggacgctgcaggtgctagcgctgctgggggccgcccatgaaagcgcagccatggcggagactctccaacatgtgccttctgaccatacaaatgaaacttccaacagtactgtgaaaccaccaacttcagttgcctcagactccagtaatacaacggtcaccaccatgaaacctacagcggcatctaatacaacaacaccagggatggtctcaacaaatatgacttctaccaccttaaagtctacacccaaaacaacaagtgtttcacagaacacatctcagatatcaacatccacaatgaccgtaacccacaatagttcagtgacatctgctgcttcatcagtaacaatcacaacaactatgcattctgaagcaaagaaaggatcaaaatttgatactgggagctttgttggtggtattgtattaacgctgggagttttatctattctttacattggatgcaaaatgtattactcaagaagaggcattcggtatcgaaccatagatgaacatgatgccatcatttaaggaaatccatggaccaaggatggaatacagattgatgctgccctatcaattaattttggtttattaatagtttaaaacaatattctctttttgaaaatagtataaacaggccatgcatataatgtacagtgtattacgtaaatatgtaaagattcttcaaggtaacaagggtttgggttttgaaataaacatctggatccttatagaccgttcatacaatggttttagcaagttcatagtaagacaaacaagtcctatctttttttttttggctggggtgggggcattggtcacatatgaccagtaattgaaagacgtcatcactgaaagacagaatgccatctgggcatacaaataagaagtttgtcacagcactcaggattttgggtatcttttgtagctcacataaagaacttcagtgcttttcagagctggatatatcttaattactaatgccacacagaaattatacaatcaaactagatctgaagcataatttaagaaaaacatcaacattttttgtgctttaaactgtagtagttggtctagaaacaaaatactccaagaaaaagaaaattttcaaataaaacccaaaataatagctttgcttagccctgttagggatccattggagcattaaggagcacatatttttattaacttcttttgagctttcaatgttgatgtaatttttgttctctgtgtaatttaggtaaactgcagtgtttaacataataatgttttaaagacttagttgtcagtattaaataatcctggcattatagggaaaaaacctcctagaagttagattatttgctactgtgagaatattgtcaccactggaagttactttagttcatttaattttaattttatattttgtgaatattttaagaactgtagagctgctttcaatatctagaaatttttaattgagtgtaaacacacctaactttaagaaaaagaaccgcttgtatgattttcaaaagaacatttagaattctatagagtcaaaactatagcgtaatgctgtgtttattaagccagggattgtgggacttcccccaggcaactaaacctgcaggatgaaaatgctatattttctttcatgcactgtcgatattactcagatttggggaaatgacatttttatactaaaacaaacaccaaaatattttagaataaattcttagaaagttttgagaggaatttttagagaggacatttcctccttcctgatttggatattccctcaaatccctcctcttactccatgctgaaggagaagtactctcagatgcattatgttaatggagagaaaaagcacagtattgtagagacaccaatattagctaatgtattttggagtgttttccattttacagtttatattccagcactcaaaactcagggtcaagttttaacaaaagaggtatgtagtcacagtaaatactaagatggcatttctatctcagagggccaaagtgaatcacaccagtttctgaaggtcctaaaaatagctcagatgtcctaatgaacatgcacctacatttaataggagtacaataaaactgttgtcagcttttgttttacagagaacgctagatattaagaattttgaaatggatcatttctacttgctgtgcattttaaccaataatctgatgaatatagaaaaaaatgatccaaaatatggatatgattggatgtatgtaacacatacatggagtatggaggaaattttctgaaaaatacatttagattagtttagtttgaaggagaggtgggctgatggctgagttgtatgttactaacttggccctgactggttgtgcaaccattgcttcatttctttgcaaaatgtagttaagatatactttattctaatgaaggccttttaaatttgtccactgcattcttggtatttcactacttcaagtcagtcagaacttcgtagaccgacctgaagtttctttttgaatacttgtttctttagcactttgaagatagaaaaaccactttttaagtactaagtcatcatttgccttgaaagtttcctctgcattgggtttgaagtagtttagttatgtctttttctctgtatgtaagtagtataatttgttactttcaaatacccgtactttgaatgtaggtttttttgttgttgttatctataaaaattgagggaaatggttatgcaaaaaaatattttgctttggaccatatttcttaagcataaaaaaaatgctcagttttgcttgcattccttgagaatgtatttatctgaagatcaaaacaaacaatccagatgtataagtactaggcagaagccaattttaaaatttccttgaataatccatgaaaggaataattcaaatacagataaacagagttggcagtatattatagtgataattttgtattttcacaaaaaaaaagttaaactcttcttttctttttattataatgaccagcttttggtatttcattgttaccaagttctatttttagaataaaattgttctccttctaaaa

SEQ ID NO: 32349 - DNA, 3579 bp, Homo sapiens
  source 1..3579: mol_type = unassigned DNA
aaaggcttccttccgggcaccgcgaagccagcgtgctcagcattcagggaggcagcggcgctcgccttcatccaggacaacaaaactgccatttccgaagagaaaggaaacggctcgcggtttctggggttcccaagcgcgcgcctgcgagggaggccgcgagccgagtcgccacgcccagaaccccgagcccgcccccgcgccacccagcccggccccgccgccccggctgcgcacgcgacgccccctccaggccccgctcctgcgccctatttggtcattcggggggcaagcggcgggaggggaaacgtgcgcggccgaaggggaagcggagccggcgccggctgcgcagaggagccgctctcgccgccgccacctcggctgggagcccacgaggctgccgcatcctgccctcggaacaatgggactcggcgcgcgaggtgcttgggccgcgctgctcctggggacgctgcaggtgctagcgctgctgggggccgcccatgaaagcgcagccatggcggcatctgcaaacatagagaattctgggcttccacacaactccagtgctaactcaacagagactctccaacatgtgccttctgaccatacaaatgaaacttccaacagtactgtgaaaccaccaacttcagttgcctcagactccagtaatacaacggtcaccaccatgaaacctacagcggcatctaatacaacaacaccagggatggtctcaacaaatatgacttctaccaccttaaagtctacacccaaaacaacaagtgtttcacagaacacatctcagatatcaacatccacaatgaccgtaacccacaatagttcagtgacatctgctgcttcatcagtaacaatcacaacaactatgcattctgaagcaaagaaaggatcaaaatttgatactgggagctttgttggtggtattgtattaacgctgggagttttatctattctttacattggatgcaaaatgtattactcaagaagaggcattcggtatcgaaccatagatgaacatgatgccatcatttaaggaaatccatggaccaaggatggaatacagattgatgctgccctatcaattaattttggtttattaatagtttaaaacaatattctctttttgaaaatagtataaacaggccatgcatataatgtacagtgtattacgtaaatatgtaaagattcttcaaggtaacaagggtttgggttttgaaataaacatctggatccttatagaccgttcatacaatggttttagcaagttcatagtaagacaaacaagtcctatctttttttttttggctggggtgggggcattggtcacatatgaccagtaattgaaagacgtcatcactgaaagacagaatgccatctgggcatacaaataagaagtttgtcacagcactcaggattttgggtatcttttgtagctcacataaagaacttcagtgcttttcagagctggatatatcttaattactaatgccacacagaaattatacaatcaaactagatctgaagcataatttaagaaaaacatcaacattttttgtgctttaaactgtagtagttggtctagaaacaaaatactccaagaaaaagaaaattttcaaataaaacccaaaataatagctttgcttagccctgttagggatccattggagcattaaggagcacatatttttattaacttcttttgagctttcaatgttgatgtaatttttgttctctgtgtaatttaggtaaactgcagtgtttaacataataatgttttaaagacttagttgtcagtattaaataatcctggcattatagggaaaaaacctcctagaagttagattatttgctactgtgagaatattgtcaccactggaagttactttagttcatttaattttaattttatattttgtgaatattttaagaactgtagagctgctttcaatatctagaaatttttaattgagtgtaaacacacctaactttaagaaaaagaaccgcttgtatgattttcaaaagaacatttagaattctatagagtcaaaactatagcgtaatgctgtgtttattaagccagggattgtgggacttcccccaggcaactaaacctgcaggatgaaaatgctatattttctttcatgcactgtcgatattactcagatttggggaaatgacatttttatactaaaacaaacaccaaaatattttagaataaattcttagaaagttttgagaggaatttttagagaggacatttcctccttcctgatttggatattccctcaaatccctcctcttactccatgctgaaggagaagtactctcagatgcattatgttaatggagagaaaaagcacagtattgtagagacaccaatattagctaatgtattttggagtgttttccattttacagtttatattccagcactcaaaactcagggtcaagttttaacaaaagaggtatgtagtcacagtaaatactaagatggcatttctatctcagagggccaaagtgaatcacaccagtttctgaaggtcctaaaaatagctcagatgtcctaatgaacatgcacctacatttaataggagtacaataaaactgttgtcagcttttgttttacagagaacgctagatattaagaattttgaaatggatcatttctacttgctgtgcattttaaccaataatctgatgaatatagaaaaaaatgatccaaaatatggatatgattggatgtatgtaacacatacatggagtatggaggaaattttctgaaaaatacatttagattagtttagtttgaaggagaggtgggctgatggctgagttgtatgttactaacttggccctgactggttgtgcaaccattgcttcatttctttgcaaaatgtagttaagatatactttattctaatgaaggccttttaaatttgtccactgcattcttggtatttcactacttcaagtcagtcagaacttcgtagaccgacctgaagtttctttttgaatacttgtttctttagcactttgaagatagaaaaaccactttttaagtactaagtcatcatttgccttgaaagtttcctctgcattgggtttgaagtagtttagttatgtctttttctctgtatgtaagtagtataatttgttactttcaaatacccgtactttgaatgtaggtttttttgttgttgttatctataaaaattgagggaaatggttatgcaaaaaaatattttgctttggaccatatttcttaagcataaaaaaaatgctcagttttgcttgcattccttgagaatgtatttatctgaagatcaaaacaaacaatccagatgtataagtactaggcagaagccaattttaaaatttccttgaataatccatgaaaggaataattcaaatacagataaacagagttggcagtatattatagtgataattttgtattttcacaaaaaaaaagttaaactcttcttttctttttattataatgaccagcttttggtatttcattgttaccaagttctatttttagaataaaattgttctccttct

SEQ ID NO: 32350 - DNA, 739 bp, Homo sapiens
  source 1..739: mol_type = unassigned DNA
aaagatggctgcgcccaggtaatttgagcaaaggccacagtgaactccggcgtggctgaggaaggaggaggcacccacaggctgctgggaggagagcataaggctcaaaatggaaaatcataaatccaataataaggaaaacataacaattgttgatatatccagaaaaattaaccagcttccagaagcagaaaggaatctacttgaaaatggatcggtttatgttggattaaatgctgctctttgtggcctcatagcaaacagtctttttcgacgcatcttgaatgtgacaaaggctcgcatagctgctggcttaccaatggcagggataccttttcttacaacagacttaacttacagatgttttgtaagttttcctttgaatacaggtgatttggattgtgaaacctgtaccataacacggagtggactgactggtcttgttattggtggtctataccctgttttcttggctatacctgtaaatggtggtctagcagccaggtatcaatcagctctgttaccacacaaagggaacatcttaagttactggattagaacttctaagcctgtctttagaaagatgttatttcctattttgctccagactatgttttcagcataccttgggtctgaacaatataaactacttataaaggcccttcagttatctgaacctggcaaagaaattcactgattttaaacaaatatgtaaacaaaaataaaatggtaaaaacag

SEQ ID NO: 32351 - DNA, 656 bp, Homo sapiens
  source 1..656: mol_type = unassigned DNA
acgagtcagccaaagatggctgcgcccaggtaatttgagcaaaggccacagtgaactccggcgtggctgaggaaggaggaggcacccacaggctgctgggaggagagcataaggaatctacttgaaaatggatcggtttatgttggattaaatgctgctctttgtggcctcatagcaaacagtctttttcgacgcatcttgaatgtgacaaaggctcgcatagctgctggcttaccaatggcagggataccttttcttacaacagacttaacttacagatgttttgtaagttttcctttgaatacaggtgatttggattgtgaaacctgtaccataacacggagtggactgactggtcttgttattggtggtctataccctgttttcttggctatacctgtaaatggtggtctagcagccaggtatcaatcagctctgttaccacacaaagggaacatcttaagttactggattagaacttctaagcctgtctttagaaagatgttatttcctattttgctccagactatgttttcagcataccttgggtctgaacaatataaactacttataaaggcccttcagttatctgaacctggcaaagaaattcactgattttaaacaaatatgtaaacaaaaataaaatggtaaaaaca

SEQ ID NO: 32352 - DNA, 1550 bp, Homo sapiens
  source 1..1550: mol_type = unassigned DNA
gctaaccccctaactcccgttcctcctcggcgtttcttctccaagtccgaagtcagggtccaggactgctgcgatgcatcagccccgcctctcatcccccatccagaggaggcggaaatgttcaggtgaacgcgaagcctcccactacgagccggccctcagcaaggccgtgcgcagtgtgggcgggagccctaagtcagctagcggcgacgctgggagggcccggagcaggccgggccccgaacagcgaaagctccaacatggcggccagactggccatagagcgggaagagaaagccggggactagcaggccgcacggcgcagacggggcccgcctcctccatttacttccggaatttaaagccggcttccggaagccgggacgatgtccgcatgacaaccgacgttggagtttggaggtgcttgccttagagcaagggaaacagctctcattcaaaggaactagaagcctctccctcagtggtagggagacagccaggagcggttttctgggaactgtgggatgtgcccttgggggcccgagaaaacagaaggaagatgctccagaccagtaactacagcctggtgctctctctgcagttcctgctgctgtcctatgacctctttgtcaattccttctcagaactgctccaaaagactcctgtcatccagcttgtgctcttcatcatccaggatattgcagtcctcttcaacatcatcatcattttcctcatgttcttcaacaccttcgtcttccaggctggcctggtcaacctcctattccataagttcaaagggaccatcatcctgacagctgtgtactttgccctcagcatctcccttcatgtctgggtcatgaacttacgctggaaaaactccaacagcttcatatggacagatggacttcaaatgctgtttgtattccagagactagcagcagtgttgtactgctacttctataaacggacagccgtaagactaggcgatcctcacttctaccaggactctttgtggctgcgcaaggagttcatgcaagttcgaaggtgacctcttgtcacactgatggatacttttccttcctgatagaagccacatttgctgctttgcagggagagttggccctatgcatgggcaaacagctggactttccaaggaaggttcagactagctgtgttcagcattcaagaaggaagatcctccctcttgcacaattagagtgtccccatcggtctccagtgcggcatcccttccttgccttctacctctgttccaccccctttccttcctttcctctctgtaccattcattctccctgaccggcctttcttgccgagggttctgtggctcttacccttgtgaagcttttcctttagcctgggacagaaggacctcccagcccccaaaggatctcccagtgaccaaaggatgcgaagagtgatagttacgtgctcctgactgatcacaccgcagacatttagatttttatacccaaggcactttaaaaaaatgttttataaatagagaataaattgaattcttgttccataaa

SEQ ID NO: 32353 - DNA, 2839 bp, Homo sapiens
  source 1..2839: mol_type = unassigned DNA
aaagccggcttccggaagccgggacgatgtccgcatgacaaccgacgttggagtttggaggtgcttgccttagagcaagggaaacagctctcattcaaaggaactagaagcctctccctcagtggtagggagacagccaggagcggttttctgggaactgtgggatgtgcccttgggggcccgagaaaacagaaggaagatgctccagaccagtaactacagcctggtgctctctctgcagttcctgctgctgtcctatgacctctttgtcaattccttctcagaactgctccaaaagactcctgtcatccagcttgtgctcttcatcatccaggatattgcagtcctcttcaacatcatcatcattttcctcatgttcttcaacaccttcgtcttccaggctggcctggtcaacctcctattccataagttcaaagggaccatcatcctgacagctgtgtactttgccctcagcatctcccttcatgtctgggtcatggtaagagtggcagtctgaattctttttttaatttttattttaaatagaggtggggtcttactttgttaccaaggctggtctcaaactcctgagctcaagcaattctcctgcttctgcctcccaagctcaagcaattctcctgcttctgcctcccaaagtgctggaattacaggcatgagtcactgtgcccggcctgaactctgaattcctgaatcgctaaagggctaggaataacttttcttttcttttcttttctttttttttttttttgagacagagtctcgctctgtcgcctggctggagtgcagtggcgtgatctcagctcactgcaacctccgcttcctgggttcaagcaattctcctccctcagtctcctgagtacctgggattacaggcacgcaccaccacgcccagctaatttttgtgtttttagtagagactgggtttcaccatgttggccgggatggtctcaatctcttgacctcgtgatcctcctgcctcggcctctgaagtgctaggattacaggcgtgagctactgcgcccggccactgggatatcttttctctgggaacccagcttcattctttgacatctcacacaatccttcgtagagaacaggtgaaatgaaagtggtttgggttggagccctgggcatgtgagagtttcataaggtactcttgaccaaccttatgtgttgaaaaacagccttgtccaagagtcaggggactcttccagaacattcaattcacctttgccccaaacaggcctaccagggctaaaacaggtagttgaatgtgtctcatcattagctatttgggcaggtggatgttgatacaggttattcttaggcatcagtgccccatggctaatgctgtaggcagtggatgtttttggaagtagccaagcaggattgctgcttgcccttgagtgctccatgccgtctgccaagctcccatcactttaactaggagaaccggcctccaggatccctccctttggttctaacataggcctcagatcagatccagtgtctgtggtttcagatttcttctgcttcacaaattcttccagctctttgagtatcttgtatatttctcatgtactcaattcaattgaactctaaaacctcagggttctctagttgtcacttcattattaaagccactttcacacctgaaccccctgttaggttgtgcttgtgattccacagaaagaagtagaggtcccaggaaagaagcaaagcaacaccagagtctccgggtgcttcctgaagaggattctgtgccctggttcctggagccaaaataggtcctggctttgtactataaaagccgttaatctcattaaaccctgagtacaccaaagtctttatctgacaggagctgagccagcgatttttcaaggcaagacagtgaccagctgaactcctgagataatgaatatatcatttctccttggcaaaggttatggaattaaagagaataaataacttagttcatacttcctccctcaaagttaaaagatattccctttgcagcgaaaaatggagctttgaggctccttcgagaaacgctccttggggttgtagaaaggaggaagaggttagcatgattttaaagcaactggcatctctgcagctaaccaagttggagacattagggcttcttgtggccattaacttttgtgtatctcacatctccttcagaacttacgctggaaaaactccaacagcttcatatggacagatggacttcaaatgctgtttgtattccagagactaggtaaggaccagagcaaggtcaggcctctctcaggtcccacatgtgtctctttcagtgagggccttgatgctggcttcccagacctgtcccagctggcttgggatggttgtgacagccacaccaggaacaggagggattactgcccctgcccttgctagaagactatgggaaatgaggaggcagggctgcccagcctcattaggttctgttctttttgtttgtttgtttgtttgtttgtttgtttttgagacagtcttgctctgtcgcccaggctggagtgctgtggcgctatctcaggctcactgcaagctccgcctcccgggttcacaccattctcctgcctcagcctccggagtagctgggactacaggcgcccgccaccacgcccagctaattttttgtgtatttttagtagagacagggtttcaccgtgttagccaggatggtctcgatctctgacctcatgatccgcctgcctctgcctcctaaagtgctgggattacaggcgtgagccaccacgcctggccaggttctgttcttaacctgaaatgatactca

SEQ ID NO: 32354 - DNA, 1771 bp, Homo sapiens
  source 1..1771: mol_type = unassigned DNA
tataaaaatagctcttgttaccggaaataactgttcatttttcactcctccctcctaggtcacacttttcagaaaaagaatctgcatcctggaaaccagaagaaaaatatgagacggggaatcatcgtgtgatgtgtgtgctgcctttggctgagtgtgtggagtcctgctcaggtgttaggtacagtgtgtttgatcgtggtggcttgaggggaacccgctgttcagagctgtgactgcggctgcactcagagaagctgcccttggctgctcgtagcgccgggccttctctcctcgtcatcatccagagcagccagtgtccgggaggcagaagatgccccactccagcctgcatccatccatcccgtgtcccaggggtcacggggcccagaaggcagccttggttctgctgagtgcctgcctggtgaccctttgggggctaggagagccaccagagcacactctccggtacctggtgctccacctagcctccctgcagctgggactgctgttaaacggggtctgcagcctggctgaggagctgcgccacatccactccaggtaccggggcagctactggaggactgtgcgggcctgcctgggctgccccctccgccgtggggccctgttgctgctgtccatctatttctactactccctcccaaatgcggtcggcccgcccttcacttggatgcttgccctcctgggcctctcgcaggcactgaacatcctcctgggcctcaagggcctggccccagctgagatctctgcagtgtgtgaaaaagggaatttcaacgtggcccatgggctggcatggtcatattacatcggatatctgcggctgatcctgccagagctccaggcccggattcgaacttacaatcagcattacaacaacctgctacggggtgcagtgagccagcggctgtatattctcctcccattggactgtggggtgcctgataacctgagtatggctgaccccaacattcgcttcctggataaactgccccagcagaccggtgaccatgctggcatcaaggatcgggtttacagcaacagcatctatgagcttctggagaacgggcagcgggcgggcacctgtgtcctggagtacgccacccccttgcagactttgtttgccatgtcacaatacagtcaagctggctttagccgggaggataggcttgagcaggccaaactcttctgccggacacttgaggacatcctggcagatgcccctgagtctcagaacaactgccgcctcattgcctaccaggaacctgcagatgacagcagcttctcgctgtcccaggaggttctccggcacctgcggcaggaggaaaaggaagaggttactgtgggcagcttgaagacctcagcggtgcccagtacctccacgatgtcccaagagcctgagctcctcatcagtggaatggaaaagcccctccctctccgcacggatttctcttgagacccagggtcaccaggccagagcctccagtggtctccaagcctctggactgggggctctcttcagtggctgaatgtccagcagagctatttccttccacagggggccttgcagggaagggtccaggacttgacatcttaagatgcgtcttgtccccttgggccagtcatttcccctctctgagcctcggtgtcttcaacctgtgaaatgggatcataatcactgccttacctccctcacggttgttgtgaggactgagtgtgtggaagtttttcataaactttggatgctagtgta

SEQ ID NO: 32355 - DNA, 901 bp, Homo sapiens
  source 1..901: mol_type = unassigned DNA
ggctagagtgttgtggagaaaccaatcgttgttaacatctcattttcaggctgcactcagagaagctgcccttggctgctcgtagcgccgggccttctctcctcgtcatcatccagagcagccagtgtccgggaggcagaagatgccccactccagcctgcatccatccatcccgtgtcccaggggtcacggggcccagaaggcagccttggttctgctgagtgcctgcctggtgaccctttgggggctaggagagccaccagagcacactctccggtacctggtgctccacctagcctccctgcagctgggactgctgttaaacggggtctgcagcctggctgaggagctgcgccacatccactccaggtaccggggcagctactggaggactgtgcgggcctgcctgggctgccccctccgccgtggggccctgttgctgctgtccatctatttctactactccctcccaaatgcggtcggcccgcccttcacttggatgcttgccctcctgggcctctcgcaggcactgaacatcctcctgggcctcaagggcctggccccagctgagatctctgcagtgtgtgaaaaagggaatttcaacgtggcccatgggctggcatggtcatattacatcggatatctgcggctgatcctgccagagctccaggcccggattcgaacttacaatcagcattacaacaacctgctacggggtgcagtgagccagcggctgtatattctcctcccattggactgtggggtgcctgataacctgagtatggctgaccccaacattcgcttcctggataaactgccccagcagaccggtgaccatgctggcatcaaggatcgggtttacagcaacagcatctatgagcttctggagaacgggcagcgg

SEQ ID NO: 32356 - DNA, 2762 bp, Homo sapiens
  source 1..2762: mol_type = unassigned DNA
ggcagatctcacgagagaggatttggcgccctcctctgtggattctggccaggccgggttcggcggttgctgtgagagcgggcttcccaacaccatgccgtccgccttctctgtcagctctttccccgtcagcatcccagccgtgctcacgcagacggactggactgagccctggctcatggggctggccaccttccacgcgctctgcgtgctcctcacctgcttgtcctcccgaagctacagactacagatcgggcactttctgtgtctagtcatcttagtctactgtgctgaatacatcaatgaggcggctgcgatgaactggagattattttcgaaataccagtatttcgactccagggggatgttcatttctatagtattttcagccccactgctggtgaatgccatgatcattgtggttatgtgggtatggaagactttgaatgtgatgactgacctgaagaatgcacaagagagaagaaaggaaaagaaaaggagaaggaaagaagactgaggggcagcagctgcttggagtttgcgtccttcccgtccacccagtgcagctcccagtgctgcagtgtgcgtggcgtgggcatccttccagctgactcatggtttgaaaaaccgttgttttatttaaatatccacagtggtagggcacacactgaagttggcttttcagccagcactgaatgtatccatcaggacatgcgtcttcaggtgcctgatctttgtagtcaggctgtgggaacggtctctgcagagcttcataactgggaatttgatttgaagaagtccatgtcatatgtgtaactagtactaattataaatataaaatacacaatataaaatatgaaactcaataataaacagtgccacctgtacatgggcaccatgccctcctcctcgtgctgtgttttctagtgcatgccacagttcgcagtagagggtgttttcaccttccaagacatggggcaaagtttggagacacctggttgtcactggagggggtggtgctcctggcttctcctgtggagcccggggtgatgcataaaatcctgtgtgcctgggtcagccgcatcacagacaatgacttgacatgaaatgtcagctgtgctggggcagagagaccttggaaggaagctcttggaaaatacgttgtatctcagtttgatgaaccaattcacaagaggctaggccctctctagcaaagttatgggctgctttactgaaaacagaatggaagccctgaagtcaacactccatggagaagcgtgtctttcctaatgtcctggtgttctgttgatttaggtgcttgggaacacaatgctcccagttctgttaggacaggcatactgttactttgcaatatccactttataaaatagctcctgcccagtggctcttggttcctgtcaaatgtggacctgtagtttaagaatgacaggtggttagagacccagatatttaaaaataggtgttcaataagggaatactgattgtgcattgtatctggatagcatgcctaattgtgcatttctgaaagttaccaattcaaaatgtaattggaacagttatctttgattagacaagcctgggaagagaatgttgaggtgcagagctcaccagccaagttcatgcccctctcgggcctttgtggctgagaagtgggacagaaagatgattaaggtaatgtgtcctccctgtagcattgtccagggccgttgtgtagatatttgacttcactgacagaaaagaaaccagggagtttgtagagactgtgcatttttagtataacattttcaccatctgatatggtttggctttgtgtccccacccaaattgcatctcaaattgtaatccccatgtgtcaagggagggacctgatgggaggtgatgggatcatgggggtggtttcccctatgttgttatcataatagagagggagttctcacaagatctgctggttttaaagacagcagtttcccctgctgtcactgtctctctcctgctgccttgtgaagaaggtgcttgtttctccctctgccatgattgtaagtttcccgaggcctccccggccatgtggaactgagtcaattaaacttcttgtttataaagtaatccaggtctcaggtagtatctttatagcagtgtgagaacagactaattaaacatctatatgttatttggacttaatatggggccgtgtgattgaatctcagtttgcctgtgataaagtagtgtaacagtattgctagctttgcatgaatttgatgctgatgacatgtcagtgtgaaaccatgacgtgtggtctttgattttcattctgcatgtgtgtgtctgtgttttggaacagttatattttggttttgtaaaaacaaccttcactttatttttaactgtgtagtaagtttatattcaatgccttaaagtgcattgttaacaattgtcttgatatgttgtcctcattttagggaaagtcatagaagccaaaatgatcagcagttgagtaatttacgaaagcacaggtgcaatcccactttaaagcactgggggttgcacagagcacactggtttcaggctccataaatgtggatgactcactggagagcttcatctgtttaagtagaacaaatgtttttactctactgataaagtacaggaaaggaggtttgggatcaaaattatttttcacattccaaacctgtgacaccttacgtttatcgattgctatgcaataaaatacatctttaataata

SEQ ID NO: 32357 - DNA, 775 bp, Homo sapiens
  source 1..775: mol_type = unassigned DNA
atgctctctggatacttgcagacggactggactgagccctggctcatggggctggccaccttccacgcgctctgcgtgctcctcacctgcttgtcctcccgaagctacagactacagatcgggcactttctgtgtctagtcatcttagtctactgtgctgaatacatcaatgaggcggctgcgatgaactggagattattttcgaaataccagtatttcgactccagggggatgttcatttctatagtattttcagccccactgctggtgaatgccatgatcattgtggttatgtgggtatggaagactttgaatgtgatgactgacctgaagaatgcacaagagagaagaaaggaaaagaaaaggagaaggaaagaagactgaggggcagcagctgcttggagtttgcgtccttcccgtccacccagtgcagctcccagtgctgcagtgtgcgtggcgtgggcatccttccagctgactcatggtttgaaaaaccgttgttttatttaaatatccacagtggtagggcacacactgaagttggcttttcagccagcactgaatgtatccatcaggacatgcgtcttcaggtgcctgatctttgtagtcaggctgtgggaacggtctctgcagagcttcataactgggaatttgatttgaagaagtccatgtcatatgtgtaactagtactaattataaatataaaatacacaatataaaatatgaaactcaataataaacagtgccacctgtacatgggcaccatgccctcctc

SEQ ID NO: 32358 - DNA, 5288 bp, Homo sapiens
  source 1..5288: mol_type = unassigned DNA
ggcgcggaggcggatgggcgcggctccctcccccactcaggcctcttcacggggcggggggccgggtcccccagcccccacccgcgccgtgtccagctcctcgcgtgctcgcggcggagccctgagcgcactgggtccgagtcctgcgcgccccctcaccacctcccccgcacctgctcctcctcctcggtcccgcccagcgcgccagcagcccgatccccagtgctgggagaagagagggggcgcaggcggcgacacaaagggtggagcggcgggaccgggacccgggaggctgcgcggcatggacgccgagtaccctgcctttgagcccccgctctgcagcgagctcaagcacctgtgccggcggctgcgggaagcgtaccgcgagctcaaggaggacctcacgcccttcaaggatgaccgctactacaggacctaaagtgatccagacttctgcggctaatttttcactaaataatagcaaaaagctaaagccaattcaaatactttcaaatccactgtctacatacaatcagcaactatggctgacatgtgttgttgagttggatcaatcaaaagaaacttctattaagacaagctttcccatgactgttaaagtcgatggtgtagctcaagatggaaccacgatgtacattcataacaaagttcacaaccggacaaggaccctcacatgtgcagggaaatgtgcggagattattgtggctcaccttggctacctgaactacactcagtatacagtgatagtgggatttgaacacctgaagctccccatcaagggaatgaacttcacatggaagacttataaccctgccttctcccggttggaaatctggttccggtttttctttgtggtgctcaccttcatcgtcacttgcctgtttgcgcattccctccggaaattttccatgagagactggggcatcgagcagaagtggatgtctgttctcctgcctctgctgctactttacaatgatccgttcttccccctctccttcctggtcaacagctggctcccagggatgctggatgacctctttcagtccatgttcctgtgcgccctgctgctcttctggctgtgcgtgtaccacgggattcgtgtccagggagaaagaaagtgtttaactttctatttgcctaaattcttcattgttggactattgtggttggcttctgttacgctaggaatatggcaaacagttaacgaattacatgatccaatgtaccagtatcgagttgataccggaaattttcagggaatgaaggtcttcttcatggtggtggcagcggtgtacattctgtacctcttgttcttgatagtgcgggcgtgttccgagctacgtcacatgccttatgtggatctcaggttgaaatttttgactgcattgactttcgtagtacttgtcattagcatcgccatcctttatttgagatttggggcgcaagtactacaagacaattttgtagcagagctgtcaactcactaccagaaaccagccgagttcttatctttctatggcctgttgaacttctatctctacaccttggcctttgtatattctccatcgaagaatgccctctatgagtcccagctgaaagacaatcctgccttctccatgctgaatgactcggatgatgatgtgatttatgggagtgactatgaggaaatgccgctgcagaacggccaggccatccgggccaagtacaaggaggagtcagatagtgactgagccccggccagcccagcgaggcgacaagatgcctggatgctttccccggtgaccgtctgctgaccttcccctgttatattcagatttttcttacaagcagagatttcctgttcatttgtttacatatttttttaaaggaaaaccaaaactgagggtaaatttaaatgtttagccaaatttattgtcatggtggctacgagaagaggcattgataacaagtttcaacagccaaatccttttttacagagatttcagatgagcgtgttttcagtgatgaggaaatttcacgtttttagtacagtgaattatgtacttttttttcctgtaatcattcactgattccaagttcacgggcagcctgtgactaggtcctcagcgtgacagcatcaccctctttcttcccttttccatggtactgttttgtgaccctttaaactcaaagggaagccttatctgtggctgcttcagggcagtccttcctcgttgagtggccagtgccctgggtaaccaggtggctgaagtgattggtcagttatgtggactgcgttttgtgcagtgtgtgagttatgactcatcgggaatgggagatgctggggttccaacccttcacgtcaccaaaggggaagtaatagtgtggagttctgaggagggtttgataagttgaataaggaaaggctaagataatttacaggttaccaactcatgtggggaaggtcttactgccatggtgcttttcaggggcctgtgtgtacacacatgattaaatggatttgcctgtgggaggtatgggcaggagaggaacccttaccattccagtaaatagcagtttctgcaattctgttgaatatgaaatgccatagagctttatttatttatgtaagtaaaagctaaatgaggggccaggtgcagtggctcacatctgtaatctcaacactttgggaggccaaggtgggaggatcacttgagcccaggagtttgagaccagcctgggcaacacagggagaccccgtctctataaaacatttagaaagttggctgggcatgctggggcatgcccatagtcccagctactcaggaggctgaggtgggaggattgcttgagccctggaggtcaaggctgcagtgagccatgattgcaccactgcactccagcctgggtgtcagagcgagaacccgtgtcataaataaataaagctacatgaaagattgatagaatattttagattatttattggccaaaagtttttaaaactcatatttggaagcaaaatgaaaagcaagtaaaatgttttaaatggttcatggaaaacgtatttgggtagaaggcaactcgtgcttccggaaggggttccctgtcctccatgtgtccacatggcggtcaggtagggacgacctgttctgtaaagtccttggcactgctgaatctgtggcatcatagaaggccctggagcttccccgttcctttcagtcagggactccatatagagtctcatgtggacgtctcccgtgctttcctcttgacctctacagtcacacttctgttaacatctggtaactgtgggcaacctgactgatgccgtcttggcaattgaggtccagaagatgatagttccgcaacgcaagcagtacctactttttttcttcatctatgcattgactctcagattaccatgcagagcttcacgttatcatccacgttaagtagtgctaggtaggaccttagagatgttcatgagaaactatttgttatgactttcctttgtatctttccttttaatttaaactttaatgataatgtacttttaatatggattctattcacatttgttttaaaaaccttgtaaatatgaatgtttaagacaacttactgcaagggtaattcaagtttacatgatttttaaatttgcaatgatgttttttttattctgtgtattgaaaaaaattttctgttaccaaattttacaacttctaataagactactataactttatgtaaactgatgaagatgtgctgattaacatattctgtgatatggtttacaacttttaatcataattgtccatgattttggaatgctgttatttatcagtaaatgtaaaatatttgaggcatttagccatacacacactagaactttttaaaactttgtcctatagtgtaattataaactgatgactattatcttcatacattgagtcttcatgcatcaatgaaatgaaaaatataggattatttatttactttttgtaactaagtgggaaataagaaaaaaagttagaaagtacttaaggggaaaatcgttcttactaagtcatgtattttcaacttgtcttccctggtatatcataaataccgacatattacataccccatgtaaaattttgcttaaactctctagcacttggcatgtagaatatgtaccataggtatcaggttaaaacactaaagtctgccagaaacttttgacagtagcaagaaaattgttgaagaaaaaataaattatttactgagggtagttatgttaaagttttgcgaacttaaagggctgactttagttccttcatggtaatggcttgagtaacatcatctttgggattttttaaatactggtccagtctaggagaacctggaagatgaccagaggtatttcagtttccctagggagagcttcgttatccatgtggatgataagtctgcttgatttattattaaatcattatagcagtgaagtggtgccattttctctctcttaagccccatttgaaaggctagagaaggggatatatatactatgttcaaggtttgtaaggttgttaatgtacataattgcagattgcaataaaagcttagatacattttgtaaacccaacccactaaatgagcaggttacaagacaaatgtcaccagcctcaagtattttatgaactatttactgagggtagttatgttaaatagattataatgtggtaaattatttcctgaatcctttatcacaggaaaaacacagaccctcataaaagggataattaaaacggatgtgtctgaacatttagtgaagatgagacttaaaacatgaaagtgtatttgtgtattttgagggttttagaaaccggttgccttagaggttagacttttgaagaaaaaaaaaaaaagatacagatcttttcccctggccaaagggaagttgtattagtctgtgacatcttgtgatgctgtttatcttggtttgacattggagatacgctagtaactgtgataccatactataaaacagaagaattttctgctactaaaaactgcctttttacaaaatgactgtaaatatttgtaaaataaaataacactaaactttaagcccaaaaggagagatagagccatgtgttcagttgtggacctgtccgtggggcacagtgccaccccatcacagtgttgctgtcatcaggcaaaagtgaatgtttgtttatggcaaattcgtcttttgcgaatggcttaattctgacactacctttctgggaaatgttaataaatttttaatattc

SEQ ID NO: 32359 - DNA, 5390 bp, Homo sapiens
  source 1..5390: mol_type = unassigned DNA
cgcggaggcggatgggcgcggctccctcccccactcaggcctcttcacggggcggggggccgggtcccccagcccccacccgcgccgtgtccagctcctcgcgtgctcgcggcggagccctgagcgcactgggtccgagtcctgcgcgccccctcaccacctcccccgcacctgctcctcctcctcggtcccgcccagcgcgccagcagcccgatccccagtgctgggagaagagagggggcgcaggcggcgacacaaagggtggagcggcgggaccgggacccgggaggctgcgcggcatggacgccgagtaccctgcctttgagcccccgctctgcagcgagctcaagcacctgtgccggcggctgcgggaagcgtaccgcgagctcaaggaggacctcacgcccttcaaggatgaccgctactacaggctggcgcccatgcggctctacacgctctccaagcgccactttgtcctcgtgtttgtcgtcttcttcatctgctttggcctgaccatcttcgttgggatcagaggacctaaagtgatccagacttctgcggctaatttttcactaaataatagcaaaaagctaaagccaattcaaatactttcaaatccactgtctacatacaatcagcaactatggctgacatgtgttgttgagttggatcaatcaaaagaaacttctattaagacaagctttcccatgactgttaaagtcgatggtgtagctcaagatggaaccacgatgtacattcataacaaagttcacaaccggacaaggaccctcacatgtgcagggaaatgtgcggagattattgtggctcaccttggctacctgaactacactcagtatacagtgatagtgggatttgaacacctgaagctccccatcaagggaatgaacttcacatggaagacttataaccctgccttctcccggttggaaatctggttccggtttttctttgtggtgctcaccttcatcgtcacttgcctgtttgcgcattccctccggaaattttccatgagagactggggcatcgagcagaagtggatgtctgttctcctgcctctgctgctactttacaatgatccgttcttccccctctccttcctggtcaacagctggctcccagggatgctggatgacctctttcagtccatgttcctgtgcgccctgctgctcttctggctgtgcgtgtaccacgggattcgtgtccagggagaaagaaagtgtttaactttctatttgcctaaattcttcattgttggactattgtggttggcttctgttacgctaggaatatggcaaacagttaacgaattacatgatccaatgtaccagtatcgagttgataccggaaattttcagggaatgaaggtcttcttcatggtggtggcagcggtgtacattctgtacctcttgttcttgatagtgcgggcgtgttccgagctacgtcacatgccttatgtggatctcaggttgaaatttttgactgcattgactttcgtagtacttgtcattagcatcgccatcctttatttgagatttggggcgcaagtactacaagacaattttgtagcagagctgtcaactcactaccagaattcagccgagttcttatctttctatggcctgttgaacttctatctctacaccttggcctttgtatattctccatcgaagaatgccctctatgagtcccagctgaaagacaatcctgccttctccatgctgaatgactcggatgatgatgtgatttatgggagtgactatgaggaaatgccgctgcagaacggccaggccatccgggccaagtacaaggaggagtcagatagtgactgagccccggccagcccagcgaggcgacaagatgcctggatgctttccccggtgaccgtctgctgaccttcccctgttatattcagatttttcttacaagcagagatttcctgttcatttgtttacatatttttttaaaggaaaaccaaaactgagggtaaatttaaatgtttagccaaatttattgtcatggtggctacgagaagaggcattgataacaagtttcaacagccaaatccttttttacagagatttcagatgagcgtgttttcagtgatgaggaaatttcacgtttttagtacagtgaattatgtacttttttttcctgtaatcattcactgattccaagttcacgggcagcctgtgactaggtcctcagcgtgacagcatcaccctctttcttcccttttccatggtactgttttgtgaccctttaaactcaaagggaagccttatctgtggctgcttcagggcagtccttcctcgttgagtggccagtgccctgggtaaccaggtggctgaagtgattggtcagttatgtggactgcgttttgtgcagtgtgtgagttatgactcatcgggaatgggagatgctggggttccaacccttcacgtcaccaaaggggaagtaatagtgtggagttctgaggagggtttgataagttgaataaggaaaggctaagataatttacaggttaccaactcatgtggggaaggtcttactgccatggtgcttttcaggggcctgtgtgtacacacatgattaaatggatttgcctgtgggaggtatgggcaggagaggaacccttaccattccagtaaatagcagtttctgcaattctgttgaatatgaaatgccatagagctttatttatttatgtaagtaaaagctaaatgaggggccaggtgcagtggctcacatctgtaatctcaacactttgggaggccaaggtgggaggatcacttgagcccaggagtttgagaccagcctgggcaacacagggagaccccgtctctataaaacatttagaaagttggctgggcatgctggggcatgcccatagtcccagctactcaggaggctgaggtgggaggattgcttgagccctggaggtcaaggctgcagtgagccatgattgcaccactgcactccagcctgggtgtcagagcgagaacccgtgtcataaataaataaagctacatgaaagattgatagaatattttagattatttattggccaaaagtttttaaaactcatatttggaagcaaaatgaaaagcaagtaaaatgttttaaatggttcatggaaaacgtatttgggtagaaggcaactcgtgcttccggaaggggttccctgtcctccatgtgtccacatggcggtcaggtagggacgacctgttctgtaaagtccttggcactgctgaatctgtggcatcatagaaggccctggagcttccccgttcctttcagtcagggactccatatagagtctcatgtggacgtctcccgtgctttcctcttgacctctacagtcacacttctgttaacatctggtaactgtgggcaacctgactgatgccgtcttggcaattgaggtccagaagatgatagttccgcaacgcaagcagtacctactttttttcttcatctatgcattgactctcagattaccatgcagagcttcacgttatcatccacgttaagtagtgctaggtaggaccttagagatgttcatgagaaactatttgttatgactttcctttgtatctttccttttaatttaaactttaatgataatgtacttttaatatggattctattcacatttgttttaaaaaccttgtaaatatgaatgtttaagacaacttactgcaagggtaattcaagtttacatgatttttaaatttgcaatgatgttttttttattctgtgtattgaaaaaaattttctgttaccaaattttacaacttctaataagactactataactttatgtaaactgatgaagatgtgctgattaacatattctgtgatatggtttacaacttttaatcataattgtccatgattttggaatgctgttatttatcagtaaatgtaaaatatttgaggcatttagccatacacacactagaactttttaaaactttgtcctatagtgtaattataaactgatgactattatcttcatacattgagtcttcatgcatcaatgaaatgaaaaatataggattatttatttactttttgtaactaagtgggaaataagaaaaaaagttagaaagtacttaaggggaaaatcgttcttactaagtcatgtattttcaacttgtcttccctggtatatcataaataccgacatattacataccccatgtaaaattttgcttaaactctctagcacttggcatgtagaatatgtaccataggtatcaggttaaaacactaaagtctgccagaaacttttgacagtagcaagaaaattgttgaagaaaaaataaattatttactgagggtagttatgttaaagttttgcgaacttaaagggctgactttagttccttcatggtaatggcttgagtaacatcatctttgggattttttaaatactggtccagtctaggagaacctggaagatgaccagaggtatttcagtttccctagggagagcttcgttatccatgtggatgataagtctgcttgatttattattaaatcattatagcagtgaagtggtgccattttctctctcttaagccccatttgaaaggctagagaaggggatatatatactatgttcaaggtttgtaaggttgttaatgtacataattgcagattgcaataaaagcttagatacattttgtaaacccaacccactaaatgagcaggttacaagacaaatgtcaccagcctcaagtattttatgaactatttactgagggtagttatgttaaatagattataatgtggtaaattatttcctgaatcctttatcacaggaaaaacacagaccctcataaaagggataattaaaacggatgtgtctgaacatttagtgaagatgagacttaaaacatgaaagtgtatttgtgtattttgagggttttagaaaccggttgccttagaggttagacttttgaagaaaaaaaaaaaaagatacagatcttttcccctggccaaagggaagttgtattagtctgtgacatcttgtgatgctgtttatcttggtttgacattggagatacgctagtaactgtgataccatactataaaacagaagaattttctgctactaaaaactgcctttttacaaaatgactgtaaatatttgtaaaataaaataacactaaactttaagcccaaaaggagagatagagccatgtgttcagttgtggacctgtccgtggggcacagtgccaccccatcacagtgttgctgtcatcaggcaaaagtgaatgtttgtttatggcaaattcgtcttttgcgaatggcttaattctgacactacctttctgggaaatgttaataaatttttaatattc

SEQ ID NO: 32360 - DNA, 4178 bp, Homo sapiens
  source 1..4178: mol_type = unassigned DNA
gagctgaaagtcttggtttggccttgggttccgctgtaggggaggtcccgtgcgaaagaatgaggagatcctggggccttacctactagcggaatcgactgaagagacgcctgccagtgcgggaggtaggaagctcgatccccaaagaaaagagcgagtgggcaggcagctgcgagacagaaccggagtgtgcagggtccctagaggccggttcctggtctgtgctgctctcctggaagccatggtacaggcagagctcagggcgatccccaggtgagggcagcggctctgcctgggattccaccgcagtacaaccgggtagatgcggggtggagaagaaaggatgttgcctgcactgctcgccaatagcaccctgagaggctacatttgcagaagcagcagcagcagaagacacagcgccggtccaggaggcggctcgagctgttcgtaaagtcgcccgacagctttttctccgtagtatgcgagttgacaaaacagccagagaacagggctccccattacaatcttttcgagatcttttcccttgctaaccggatctgatttgtgcgaaaacatgccttgcacttgtacctggaggaactggagacagtggattcgacctttagtagcggtcatctacctggtgtcaatagtggttgcggttcccctatgcgtgtgggaattacagaaactggaggttggaatacacaccaaggcttggtttattgctggaatctttttgctgttgactattcctatatcactgtgggtgatattgcaacacttagtgcattatacacaacctgaactacaaaaaccaataataaggattctttggatggtacctatttacagtttagatagttggatagctttgaaatatcccggaattgcaatatatgtggatacctgcagagaatgctatgaagcttatgtaatttacaactttatgggattccttaccaattatctaactaaccggtatccaaatctggtattaatccttgaagccaaagatcaacagaaacatttccctcctttatgttgctgtccaccatgggctatgggagaagtattgctgtttaggtgcaaactaggtgtattacagtacacagttgtcagacctttcaccaccatcgttgctttaatctgtgagctgcttggtatatatgacgaagggaactttagcttttcaaatgcttggacttatttggttataataaacaacatgtcacagttgtttgccatgtattgtctcctgctcttttataaagtactaaaagaagaactgagcccaatccaacctgttggcaaatttctttgtgtaaagctggtggtttttgtttctttttggcaagcagtagttattgctttgttggtaaaagttggcgttatttctgaaaagcatacgtgggaatggcaaactgtagaagctgtggccaccggactccaggattttattatctgtattgagatgttcctcgctgccattgctcatcattacacattctcatataaaccatatgtccaagaagcagaagagggctcatgctttgattcctttcttgccatgtgggatgtctcagatattagagatgatatttctgaacaagtaaggcatgttggacggacagtcaggggacatcccaggaaaaaattgtttcccgaggatcaagatcaaaatgaacatacaagtttattatcatcatcatcacaagatgcaatttccattgcttcttctatgccaccttcacccatgggtcactaccaagggtttggacacactgtgactccccagactacacctaccacagctaagatatctgatgaaatccttagtgatactataggagagaaaaaagaaccttcagataaatccgtggattcctgaacagtatggaaaagcaaactgtgcaactactacattatatcattacctggtatcccatggattttgtgcttgggacagaccataaatgatggaaaatgtcaacacaaaaatagctgaaagccaggtacaactactgcatttatatatgtaagttttgtatatcaaaaataattggtctaaatttcctagacttagacttgatttcttaacattagggtatcgcatactcaaatggtagacaatgaccccaactaaatcttcctgatgttacactgctttatcaagaggatggacttttttttttttgagacagacagagtcttgctctgtcacccaggctggagtgcagtggcgcaatctcgggtcactgcaagctctgcctcccaagttcatgccattctcctgcctcagcctcccaagtagctgggactacaggcacctgccaccatgcccagctaattttttttttttcagtagagacagggtctcaccatgttagccaggatggtcttgatctgacctcgtgatccgccgacctcggcctcccaaagtgctggaattacaggcgtgagccactgcgcctggccaagaatggacattttttaaaaaaacatcagtacttcctaccactgctgcatgagtataatgctccggaattatcagaaagcataatgcagaaatacgaattagtggaacttaatcatgtgccatataagcttacctaacaaacagttatatccctattcctcaactgaatgtctttcaataaataagaatttatcatttattttctgcaacttttttatgtctcattctttaaacattaaaaacccttaatattttaacaaaaatttcttgattagaggcacagtgaaaaagaagtcaaaaaaaaaagttctacttttcatcagtgctattaaaggtggcagcaaatgtaaatcttggctgaatggtcttaattactcattaaaccacagtcagaaagacatataggtgctatttgggaaaactttttattacctaggatggggtttctctaattgctaatcacaaccccactgggtcatgtttgacattttataatgaaaataaaacagaaagtgccatagtatgttacagaaagcaaagatgagtattgtttctcaaagcctttgctttatgtatttatacacatactcattcatatctatctatatatatagagagagatagtggttcacagtaatcatacaaagtctttattccatccactattataaacatttctattaaaactaaaactgggctctatgtaaaaaccccaaagatacacacacaaaaaaaatctgtttgttagaactcaagtgaattcagtaaagttgcagaatacaaaatcaacatacaaaaagcattagcatttttatacataaataatgaaaataatgacctaactgaaaaattaagatgccatttatgatagcataaaaaaaatacttacttaggaataaatttaacaccaaggcagtaaaagatctgtatgtacactgaaaactatgaaacactgatgaaagaaagacacaaataaatggaaaggtatcccgtgctcatggatcagaataatactgttaaaatggtcacactacccaaagcaattcagaatcaatgcaatcctatcaaaattccaatggcattatttacacaaacagaaaaaaatcctaaaattcatatgtaacgataaaagaccctgaataggcaaaagaatactgaggaaaaaatgttggagacatcacatttcctaattataaattatactacaaaactatagtaatcaagacagtatggtactggtataaaaacacatacacaggccagtgggacagaagaaagagtccagatataaatccaaacatacacagtcaactaatttttgacaaagacaccaagaagacacatcggggaaagaacagtcttcattaagtgttcttaatgaagatgctgggaaaactgcacttccacatgcaaaacaatgaaatcagacccttatcttagacctacacaacaatcaattcaaaatggataaaagacctaaatgtaagaccagaaactatagaagagaacataggagaaaagttcctggacactgacccttggcaatgattttttggatatcacaccaaaagctcagtcaacaaaaacaaaaacaaatgtgactacatcaaaccaaaaagcttctgacagtaaaagaaacagtcaacaaaatgaaacagtagcctacagattgagtaaaaaatatttgtaaggcatatat

SEQ ID NO: 32361 - DNA, 6523 bp, Homo sapiens
  source 1..6523: mol_type = unassigned DNA
cggcccagccgagccgggctgcttgtctggccggcggaggctgagcgcgaccctagcaagccgcggcgcccgccgaccagggacaagagcgactcctgggaccccactctgccccgcgccgccgcctcctcccctgttgtcgcggggacgctcaggcccgcgccgcccgggccacgattctcctcctctttctcccggaggggaaggaacggagaaagccgagcggcggctccgggagagagcgagccgaggcccctgcccccgaggctcggggcaggaggaggaggaggaggaggaggcggaggcggagggaagtgcgcgtcactctcgggaggagagtatttcacctccaggcagaggctgcggctgccagttgagtacgagcggcagctgcgggcgccggcaatcgagtggcttcctggccatggagaggagatctggacccgaggacgccagggactcctctccgtctccctggaccgctgtgtaggcacctgagttaacggacgctaagcggggtaggggaagtaacagtgtatcatgtatgccactgattccaggggacactcccctgctttcctccaacctcagaatggaaatagtcgtcacccatctggctatgttccagggaaggttgtcccattgcgtccccctcctcctccaaagagtcaagcttcagccaaatttacctccatcagacgagaagaccgggcaaccttcgcattctcacctgaagaacagcaagcccagagagaaagtcaaaagcaaaagagacacaaaaatactttcatttgttttgctattactagtttctcattttttattgcacttgcaatcattttaggaatatcctcaaaatatgctccagatgaaaattgcccagatcaaaatcctcgtctcaggaattgggatccaggacaagattctgcaaagcaagttgttatcaaggagggagatatgctccgtctgacctcagacgccaccgtgcattctatagtcattcaggatggaggactgcttgtatttggggacaataaagatggatccagaaatattactttgaggactcattacatcctgatccaggatggtggggcgcttcatattggagcagaaaaatgccgctataaatccaaagcgacaattaccttgtatggcaagtcagatgaaggtgaaagtatgccaacatttggcaaaaagtttattggtgtggaagctggcgggacactggagttacatggggcacggaaggcatcgtggacgttgttggcaaggaccctgaattcctcaggcttgccctttgggtcctatacctttgaaaaggacttttcccggggcctcaatgtgagggtcattgaccaagacacggccaaaattttggaaagtgagagatttgatacccatgaataccgcaatgagagcaggcggcttcaggagtttctgagattccaggatccaggtcggattgttgccatagctgtcggggattcagccgctaaaagtctcttacaaggaaccatccagatgatccaggaacggttgggaagtgaactgatccaaggactgggctacaggcaagcttgggctttagttggtgtcattgatggtggaagcacttcttgcaatgaatccgtgagaaactatgaaaatcatagcagtggcgggaaggctcttgcccaaagagaattttatactgtggatggccagaagttctctgtgacagcttatagtgaatggattgaaggcgtttctctttcaggattccgggtagaggttgtagatggagtgaagctaaatttgctagatgatgttagtagttggaaacctggagaccagattgtggtcgcaagcacagactattccatgtaccaagcagaggagttcactcttcttccctgttctgaatgcagccattttcaggtcaaagtcaaagaaacccctcagttcctgcacatgggtgagatcatagacggtgtagacatgagagctgaggttggaattcttacccggaatattgtgatccaaggagaagtggaggactcatgctacgcagaaaatcagtgccaattttttgattatgatacctttgggggacacattatgataatgaaaaattttacttcagtccatctttcttatgtggaattgaaacacatgggtcagcagcagatggggcgataccctgttcattttcacctgtgtggtgacgtggattataaaggaggatacagacatgcaacatttgtggacggcctgtctattcatcacagcttctcaaggtgcatcactgtgcatgggacaaatggcttgctaataaaagacaccattgggtttgacacactaggtcattgtttctttttggaagatggtattgaacagaggaatactttgttccacaatctgggactcctcaccaagccgggtactctcctgcccaccgataggaacaactccatgtgtaccaccatgcgagataaagtgtttggaaattacattcctgtgcctgctactgactgtatggctgtttcaactttctggattgctcatcccaacaataatctgattaataatgcagctgcaggctcacaggatgctggaatatggtatttattccacaaggaaccaactggggaatccagtggattgcagctcttggcaaaaccagaactcactccattgggtatattttataacaacagggtccattcaaattttaaggctggcttatttattgacaaaggtgtcaaaacaaccaactctagtgctgctgacccaagggaatacctctgtttggacaatagtgcaagatttcgacctcatcaggatgcaaaccccgaaaaaccacgtgttgctgctctaattgacaggctcattgcttttaaaaataatgataatggagcttgggtcagaggaggagatattatcgttcaaaattcagcatttgcagataatggaataggactgacctttgccagtgatggaagcttcccaagtgatgaaggttccagccaagaggtatctgaatctctctttgttggggagagcaggaattacggctttcagggtggtcagaacaagtatgtaggcactggaggaatagaccagaagcctcgaacattacccaggaacaggacgttcccaattagaggctttcagatttatgatgggcccattcatctcacaaggagcactttcaaaaaatatgtgccaactccagataggtacagcagtgcaattggcttcctcatgaagaattcctggcagataacccccaggaataatatctccctcgtgaagtttggtccacatgtctctctgaatgtcttttttggaaagcctggtccctggtttgaagattgtgagatggatggtgataagaactccatattccatgacattgatggctctgtgacaggatacaaggatgcttatgtgggaagaatggacaactacctgatccgccatccaagctgtgtaaatgtgtctaagtggaatgcagtgatctgcagtgggacctatgcacaggtctatgtacagacatggagcactcagaatctttctatgaccattacacgagatgagtatccgtccaaccctatggtgctccgaggtattaatcagaaggctgcctttccacagtaccagcctgtcgtcatgctggagaagggttataccatccactggaatgggccggcaccacggactacatttctatacctcgtcaacttcaacaagaatgactggattcgagttggcctttgctatccatcaaacacaagttttcaagttacctttggctatttgcagcggcagaatggctcattatccaaaatcgaagaatatgagcctgtgcattcactggaagaactgcaaagaaagcaatccgagaggaaattctattttgactccagcacggggttactgtttttgtatctcaaagccaaaagccacaggcatggccacagttactgttcatctcagggatgtgaaagagtcaagatccaagcagccacagactcaaaggacatcagtaactgcatggccaaagcatacccacagtactacagaaagccgtcagtggtcaagcggatgccggccatgctcactggactctgtcaaggctgtggcactcggcaggtggtgtttactagtgatcctcataaaagttacctccctgtgcaattccagtcacctgataaagcagaaacccagcgtggagacccgtctgttatttctgtcaatggcactgactttaccttccgaagtgcaggcgtcctcctccttgttgtggatccgtgcagcgttccattccgcttgacggaaaaaacggtttttcctcttgctgatgtcagtcgcattgaagagtatttaaaaacaggcatccctccaaggtccattgttctgttgagcacaagaggagaaataaagcagttaaacatttcacacttactagtacctctgggattagccaaaccagctcatctttatgacaaagggagtaccatatttttgggattcagtggaaactttaaaccatcatggactaagctatttaccagtcctgctggacagggccttggggtgcttgaacaattcatacctttgcagctggacgaatatggttgtcccagagccaccactgtccgcagaagagacctggaactgctaaagcaagcttcaaaagcacattagagactaactgtaacttaagtgctgggggaaaaaaaatgtgaactaacttatttaatttatggcattttaaaatgacactgttaacccaacggaaccattttccagtttgatacagaatggggagaaaagaaagcgtttgaaattattgcttggataccagcttcatgcaccttctagttgtacaaaatgttaaagacgttgtttgtatttgtaaggctggtgtattcagagagcagatctcttattcctcactttccacccccgtattttgtaatgaccatgagcaatgtttttactttttgtataatggggtggggtggagtgggggcttctgagagtcagcctgaggtctttagaggaccagctattgtagcaccttggatacttgaagtttaatgctcagttgggtcgggtggcagttgacttggtggctggcatgttcagcagtgcctggggccctgtttctgggcagcctttgaggattttctatgatattgaatgacagttttaagtggcaactcaggcccagctcatgcccttttttgcctggacatgtgctatttttattcacttatatatcaattacttgtaagggttaaactttcaaacaggaagtatattgggacaaaagggctcttggggattagatatccctttaatctgtgaccattgggcaaaaaattttcctgcagcaaaagtctgaggctgttgggaccatttttgcagctttaatccttagcctcttttgactgtatatttgtgtttaaaatgcagagctcaactgaatatttccttttttgttttgttttgttttgttttaagaagtaggttgttttcctgaaccgtaaacttgtatcattttaacttgcacaaaggaagtctgttcttggtattgctcttgcacttgggttttttgttattgttttgtgtggattttttaaagcttttctgttcaccctcctgccaggaaaatcccagaaagcttaatgataccccaaaatgattacacccagggaggaaaaaaaggagcgctttctagggtcagaatcgtggagagaatactcagaaatgaacctctttaaagccttgcaggaatgagtcactcttacttaatgaaatgttaaagccaattaaaaagcatgctgtgatgcccagcttccctttccacagggtgcatgcgtctcctgctggtgaatcacatgcggcaagaggcaactggctccacagcctgggatgctgccgtaccaagaggaaagaagcagcaaaatgcctttacgttgttctaaacccccgacgcataaagtgtagaggagggatggccaagggtgggtggtagaaagtgtgttcaggctgacactggcaatgagtacagataatttcactttcctcttctaggggcaaaggctgatggcctctacctttgtatccaggagaaactgcagagcagccctgtgactttacaaaatatgctacctcaaagtgctaccgataaacctttctaattgtaagtgcccttactaagggcacatgtcttaatcaaagttagttttttgttttctggtttgttttttttttttgtatattgatgaatgagatcttacctattaaatatattattggattatggttcctgaaggtcattagagtgtgtgtgtgtgtgtgtgtgtgtgtgtgtgttttatgacttaaatatctttacgtgtgttttttagagcttggttctttaaagatttggagaagatatgtaaattaccaaggcacttggtttttctgttttatatactaataatcagggcctaagttaaataaaaatatgtgtgcatgtatttta

SEQ ID NO: 32362 - DNA, 5217 bp, Homo sapiens
  source 1..5217: mol_type = unassigned DNA
gttaacggacgctaagcggggtaggggaagtaacagtgtatcatgtatgccactgattccaggggacactcccctgctttcctccaacctcagaatggaaatagtcgtcacccatctggctatgttccagggaaggttgtcccattgcgtccccctcctcctccaaagagtcaagcttcagccaaatttacctccatcagacgagaagaccgggcaaccttcgcattctcacctgaagaacagcaagcccagagagaaagtcaaaagcaaaagagacacaaaaatactttcatttgttttgctattactagtttctcattttttattgcacttgcaatcattttaggaatatcctcaaaatatgctccagatgaaaattgcccagatcaaaatcctcgtctcaggaattgggatccaggacaagattctgcaaagcaagttgttatcaaggagggagatatgctccgtctgacctcagacgccaccgtgcattctatagtcattcaggatggaggactgcttgtatttggggacaataaagatggatccagaaatattactttgaggactcattacatcctgatccaggatggtggggcgcttcatattggagcagaaaaatgccgctataaatccaaagcgacaattaccttgtatggcaagtcagatgaaggtgaaagtatgccaacatttggcaaaaagtttattggtgtggaagctggcgggacactggagttacatggggcacggaaggcatcgtggacgttgttggcaaggaccctgaattcctcaggcttgccctttgggtcctatacctttgaaaaggacttttcccggggcctcaatgtgagggtcattgaccaagacacggccaaaattttggaaagtgagagatttgatacccatgaataccgcaatgagagcaggcggcttcaggagtttctgagattccaggatccaggtcggattgttgccatagctgtcggggattcagccgctaaaagtctcttacaaggaaccatccagatgatccaggaacggttgggaagtgaactgatccaaggactgggctacaggcaagcttgggctttagttggtgtcattgatggtggaagcacttcttgcaatgaatccgtgagaaactatgaaaatcatagcagtggcgggaaggctcttgcccaaagagaattttatactgtggatggccagaagttctctgtgacagcttatagtgaatggattgaagaaacccctcagttcctgcacatgggtgagatcatagacggtgtagacatgagagctgaggttggaattcttacccggaatattgtgatccaaggagaagtggaggactcatgctacgcagaaaatcagtgccaattttttgattatgatacctttgggggacacattatgataatgaaaaattttacttcagtccatctttcttatgtggaattgaaacacatgggtcagcagcagatggggcgataccctgttcattttcacctgtgtggtgacgtggattataaaggaggatacagacatgcaacatttgtggacggcctgtctattcatcacagcttctcaaggtgcatcactgtgcatgggacaaatggcttgctaataaaagacaccattgggtttgacacactaggtcattgtttctttttggaagatggtattgaacagaggaatactttgttccacaatctgggactcctcaccaagccgggtactctcctgcccaccgataggaacaactccatgtgtaccaccatgcgagataaagtgtttggaaattacattcctgtgcctgctactgactgtatggctgtttcaactttctggattgctcatcccaacaataatctgattaataatgcagctgcaggctcacaggatgctggaatatggtatttattccacaaggaaccaactggggaatccagtggattgcagctcttggcaaaaccagaactcactccattgggtatattttataacaacagggtccattcaaattttaaggctggcttatttattgacaaaggtgtcaaaacaaccaactctagtgctgctgacccaagggaatacctctgtttggacaatagtgcaagatttcgacctcatcaggatgcaaaccccgaaaaaccacgtgttgctgctctaattgacaggctcattgcttttaaaaataatgataatggagcttgggtcagaggaggagatattatcgttcaaaattcagcatttgcagataatggaataggactgacctttgccagtgatggaagcttcccaagtgatgaaggttccagccaagaggtatctgaatctctctttgttggggagagcaggaattacggctttcagggtggtcagaacaagtatgtaggcactggaggaatagaccagaagcctcgaacattacccaggaacaggacgttcccaattagaggctttcagatttatgatgggcccattcatctcacaaggagcactttcaaaaaatatgtgccaactccagataggtacagcagtgcaattggcttcctcatgaagaattcctggcagataacccccaggaataatatctccctcgtgaagtttggtccacatgtctctctgaatgtcttttttggaaagcctggtccctggtttgaagattgtgagatggatggtgataagaactccatattccatgacattgatggctctgtgacaggatacaaggatgcttatgtgggaagaatggacaactacctgatccgccatccaagctgtgtaaatgtgtctaagtggaatgcagtgatctgcagtgggacctatgcacaggtctatgtacagacatggagcactcagaatctttctatgaccattacacgagatgagtatccgtccaaccctatggtgctccgaggtattaatcagaaggctgcctttccacagtaccagcctgtcgtcatgctggagaagggttataccatccactggaatgggccggcaccacggactacatttctatacctcgtcaacttcaacaagaatgactggattcgagttggcctttgctatccatcaaacacaagttttcaagttacctttggctatttgcagcggcagaatggctcattatccaaaatcgaagaatatgagcctgtgcattcactggaagaactgcaaagaaagcaatccgagaggaaattctattttgactccagcacggggttactgtttttgtatctcaaagccaaaagccacaggcatggccacagttactgttcatctcagggatgtgaaagagtcaagatccaagcagccacagactcaaaggacatcagtaactgcatggccaaagcatacccacagtactacagaaagccgtcagtggtcaagcggatgccggccatgctcactggactctgtcaaggctgtggcactcggcaggtggtgtttactagtgatcctcataaaagttacctccctgtgcaattccagtcacctgataaagcagaaacccagcgtggagacccgtctgttatttctgtcaatggcactgactttaccttccgaagtgcaggcgtcctcctccttgttgtggatccgtgcagcgttccattccgcttgacggaaaaaacggtttttcctcttgctgatgtcagtcgcattgaagagtatttaaaaacaggcatccctccaaggtccattgttctgttgagcacaagaggagaaataaagcagttaaacatttcacacttactagtacctctgggattagccaaaccagctcatctttatgacaaagggagtaccatatttttgggattcagtggaaactttaaaccatcatggactaagctatttaccagtcctgctggacagggccttggggtgcttgaacaattcatacctttgcagctggacgaatatggttgtcccagagccaccactgtccgcagaagagacctggaactgctaaagcaagcttcaaaagcacattagagactaactgtaacttaagtgctgggggaaaaaaaatgtgaactaacttatttaatttatggcattttaaaatgacactgttaacccaacggaaccattttccagtttgatacagaatggggagaaaagaaagcgtttgaaattattgcttggataccagcttcatgcaccttctagttgtacaaaatgttaaagacgttgtttgtatttgtaaggctggtgtattcagagagcagatctcttattcctcactttccacccccgtattttgtaatgaccatgagcaatgtttttactttttgtataatggggtggggtggagtgggggcttctgagagtcagcctgaggtctttagaggaccagctattgtagcaccttggatacttgaagtttaatgctcagttgggtcgggtggcagttgacttggtggctggcatgttcagcagtgcctggggccctgtttctgggcagcctttgaggattttctatgatattgaatgacagttttaagtggcaactcaggcccagctcatgcccttttttgcctggacatgtgctatttttattcacttatatatcaattacttgtaagggttaaactttcaaacaggaagtatattgggacaaaagggctcttggggattagatatccctttaatctgtgaccattgggcaaaaaattttcctgcagcaaaagtctgaggctgttgggaccatttttgcagctttaatccttagcctcttttgactgtatatttgtgtttaaaatgcagagctcaactgaatatttccttttttgttttgttttgttttgttttaagaagtaggttgttttcctgaaccgtaaacttgtatcattttaacttgcacaaaggaagtctgttcttggtattgctcttgcacttgggttttttgttattgttttgtgtggattttttaaagcttttctgttcaccctcctgccaggaaaatcccagaaagcttaatgataccccaaaatgattacacccagggaggaaaaaaaggagcgctttctagggtcagaatcgtggagagaatactcagaaatgaacctctttaaagccttgcaggaatgagtcactcttacttaatgaaatgttaaagccaattaaaaagcatgctgtgatgcccagcttccctttccacagggtgcatgcgtctcctgctggtgaatcacatgcggcaagagg

SEQ ID NO: 32363 - DNA, 1437 bp, Homo sapiens
  source 1..1437: mol_type = unassigned DNA
cacttagtctggcacagatcacagaatctcccttttcaaagttgagacacttgactttgtgctgaaaatgtctttttagctgtttaaattttcattctcttccctttacttcttgattattttttcaaggtctatgtacagacatggagcactcagaatctttctatgaccattacacgagatgagtatccgtccaaccctatggtgctccgaggtattaatcagaaggctgcctttccacagtaccagcctgtcgtcatgctggagaagggttataccatccactggaatgggccggcaccacggactacatttctatacctcgtcaacttcaacaagaatgactggattcgagttggcctttgctatccatcaaacacaagttttcaagttacctttggctatttgcagcggcagaatggctcattatccaaaatcgaagaatatgagcctgtgcattcactggaagaactgcaaagaaagcaatccgagaggaaattctattttgactccagcacggggttactgtttttgtatctcaaagccaaaagccacaggcatggccacagttactgttcatctcagggatgtgaaagagtcaagatccaagcagccacagactcaaaggacatcagtaactgcatggccaaagcatacccacagtactacagaaagccgtcagtggtcaagcggatgccggccatgctcactggactctgtcaaggctgtggcactcggcaggtggtgtttactagtgatcctcataaaagttacctccctgtgcaattccagtcacctgataaagcagaaacccagcgtggagacccgtctgttatttctgtcaatggcactgactttaccttccgaagtgcaggcgtcctcctccttgttgtggatccgtgcagcgttccattccgcttgacggaaaaaacggtttttcctcttgctgatgtcagtcgcattgaagagtatttaaaaacaggcatccctccaaggtccattgttctgttgagcacaagaggagaaataaagcagttaaacatttcacacttactagtacctctgggattagccaaaccagctcatctttatgacaaagggagtaccatatttttgggattcagtggaaactttaaaccatcatggactaagctatttaccagtcctgctggacagggccttggggtgcttgaacaattcatacctttgcagctggacgaatatggttgtcccagagccaccactgtccgcagaagagacctggaactgctaaagcaagcttcaaaagcacattagagactaactgtaacttaagtgctgggggaaaaaaaatgtgaactaacttatttaatttatggcattttaaaatgacactgttaacccaacggaaccattttccagtttgatacagaatggggagaaaagaaagcgtttgaa

SEQ ID NO: 32364 - DNA, 533 bp, Homo sapiens
  source 1..533: mol_type = unassigned DNA
accacttcacttgtgtgtgaacataagaagtatgactctgaaatgaatgcttcatgacagcaaggatcatgtctttctttcttgttcaacaccctatgtccagtgccttgaacagttcctgacccatgattttctgaaaactttactcctttgctgcacttcaagtctgcaaaattgacaaatgaaagtgtcggggcagttggggagaaagaggccttcagatatactctataaatcatcaaaatatgatgtgctatatattctcggcataaactggaaatgaaaaaaacttgctacaaataggagtgactcctttgggcttaaattggattggcagcaacacagattctgctgtggattgaagtcattttctacctcggcactactcagtccatggggaatggtgaagttatgattttgcagcaagattctgggagcaggccagcatctacatctgttctaaacttaacagtgtatcatgtatgccactgattccaggggacactcccctgctttcctccaacctcagaatg

SEQ ID NO: 32365 - DNA, 1295 bp, Homo sapiens
  source 1..1295: mol_type = unassigned DNA
ggctcagctgggaggcgggacgaattattggttgggggaaacccacgaggggacgcggccgaggagggtcgctgtccacccgggggcgtgggagtgaggtaccagattcagcccatttggccccgacgcctctgttctcggaatccgggtgctgcggattgaggtcccggttcctaacggtgggatcggtgtcctcgggatgagatttggcgtttcctcggggctttggtgggatcggtgtcctcaggatgagatttagggtttcctcggggctttcgggatcttcacctaatatccggtattattttatgagaggagtggtcttggctgtcagaactggatccctggggtgatatttgggaattagtggagtgatctctgaagacctagggctatgatctggagctgctgtggctgaaatttggggcctctgaagtggcatggagattgaggtccagagagcctgagatcttgagggctgacatttggagagatggggtcgagggttgtctttgggccttgactgctttgggcctttctcactctcattcccgggatgctttgccagaatctctgctggattggccgtaaccctgtccccgagcgggctcacagggtctgaaggccacgcatgaggcaaaggtaaagttctgagccacccggtgcctccttcccaggactgcaagatggaggaaggcgggaacctaggaggcctgattaagatggtccatctactggtcttgtcaggtgcctggggcatgcaaatgtgggtgaccttcgtctcaggcttcctgcttttccgaagccttccccgacataccttcggactagtgcagagcaaactcttccccttctacttccacatctccatgggctgtgccttcatcaacctctgcatcttggcttcacagcatgcttgggctcagctcacattctgggaggccagccagctttacctgctgttcctgagccttacgctggccactgtcaacgcccgctggctggaaccccgcaccacagctgccatgtgggccctgcaaaccgtggagaaggagcgaggcctgggtggggaggtaccaggcagccaccagggtcccgatccctaccgccagctgcgagagaaggaccccaagtacagtgctctccgccagaatttcttccgctaccatgggctgtcctctctttgcaatctgggctgcgtcctgagcaatgggctctgtctcgctggccttgccctggaaataaggagcctctagcatgggccctgcatgctaataaatgcttcttcagaaatg

SEQ ID NO: 32366 - DNA, 916 bp, Homo sapiens
  source 1..916: mol_type = unassigned DNA
ggctcagctgggaggcgggacgaattattggttgggggaaacccacgaggggacgcggccgaggagggtcgctgtccacccgggggcgtgggagtgaggtaccagattcagcccatttggccccgacgcctctgttctcggaatccgggtgctgcggattgaggtcccggttcctaacggtgggatcggtgtcctcgggatgagatttggcgtttcctcggggctttggtgggatcggtgtcctcaggatgagatttagggtttcctcggggctttcgggatcttcacctaatatccggactgcaagatggaggaaggcgggaacctaggaggcctgattaagatggtccatctactggtcttgtcaggtgcctggggcatgcaaatgtgggtgaccttcgtctcaggcttcctgcttttccgaagccttccccgacataccttcggactagtgcagagcaaactcttccccttctacttccacatctccatgggctgtgccttcatcaacctctgcatcttggcttcacagcatgcttgggctcagctcacattctgggaggccagccagctttacctgctgttcctgagccttacgctggccactgtcaacgcccgctggctggaaccccgcaccacagctgccatgtgggccctgcaaaccgtggagaaggagcgaggcctgggtggggaggtaccaggcagccaccagggtcccgatccctaccgccagctgcgagagaaggaccccaagtacagtgctctccgccagaatttcttccgctaccatgggctgtcctctctttgcaatctgggctgcgtcctgagcaatgggctctgtctcgctggccttgccctggaaataaggagcctctagcatgggccctgcatgctaataaatgcttcttcagaaatg

SEQ ID NO: 32367 - DNA, 787 bp, Homo sapiens
  source 1..787: mol_type = unassigned DNA
agctgggaggcgggacgaattattggttgggggaaacccacgaggggacgcggccgaggagggtcgctgtccacccgggggcgtgggagtgaggtaccagattcagcccatttggccccgacgcctctgttctcggaatccgggtgctgcggattgaggtcccggttcctaacggactgcaagatggaggaaggcgggaacctaggaggcctgattaagatggtccatctactggtcttgtcaggtgcctggggcatgcaaatgtgggtgaccttcgtctcaggcttcctgcttttccgaagccttccccgacataccttcggactagtgcagagcaaactcttccccttctacttccacatctccatgggctgtgccttcatcaacctctgcatcttggcttcacagcatgcttgggctcagctcacattctgggaggccagccagctttacctgctgttcctgagccttacgctggccactgtcaacgcccgctggctggaaccccgcaccacagctgccatgtgggccctgcaaaccgtggagaaggagcgaggcctgggtggggaggtaccaggcagccaccagggtcccgatccctaccgccagctgcgagagaaggaccccaagtacagtgctctccgccagaatttcttccgctaccatgggctgtcctctctttgcaatctgggctgcgtcctgagcaatgggctctgtctcgctggccttgccctggaaataaggagcctctagcatgggccctgcatgctaataaatgcttcttcag

SEQ ID NO: 32368 - DNA, 1306 bp, Homo sapiens
  source 1..1306: mol_type = unassigned DNA
acttccgcccaacgcccggtagtctgagagcctccaaggtcctcccccgcacccctgaggtcctgcagacgacggcgtcgtgggtggtcaccgttatcccttaggtctggagaggggacatccgagcgagggccacttgcggccaggcccgagctcgtccagctccgggtgaccacagagtgccgcgggcgggcagaggggccggaaacccaggccgcttcgtccctgtttccggcagcgccgcgctgctccgggagccgctgtggcagcgtatgctgccacggggactgaagatggcgccgcgaggtaaacggttgtcctccaccccgctggaaatcctgttctttctgaacgggtggtataatgctacctatttcctgctggaacttttcatatttctgtataaaggtgtcctgctaccatatccaacagctaacctagtactggatgtggtgatgctcctcctttatcttggaattgaagtaattcgcctgttttttggtacaaagggaaacctctgccagcgaaagatgccgctcagtattagcgtggccttgaccttcccatctgccatgatggcctcctattacctgctgctgcagacctacgtactccgcctggaagccatcatgaatggcatcttgctcttcttctgtggctcagagcttttacttgaggtgctcaccttggctgctttctccagtatggacaggatttgaagtacagaatttcagccagcagcccatcaggctgacaccacacatattgcttctggtactttagccacaccagtgagaattggtggggcaagttgtcctgagaaaggctgtgtggcttttcttcagcacagacatttgggcaagcaactcagcataaggccagtgggtaccatcttctaaaccaggaccatcagcccaagagactcttctacactccagtatagggaggggcaaggttattcccatcctgccccttctcagaaccagtcccctgctgacctcaagttctcctccttgatcaccgtggccagagcatctcgtgtggaccatctaggctccttgggcttcaagcaggacctgagccacatgctccctgtacgagctgtgctatacctgtcccacatgagcacggagagcctcatgttggtgggtttccagagtgatgtgaaagcctctcaccccaatcctcggagactgagttccacaacttttttagtagctcatagtgttatttttctactctcttcatgaaactaactttattttataataaatatgtattttctgttgtgggggttgcagccttt

SEQ ID NO: 32369 - DNA, 1955 bp, Homo sapiens
  source 1..1955: mol_type = unassigned DNA
cagttttctgtttttttttttttttgagacagagtctcactgtcgcccaggctggagtgcggtggcgcgatctcagctcactgcaacctccgcctcccgggttcgagcgattctcctacctcagcctcccaagtagctgtaactactggcgcgcgccagtacgcccggctaatttttgtatttttagtagagacggggtttcgccatgttggccaggctgatttcgaactcctgacctcaggtgatccatcacctcggcctcccaaagtgctgggattacaggcgtgagccactaagcccggccagcaacacgcttttaccgctgcaaatccggatcaggcaggctttgaagcccagctcacaggccgtctcttggaaactaacttagatttccacctgggagcactttgtcctctcagctcccactgcaccactttatggatcgcgtggtgactcgtttcattttatttatgtgtgttcctggaaaggacgctctatttccttcgtgtctctacctggtaggtaaatcggccgcagaaaagaccaatgctaactccaccctgcatttgcagagatccgtcgctcacaccttttcttgtcttccgttgaaaaaagagaatcgtgggagtaggacctatttgccaatctcctggtaacactatcacaactggccacttccgcccaacgcccggtagtctgagagcctccaaggtcctcccccgcacccctgaggtcctgcagacgacggcgtcgtgggtggtcaccgttatcccttaggtctggagaggggacatccgagcgagggccacttgcggccaggcccgagctcgtccagctccgggtgaccacagagtgccgcgggcgggcagaggggccggaaacccaggccgcttcgtccctgtttccggcagcgccgcgctgctccgggagccgctgtggcagcgtatgctgccacggggactgaagatggcgccgcgaggtaaacggttgtcctccaccccgctggaaatcctgttctttctgaacgggtggtataatgctacctatttcctgctggaacttttcatatttctgtataaaggtgtcctgctaccatatccaacagctaacctagtactggatgtggtgatgctcctcctttatcttggaattgaagtaattcgcctgttttttggtacaaagggaaacctctgccagcgaaagatgccgctcagtattagcgtggccttgaccttcccatctgccatgatggcctcctattacctgctgctgcagacctacgtactccgcctggaagccatcatgaatggcatcttgctcttcttctgtggctcagagcttttacttgaggtgctcaccttggctgctttctccaggatttgaagtacagaatttcagccagcagcccatcaggctgacaccacacatattgcttctggtactttagccacaccagtgagaattggtggggcaagttgtcctgagaaaggctgtgtggcttttcttcagcacagacatttgggcaagcaactcagcataaggccagtgggtaccatcttctaaaccaggaccatcagcccaagagactcttctacactccagtatagggaggggcaaggttattcccatcctgccccttctcagaaccagtcccctgctgacctcaagttctcctccttgatcaccgtggccagagcatctcgtgtggaccatctaggctccttgggcttcaagcaggacctgagccacatgctccctgtacgagctgtgctatacctgtcccacatgagcacggagagcctcatgttggtgggtttccagagtgatgtgaaagcctctcaccccaatcctcggagactgagttccacaacttttttagtagctcatagtgttatttttctactctcttcatgaaactaactttattttataataaatatgtattttctgttgtg

SEQ ID NO: 32370 - DNA, 1378 bp, Homo sapiens
  source 1..1378: mol_type = unassigned DNA
acgaagccccggcgtcccacaggtcccggaggccgctgcgtcgcggggagctgggctcgggccgccggcggttgcgccggggcagccccgcggggagagcaccatgaggactgactcgggggctcggctggaggagggccacctgcgtcctccacgagctcttccacctgtgccaagtatagatgatattccacttagtcgtcctaagaaaaagaaaacccagccagcagaattacagtatgccaatgagctaggagtagaagatgaagacataatcactgatgagcaaactactgtggaacagcagtctgtattcactgcacccactggcattagccagcctgtaggcaaagtatttgtggaaaaaagccggagattccaggctgctgatcgttcagagttgataaagaccacagaaaacatagatgtgtcaatggacgtgaagccttcctggaccaccagagatgtggcacttacagtgcaccgggctttcaggatgattggtctcttttctcatggattcttggctggctgtgctgtgtggaatattgttgtgatatatgttctagcaggagatcagctatccaacctctcaaaccttctgcaacaatacaagaccctagcgtatccattccagagtcttctgtacttgcttttggctctgagtacaatttcagcttttgacaggattgactttgctaaaatatcagtagcaatccgaaattttttggccctggatcctacagctttagcatctttcttgtactttactgctcttatactatctctgagtcagcaaatgacaagtgacagaatccacctttacacaccttcttctgttaatggtagcctctgggaagcaggaattgaggaacagattctccagccatggattgtggtgaatctcgtggtggctcttctggttggattatcttggctatttttgtcttataggccaggcatggatcttagtgaagagttaatgttctcctcagaggtggaagaatatcctgataaagagaaagaaatcaaagcctcttcataataccagctcacctttggaggaataatgacccagtatttgtcccatttttgtttttaaatgtatttttataagatgtatacatgtgtatttgtaatagattttttgattatataatactgaaacatctctcaatattatgaaaaatgttaaaattgtgtttgctgtttatgtctaaacattaatttgtctagcattatcatcttaatgacaaagggaataatgaactagaaaccagcaagtgaaagtgtttatttcctattttctcaaaacagttgtatttataactattaccttaaaaagcactggtttagaaaaagccataacttaaatagt

SEQ ID NO: 32371 - DNA, 5592 bp, Homo sapiens
  source 1..5592: mol_type = unassigned DNA
ttcccgcaaacaaatcaccgccaccacttaggaaaccacgggaaagctgtgattgcagcgccacggtcgccagatttctgctcctgggcacattacccccaactccgaggccccctttttggcagggctagtctggactggccaatccaggtccctgcacgcctctcaccgcaacatccccgcagggcgctgcgcgcggggtactagccaggcggcgcggcccgatgacgcattgcgcctgcgcgcgcgaccgagccgggaggggtggggcgccaggtgcttgggggccggcggccgccgaggccggctaaacgcagaatggggaagaatcctgtgcgtcctccacgagctcttccacctgtgccaagtcaagatgatattccacttagtcgtcctaagaaaaagaagcccagaacaaaaaacacaccagcaagtgcttctttggaaggccttgctcagactgctggtcgaaggccctctgagggcaatgagccatcaactaaagaactcaaagagcacccagaggctcctgttcaaagaagacagaaaaagacaaggctacctcttgaattggagacttcctccacccaaaagaagtcatctagttcatctttattacgaaatgaaaatggtattgatgcggagccagctgaggaggcagttattcaaaaacctcggaggaagacaaagaaaacccagccagcagaattacagtatgccaatgagctaggagtagaagatgaagacataatcactgatgagcaaactactgtggaacagcagtctgtattcactgcacccactggcattagccagcctgtaggcaaagtatttgtggaaaaaagccggagattccaggctgctgatcgttcagagttgataaagaccacagaaaacatagatgtgtcaatggacgtgaagccttcctggaccaccagagatgtggcacttacagtgcaccgggctttcaggatgattggtctcttttctcatggattcttggctggctgtgctgtgtggaatattgttgtgatatatgttctagcaggagatcagctatccaacctctcaaaccttctgcaacaatacaagaccctagcgtatccattccagagtcttctgtacttgcttttggctctgagtacaatttcagcttttgacaggattgactttgctaaaatatcagtagcaatccgaaattttttggccctggatcctacagctttagcatctttcttgtactttactgctcttatactatctctgagtcagcaaatgacaagtgacagaatccacctttacacaccttcttctgttaatggtagcctctgggaagcaggaattgaggaacagattctccagccatggattgtggtgaatctcgtggtggctcttctggttggattatcttggctatttttgtcttataggccaggcatggatcttagtgaagagttaatgttctcctcagaggtggaagaatatcctgataaagagaaagaaatcaaagcctcttcataataccagctcacctttggaggaataatgacccagtatttgtcccatttttgtttttaaatgtatttttataagatgtatacatgtgtatttgtaatagattttttgattatataatactgaaacatctctcaatattatgaaaaatgttaaaattgtgtttgctgtttatgtctaaacattaatttgtctagcattatcatcttaatgacaaagggaataatgaactagaaaccagcaagtgaaagtgtttatttcctattttctcaaaacagttgtatttataactattaccttaaaaagcactggtttagaaaaagccataacttaaatagtgttataaaatatatatcaggtttaaacataaatttagcgaatatggtagaagggaaaaaagccttcatttttgacctccccttactgaataaattgaaatatgaagtttgtcttttctgaaactggcttagtgattgagtatcatgtaataattataatataatttagcttgaaagatgctctacattatgaccaataaaaagggaatgtatgttttgtttgaaaaattatataacctaaattttttacctagaagtaactaaaaagttgcttctcattataatctgtactagtggttctcatatctggttgtacatcaggatcatagagggagattttaaaaatctatgtagcaaaagaggctgagcagggcaaggctcaggggaataaaggagagacctgtgagcttgtgggctcccagttgacatctgcagtaccctttcctctgtcccttttttctgagtgacaagaaataggagtagaaattcaccatctctgttctccagctctttgtcagagaggtttctggttttccaggaaatccccctcttgagatgggtcctgcactgggaaagatctcttcagaactatatccaatggtacctcagctgttgtatatgagaccctaaagctcaagttgaggagaagactagctatgggaaaaaatgtttcaaaggctgttgagcacatcaataaaactattgagcctgccctgattagcaagcacctgaatgttatagaacagaagaggattgacaaattgatgatagagacagttgaccctgacaataggtctaaatttggagtgaacattatactgggaatctcttttgctgtttgtaaggctggagctgccgaaaagggattctccctgctgtcacagaattgtgaatttgctggcaattctgaaggcatcctgctagttccagctttcactgtgaccagcaatggttctcaatctggcaataagctggcagtataggagttcataatcttccccgtcagcaaacttcagggaagccatgctcgttagagccaaggcttagcacacttgagccgtgtcatcaaagagaaatgtgagaaagctgctgccaatgtgggggattgtggtaggctgcataatgtctcctaaagatgtccatgtcctaatccctggaacttgtgaatatactactttacttggccaaagggatttgcagatatgattaaggttatgaaccttaaaacggggacattatcctgtattatccagaagggtccagtgtaatcttatgagtccttaaaagcagagaagaaagccttttatgtctgtggtcagagaggtcagaagttatgatattgctggctttgaagatggaagagggggccatgagccaaggagagtgatgaccttgcagctgagtacggcccttggccaacaatgagcaaggaaatggatttcagtcacataaccacaaggaactgagttctatgagtatcccaaatgagcaaggaaacaaatcctcccctagagccaagaaaggaaggcagctctgtggataccttggttttggcctggtgctgcccatgtcatacttttgacatacagaactgtaagatagcaagtgtatgttgactaagctgctaaattggtggtgattgcttatggcagcaatagaaagctatatatcctagagaataaagaaggctagagctgctgtggaatgcacttgggaaagctggctacattgataatatgtaactgccatgggcatagttgcctttgtattcttccaggtctgggaagtacaacttagacttcagatctcgtaatgacccaggaggcatataaacctgagcagctagtggccctgtacaagtccttcatcagggaaaaacattgagtattccctgattaaggacttgtacagaggactctgttttccctggtgtttctggtgtgtctcaaaaattgtttgactgtgatgacagggaagtttggaagaagttcactgctaatgcatgtctccaggaagcagggaatgatctcacagtgacacttgaggcacattgctgaggccgtcgatgagaattcatgtaactttctccagcttacagtggactagattgacatgcaagctgatccagtccaattggtagggcatcatggtttctcattactcactgacttaaaatacttttattgccatcctggtgaagcactgcactgggtagataacacaggggcaccttgctgatcagagcccttggccaggtacaaagagctcagtttctaaaactctgtcatttcaataatgttataaattgaatcatacagtatgtaattttatgggattcgctttttttctgttgatctctttttttctgagtcatctcagctgttgtgtgtatcaatagttcatttccttttactgttttgtttggtttaactcattgacctattgaaggatatctgggctcattccagtctgtgaataatgctgctgtggacattcatgtgcaagtttttgtgtgaacattaagttttcatttctttaagataaatgcccaggagtgaaactgatgggttgtatgtagttacaaactgccaagctgttttccagagttggcggtaccattctaatttcccatgacaattttttgaagagtccaagctagttgctttagagtgcctcacctacattttttaattgtctgactttttcctaatgacatcacttaatttgttcctcaatctcctgaatttcctatagactggaggttaggtctggtggtttgattagattttttaaaaaaatatgacttcatctgtgatgctgtgtactttatgttgcataacatgaaccctaagaacagagtgagctgctggacagcaagtttcatggggtgcagtaattaacacaccacatagtataaatctgaaataatgacaaatgtgttaagggccttgggatattgggccatgtactctgaggagcacaaggtgaggtgcaggttcctgcccctaaagaactctatcttttgagattagcaactaacagtgtgagcccactaataggatgtgaaagttgtcaaaatcaagttctggtcattgtgttaaaaatcctaacaaatagagctggggaaggccgtgaaaggacgattttcatgcacagatgtctgataatgaggactatcattaaaagactgcacaaaaccacaccttgcacaaaggccatcacaacctgacacacacaaaaaatacttctatgaggacatttgcccagcaactccctgtccaatgtccaactggcaacatccttgttattgatccttgtagccaaggataattctctcaaaacaatcatttttgctttaaaaaccgttgtcttccttgacctccctgtatatgcacatagtttactgtggcacttgtattcttattgcaatgcctactcctgaataaacatcattttctttcagagagtctccctctctgttatttaggctgacaaggatatgccaagaagtagcttggatatagcagttaactctgcctttaggatatgtgtatggggatataagagttaactaaaagctgacctttgagttggtccttgaataaaagaagaatagattccaaaaataagaggaataaataatgatcctgagctaggagagtacattttgcagacctttggtttccatattaagaaattcagatttttatgtacaataaagaagttctggaattctctg

SEQ ID NO: 32372 - DNA, 5415 bp, Homo sapiens
  source 1..5415: mol_type = unassigned DNA
cctcgccaggcgccacgaagccccggcgtcccacaggtcccggaggccgctgcgtcgcggggagctgggctcgggccgccggcggttgcgccggggcagccccgcggggagagcaccatgaggactgactcgggggctcggctggaggagggccacctgcgtcctccacgagctcttccacctgtgccaagtcaagatgatattccacttagtcgtcctaagaaaaagaagcccagaacaaaaaacacaccagcaagtgcttctttggaaggccttgctcagactgctggtcgaaggccctctgagggcaatgagccatcaactaaagaactcaaagagcacccagaggctcctgttcaaagaagacagaaaaagacaaggctacctcttgaattggagacttcctccacccaaaagaagtcatctagttcatctttattacgaaatgaaaatggtattgatgcggagccagctgaggaggcagttattcaaaaacctcggaggaagacaaagaaaacccagccagcagaattacagtatgccaatgagctaggagtagaagatgaagacataatcactgatgagcaaactactgtggaacagcagtctgtattcactgcacccactggcattagccagcctgtaggcaaagtatttgtggaaaaaagccggagattccaggctgctgatcgttcagagttgataaagaccacagaaaacatagatgtgtcaatggacgtgaagccttcctggaccaccagagatgtggcacttacagtgcaccgggctttcaggatgattggtctcttttctcatggattcttggctggctgtgctgtgtggaatattgttgtgatatatgttctagcaggagatcagctatccaacctctcaaaccttctgcaacaatacaagaccctagcgtatccattccagagtcttctgtacttgcttttggctctgagtacaatttcagcttttgacaggattgactttgctaaaatatcagtagcaatccgaaattttttggccctggatcctacagctttagcatctttcttgtactttactgctcttatactatctctgagtcagcaaatgacaagtgacagaatccacctttacacaccttcttctgttaatggtagcctctgggaagcaggaattgaggaacagattctccagccatggattgtggtgaatctcgtggtggctcttctggttggattatcttggctatttttgtcttataggccaggcatggatcttagtgaagagttaatgttctcctcagaggtggaagaatatcctgataaagagaaagaaatcaaagcctcttcataataccagctcacctttggaggaataatgacccagtatttgtcccatttttgtttttaaatgtatttttataagatgtatacatgtgtatttgtaatagattttttgattatataatactgaaacatctctcaatattatgaaaaatgttaaaattgtgtttgctgtttatgtctaaacattaatttgtctagcattatcatcttaatgacaaagggaataatgaactagaaaccagcaagtgaaagtgtttatttcctattttctcaaaacagttgtatttataactattaccttaaaaagcactggtttagaaaaagccataacttaaatagtgttataaaatatatatcaggtttaaacataaatttagcgaatatggtagaagggaaaaaagccttcatttttgacctccccttactgaataaattgaaatatgaagtttgtcttttctgaaactggcttagtgattgagtatcatgtaataattataatataatttagcttgaaagatgctctacattatgaccaataaaaagggaatgtatgttttgtttgaaaaattatataacctaaattttttacctagaagtaactaaaaagttgcttctcattataatctgtactagtggttctcatatctggttgtacatcaggatcatagagggagattttaaaaatctatgtagcaaaagaggctgagcagggcaaggctcaggggaataaaggagagacctgtgagcttgtgggctcccagttgacatctgcagtaccctttcctctgtcccttttttctgagtgacaagaaataggagtagaaattcaccatctctgttctccagctctttgtcagagaggtttctggttttccaggaaatccccctcttgagatgggtcctgcactgggaaagatctcttcagaactatatccaatggtacctcagctgttgtatatgagaccctaaagctcaagttgaggagaagactagctatgggaaaaaatgtttcaaaggctgttgagcacatcaataaaactattgagcctgccctgattagcaagcacctgaatgttatagaacagaagaggattgacaaattgatgatagagacagttgaccctgacaataggtctaaatttggagtgaacattatactgggaatctcttttgctgtttgtaaggctggagctgccgaaaagggattctccctgctgtcacagaattgtgaatttgctggcaattctgaaggcatcctgctagttccagctttcactgtgaccagcaatggttctcaatctggcaataagctggcagtataggagttcataatcttccccgtcagcaaacttcagggaagccatgctcgttagagccaaggcttagcacacttgagccgtgtcatcaaagagaaatgtgagaaagctgctgccaatgtgggggattgtggtaggctgcataatgtctcctaaagatgtccatgtcctaatccctggaacttgtgaatatactactttacttggccaaagggatttgcagatatgattaaggttatgaaccttaaaacggggacattatcctgtattatccagaagggtccagtgtaatcttatgagtccttaaaagcagagaagaaagccttttatgtctgtggtcagagaggtcagaagttatgatattgctggctttgaagatggaagagggggccatgagccaaggagagtgatgaccttgcagctgagtacggcccttggccaacaatgagcaaggaaatggatttcagtcacataaccacaaggaactgagttctatgagtatcccaaatgagcaaggaaacaaatcctcccctagagccaagaaaggaaggcagctctgtggataccttggttttggcctggtgctgcccatgtcatacttttgacatacagaactgtaagatagcaagtgtatgttgactaagctgctaaattggtggtgattgcttatggcagcaatagaaagctatatatcctagagaataaagaaggctagagctgctgtggaatgcacttgggaaagctggctacattgataatatgtaactgccatgggcatagttgcctttgtattcttccaggtctgggaagtacaacttagacttcagatctcgtaatgacccaggaggcatataaacctgagcagctagtggccctgtacaagtccttcatcagggaaaaacattgagtattccctgattaaggacttgtacagaggactctgttttccctggtgtttctggtgtgtctcaaaaattgtttgactgtgatgacagggaagtttggaagaagttcactgctaatgcatgtctccaggaagcagggaatgatctcacagtgacacttgaggcacattgctgaggccgtcgatgagaattcatgtaactttctccagcttacagtggactagattgacatgcaagctgatccagtccaattggtagggcatcatggtttctcattactcactgacttaaaatacttttattgccatcctggtgaagcactgcactgggtagataacacaggggcaccttgctgatcagagcccttggccaggtacaaagagctcagtttctaaaactctgtcatttcaataatgttataaattgaatcatacagtatgtaattttatgggattcgctttttttctgttgatctctttttttctgagtcatctcagctgttgtgtgtatcaatagttcatttccttttactgttttgtttggtttaactcattgacctattgaaggatatctgggctcattccagtctgtgaataatgctgctgtggacattcatgtgcaagtttttgtgtgaacattaagttttcatttctttaagataaatgcccaggagtgaaactgatgggttgtatgtagttacaaactgccaagctgttttccagagttggcggtaccattctaatttcccatgacaattttttgaagagtccaagctagttgctttagagtgcctcacctacattttttaattgtctgactttttcctaatgacatcacttaatttgttcctcaatctcctgaatttcctatagactggaggttaggtctggtggtttgattagattttttaaaaaaatatgacttcatctgtgatgctgtgtactttatgttgcataacatgaaccctaagaacagagtgagctgctggacagcaagtttcatggggtgcagtaattaacacaccacatagtataaatctgaaataatgacaaatgtgttaagggccttgggatattgggccatgtactctgaggagcacaaggtgaggtgcaggttcctgcccctaaagaactctatcttttgagattagcaactaacagtgtgagcccactaataggatgtgaaagttgtcaaaatcaagttctggtcattgtgttaaaaatcctaacaaatagagctggggaaggccgtgaaaggacgattttcatgcacagatgtctgataatgaggactatcattaaaagactgcacaaaaccacaccttgcacaaaggccatcacaacctgacacacacaaaaaatacttctatgaggacatttgcccagcaactccctgtccaatgtccaactggcaacatccttgttattgatccttgtagccaaggataattctctcaaaacaatcatttttgctttaaaaaccgttgtcttccttgacctccctgtatatgcacatagtttactgtggcacttgtattcttattgcaatgcctactcctgaataaacatcattttctttcagagagtctccctctctgttatttaggctgacaaggatatgccaagaagtagcttggatatagcagttaactctgcctttaggatatgtgtatggggatataagagttaactaaaagctgacctttgagttggtccttgaataaaagaagaatagattccaaaaataagaggaataaataatgatcctgagctaggagagtacattttgcagacctttggtttccatattaagaaattcagatttttatgtacaataaagaagttctggaattctctg

SEQ ID NO: 32373 - DNA, 5364 bp, Homo sapiens
  source 1..5364: mol_type = unassigned DNA
atgacgcattgcgcctgcgcgcgcgaccgacgggaggggtggggcgccaggtgcttggggcggcggccgccgaggccggctaaacgcagaatggggaagaatcctgtgcgtcctccacgagctcttccacctgtgccaagtatagatgatattccacttagtcgtcctaagaaaaagaagcccagaacaaaaaacacaccagcaagtgcttctttggaaggccttgctcagactgctggtcgaaggccctctgagggcaatgagccatcaactaaagaactcaaagagcacccagaggctcctgttcaaagaagacagaaaaagacaaggctacctcttgaattggagacttcctccacccaaaagaagtcatctagttcatctttattacgaaatgaaaatggtattgatgcggagccagctgaggaggcagttattcaaaaacctcggaggaagacaaagaaaacccagccagcagaattacagtatgccaatgagctaggagtagaagatgaagacataatcactgatgagcaaactactgtggaacagcagtctgtattcactgcacccactggcattagccagcctgtaggcaaagtatttgtggaaaaaagccggagattccaggctgctgatcgttcagagttgataaagaccacagaaaacatagatgtgtcaatggacgtgaagccttcctggaccaccagagatgtggcacttacagtgcaccgggctttcaggatgattggtctcttttctcatggattcttggctggctgtgctgtgtggaatattgttgtgatatatgttctagcaggagatcagctatccaacctctcaaaccttctgcaacaatacaagaccctagcgtatccattccagagtcttctgtacttgcttttggctctgagtacaatttcagcttttgacaggattgactttgctaaaatatcagtagcaatccgaaattttttggccctggatcctacagctttagcatctttcttgtactttactgctcttatactatctctgagtcagcaaatgacaagtgacagaatccacctttacacaccttcttctgttaatggtagcctctgggaagcaggaattgaggaacagattctccagccatggattgtggtgaatctcgtggtggctcttctggttggattatcttggctatttttgtcttataggccaggcatggatcttagtgaagagttaatgttctcctcagaggtggaagaatatcctgataaagagaaagaaatcaaagcctcttcataataccagctcacctttggaggaataatgacccagtatttgtcccatttttgtttttaaatgtatttttataagatgtatacatgtgtatttgtaatagattttttgattatataatactgaaacatctctcaatattatgaaaaatgttaaaattgtgtttgctgtttatgtctaaacattaatttgtctagcattatcatcttaatgacaaagggaataatgaactagaaaccagcaagtgaaagtgtttatttcctattttctcaaaacagttgtatttataactattaccttaaaaagcactggtttagaaaaagccataacttaaatagtgttataaaatatatatcaggtttaaacataaatttagcgaatatggtagaagggaaaaaagccttcatttttgacctccccttactgaataaattgaaatatgaagtttgtcttttctgaaactggcttagtgattgagtatcatgtaataattataatataatttagcttgaaagatgctctacattatgaccaataaaaagggaatgtatgttttgtttgaaaaattatataacctaaattttttacctagaagtaactaaaaagttgcttctcattataatctgtactagtggttctcatatctggttgtacatcaggatcatagagggagattttaaaaatctatgtagcaaaagaggctgagcagggcaaggctcaggggaataaaggagagacctgtgagcttgtgggctcccagttgacatctgcagtaccctttcctctgtcccttttttctgagtgacaagaaataggagtagaaattcaccatctctgttctccagctctttgtcagagaggtttctggttttccaggaaatccccctcttgagatgggtcctgcactgggaaagatctcttcagaactatatccaatggtacctcagctgttgtatatgagaccctaaagctcaagttgaggagaagactagctatgggaaaaaatgtttcaaaggctgttgagcacatcaataaaactattgagcctgccctgattagcaagcacctgaatgttatagaacagaagaggattgacaaattgatgatagagacagttgaccctgacaataggtctaaatttggagtgaacattatactgggaatctcttttgctgtttgtaaggctggagctgccgaaaagggattctccctgctgtcacagaattgtgaatttgctggcaattctgaaggcatcctgctagttccagctttcactgtgaccagcaatggttctcaatctggcaataagctggcagtataggagttcataatcttccccgtcagcaaacttcagggaagccatgctcgttagagccaaggcttagcacacttgagccgtgtcatcaaagagaaatgtgagaaagctgctgccaatgtgggggattgtggtaggctgcataatgtctcctaaagatgtccatgtcctaatccctggaacttgtgaatatactactttacttggccaaagggatttgcagatatgattaaggttatgaaccttaaaacggggacattatcctgtattatccagaagggtccagtgtaatcttatgagtccttaaaagcagagaagaaagccttttatgtctgtggtcagagaggtcagaagttatgatattgctggctttgaagatggaagagggggccatgagccaaggagagtgatgaccttgcagctgagtacggcccttggccaacaatgagcaaggaaatggatttcagtcacataaccacaaggaactgagttctatgagtatcccaaatgagcaaggaaacaaatcctcccctagagccaagaaaggaaggcagctctgtggataccttggttttggcctggtgctgcccatgtcatacttttgacatacagaactgtaagatagcaagtgtatgttgactaagctgctaaattggtggtgattgcttatggcagcaatagaaagctatatatcctagagaataaagaaggctagagctgctgtggaatgcacttgggaaagctggctacattgataatatgtaactgccatgggcatagttgcctttgtattcttccaggtctgggaagtacaacttagacttcagatctcgtaatgacccaggaggcatataaacctgagcagctagtggccctgtacaagtccttcatcagggaaaaacattgagtattccctgattaaggacttgtacagaggactctgttttccctggtgtttctggtgtgtctcaaaaattgtttgactgtgatgacagggaagtttggaagaagttcactgctaatgcatgtctccaggaagcagggaatgatctcacagtgacacttgaggcacattgctgaggccgtcgatgagaattcatgtaactttctccagcttacagtggactagattgacatgcaagctgatccagtccaattggtagggcatcatggtttctcattactcactgacttaaaatacttttattgccatcctggtgaagcactgcactgggtagataacacaggggcaccttgctgatcagagcccttggccaggtacaaagagctcagtttctaaaactctgtcatttcaataatgttataaattgaatcatacagtatgtaattttatgggattcgctttttttctgttgatctctttttttctgagtcatctcagctgttgtgtgtatcaatagttcatttccttttactgttttgtttggtttaactcattgacctattgaaggatatctgggctcattccagtctgtgaataatgctgctgtggacattcatgtgcaagtttttgtgtgaacattaagttttcatttctttaagataaatgcccaggagtgaaactgatgggttgtatgtagttacaaactgccaagctgttttccagagttggcggtaccattctaatttcccatgacaattttttgaagagtccaagctagttgctttagagtgcctcacctacattttttaattgtctgactttttcctaatgacatcacttaatttgttcctcaatctcctgaatttcctatagactggaggttaggtctggtggtttgattagattttttaaaaaaatatgacttcatctgtgatgctgtgtactttatgttgcataacatgaaccctaagaacagagtgagctgctggacagcaagtttcatggggtgcagtaattaacacaccacatagtataaatctgaaataatgacaaatgtgttaagggccttgggatattgggccatgtactctgaggagcacaaggtgaggtgcaggttcctgcccctaaagaactctatcttttgagattagcaactaacagtgtgagcccactaataggatgtgaaagttgtcaaaatcaagttctggtcattgtgttaaaaatcctaacaaatagagctggggaaggccgtgaaaggacgattttcatgcacagatgtctgataatgaggactatcattaaaagactgcacaaaaccacaccttgcacaaaggccatcacaacctgacacacacaaaaaatacttctatgaggacatttgcccagcaactccctgtccaatgtccaactggcaacatccttgttattgatccttgtagccaaggataattctctcaaaacaatcatttttgctttaaaaaccgttgtcttccttgacctccctgtatatgcacatagtttactgtggcacttgtattcttattgcaatgcctactcctgaataaacatcattttctttcagagagtctccctctctgttatttaggctgacaaggatatgccaagaagtagcttggatatagcagttaactctgcctttaggatatgtgtatggggatataagagttaactaaaagctgacctttgagttggtccttgaataaaagaagaatagattccaaaaataagaggaataaataatgatcctgagctaggagagtacattttgcagacctttggtttccatattaagaaattcagatttttatgtacaataaagaagttctggaattctctg

SEQ ID NO: 32374 - DNA, 5399 bp, Homo sapiens
  source 1..5399: mol_type = unassigned DNA
gaagccccggcgtcccacaggtcccggaggccgctgcgtcgcggggagctgggctcgggccgccggcggttgcgccggggcagccccgcggggagagcaccatgaggactgactcgggggctcggctggaggagggccacctgcgtcctccacgagctcttccacctgtgccaagtatagatgatattccacttagtcgtcctaagaaaaagaagcccagaacaaaaaacacaccagcaagtgcttctttggaaggccttgctcagactgctggtcgaaggccctctgagggcaatgagccatcaactaaagaactcaaagagcacccagaggctcctgttcaaagaagacagaaaaagacaaggctacctcttgaattggagacttcctccacccaaaagaagtcatctagttcatctttattacgaaatgaaaatggtattgatgcggagccagctgaggaggcagttattcaaaaacctcggaggaagacaaagaaaacccagccagcagaattacagtatgccaatgagctaggagtagaagatgaagacataatcactgatgagcaaactactgtggaacagcagtctgtattcactgcacccactggcattagccagcctgtaggcaaagtatttgtggaaaaaagccggagattccaggctgctgatcgttcagagttgataaagaccacagaaaacatagatgtgtcaatggacgtgaagccttcctggaccaccagagatgtggcacttacagtgcaccgggctttcaggatgattggtctcttttctcatggattcttggctggctgtgctgtgtggaatattgttgtgatatatgttctagcaggagatcagctatccaacctctcaaaccttctgcaacaatacaagaccctagcgtatccattccagagtcttctgtacttgcttttggctctgagtacaatttcagcttttgacaggattgactttgctaaaatatcagtagcaatccgaaattttttggccctggatcctacagctttagcatctttcttgtactttactgctcttatactatctctgagtcagcaaatgacaagtgacagaatccacctttacacaccttcttctgttaatggtagcctctgggaagcaggaattgaggaacagattctccagccatggattgtggtgaatctcgtggtggctcttctggttggattatcttggctatttttgtcttataggccaggcatggatcttagtgaagagttaatgttctcctcagaggtggaagaatatcctgataaagagaaagaaatcaaagcctcttcataataccagctcacctttggaggaataatgacccagtatttgtcccatttttgtttttaaatgtatttttataagatgtatacatgtgtatttgtaatagattttttgattatataatactgaaacatctctcaatattatgaaaaatgttaaaattgtgtttgctgtttatgtctaaacattaatttgtctagcattatcatcttaatgacaaagggaataatgaactagaaaccagcaagtgaaagtgtttatttcctattttctcaaaacagttgtatttataactattaccttaaaaagcactggtttagaaaaagccataacttaaatagtgttataaaatatatatcaggtttaaacataaatttagcgaatatggtagaagggaaaaaagccttcatttttgacctccccttactgaataaattgaaatatgaagtttgtcttttctgaaactggcttagtgattgagtatcatgtaataattataatataatttagcttgaaagatgctctacattatgaccaataaaaagggaatgtatgttttgtttgaaaaattatataacctaaattttttacctagaagtaactaaaaagttgcttctcattataatctgtactagtggttctcatatctggttgtacatcaggatcatagagggagattttaaaaatctatgtagcaaaagaggctgagcagggcaaggctcaggggaataaaggagagacctgtgagcttgtgggctcccagttgacatctgcagtaccctttcctctgtcccttttttctgagtgacaagaaataggagtagaaattcaccatctctgttctccagctctttgtcagagaggtttctggttttccaggaaatccccctcttgagatgggtcctgcactgggaaagatctcttcagaactatatccaatggtacctcagctgttgtatatgagaccctaaagctcaagttgaggagaagactagctatgggaaaaaatgtttcaaaggctgttgagcacatcaataaaactattgagcctgccctgattagcaagcacctgaatgttatagaacagaagaggattgacaaattgatgatagagacagttgaccctgacaataggtctaaatttggagtgaacattatactgggaatctcttttgctgtttgtaaggctggagctgccgaaaagggattctccctgctgtcacagaattgtgaatttgctggcaattctgaaggcatcctgctagttccagctttcactgtgaccagcaatggttctcaatctggcaataagctggcagtataggagttcataatcttccccgtcagcaaacttcagggaagccatgctcgttagagccaaggcttagcacacttgagccgtgtcatcaaagagaaatgtgagaaagctgctgccaatgtgggggattgtggtaggctgcataatgtctcctaaagatgtccatgtcctaatccctggaacttgtgaatatactactttacttggccaaagggatttgcagatatgattaaggttatgaaccttaaaacggggacattatcctgtattatccagaagggtccagtgtaatcttatgagtccttaaaagcagagaagaaagccttttatgtctgtggtcagagaggtcagaagttatgatattgctggctttgaagatggaagagggggccatgagccaaggagagtgatgaccttgcagctgagtacggcccttggccaacaatgagcaaggaaatggatttcagtcacataaccacaaggaactgagttctatgagtatcccaaatgagcaaggaaacaaatcctcccctagagccaagaaaggaaggcagctctgtggataccttggttttggcctggtgctgcccatgtcatacttttgacatacagaactgtaagatagcaagtgtatgttgactaagctgctaaattggtggtgattgcttatggcagcaatagaaagctatatatcctagagaataaagaaggctagagctgctgtggaatgcacttgggaaagctggctacattgataatatgtaactgccatgggcatagttgcctttgtattcttccaggtctgggaagtacaacttagacttcagatctcgtaatgacccaggaggcatataaacctgagcagctagtggccctgtacaagtccttcatcagggaaaaacattgagtattccctgattaaggacttgtacagaggactctgttttccctggtgtttctggtgtgtctcaaaaattgtttgactgtgatgacagggaagtttggaagaagttcactgctaatgcatgtctccaggaagcagggaatgatctcacagtgacacttgaggcacattgctgaggccgtcgatgagaattcatgtaactttctccagcttacagtggactagattgacatgcaagctgatccagtccaattggtagggcatcatggtttctcattactcactgacttaaaatacttttattgccatcctggtgaagcactgcactgggtagataacacaggggcaccttgctgatcagagcccttggccaggtacaaagagctcagtttctaaaactctgtcatttcaataatgttataaattgaatcatacagtatgtaattttatgggattcgctttttttctgttgatctctttttttctgagtcatctcagctgttgtgtgtatcaatagttcatttccttttactgttttgtttggtttaactcattgacctattgaaggatatctgggctcattccagtctgtgaataatgctgctgtggacattcatgtgcaagtttttgtgtgaacattaagttttcatttctttaagataaatgcccaggagtgaaactgatgggttgtatgtagttacaaactgccaagctgttttccagagttggcggtaccattctaatttcccatgacaattttttgaagagtccaagctagttgctttagagtgcctcacctacattttttaattgtctgactttttcctaatgacatcacttaatttgttcctcaatctcctgaatttcctatagactggaggttaggtctggtggtttgattagattttttaaaaaaatatgacttcatctgtgatgctgtgtactttatgttgcataacatgaaccctaagaacagagtgagctgctggacagcaagtttcatggggtgcagtaattaacacaccacatagtataaatctgaaataatgacaaatgtgttaagggccttgggatattgggccatgtactctgaggagcacaaggtgaggtgcaggttcctgcccctaaagaactctatcttttgagattagcaactaacagtgtgagcccactaataggatgtgaaagttgtcaaaatcaagttctggtcattgtgttaaaaatcctaacaaatagagctggggaaggccgtgaaaggacgattttcatgcacagatgtctgataatgaggactatcattaaaagactgcacaaaaccacaccttgcacaaaggccatcacaacctgacacacacaaaaaatacttctatgaggacatttgcccagcaactccctgtccaatgtccaactggcaacatccttgttattgatccttgtagccaaggataattctctcaaaacaatcatttttgctttaaaaaccgttgtcttccttgacctccctgtatatgcacatagtttactgtggcacttgtattcttattgcaatgcctactcctgaataaacatcattttctttcagagagtctccctctctgttatttaggctgacaaggatatgccaagaagtagcttggatatagcagttaactctgcctttaggatatgtgtatggggatataagagttaactaaaagctgacctttgagttggtccttgaataaaagaagaatagattccaaaaataagaggaataaataatgatcctgagctaggagagtacattttgcagacctttggtttccatattaagaaattcagatttttatgtacaataaagaagttctggaattctctg

SEQ ID NO: 32375 - DNA, 2409 bp, Homo sapiens
  source 1..2409: mol_type = unassigned DNA
ccggcggcgctcggggagggagccagcagcctagggcctaggcccgggccaccatggcgctgcctccaggcccagccgccctccggcacacactgctgctcctgccagcccttctgagctcaggttggggggagttggagccacaaatagatggtcagacctgggctgagcgggcacttcgggagaatgaacgccacgccttcacctgccgggtggcaggggggcctggcacccccagattggcctggtatctggatggacagctgcaggaggccagcacctcaagactgctgagcgtgggaggggaggccttctctggaggcaccagcaccttcactgtcactgcccatcgggcccagcatgagctcaactgctctctgcaggaccccagaagtggccgatcagccaacgcctctgtcatccttaatgtgcaattcaagccagagattgcccaagtcggcgccaagtaccaggaagctcagggcccaggcctcctggttgtcctgtttgccctggtgcgtgccaacccgccggccaatgtcacctggatcgaccaggatgggccagtgactgtcaacacctctgacttcctggtgctggatgcgcagaactacccctggctcaccaaccacacggtgcagctgcagctccgcagcctggcacacaacctctcggtggtggccaccaatgacgtgggtgtcaccagtgcgtcgcttccagccccagggcttctggctacccgggtggaagtgccactgctgggcattgttgtggctgctgggcttgcactgggcaccctcgtggggttcagcaccttggtggcctgcctggtctgcagaaaagagaagaaaaccaaaggcccctcccggcacccatctctgatatcaagtgactccaacaacctaaaactcaacaacgtgcgcctgccacgggagaacatgtccctcccgtccaaccttcagctcaatgacctcactccagattccagagcagtgaaaccagcagaccggcagatggctcagaacaacagccggccagagcttctggacccggagcccggcggcctcctcaccagccaaggtttcatccgcctcccagtgctgggctatatctatcgagtgtccagcgtgagcagtgatgagatctggctctgagccgagggcgagacaggagtattctcttggcctctggacaccctcccgttcctccaaggcatcctctacctagctaggtcaccaacgtgaagaagttatgccactgccacttttgcttgccctcctggctggggtgccctccatgtcatgcacgtgatgcatttcactgggctgtaacccgcaggggcacaggtatctttggcaaggctaccagttggacgtaagcccctcatgctgactcagggtgggccctgcatgtgatgactgggcccttccagagggagctctttggccaggggtgttcagatgtcatccagcatccaagtgtggcatggcctgctgtataccccaccccagtactccacagcaccttgtacagtaggcatgggggcgtgcctgtgtgggggacagggagggccctgcatggattttcctccttcctatgctatgtagccttgttccctcaggtaaaatttaggaccctgctagctgtgcagaacccaattgccctttgcacagaaaccaacccctgacccagcggtaccggccaagcacaaacgtcctttttgctgcacacgtctctgcccttcacttcttctcttctgtccccacctcctcttgggaattctaggttacacgttggaccttctctactacttcactgggcactagacttttctattggcctgtgccatcgcccagtattagcacaagttagggaggaagaggcaggcgatgagtctagtagcacccaggacggcttgtagctatgcatcattttcctacggcgttagcactttaagcacatcccctaggggagggggtgagtgaggggcccagagccctctttgtggcttccccacgtttggccttctgggattcactgtgagtgtcctgagctctcggggttgatggtttttctctcagcatgtctcctccaccacgggaccccagccctgaccaacccatggttgcctcatcagcaggaaggtgcccttcctggaggatggtcgccacaggcacataattcaacagtgtggaagctttaggggaacatggagaaagaaggagaccacataccccaaagtgacctaagaacactttaaaaagcaacatgtaaatgattggaaattaatatagtacagaatatatttttcccttgttgagatcttcttttgtaatgtttttcatgttactgcctagggcggtgctgagcacacagcaagtttaataaacttgactgaattcatttaca

SEQ ID NO: 32376 - DNA, 1965 bp, Homo sapiens
  source 1..1965: mol_type = unassigned DNA
agttgctccggcggcgctcggggagggagccagcagcctagggcctaggcccgggccaccatggcgctgcctccaggcccagccgccctccggcacacactgctgctcctgccagcccttctgagctcagtcaagccagagattgcccaagtcggcgccaagtaccaggaagctcagggcccaggcctcctggttgtcctgtttgccctggtgcgtgccaacccgccggccaatgtcacctggatcgaccaggatgggccagtgactgtcaacacctctgacttcctggtgctggatgcgcagaactacccctggctcaccaaccacacggtgcagctgcagctccgcagcctggcacacaacctctcggtggtggccaccaatgacgtgggtgtcaccagtgcgtcgcttccagccccaggcccctcccggcacccatctctgatatcaagtgactccaacaacctaaaactcaacaacgtgcgcctgccacgggagaacatgtccctcccgtccaaccttcagctcaatgacctcactccagattccagagcagtgaaaccagcagaccggcagatggctcagaacaacagccggccagagcttctggacccggagcccggcggcctcctcaccagccaaggtttcatccgcctcccagtgctgggctatatctatcgagtgtccagcgtgagcagtgatgagatctggctctgagccgagggcgagacaggagtattctcttggcctctggacaccctcccgttcctccaaggcatcctctacctagctaggtcaccaacgtgaagaagttatgccactgccacttttgcttgccctcctggctggggtgccctccatgtcatgcacgtgatgcatttcactgggctgtaacccgcaggggcacaggtatctttggcaaggctaccagttggacgtaagcccctcatgctgactcagggtgggccctgcatgtgatgactgggcccttccagagggagctctttggccaggggtgttcagatgtcatccagcatccaagtgtggcatggcctgctgtataccccaccccagtactccacagcaccttgtacagtaggcatgggggcgtgcctgtgtgggggacagggagggccctgcatggattttcctccttcctatgctatgtagccttgttccctcaggtaaaatttaggaccctgctagctgtgcagaacccaattgccctttgcacagaaaccaacccctgacccagcggtaccggccaagcacaaacgtcctttttgctgcacacgtctctgcccttcacttcttctcttctgtccccacctcctcttgggaattctaggttacacgttggaccttctctactacttcactgggcactagacttttctattggcctgtgccatcgcccagtattagcacaagttagggaggaagaggcaggcgatgagtctagtagcacccaggacggcttgtagctatgcatcattttcctacggcgttagcactttaagcacatcccctaggggagggggtgagtgaggggcccagagccctctttgtggcttccccacgtttggccttctgggattcactgtgagtgtcctgagctctcggggttgatggtttttctctcagcatgtctcctccaccacgggaccccagccctgaccaacccatggttgcctcatcagcaggaaggtgcccttcctggaggatggtcgccacaggcacataattcaacagtgtggaagctttaggggaacatggagaaagaaggagaccacataccccaaagtgacctaagaacactttaaaaagcaacatgtaaatgattggaaattaatatagtacagaatatatttttcccttgttgagatcttcttttgtaatgtttttcatgttactgcctagggcggtgctgagcacacagcaagtttaataaacttgactgaattc

SEQ ID NO: 32377 - DNA, 1456 bp, Homo sapiens
  source 1..1456: mol_type = unassigned DNA
agcagttgctccggcggcgctcggggagggagccagcagcctagggcctaggcccgggccaccatggcgctgcctccaggcccagccgccctccggcacacactgctgctcctgccagcccttctgagctcaggttggggggagttggagccacaaatagatggtcagacctgggctgagcgggcacttcgggagaatgaacgccacgccttcacctgccgggtggcaggggggcctggcacccccagattggcctggtatctggatggacagctgcaggaggccagcacctcaagactgctgagcgtgggaggggaggccttctctggaggcaccagcaccttcactgtcactgcccatcgggcccagcatgagctcaactgctctctgcaggaccccagaagtggccgatcagccaacgcctctgtcatccttaatgtgcaattcaagccagagattgcccaagtcggcgccaagtaccaggaagctcagggcccaggcctcctggttgtcctgtttgccctggtgcgtgccaacccgccggccaatgtcacctggatcgaccaggatgggccagtgactgtcaacacctctgacttcctggtgctggatgcgcagaactacccctggctcaccaaccacacggtgcagctgcagctccgcagcctggcacacaacctctcggtggtggccaccaatgacgtgggtgtcaccagtgcgtcgcttccagccccagggcttctggctacccgggtggaagtgccactgctgggcattgttgtggctgctgggcttgcactgggcaccctcgtggggttcagcaccttggtggcctgcctggtctgcagaaaagagaagaaaaccaaaggcccctcccggcacccatctctgatatcaagtgactccaacaacctaaaactcaacaacgtgcgcctgccacgggagaacatgtccctcccgtccaaccttcagctcaatgacctcactccagattccagagcagtgaaaccagcagaccggcagatggctcagaacaacagccggccagagcttctggacccggagcccggcggcctcctcaccagccaaggaagaagaaatcaggacaaagacgcataacagagggaagaccatgggaagacacagaagatggccaagaagagacccctcagaagaaatcaatcttggtggggcgtggtggcttcacgcctgtaataccagcactgtgggaggttgaggtgggcagatcgcctgagcctaggagttcgagaccagcctgggcaacatggtgaaattccatctctacaaaaaaattagccgggtgtggtgttgagtatctgtagtcccagctacttgggaggctggggtgggaggactgcttgagtccagcaggttgaggctgcagtgagctgagattgagctactgcactccagcctgggcatagagtaataccct

SEQ ID NO: 32378 - DNA, 2395 bp, Homo sapiens
  source 1..2395: mol_type = unassigned DNA
cggccgcccacctgccgggtaagggcccctcgggcccgtggtcgggcatcgattggccccgcctggcgcagcccccgcccctgcagcggactgcggtgctcatcagacctgagcagttgctccggcggcgctcggggagggagccagcagcctagggcctaggcccgggccaccatggcgctgcctccaggcccagccgccctccggcacacactgctgctcctgccagcccttctgagctcaggttggggggagttggagccacaaatagatggtcagacctgggctgagcgggcacttcgggagaatgaacgccacgccttcacctgccgggtggcaggggggcctggcacccccagattggcctggtatctggatggacagctgcaggaggccagcacctcaagactgctgagcgtgggaggggaggccttctctggaggcaccagcaccttcactgtcactgcccatcgggcccagcatgagctcaactgctctctgcaggaccccagaagtggccgatcagccaacgcctctgtcatccttaatgtgcaattcaagccagagattgcccaagtcggcgccaagtaccaggaagctcagggcccaggcctcctggttgtcctgtttgccctggtgcgtgccaacccgccggccaatgtcacctggatcgaccaggatgggccagtgactgtcaacacctctgacttcctggtgctggatgcgcagaactacccctggctcaccaaccacacggtgcagctgcagctccgcagcctggcacacaacctctcggtggtggccaccaatgacgtgggtgtcaccagtgcgtcgcttccagccccaggcccctcccggcacccatctctgatatcaagtgactccaacaacctaaaactcaacaacgtgcgcctgccacgggagaacatgtccctcccgtccaaccttcagctcaatgacctcactccagattccagagcagtgaaaccagcagaccggcagatggctcagaacaacagccggccagagcttctggacccggagcccggcggcctcctcaccagccaaggtttcatccgcctcccagtgctgggctatatctatcgagtgtccagcgtgagcagtgatgagatctggctctgagccgagggcgagacaggagtattctcttggcctctggacaccctcccgttcctccaaggcatcctctacctagctaggtcaccaacgtgaagaagttatgccactgccacttttgcttgccctcctggctggggtgccctccatgtcatgcacgtgatgcatttcactgggctgtaacccgcaggggcacaggtatctttggcaaggctaccagttggacgtaagcccctcatgctgactcagggtgggccctgcatgtgatgactgggcccttccagagggagctctttggccaggggtgttcagatgtcatccagcatccaagtgtggcatggcctgctgtataccccaccccagtactccacagcaccttgtacagtaggcatgggggcgtgcctgtgtgggggacagggagggccctgcatggattttcctccttcctatgctatgtagccttgttccctcaggtaaaatttaggaccctgctagctgtgcagaacccaattgccctttgcacagaaaccaacccctgacccagcggtaccggccaagcacaaacgtcctttttgctgcacacgtctctgcccttcacttcttctcttctgtccccacctcctcttgggaattctaggttacacgttggaccttctctactacttcactgggcactagacttttctattggcctgtgccatcgcccagtattagcacaagttagggaggaagaggcaggcgatgagtctagtagcacccaggacggcttgtagctatgcatcattttcctacggcgttagcactttaagcacatcccctaggggagggggtgagtgaggggcccagagccctctttgtggcttccccacgtttggccttctgggattcactgtgagtgtcctgagctctcggggttgatggtttttctctcagcatgtctcctccaccacgggaccccagccctgaccaacccatggttgcctcatcagcaggaaggtgcccttcctggaggatggtcgccacaggcacataattcaacagtgtggaagctttaggggaacatggagaaagaaggagaccacataccccaaagtgacctaagaacactttaaaaagcaacatgtaaatgattggaaattaatatagtacagaatatatttttcccttgttgagatcttcttttgtaatgtttttcatgttactgcctagggcggtgctgagcacacagcaagtttaataaacttgactgaattcattt

SEQ ID NO: 32379 - DNA, 2442 bp, Homo sapiens
  source 1..2442: mol_type = unassigned DNA
gggggtactcggcgcgggctggggaccagccggggggtggtgagccgcggccgcccacctgccgggtaagggcccctcgggcccgtggtcgggcatcgattggccccgcctggcgcagcccccgcccctgcagcggactgcggtgctcatcagacctgagcagttgctccggcggcgctcggggagggagccagcctagggcctaggcccgggccaccatggcgctgcctccaggcccagccgccctccggcacacactgctgctcctgccagcccttctgagctcaggttggggggagttggagccacaaatagatggtcagacctgggctgagcgggcacttcgggagaatgaacgccacgccttcacctgccgggtggcaggggggcctggcacccccagattggcctggtatctggatggacagctgcaggaggccagcacctcaagactgctgagcgtgggaggggaggccttctctggaggcaccagcaccttcactgtcactgcccatcgggcccagcatgagctcaactgctctctgcaggaccccagaagtggccgatcagccaacgcctctgtcatccttaatgtgcaattcaagccagagattgcccaagtcggcgccaagtaccaggaagctcagggcccaggcctcctggttgtcctgtttgccctggtgcgtgccaacccgccggccaatgtcacctggatcgaccaggatgggccagtgactgtcaacacctctgacttcctggtgctggatgcgcagaactacccctggctcaccaaccacacggtgcagctgcagctccgcagcctggcacacaacctctcggtggtggccaccaatgacgtgggtgtcaccagtgcgtcgcttccagccccaggcccctcccggcacccatctctgatatcaagtgactccaacaacctaaaactcaacaacgtgcgcctgccacgggagaacatgtccctcccgtccaaccttcagctcaatgacctcactccagattccagagcagtgaaaccagcagaccggcagatggctcagaacaacagccggccagagcttctggacccggagcccggcggcctcctcaccagccaaggtttcatccgcctcccagtgctgggctatatctatcgagtgtccagcgtgagcagtgatgagatctggctctgagccgagggcgagacaggagtattctcttggcctctggacaccctcccgttcctccaaggcatcctctacctagctaggtcaccaacgtgaagaagttatgccactgccacttttgcttgccctcctggctggggtgccctccatgtcatgcacgtgatgcatttcactgggctgtaacccgcaggggcacaggtatctttggcaaggctaccagttggacgtaagcccctcatgctgactcagggtgggccctgcatgtgatgactgggcccttccagagggagctctttggccaggggtgttcagatgtcatccagcatccaagtgtggcatggcctgctgtataccccaccccagtactccacagcaccttgtacagtaggcatgggggcgtgcctgtgtgggggacagggagggccctgcatggattttcctccttcctatgctatgtagccttgttccctcaggtaaaatttaggaccctgctagctgtgcagaacccaattgccctttgcacagaaaccaacccctgacccagcggtaccggccaagcacaaacgtcctttttgctgcacacgtctctgcccttcacttcttctcttctgtccccacctcctcttgggaattctaggttacacgttggaccttctctactacttcactgggcactagacttttctattggcctgtgccatcgcccagtattagcacaagttagggaggaagaggcaggcgatgagtctagtagcacccaggacggcttgtagctatgcatcattttcctacggcgttagcactttaagcacatcccctaggggagggggtgagtgaggggcccagagccctctttgtggcttccccacgtttggccttctgggattcactgtgagtgtcctgagctctcggggttgatggtttttctctcagcatgtctcctccaccacgggaccccagccctgaccaacccatggttgcctcatcagcaggaaggtgcccttcctggaggatggtcgccacaggcacataattcaacagtgtggaagctttaggggaacatggagaaagaaggagaccacataccccaaagtgacctaagaacactttaaaaagcaacatgtaaatgattggaaattaatatagtacagaatatatttttcccttgttgagatcttcttttgtaatgtttttcatgttactgcctagggcggtgctgagcacacagcaagtttaataaacttgactgaattcatttaca

SEQ ID NO: 32380 - DNA, 2228 bp, Homo sapiens
  source 1..2228: mol_type = unassigned DNA
cggccgcccacctgccgggtaagggcccctcgggcccgtggtcgggcatcgattggccccgcctggcgcagcccccgcccctgcagcggactgcggtgctcatcagacctgagcagttgctccggcggcgctcggggagggagccagcagcctagggcctaggcccgggccaccatggcgctgcctccaggcccagccgccctccggcacacactgctgctcctgccagcccttctgagctcaggttggggggagttggagccacaaatagatggtcagacctgggctgagcgggcacttcgggagaatgaacgccacgccttcacctgccgggtggcaggggggcctggcacccccagattggcctggtatctggatggacagctgcaggaggccagcacctcaagactgctgagcgtgggaggggaggccttctctggaggcaccagcaccttcactgtcactgcccatcgggcccagcatgagctcaactgctctctgcaggaccccagaagtggccgatcagccaacgcctctgtcatccttaatgtgcaattcaagccagagattgcccaagtcggcgccaagtaccaggaagctcagggcccaggcctcctggttgtcctgtttgccctggtgcgtgccaacccgccggccaatgtcacctggatcgaccaggatgggccagtgactgtcaacacctctgacttcctggtgctggatgcgcagaactacccctggctcaccaaccacacggtgcagctgcagctccgcagcctggcacacaacctctcggtggtggccaccaatgacgtgggtgtcaccagtgcgtcgcttccagccccaggcccctcccggcacccatctctgatatcaagtgactccaacaacctaaaactcaacaacgtgcgcctgccacgggagaacatgtccctcccgtccaaccttcagctcaatgacctcactccagattccagagtgaaaccagcagaccggcagatggctcagaacaacagccggccagagcttctggacccggagcccggcggcctcctcaccagccaaggaagaagaaatcaggacaaagacgcataacagagggaagaccatgggaagacacagaagatggccaagaagagacccctcagaagaaatcaatcttggtggggcgtggtggcttcacgcctgtaataccagcactgtgggaggttgaggtgggcagatcgcctgagcctaggagttcgagaccagcctgggcaacatggtgaaattccatctctacaaaaaaattagccgggtgtggtgttgagtatctgtagtcccagctacttgggaggctggggtgggaggactgcttgagtccagcaggttgaggctgcagtgagctgagattgagctactgcactccagcctgggcatagagtaataccctgtaaaaaaaaaggaaggaagggagggagggaatcaaccatgccaacaaattgatcttggactactactggactactagcctccagaactatgaaataatacatttctgatgtctaagccactcagtctatggtactttgttatggcagcctagcaaaataatacaacatgctattttttcccccgatcagtatggaattggtcatatgttttataggtaaaatacactgccatactcttttcctgtgggaatctgtgaaaaagaaactgataccaagttatgggcaagtattaacagttatatatgcattacttggtgttataatgcctaatgattccaggacaccatatgaacagagaaaatgggcatgacatctaactcaggtaacaggctctggatctaaacaagtcacagtgtgaagtttttaaactactggtttcttaaaacttttctctttttacaaaaaacagagtacatatagttctgcaacttgctgcaatttgcttttttcatttaacaacatatcactgatatttcttcatattagagcaaaataaggccaaataatattccattgcatagtatttcactgaatggatgtactgcaacctagctattcaatcccctaatcagacaccttcccctcaactacagcttcaaaatgctctgaggaaagagactgtttccaaattctgtgtgtttacaatcaattcttcatatacaaaaaaaatctgtctttgtagagcttacattttagtagggaagaacaaaataagtaaataaagtctatggtatg

SEQ ID NO: 32381 - DNA, 1410 bp, Homo sapiens
  source 1..1410: mol_type = unassigned DNA
agttgctccggcggcgctcggggagggagccagcagcctagggcctaggcccgggccaccatggcgctgcctccaggcccagccgccctccggcacacactgctgctcctgccagcccttctgagctcaggttggggggagttggagccacaaatagatggtcagacctgggctgagcgggcacttcgggagaatgaacgccacgccttcacctgccgggtggcaggggggcctggcacccccagattggcctggtatctggatggacagctgcaggaggccagcacctcaagactgctgagcgtgggaggggaggccttctctggaggcaccagcaccttcactgtcactgcccatcgggcccagcatgagctcaactgctctctgcaggaccccagaagtggccgatcagccaacgcctctgtcatccttaatgtgcaattcaagccagagattgcccaagtcggcgccaagtaccaggaagctcagggcccaggcctcctggttgtcctgtttgccctggtgcgtgccaacccgccggccaatgtcacctggatcgaccaggatgggccagtgactgtcaacacctctgacttcctggtgctggatgcgcagaactacccctggctcaccaaccacacggtgcagctgcagctccgcagcctggcacacaacctctcggtggtggccaccaatgacgtgggtgtcaccagtgcgtcgcttccagccccagggcttctggctacccgggtggaagtgccactgctgggcattgttgtggctgctgggcttgcactgggcaccctcgtggggttcagcaccttggtggcctgcctggtctgcagaaaagagaagaaaaccaaaggcccctcccggcacccatctctgatatcaagtgactccaacaacctaaaactcaacaacgtgcgcctgccacgggagaacatgtccctcccgtccaaccttcagctcaatgacctcactccagattccagagtgaaaccagcagaccggcagatggctcagaacaacagccggccagagcttctggacccggagcccggcggcctcctcaccagccaagcatgtctcctccaccacgggaccccagccctgaccaacccatggttgcctcatcagcaggaaggtgcccttcctggaggatggtcgccacaggcacataattcaacagtgtggaagctttaggggaacatggagaaagaaggagaccacataccccaaagtgacctaagaacactttaaaaagcaacatgtaaatgattggaaattaatatagtacagaatatatttttcccttgttgagatcttcttttgtaatgtttttcatgttactgcctagggcggtgctgagcacacagcaagtttaataaacttgactgaattcattta

SEQ ID NO: 32382 - DNA, 935 bp, Homo sapiens
  source 1..935: mol_type = unassigned DNA
agacctgagcagttgctccggcggcgctcggggagggagccagcagcctagggcctaggcccgggccaccatggcgctgcctccaggcccagccgccctccggcacacactgctgctcctgccagcccttctgagctcaggttggggggagttggagccacaaatagatggtcagacctgggctgagcgggcacttcgggagaatgaacgccacgccttcacctgccgggtggcaggggggcctggcacccccagattggcctggtatctggatggacagctgcaggaggccagcacctcaagactgctgagcgtgggaggggaggccttctctggaggcaccagcaccttcactgtcactgcccatcgggcccagcatgagctcaactgctctctgcaggaccccagaagtggccgatcagccaacgcctctgtcatccttaatgtgcaatggcttctggctacccgggtggaagtgccactgctgggcattgttgtggctgctgggcttgcactgggcaccctcgtggggttcagcaccttggtggcctgcctggtctgcagaaaagagaagaaaaccaaaggcccctcccggcacccatctctgatatcaagtgactccaacaacctaaaactcaacaacgtgcgcctgccacgggagaacatgtccctcccgtccaaccttcagctcaatgacctcactccagattccagagcagtgaaaccagcagaccggcagatggctcagaacaacagccggccagagcttctggacccggagcccggcggcctcctcaccagccaaggtttcatccgcctcccagtgctgggctatatctatcgagtgtccagcgtgagcagtgatgagatctggctctgagccgagggcgagacaggagtattctcttggcctctggacaccctcccgttcctcc

SEQ ID NO: 32383 - DNA, 1578 bp, Homo sapiens
  source 1..1578: mol_type = unassigned DNA
cttttgaggtagagtcagagtagggaaaacaactaatctgttttccaaacaggttttcataaataactgacaggagatgggctgtttttatggaagtattaacccaaatgatgggtgttaatcattaaacctttttggtggtggctcgcttgtttctctgatattctaatccgggtcacagaatggctaaggcagatttaagtgcagcgtggattttttttttctcactttgccttgtgttttccaccctgaaagaatgttgtggctgctcttttttctggtgactgccattcatgctgaactctgtcaaccaggtgcagaaaatgcttttaaagtgagacttagtatcagaacagctctgggagataaagcatatgcctgggataccaatgaagaatacctcttcaaagcgatggtagctttctccatgagaaaagttcccaacagagaagcaacagaaatttcccatgtcctactttgcaatgtaacccagagggtatcattctggtttgtggttacagacccttcaaaaaatcacacccttcctgctgttgaggtgcaatcagccataagaatgaacaagaaccggatcaacaatgccttctttctaaatgaccaaactctggaatttttaaaaatcccttccacacttgcaccacccatggacccatctgtgcccatctggattattatatttggtgtgatattttgcatcatcatagttgcaattgcactactgattttatcagggatctggcaacgtagaagaaagaacaaagaaccatctgaagtggatgacgctgaagataagtgtgaaaacatgatcacaattgaaaatggcatcccctctgatcccctggacatgaagggagggcatattaatgatgccttcatgacagaggatgagaggctcacccctctctgaagggctgttgttctgcttcctcaagaaattaaacatttgtttctgtgtgactgctgagcatcctgaaataccaagagcagatcatatattttgtttcaccattcttcttttgtaataaattttgaatgtgcttgaaagtgaaaagcaatcaattatacccaccaacaccactgaaatcataagctattcacgactcaaaatattctaaaatatttttctgacagtatagtgtataaatgtggtcatgtggtatttgtagttattgatttaagcatttttagaaataagatcaggcatatgtatatattttcacacttcaaagacctaaggaaaaataaattttccagtggagaatacatataatatggtgtagaaatcattgaaaatggatcctttttgacgatcacttatatcactctgtatatgactaagtaaacaaaagtgagaagtaattattgtaaatggatggataaaaatggaattactcatatacagggtggaattttatcctgttatcacaccaacagttgattatatattttctgaatatcagcccctaataggacaattctatttgttgaccatttctacaatttgtaaaagtccaatctgtgctaacttaataaagtaataatcatctctttttgattgtg

SEQ ID NO: 32384 - DNA, 4594 bp, Homo sapiens
  source 1..4594: mol_type = unassigned DNA
cccgtcacaggacagatgatcagggtgcgtccgccttttcgttcccgcttctatcctcctcccctttcccctccccatgtccctccttcttctccctcctccctctctccctccctctggcgtctccagccgactttcgcttcccgtcagcagcctttggcggaagagtgtcccgcctcttccgctctacagcggaggtggctgtggcggtggcgctggtggctgcggcggcggcggcggcagcggcgctcgagcggttcctgtcagggtcagccggcgggccccctgggtggtccacctgcaaatcgcggagcggcgccccagggatcgatggcgatgaactataacgcgaaggatgaagtggacggtgggcccccgtgtgctccggggggcaccgcgaagactcggagaccggataacacggccttcaaacagcaacggctgccagcttggcagcccatccttacggctggcacggtgctacctattttcttcatcatcggtctcatcttcattcccatcggcattggcatttttgtcacctccaacaacatccgcgagatcgagattgattataccggaacagagccttccagtccctgtaataaatgtttatctccggatgtgacaccttgcttttgtaccattaacttcacactggaaaagtcatttgagggcaacgtgtttatgtattatggactgtctaatttctatcaaaaccatcgtcgttacgtgaaatctcgagatgatagtcaactaaatggagattctagtgctttgcttaatcccagtaaggaatgtgaaccttatcgaagaaatgaagacaaaccaattgctccttgtggagctattgccaacagcatgtttaatgatacattagaattgtttctcattggcaatgattcttatcctatacctatcgctttgaaaaagaaaggtattgcttggtggacagataaaaatgtgaaattcagaaatccccctggaggagacaacctggaagaacgatttaaaggtacaacaaagcctgtgaactggcttaaaccagtttacatgctggattctgacccagataataatggattcataaatgaggattttattgtttggatgcgtactgcagcattacctacttttcgcaagttgtatcgtcttatagaaaggaaaagtgatttacatccaacattaccagctggccgatactctttgaatgtcacatacaattaccctgtacattattttgatggacgaaaacggatgatcttgagcactatttcatggatgggaggaaaaaatccatttttggggattgcttacatcgctgttggatccatctccttccttctgggagttgtactgctagtaattaatcataaatatagaaacagtagtaatacagctgacattaccatttaattttatattatgaaagcaaatcatctgcatgtgcatcaaggccagtcctattcaacctagctttcgaatgctgatatctggttagtatgtcattttgaagttggcacataacttttctaaaaaaaagcagtctttgttgtttgcttcttccctacggatgacttctaaaaatatatgacgggtataaaaaaattagctatattgatcatatcaacactgtaactgctgaaatggcattctaatgtttgctttttattcggacaggccacatgatgcatagagcctctttcatgtgacttgtgtctactgcttaaatctttatgctgtgttgatgatattatattgacatatgaagctgtatatgtgtatgtattttgtggagaaagggattacaagatgtatgagtataatgacttgctaacctttcaggattcagagaaagatgaagaaagaccatatctaaataatacacttcatcattttcatgtgtataaatgcttaaagtaccatctttgttgaggtggttcatgtatccagtttatccagtacagttatttgtcaagcttagctttgatttcaaaggacacgcttaccttgtctggcataagaattaatgctcatgtctgcagtggttgggtaggtcctgcttaggagaattaaaaaattcctctttccgtttggttgaatgttgcagtcaggaaccccaactcacttggaatgtttttatatgtaatcatttcccttgaagcttatactttataagggaagaaagaattcaggtgatatgggaaaactgcttggcagaccttcatcttctgcctcaactgtaaaccacatgtaagtgcttaatggagactgttttcattcttgtgatatttaacattcagaaaattacttcagctttggaaatactcaggctgtttttattctgcaggtaagtgttttgacttaagtactaatattccagaaatttttgaaagcagtaaccttaatttcctatgtatttcattccacttttgcatataggtcaaatagcaatgtgtatgcacattctctttagttaaggcaccaattgttttggttggttttcctaagacatactttaaaaagatgttctataaatttcctaattaaattatggggattttggagtatgtacatgataaattataatatgtatatggttgaagttattttattttttactaatgaattattttaatattccttattgaataaatgctgtaacttgtttgctatggaacttattcttaaagttctagttaaaaataatttttccacatgcatgaaaatatgtattaatcagaggtggcttaattacattgaaattgcttttttgttgttgtttttttactgaaataactcatgtttgtgtagaagaatgcctgtttactcagagtttatattttccttcagttatattttaaatcaaaaggtctgggtaatgtatacttttgattaatatatactttttttaaaaaacaaaaaacaatgtaatggttaatagtagaaatgtgccacacttttcaagttttatataacatatgaaattcagttaaaagaatgtgtgtttcataatgacttttaactggtaaaaatattacttgcacgaagtacttgatgtatggttatcctgaaatttcggagtatttggtgtgttctttgtctaaaaatagtctgttttgtcagtccttcagaatattatttattctgaagattgtccctcttgcacttggcagtttattttcggggatacattgttgggggagaggggtttctgccactctttccagattgagtctgtgctgtttaaggaggactaccatcctgcaactctttttctaactggggcacagaggatgtcgctaaagaaaagttgaagagccctttcagcactttctcatctgtggagaagatggaatcttaaaatacatttggagttttatctgttttacaagtccattgatggcctaagttcctcctgttttctgctgtttgatctctaaggaactcctgttgctaaatatgaagagtatggaacattcgtatagtctctgtgaagcatggggggagggaagacatttctttttcttataggctttatgctcaaatgtcatagtctcctttcaaagaattgtgttgcattttaaatgcacccagcttaagtagaagacattgaaggatgcattaattttcaggaactattttgaattatgaaaagattcccaattgaaaaaattattcaacaagtaaaagctaagaaatttcattgaaatcataaggcagtttaagcataaattgataaaaatagctgtgtactactaattaatagaaaatcattcaaccaagagaagagtcaagtgaatatcgtttgtttatttgctagtgagtttctttgtaacgttgattttattaaatgataatatttggttagtatgtcctatgttaataaaaatgaacaaaattaattttgctatgttcaggtgtcttgataaaataacaatgctccagtgttgttgcttacatttagcactaaattttaacacagcgtcagtgagtccaggttttaacttcttcatgcctggatgggataaaatgtaattcattgttaaattaattcatatttgtatttattaatcactgtgacaacattaaccatttgttcttaccaggaagtggtcagattatcatctgagttacagttagactggctaagtttggtattagatcaaggggaatgtccagtaaacagagaggtaagcatgatggaaataatgaagtggggtacacaggaaaaacctgactagtgaggaggagcagctgagagatagggtcagtgaatgcggttcagcctgctacctctcctgtcttcatagaaccattgccttagaattattgtatgacacattttttgttggttaagctgtaaggttttgttctttgtgaacatgggtattttgaggggagggtggagggagtagggaagtggtccttttacaagaattttgatgcataagtgtctattgtagggtttggatgatctagtaaagtgttttagaacccctttttatcccatgcaccattcagtaaacataaaaatcacaattctgctaatgtcatttggaacttcaaaataaatatcttgtctaaaaacaaa

SEQ ID NO: 32385 - DNA, 3775 bp, Homo sapiens
  source 1..3775: mol_type = unassigned DNA
acactggctaccatgggtttatggagaggaagaacccatctctccctttggtttctgaagtgggaggtggagccctgcatccttccaaaactcacaatggacagttccacaaaacttggaaacaattccagcaattgccagggtaattgtatttttaaaatgagatgatgtgtgttagataatcagtgccatgaagaaaagtcagcatagagacagaggacctctcagaaacgcagtctttactttctgcagaaagggcgctccttgaagatggaacaatggtgagagcacacttgaacaaaggaaaagcaacatatttatcccttatgcatttggatcatccttactgtcgtatcctgcatccattggctggagctggacctcacagttttaaactgatacccgatttgctaataacctaaaactttcctaaatagattgattataccggaacagagccttccagtccctgtaataaatgtttatctccggatgtgacaccttgcttttgtaccattaacttcacactggaaaagtcatttgagggcaacgtgtttatgtattatggactgtctaatttctatcaaaaccatcgtcgttacgtgaaatctcgagatgatagtcaactaaatggagattctagtgctttgcttaatcccagtaaggaatgtgaaccttatcgaagaaatgaagacaaaccaattgctccttgtggagctattgccaacagcatgtttaatgatacattagaattgtttctcattggcaatgattcttatcctatacctatcgctttgaaaaagaaaggtattgcttggtggacagataaaaatgtgaaattcagaaatccccctggaggagacaacctggaagaacgatttaaaggtacaacaaagcctgtgaactggcttaaaccagtttacatgctggattctgacccagataataatggattcataaatgaggattttattgtttggatgcgtactgcagcattacctacttttcgcaagttgtatcgtcttatagaaaggaaaagtgatttacatccaacattaccagctggccgatactctttgaatgtcacatacaattaccctgtacattattttgatggacgaaaacggatgatcttgagcactatttcatggatgggaggaaaaaatccatttttggggattgcttacatcgctgttggatccatctccttccttctgggagttgtactgctagtaattaatcataaatatagaaacagtagtaatacagctgacattaccatttaattttatattatgaaagcaaatcatctgcatgtgcatcaaggccagtcctattcaacctagctttcgaatgctgatatctggttagtatgtcattttgaagttggcacataacttttctaaaaaaaagcagtctttgttgtttgcttcttccctacggatgacttctaaaaatatatgacgggtataaaaaaattagctatattgatcatatcaacactgtaactgctgaaatggcattctaatgtttgctttttattcggacaggccacatgatgcatagagcctctttcatgtgacttgtgtctactgcttaaatctttatgctgtgttgatgatattatattgacatatgaagctgtatatgtgtatgtattttgtggagaaagggattacaagatgtatgagtataatgacttgctaacctttcaggattcagagaaagatgaagaaagaccatatctaaataatacacttcatcattttcatgtgtataaatgcttaaagtaccatctttgttgaggtggttcatgtatccagtttatccagtacagttatttgtcaagcttagctttgatttcaaaggacacgcttaccttgtctggcataagaattaatgctcatgtctgcagtggttgggtaggtcctgcttaggagaattaaaaaattcctctttccgtttggttgaatgttgcagtcaggaaccccaactcacttggaatgtttttatatgtaatcatttcccttgaagcttatactttataagggaagaaagaattcaggtgatatgggaaaactgcttggcagaccttcatcttctgcctcaactgtaaaccacatgtaagtgcttaatggagactgttttcattcttgtgatatttaacattcagaaaattacttcagctttggaaatactcaggctgtttttattctgcaggtaagtgttttgacttaagtactaatattccagaaatttttgaaagcagtaaccttaatttcctatgtatttcattccacttttgcatataggtcaaatagcaatgtgtatgcacattctctttagttaaggcaccaattgttttggttggttttcctaagacatactttaaaaagatgttctataaatttcctaattaaattatggggattttggagtatgtacatgataaattataatatgtatatggttgaagttattttattttttactaatgaattattttaatattccttattgaataaatgctgtaacttgtttgctatggaacttattcttaaagttctagttaaaaataatttttccacatgcatgaaaatatgtattaatcagaggtggcttaattacattgaaattgcttttttgttgttgtttttttactgaaataactcatgtttgtgtagaagaatgcctgtttactcagagtttatattttccttcagttatattttaaatcaaaaggtctgggtaatgtatacttttgattaatatatactttttttaaaaaacaaaaaacaatgtaatggttaatagtagaaatgtgccacacttttcaagttttatataacatatgaaattcagttaaaagaatgtgtgtttcataatgacttttaactggtaaaaatattacttgcacgaagtacttgatgtatggttatcctgaaatttcggagtatttggtgtgttctttgtctaaaaatagtctgttttgtcagtccttcagaatattatttattctgaagattgtccctcttgcacttggcagtttattttcggggatacattgttgggggagaggggtttctgccactctttccagattgagtctgtgctgtttaaggaggactaccatcctgcaactctttttctaactggggcacagaggatgtcgctaaagaaaagttgaagagccctttcagcactttctcatctgtggagaagatggaatcttaaaatacatttggagttttatctgttttacaagtccattgatggcctaagttcctcctgttttctgctgtttgatctctaaggaactcctgttgctaaatatgaagagtatggaacattcgtatagtctctgtgaagcatggggggagggaagacatttctttttcttataggctttatgctcaaatgtcatagtctcctttcaaagaattgtgttgcattttaaatgcacccagcttaagtagaagacattgaaggatgcattaattttcaggaactattttgaattatgaaaagattcccaattgaaaaaattattcaacaagtaaaagctaagaaatttcattgaaatcataaggcagtttaagcataaattgataaaaatagctgtgtactactaattaatagaaaatcattcaaccaagagaagagtcaagtgaatatcgtttgtttatttgctagtgagtttctttgtaacgttgattttattaaatgataatatttggttagtatgtcctatgttaataaaaatgaacaaaattaa

SEQ ID NO: 32386 - DNA, 2791 bp, Homo sapiens
  source 1..2791: mol_type = unassigned DNA
cagggtgcgtccgccttttcgttcccgcttctatcctcctcccctttcccctccccatgtccctccttcttctccctcctccctctctccctccctctggcgtctccagccgactttcgcttcccgtcagcagcctttggcggaagagtgtcccgcctcttccgctctacagcggaggtggctgtggcggtggcgctggtggctgcggcggcggcggcggcagcggcgctcgagcggttcctgtcagggtcagccggcgggccccctgggtggtccacctgcaaatcgcggagcggcgccccagggatcgatggcgatgaactataacgcgaaggatgaagtggacggtgggcccccgtgtgctccggggggcaccgcgaagactcggagaccggataacacggccttcaaacagcaacggctgccagcttggcagcccatccttacggctggcacggtgctacctattttcttcatcatcggtctcatcttcattcccatcggcattggcatttttgtcacctccaacaacatccgcgagatcgagggcaacgtgtttatgtattatggactgtctaatttctatcaaaaccatcgtcgttacgtgaaatctcgagatgatagtcaactaaatggagattctagtgctttgcttaatcccagtaaggaatgtgaaccttatcgaagaaatgaagacaaaccaattgctccttgtggagctattgccaacagcatgtttaatgatacattagaattgtttctcattggcaatgattcttatcctatacctatcgctttgaaaaagaaaggtattgcttggtggacagataaaaatgtgaaattcagaaatccccctggaggagacaacctggaagaacgatttaaaggtacaacaaagcctgtgaactggcttaaaccagtttacatgctggattctgacccagataataatggattcataaatgaggattttattgtttggatgcgtactgcagcattacctacttttcgcaagttgtatcgtcttatagaaaggaaaagtgatttacatccaacattaccagctggccgatactctttgaatgtcacatacaattaccctgtacattattttgatggacgaaaacggatgatcttgagcactatttcatggatgggaggaaaaaatccatttttggggattgcttacatcgctgttggatccatctccttccttctgggagttgtactgctagtaattaatcataaatatagaaacagtagtaatacagctgacattaccatttaattttatattatgaaagcaaatcatctgcatgtgcatcaaggccagtcctattcaacctagctttcgaatgctgatatctggttagtatgtcattttgaagttggcacataacttttctaaaaaaaagcagtctttgttgtttgcttcttccctacggatgacttctaaaaatatatgacgggtataaaaaaattagctatattgatcatatcaacactgtaactgctgaaatggcattctaatgtttgctttttattcggacaggccacatgatgcatagagcctctttcatgtgacttgtgtctactgcttaaatctttatgctgtgttgatgatattatattgacatatgaagctgtatatgtgtatgtattttgtggagaaagggattacaagatgtatgagtataatgacttgctaacctttcaggattcagagaaagatgaagaaagaccatatctaaataatacacttcatcattttcatgtgtataaatgcttaaagtaccatctttgttgaggtggttcatgtatccagtttatccagtacagttatttgtcaagcttagctttgatttcaaaggacacgcttaccttgtctggcataagaattaatgctcatgtctgcagtggttgggtaggtcctgcttaggagaattaaaaaattcctctttccgtttggttgaatgttgcagtcaggaaccccaactcacttggaatgtttttatatgtaatcatttcccttgaagcttatactttataagggaagaaagaattcaggtgatatgggaaaactgcttggcagaccttcatcttctgcctcaactgtaaaccacatgtaagtgcttaatggagactgttttcattcttgtgatatttaacattcagaaaattacttcagctttggaaatactcaggctgtttttattctgcaggtaagtgttttgacttaagtactaatattccagaaatttttgaaagcagtaaccttaatttcctatgtatttcattccacttttgcatataggtcaaatagcaatgtgtatgcacattctctttagttaaggcaccaattgttttggttggttttcctaagacatactttaaaaagatgttctataaatttcctaattaaattatggggattttggagtatgtacatgataaattataatatgtatatggttgaagttattttattttttactaatgaattattttaatattccttattgaataaatgctgtaacttgtttgctatggaacttattcttaaagttctagttaaaaataatttttccacatgcatgaaaatatgtattaatcagaggtggcttaattacattgaaattgcttttttgttgttgtttttttactgaaataactcatgtttgtgtagaagaatgcctgtttactcagagtttatattttccttcagttatattttaaatcaaaaggtctgggtaatgtatacttttgattaatatatactttttttaaaaaa

SEQ ID NO: 32387 - DNA, 445 bp, Homo sapiens
  source 1..445: mol_type = unassigned DNA
agttgactggctgacctcgcgccgtccaccacccccttccctctgtttctctgttttttctttctctttctgcgggtttcctgaatttgcagattgattataccggaacagagccttccagtccctgtaataaatgtttatctccggatgtgacaccttgcttttgtaccattaacttcacactggaaaagtcatttgagggcaacgtgtttatgtattatggactgtctaatttctatcaaaaccatcgtcgttacgtgaaatctcgagatgatagtcaactaaatggagattctagtgctttgcttaatcccagtaaggaatgtgaaccttatcgaagaaatgaagacaaaccaattgctccttgtggagctattgccaacagcatgtttaatgatacattagaattgtttctcattggcaatgattcttatcctatacctat

SEQ ID NO: 32388 - DNA, 4207 bp, Homo sapiens
  source 1..4207: mol_type = unassigned DNA
atggcgatgaactataccgcgaagactcggagaccggataacacggccttcaaacagcaacggctgccagcttggcagcccatccttacggctggcacggtgctacctattttcttcatcatcggtctcatcttcattcccatcggcattggcatttttgtcacctccaacaacatccgcgagatcgagattgattataccggaacagagccttccagtccctgtaataaatgtttatctccggatgtgacaccttgcttttgtaccattaacttcacactggaaaagtcatttgagggcaacgtgtttatgtattatggactgtctaatttctatcaaaaccatcgtcgttacgtgaaatctcgagatgatagtcaactaaatggagattctagtgctttgcttaatcccagtaaggaatgtgaaccttatcgaagaaatgaagacaaaccaattgctccttgtggagctattgccaacagcatgtttaatgatacattagaattgtttctcattggcaatgattcttatcctatacctatcgctttgaaaaagaaaggtattgcttggtggacagataaaaatgtgaaattcagaaatccccctggaggagacaacctggaagaacgatttaaaggtacaacaaagcctgtgaactggcttaaaccagtttacatgctggattctgacccagataataatggattcataaatgaggattttattgtttggatgcgtactgcagcattacctacttttcgcaagttgtatcgtcttatagaaaggaaaagtgatttacatccaacattaccagctggccgatactctttgaatgtcacatacaattaccctgtacattattttgatggacgaaaacggatgatcttgagcactatttcatggatgggaggaaaaaatccatttttggggattgcttacatcgctgttggatccatctccttccttctgggagttgtactgctagtaattaatcataaatatagaaacagtagtaatacagctgacattaccatttaattttatattatgaaagcaaatcatctgcatgtgcatcaaggccagtcctattcaacctagctttcgaatgctgatatctggttagtatgtcattttgaagttggcacataacttttctaaaaaaaagcagtctttgttgtttgcttcttccctacggatgacttctaaaaatatatgacgggtataaaaaaattagctatattgatcatatcaacactgtaactgctgaaatggcattctaatgtttgctttttattcggacaggccacatgatgcatagagcctctttcatgtgacttgtgtctactgcttaaatctttatgctgtgttgatgatattatattgacatatgaagctgtatatgtgtatgtattttgtggagaaagggattacaagatgtatgagtataatgacttgctaacctttcaggattcagagaaagatgaagaaagaccatatctaaataatacacttcatcattttcatgtgtataaatgcttaaagtaccatctttgttgaggtggttcatgtatccagtttatccagtacagttatttgtcaagcttagctttgatttcaaaggacacgcttaccttgtctggcataagaattaatgctcatgtctgcagtggttgggtaggtcctgcttaggagaattaaaaaattcctctttccgtttggttgaatgttgcagtcaggaaccccaactcacttggaatgtttttatatgtaatcatttcccttgaagcttatactttataagggaagaaagaattcaggtgatatgggaaaactgcttggcagaccttcatcttctgcctcaactgtaaaccacatgtaagtgcttaatggagactgttttcattcttgtgatatttaacattcagaaaattacttcagctttggaaatactcaggctgtttttattctgcaggtaagtgttttgacttaagtactaatattccagaaatttttgaaagcagtaaccttaatttcctatgtatttcattccacttttgcatataggtcaaatagcaatgtgtatgcacattctctttagttaaggcaccaattgttttggttggttttcctaagacatactttaaaaagatgttctataaatttcctaattaaattatggggattttggagtatgtacatgataaattataatatgtatatggttgaagttattttattttttactaatgaattattttaatattccttattgaataaatgctgtaacttgtttgctatggaacttattcttaaagttctagttaaaaataatttttccacatgcatgaaaatatgtattaatcagaggtggcttaattacattgaaattgcttttttgttgttgtttttttactgaaataactcatgtttgtgtagaagaatgcctgtttactcagagtttatattttccttcagttatattttaaatcaaaaggtctgggtaatgtatacttttgattaatatatactttttttaaaaaacaaaaaacaatgtaatggttaatagtagaaatgtgccacacttttcaagttttatataacatatgaaattcagttaaaagaatgtgtgtttcataatgacttttaactggtaaaaatattacttgcacgaagtacttgatgtatggttatcctgaaatttcggagtatttggtgtgttctttgtctaaaaatagtctgttttgtcagtccttcagaatattatttattctgaagattgtccctcttgcacttggcagtttattttcggggatacattgttgggggagaggggtttctgccactctttccagattgagtctgtgctgtttaaggaggactaccatcctgcaactctttttctaactggggcacagaggatgtcgctaaagaaaagttgaagagccctttcagcactttctcatctgtggagaagatggaatcttaaaatacatttggagttttatctgttttacaagtccattgatggcctaagttcctcctgttttctgctgtttgatctctaaggaactcctgttgctaaatatgaagagtatggaacattcgtatagtctctgtgaagcatggggggagggaagacatttctttttcttataggctttatgctcaaatgtcatagtctcctttcaaagaattgtgttgcattttaaatgcacccagcttaagtagaagacattgaaggatgcattaattttcaggaactattttgaattatgaaaagattcccaattgaaaaaattattcaacaagtaaaagctaagaaatttcattgaaatcataaggcagtttaagcataaattgataaaaatagctgtgtactactaattaatagaaaatcattcaaccaagagaagagtcaagtgaatatcgtttgtttatttgctagtgagtttctttgtaacgttgattttattaaatgataatatttggttagtatgtcctatgttaataaaaatgaacaaaattaattttgctatgttcaggtgtcttgataaaataacaatgctccagtgttgttgcttacatttagcactaaattttaacacagcgtcagtgagtccaggttttaacttcttcatgcctggatgggataaaatgtaattcattgttaaattaattcatatttgtatttattaatcactgtgacaacattaaccatttgttcttaccaggaagtggtcagattatcatctgagttacagttagactggctaagtttggtattagatcaaggggaatgtccagtaaacagagaggtaagcatgatggaaataatgaagtggggtacacaggaaaaacctgactagtgaggaggagcagctgagagatagggtcagtgaatgcggttcagcctgctacctctcctgtcttcatagaaccattgccttagaattattgtatgacacattttttgttggttaagctgtaaggttttgttctttgtgaacatgggtattttgaggggagggtggagggagtagggaagtggtccttttacaagaattttgatgcataagtgtctattgtagggtttggatgatctagtaaagtgttttagaacccctttttatcccatgcaccattcagtaaacataaaaatcacaattctgctaatgtcatttggaacttcaaaataaatatcttgtct

SEQ ID NO: 32389 - DNA, 3026 bp, Homo sapiens
  source 1..3026: mol_type = unassigned DNA
agcagtccccgggcttgcgcggcgcggagagggaggcgccccgcggcggggcccccactcggtcagcccgcgcgtcggtccccgcgcggccgccatgacctggagcgccacggcccggggcgcccaccagcccgacaacaccgccttcactcagcagcgcctccccgcctggcagccgctgctgtcggccagcatcgcgctgccgctcttcttctgcgcgggcctggccttcatcggcctgggcctgggcctctactactcctccaacggcatcaaggagctggagtacgactatacaggcgacccgggcaccggtaactgctcggtgtgcgccgcggctggccagggccgggcgctgccgcccccctgctcgtgcgcctggtacttctcgctgcccgagctcttccagggcccagtgtacctctactacgagctgaccaacttctaccagaacaaccggcgctacggcgtgtcccgcgacgacgcgcagctgagcggactccccagcgcgctgcgccaccctgtcaacgagtgcgccccctaccagcgcagcgcggccggcctgcccatcgcgccctgcggcgccatcgccaacagcctcttcaacgactccttctcgctttggcaccagcgccagcccggcgggccctacgtcgaggtgccgctcgaccgctccggcatcgcctggtggaccgactaccacgtcaagttccgcaacccgccgctggtcaacggcagcctggcgttggccttccagggcacggcgcccccgcccaactggcgccggccagtctacgagctcagccccgaccccaacaacaccggcttcatcaatcaggacttcgtggtgtggatgcgcacggcggcgctgcccacgttccgcaaactgtacgcgcgcatccgccagggcaactactcggccgggctgccgcggggcgcctaccgcgtcaacatcacctacaactacccggtgcgcgcgttcggcggccacaagctcctcatcttcagcagcatctcgtggatgggtggcaagaaccccttcctgggcatcgcctacctggtcgtcggctccctctgcatcctcaccggctttgtcatgctggtcgtctacattcgctaccaggaccaggacgacgacgacgaggagtgattccggctttccagggatccctcctgcttcttgccaaaactcttgcaaggtgcttttggcatctcctcctcgcccgtcacccaattccaacctcgcctagcttttcctccctttgtgaatgaggggaccagataagggaattaccccccttgctcttggggggctgctagactgtcttgccgcggggagggatgttgactgcagagtgaaacatccttgcaaactcttcccacctccttcacgacactgagttgccatgtgaggttcttcaagtctgagagtggaagggatccctatggagactcctattaaacccctattagaggaagagattgagagacctagcaatgtgaagtaacaaagatcaggcagctgcaagtgactcctgaatcttgagtccagggctttcgccactacagtacagtggttttcttttctttggtcggggagagtgggctggaatggagagtgaggcccacaaattacctgcagagacgtggaggcgtgagggagaacatgcttgttaaatatgcaggtagattaggagacaccaaacagagattcagacacagtaaggctgggatgagatcctcgaagctgtgttttaacaaactccactggagagtcccatattccctcaaatttgggaatcacgaccctgaaccaggttgggcctgaagcagtcaactgaattcactttttcggatagtaatttgttcccaggggcagtgacaaccatgatgttccaggtttggtctggcactctgccttgaacgtaggaagctcttgattttattgattaacatcaatcagtatgtttaaagttattctaagaagcaatagtttatttttaaaaaccttgtatagcaaaataacttaaaaccctttgtgatatcatcttaccagtttatttggtaaaaacaaacagttatttggtatttgtcagaattcttcagtgcctgctattacagctattttccaattactaacttgattatactcactcaaggcagtgcaagatcttgaagtactttttagcagttaagtaatattgaattgtattgaatagtttacatagtttattctagtctttgaaaattactgaacatggacaatgtgcatgtcattgacatctgccttagaacttctgggacaatcctgattcgagagattctatcccattatttacatataccaaaaatactttgttaatttaatgtgttggcttcccaactcctgaacacgacacaattttattattagattttgtatggtgattttaggctatgaaaacatgatcattatatgtatatagatacatttttatttgttacaaatgtttgagcagctcactagcccacccctcctctattttgggtaagagaatttactaccttttttaactatgtagttgagagcaacatgtattttgttatttttagaatggtcagtatattgctataaaattttaaatgagactatgaaagttaaagtattctgattctggttaaattaacgaatatggttccaggccctgttctctgggtttttgagagagaataaaggttatgtttgtcttacctttgttatcgagtttgctgaattcttttgaacgatgatcttaaaggcacaaacaccaccagccactttgctaatttcttaatagcagatttacattgcagcaagaaaaccatcttttatagtaacattcagttaaaatgaactcaattcattgttaacttcctaaaacagaatttgaactttatcaacctcaacgtgtatataaactagatagtcctcaatactttatcaacctcaacatgtatataaactagatagtcctcaaatactgtttgaatttaataaatgtcaattt

SEQ ID NO: 32390 - DNA, 4471 bp, Homo sapiens
  source 1..4471: mol_type = unassigned DNA
aaacagatttatcataacgtaattccctggacactcccaacttgagactgaaagctgggcgaaagcggtttgtgaagctaacctaaaagacaaaatggtctagagccaccttttccccgcaaataacagaggattaaggatctgaaatcttcaagcctccaggaccacggtgcaagccctcagcaaaaatttctgctggaggccggagcgccttttgatttcgggagactggcccaggaactctagtcacttggaaggcggaagagaaggtggtacctgagccaggtaggagccactcagaggcagcccggggccgccactcacctaggagaggaggtggagtccgatgacctggactgagaggaaacgcgagactgagtctaccaggtgaggtaaaaaacacccacctgctcacctcggaaggggcgggcgaggtgcggctcccggtgacccgcgggggtgcagcgcacctgggcggaggcggaactgggagggtgtgggcactgctcgtagggcctggaactaaactcacctgtgacggaggcagaggaggggcccgggcaaaaacccacctgagctggcgggaaacccgacccgcgagcagtccccgggcttgcgcggcgcggagagggaggcgccccgcggcggggcccccactcggtcagcccgcgcgtcggtccccgcgcggccgccatgacctggagcgccacggcccggggcgcccaccagcccgacaacaccgccttcactcagcagcgcctccccgcctggcagccgctgctgtcggccagcatcgcgctgccgctcttcttctgcgcgggcctggccttcatcggcctgggcctgggcctctactactcctccaacggcatcaaggagctggagtacgactatacaggcgacccgggcaccggtaactgctcggtgtgcgccgcggctggccagggccgggcgctgccgcccccctgctcgtgcgcctggtacttctcgctgcccgagctcttccagggcccagtgtacctctactacgagctgaccaacttctaccagaacaaccggcgctacggcgtgtcccgcgacgacgcgcagctgagcggactccccagcgcgctgcgccaccctgtcaacgagtgcgccccctaccagcgcagcgcggccggcctgcccatcgcgccctgcggcgccatcgccaacagcctcttcaacgactccttctcgctttggcaccagcgccagcccggcgggccctacgtcgaggtgccgctcgaccgctccggcatcgcctggtggaccgactaccacgtcaagttccgcaacccgccgctggtcaacggcagcctggcgttggccttccagggcacggcgcccccgcccaactggcgccggccagtctacgagctcagccccgaccccaacaacaccggcttcatcaatcaggacttcgtggtgtggatgcgcacggcggcgctgcccacgttccgcaaactgtacgcgcgcatccgccagggcaactactcggccgggctgccgcggggcgcctaccgcgtcaacatcacctacaactacccggtgcgcgcgttcggcggccacaagctcctcatcttcagcagcatctcgtggatgggtggcaagaaccccttcctgggcatcgcctacctggtcgtcggctccctctgcatcctcaccggctttgtcatgctggtcgtctacattcgctaccaggaccaggacgacgacgacgaggagtgattccggctttccagggatccctcctgcttcttgccaaaactcttgcaaggtgcttttggcatctcctcctcgcccgtcacccaattccaacctcgcctagcttttcctccctttgtgaatgaggggaccagataagggaattaccccccttgctcttggggggctgctagactgtcttgccgcggggagggatgttgactgcagagtgaaacatccttgcaaactcttcccacctccttcacgacactgagttgccatgtgaggttcttcaagtctgagagtggaagggatccctatggagactcctattaaacccctattagaggaagagattgagagacctagcaatgtgaagtaacaaagatcaggcagctgcaagtgactcctgaatcttgagtccagggctttcgccactacagtacagtggttttcttttctttggtcggggagagtgggctggaatggagagtgaggcccacaaattacctgcagagacgtggaggcgtgagggagaacatgcttgttaaatatgcaggtagattaggagacaccaaacagagattcagacacagtaaggctgggatgagatcctcgaagctgtgttttaacaaactccactggagagtcccatattccctcaaatttgggaatcacgaccctgaaccaggttgggcctgaagcagtcaactgaattcactttttcggatagtaatttgttcccaggggcagtgacaaccatgatgttccaggtttggtctggcactctgccttgaacgtaggaagctcttgatgatttgtggaatgaatttttaaaaaattactatctggggaaaactagttggcatacagagttgtaggacagggtttatgtgattcatttgatattttagtattttggtgtaaaagccaacaggcaaactttgccaggtactgtgtagaaactcgaaaatgtgaggccagtttgtacagttcagaggaaatgctttaacgtagaatcagatagctggaagagatcttcgagggaaagtaagttccctaaagtcacatctatgtctcctagctcagtgttctttgtcattgtgtgtgtgtgtgtgtgtgtgtgtgtgtgtgtgtgtgattagaaagggcttcattcataccttttcccttggacctggaaaaaaaattttttttatcttttcaaatgaaatctattgatttctagtaatcatatttgaatcaatgttaaagcatatatagtcttatatgtaaactagattcttaagattatttgaacctttgagatgaagtttacactcaactaaaatcattccattgattttattgattaacatcaatcagtatgtttaaagttattctaagaagcaatagtttatttttaaaaaccttgtatagcaaaataacttaaaaccctttgtgatatcatcttaccagtttatttggtaaaaacaaacagttatttggtatttgtcagaattcttcagtgcctgctattacagctattttccaattactaacttgattatactcactcaaggcagtgcaagatcttgaagtactttttagcagttaagtaatattgaattgtattgaatagtttacatagtttattctagtctttgaaaattactgaacatggacaatgtgcatgtcattgacatctgccttagaacttctgggacaatcctgattcgagagattctatcccattatttacatataccaaaaatactttgttaatttaatgtgttggcttcccaactcctgaacacgacacaattttattattagattttgtatggtgattttaggctatgaaaacatgatcattatatgtatatagatacatttttatttgttacaaatgtttgagcagctcactagcccacccctcctctattttgggtaagagaatttactaccttttttaactatgtagttgagagcaacatgtattttgttatttttagaatggtcagtatattgctataaaattttaaatgagactatgaaagttaaagtattctgattctggttaaattaacgaatatggttccaggccctgttctctgggtttttgagagagaataaaggttatgtttgtcttacctttgttatcgagtttgctgaattcttttgaacgatgatcttaaaggcacaaacaccaccagccactttgctaatttcttaatagcagatttacattgcagcaagaaaaccatcttttatagtaacattcagttaaaatgaactcaattcattgttaacttcctaaaacagaatttgaactttatcaacctcaacgtgtatataaactagatagtcctcaatactttatcaacctcaacatgtatataaactagatagtcctcaaatactgtttgaatttaataaatgtcaatttaaaaatttttgtagtagtcttctgcattttacttcaattataaattgcaattatttattggatattttggacttcaaagcagcagaaactttaaaactgaaatgggaaacgttttcctgcaatgatccctgtgctgtaacattttgtctggtgtctcaggcttccaggttcttgttggcctgaattcccttgttgcccagtaaatgttcactagctagaagtatcttcaggaagtgagatagaaaagagtgaacctcaacaattggactggaaatgagctttgacctaactttgtaaaataaaagcataaaagagaaa

SEQ ID NO: 32391 - DNA, 444 bp, Homo sapiens
  source 1..444: mol_type = unassigned DNA
atggaggagagagcacagcactgcctgtccagattactagacaactctgccctgaagcagcaggagttacccatccaccggctatatttcacggccaggagagtcctctttgtctttttcgcaacaggaatattctgcctttgtatgggcatcatccttatattgtctgcaaggagcactcaggaaatagagattaattacacaagaatatgtgcaaattgtgcaaaactgcgagaaaatgcctctaattttgacaaggaatgcacctgctctattcccttttacctttcaggaaaaatgatggtaggtgaaattcaagaaactcggttgactttacactgatctattcctatgtaacacttagcagtaagttcacaatttccatgaaatgctttccaaaactgaaaatatgaaacataaagcaggatggtggtggtgaatccg

SEQ ID NO: 32392 - DNA, 454 bp, Homo sapiens
  source 1..454: mol_type = unassigned DNA
cctttgtatgggcatcatccttatattgtctgcaaggagcactcaggaaatagagattaattacacaagaatatgtgcaaattgtgcaaaactgcgagaaaatgcctctaattttgacaaggaatgcacctgctctattcccttttacctttcaggaaaaatgatggtaggtgaaattcaagaaactcggttgactttacactgatctattcctatgtaacacttagcagtaagttcacaatttccatgaaatgctttccaaaactgaaaatatgaaacataaagcaggatggtggtggtgaatccgaaagattgttgagttcatatcccctccctcctttttgagtattattctcctcctttgtttctaagttgcaagattctttacctatccaactttgtaacataaatcttatctaccaaacaggttttactctaaatatcagcacaggga

SEQ ID NO: 32393 - DNA, 3341 bp, Homo sapiens
  source 1..3341: mol_type = unassigned DNA
tttgcagtgcgcaggcgcatcaatgaggtactgcaatgtcccggaccgtatagtttccaggacgtctcgccgcgcgcatgcgcagaaacactgggcacagggggaggtaactgcagtaagtcccgcttggccctggagtccacgcggattttcgaagctggggctggcaagaggccgctggacaccacgctccagtcgtcagcccacttcctagctgaacagcgcgaggcggcggcagcgagccgggtcccaccatggccgcgaattattccagtaccagtacccggagagaacatgtcaaagttaaaaccagctcccagccaggcttcctggaacggctgagcgagacctcgggtgggatgtttgtggggctcatggccttcctgctctccttctacctaattttcaccaatgagggccgcgcattgaagacggcaacctcattggctgaggggctctcgcttgtggtgtctcccgacagcatccacagtgtggctccggagaatgaaggaaggctggtgcacatcattggcgccttacggacatccaagcttttgtctgatccaaactatggggtccatcttccggctgtgaaactgcggaggcacgtggagatgtaccaatgggtagaaactgaggagtccagggagtacaccgaggatgggcaggtgaagaaggagacgaggtattcctacaacactgaatggaggtcagaaatcatcaacagcaaaaacttcgaccgagagattggccacaaaaaccccagtgccatggcagtggagtcattcatggcaacagccccctttgtccaaattggcaggtttttcctctcgtcaggcctcatcgacaaagtcgacaacttcaagtccctgagcctatccaagctggaggaccctcatgtggacatcattcgccgtggagactttttctaccacagcgaaaatcccaagtatccagaggtgggagacttgcgtgtctccttttcctatgctggactgagcggcgatgaccctgacctgggcccagctcacgtggtcactgtgattgcccggcagcggggtgaccagctagtcccattctccaccaagtctggggataccttactgctcctgcaccacggggacttctcagcagaggaggtgtttcatagagaactaaggagcaactccatgaagacctggggcctgcgggcagctggctggatggccatgttcatgggcctcaaccttatgacacggatcctctacaccttggtggactggtttcctgttttccgagacctggtcaacattggcctgaaagcctttgccttctgtgtggccacctcgctgaccctgctgaccgtggcggctggctggctcttctaccgacccctgtgggccctcctcattgccggcctggcccttgtgcccatccttgttgctcggacacgggtgccagccaaaaagttggagtgaaaagaccctggcacccgcccgacacctgcgtgagccctaggatccaggtcctctctcacctctgacccagctccatgccagagcaggagccccggtcaattttggactctgcactccctctcctcttcaggggccagacttggcagcatgtgcaccaggttggtgttcaccagctcatgtcttccccacatctcttcttgccagtaagcagctttggtgggcagcagcagctcatgaatggcaagctgacagcttctcctgctgtttccttcctctcttggactgagtgggtacggccagccactcagcccattggcagctgacaacgcagacacgctctacggaggcctgctgataaagggctcagccttgccgtgtgctgcttctcatcactgcacacaagtgccatgctttgccaccaccaccaagcacatctgtgatcctgaagggcggccgttagtcattactgctgagtcctgggtcaccagcagacacactgggcatggacccctcaaagcaggcacacccaaaacacaagtctgtggctagaacctgatgtggtgtttaaaagagaagaaacactgaagatgtcctgaggagaaaagctggacatatactgggcttcacacttatcttatggcttggcagaatctttgtagtgtgtgggatctctgaaggccctatttaagtttttcttcgttactttgctgcttcatgtgtactttcctaccccaagaggaagttttctgaaataagatttaaaaacaaaacaaaaaaaacacttaatatttcagactgttacaggaaacaccctttagtctgtcagttgaattcagagcactgaaaggtgttaaattggggtatgtggtttgattgataaaaagttacctctcagtattttgtgtcactgagaagctttacaatggatgcttttgaaacaagtatcagcaaaaggatttgttttcactctgggaggagagggtggagaaagcacttgctttcatcctctggcatcggaaactcccctatgcacttgaagatggtttaaaagattaaagaaacgattaagagaaaaggttggaagctttatactaaatgggctccttcatggtgacgccccgtcaaccacaatcaagaactgaggcctgaggctggttgtacaatgcccacgcctgcctggctgctttcacctgggagtgctttcgatgtgggcacctgggcttcctagggctgcttctgagtggttctttcacgtgttgtgtccatagctttagtcttcctaaataagatccacccacacctaagtcacagaatttctaagttccccaactactctcacacccttttaaagataaagtatgttgtaaccaggatgtcttaaatgattctttgtgtaccttttctgtcatattcagaaaccgttttgtgcctgctgggagtaattcctttagcaattaagtatttggtagctgaataaggggtcagaacttctgaaaccagagatctgtaatcatctctattggcctggggtgcctgtgctataaatgagtttcttcacatgaaaaacacagccagcccaagatgacttatctgggtttaggattcaatagtattcactaactgcttattacatgagcaatttcatcaaatctccaaactcttaaaggatgctttcggaaaacacgctgtatacctagatgatgactaaatgcaaaatccttgggctttggtttttttctagtaaggattttaaataactgccgacttcaaaagtgttcttaaaacgaaagataatgttaagaaaaatttgaaagctttggaaaaccaaatttgtaatatcattgtattttttattaaaagttttgtaataaatttctaaattat

SEQ ID NO: 32394 - DNA, 4054 bp, Homo sapiens
  source 1..4054: mol_type = unassigned DNA
ggcagagcgcggcgcggggccggcggcgaaggtccggggtggaatcgacgtcgctgcggctgccgacgacccacacccggccggccgcctccgcagacccaccttggccgcgcggcagggggcgcgcagagccccgagggagcgagtccccgcgcgtggcagctcggcggcttctcccttcgggaggtccggctcccggctctccggacccgcctggcgtcctcgcctgcggcggggcggacgacagcggcgcccaggaatggcttcggcgggcagcggcatggaggaggtgcgcgtgtcggtgctgacccccttgaagctggtcgggctggtgtgcatcttcctggcgctgtgtctggacctgggggcggtgctgagcccggcctgggtcacagctgaccaccagtactacctgtcgttgtgggagtcctgccggaaacccgccagcttggacatctggcactgcgagtccacgctcagcagcgattggcagattgctactctggctttactcctgggcggcgctgccatcattctcattgcattcctggtgggtttgatttctatctgcgtgggatctcgaaggcgtttctatagacctgttgcggtcatgctttttgcagcagttgttttacaggtttgcagcctggtcctttacccaatcaagttcattgaaactgtgagcttgaaaatttaccatgagttcaactggggttatggcctggcctggggtgcaactatattttcgtttgggggtgccatcctttattgcctgaaccctaagaactatgaagactactactagaaccaatagtctcaaagtaaaaacaaccaccaccatccaacaaaaggattacgtctgcatcttttctaacttactattttctaaaacacttgtggagcatcaagcagtttgctcagttgatttaatcttttttgccttttggctgtcaacatcataaccagcttttacatccattttagaaatctgcacaaattaagagagctgattagacataggcaaatgctgcaaacttccaatatgttcatatcgtttttcttgacaaatgaagggtctatatgacagcaaccattgtgagaaactagttggaatgagatttgcctcaatctcctattgcctgcaggggagcagttggcataagcaacatttagaagttcctttgcgctgacaaggattccactgttagagcccttaccgcctgcttatcctacccaatgactacattggctgttggttatttgcttgagtgagcccttgaaaaatgaactgcccttcagcatctaatgggagttgtgaatgtaactggttaatgatacacattccaccttcaggaacactctttttaatgggaggttatgctttggcaatcagcgtctccctgggaagagagtcaagacttggagacatgtgcttctcattatgtggttagaaattggtgcctcagccctatctagactggggaaaaattgaggatctctgtttttcctggggcaaacagaaagaaatctgcatgagttgcttttgtaccctttaaatcatttgccaaacattgcagcaaacaagtgtgcgtatgtaacaagcttcactgtttttatagaaggtgaaccattagtataaatggtaataagttgttccctaaccctccacatacatttgcctatcacacgtaaaattaatatttactctagtgaagtggtttgagcactaaccttgtacacattgttaagaggcttagattggtattcatacttatttaccatacaaaagtatggtaccttaaagcttttgctctatgttctttactgtttcactggaaagtgtcaatagagttgcctaagaataaaaattgaaatggtgttaatctgaaaattaatgattctctgtaagcactgtagttgaaaagagagtagcaattaggatgatcattttgtgtaaaattcattaaaatagaaggctgctattttttgcaagtattttaaatgtcttcatttttttaagaaaggaatagcgatagatttatataaatatctaaatgtctcagtagaggagtagaattcatctggttatcacctggtcctctgaagttaactgatgggctaaccgatttgtgcacacacttaggatggatttatgttaagggaattacttactgactgttcaatggaaggaagtattaataatagggaataagtttgcaactaatctcatgctgcaaacttgtgttaattctgtttaatatacaaatttggatagcttaattataaacatatttttatatcaaatatacagttctaatataaaagttataaataattatttttgttaacaaagacactaaaacagtatgttctggttttggccctcttgcagaaagaagcattagaaaaattactttaaaagtagctatatgttactgtattgcaaaatctgttaagagcaggaccacatcgatagtatttaataatttgttttacctcccaaaacacagttcttctttcagcttgtcttaagaatggttgccaaaaacaacagccaaaaaaaaaaaacctattttattatccaaatgctagaaaacacacatgaattttctataaaatcacgaatatgaagtaccaggtttagtcttactttagcaatgatagacaaaagcgaataaatacatcacagacagaaacctttataaaaatatatgattctataaagaatcattagaaattatgagtggaaattctccagaaagatagtattatagagtcttttgaagcaattttttgagaaatagtaaaatctggggcagagtgtcttgcagttaattgcatattgtcagagcagcatgagaaatatgatatttggatagggatttcagcaactaaacattctctgttctgagatctctttattcctgaataatgaaagaatagtactttggtgctgacaccaatgaggcacttctcttggtcctagtagaggatgcagtgtactgttaaaccaatatcatcacatctcgagtcttatcaagttttcattctctgtcaatatgacaagctcaaagtgacagaatatgttataggttgaagcacacatatttgcagtttactgaaaagtagatttcttatgtgacttttttcccttctcagcaaagagccctacactagatttctaccatcactaatatttggaagtatttcattactaacaatctcagtacaacatgaaaattgttgcttctcatctaaaatacaattttgtctatcagaataaacacaagtgaaattttcacctacattaacattatgtctttgcagctttaggtttgttagatgtgttcttaagcataatttttagccacaaacccattgttagatagatatctatggatatagatctacatctatagatatagatatacacacatatatatactcacacacatatagcataaaatactcagcagggctagttattccgatttcttgcacaattatttagctttttgtaagttcaacatgtaaattttaaagacataaatatagagagacttatgtgtttgaatataaatgatatatatggattagcatgtacctgtatattattaaacatgcaatgaactgactggtaagtgacgtctaattgtatggctagcaatgtaatttattcagactgtatttttgtacagagcagtgcactctaacctatgcctctgtgtcctctttaatgcctaaagctgtgcctagaaatttcatctgtcttaaaagtaaaatatacttcatgctgtttatgctattagtttctgtactgctattctatatttattatttttaaatatatgacatgtttactacttaaacatgaattcatggtatcctggttattttttttaagtcatctgggggaaaacctgtttatcactccagtgattttgagtttgcagtttcacaatcagttcttcatttcatgatttttgtagttgacatgaagtcatctatgtggaaaaaaataaaaataaaagtgatttcacggatgtggtttgaa

SEQ ID NO: 32395 - DNA, 2019 bp, Homo sapiens
  source 1..2019: mol_type = unassigned DNA
ctcctgtacgccctagactaggggccgccatctccatggccacggccgtgagccggccctgcgccggcaggtcgcgggacatactgtggcgcattctttcagtgacctgtatagttcctatgtaatcttttacttcctgctgctgtcagtggtaataataataataagtattttcaatgtggagttctatgcagttgtgccttctattccttgctccagactagctctgatagggaagatcattcatcctcagcaactcatgcactcatttattcatgctgcaatgggaatggtgatggcctggtgtgctgcagtgataacccagggccagtacagctttcttgtggttccctgcactggtactaacagctttggtagccctgctgcgcaaacctgcttaaatgaatatcatctttttttcctactgactggagcatttatgggctatagctatagcctcctgtattttgttaacaacatgaactatcttccatttcccatcatacagcaatacaagttcttgcgttttaggagatctctgctcttattagttaaacacagttgtgtggaatcactgttcctggttagaaatttctgcattttatattattttcttggctatattcccaaagcttggattagcactgctatgaaccttcacatagatgagcaggttcataggccacttgacacagtgagtggcctcttaaatctctcgttactctaccatgtctggctgtgtggtgtctttctcctgacgacttggtatgtctcatggatactcttcaaaatctatgccacagaggctcatgtgtttcctgttcaaccaccatttgcagaagggtcagatgagtgccttccaaaagtgttaaatagcaatcctccccccatcataaagtatttagccttgcaggacctgatgttgctttctcaatattctccttcacgaagacaagaagttttcagcctcagccaaccaggtggacatccccacaattggacagccatttcaagggagtgtttgaatcttttaaatggtatgactcagaaactgattctctatcaagaagctgctgctacgaatgggagagtgtcttcatcttacccagtggaacctaagaaattaaattctccagaagaaactgcttttcagacaccaaaatctagccagatgcctcggccttcagtgccaccattagttaaaacatcactgttttcttcaaaattatctacacctgatgttgtgagcccatttgggaccccatttggctctagtgtaatgaatcggatggctggaatttttgatgtaaacacctgctatgggtcaccgcaaagtcctcagctaataagaagggggccaagattgtggacatcagcttctgatcagcaaatgactgaattttctaatccttctccatctacctctattagtgctgagggtaagacaatgagacaacccagtgtgatttattcatggattcagaataaacgtgaacagattaagaatttcttgtcaaaacgggtgctgataatgtattttttcagtaagcacccagaggcctccattcaggctgttttttcagatgcccaaatgcatatttgggcattagaaggtctgtcgcacttagtagcagcatcatttacagaggatagatttggagttgtccagacgacactaccagctatccttaatactttgttgacactgcaagaggcagtcgacaagtactttaagcttcctcatgcttccagtaaaccaccccggatttcaggaagccttgtggacacttcatataaaacattaagatttgcattcagagcatcactgaaaactgccatctatcgaataactactacatttggtgaacatctgaatgctgtgcaagcatctgcagaacatcagaaaagacttcaacagttcttggagttcaaagaatagttaagtaatataaactgtgttcattacactgctgatacaactacagatgggacagtaaatgttcagcattcttggatcag

SEQ ID NO: 32396 - DNA, 4472 bp, Homo sapiens
  source 1..4472: mol_type = unassigned DNA
ctgcttctggcgccccgctggaccctgcttcgaagggaccgtttggtcgccagagggcggttcctggagttacagccgcgtttgcgggacgtgtctgcgcggcagtcctggcctgttgagcttgtccagacgaagcctcgcagggatgggttggagcctgggccgggcttcgctcaggcagcgtttgaggcagacccagcagggtcctcctggggccttcctgcctttgaactgcggtggcgggcgggcgcacggtctcctgtacgccctagactaggggccgccatctccatggccacggccgtgagccggccctgcgccggcaggtcgcgggacatactgtggcgcgttttgggctggaggatagttgcaagtattgtttggtcagtgctatttctacccatctgcaccacagtatttataattttcagcaggattgatttgtttcatcctatacagtggctgtctgattctttcagtgacctgtatagttcctatgtaatcttttacttcctgctgctgtcagtggtaataataataataagtattttcaatgtggagttctatgcagttgtgccttctattccttgctccagactagctctgatagggaagatcattcatcctcagcaactcatgcactcatttattcatgctgcaatgggaatggtgatggcctggtgtgctgcagtgataacccagggccagtacagctttcttgtggttccctgcactggtactaacagctttggtagccctgctgcgcaaacctgcttaaatgaatatcatctttttttcctactgactggagcatttatgggctatagctatagcctcctgtattttgttaacaacatgaactatcttccatttcccatcatacagcaatacaagttcttgcgttttaggagatctctgctcttattagttaaacacagttgtgtggaatcactgttcctggttagaaatttctgcattttatattattttcttggctatattcccaaagcttggattagcactgctatgaaccttcacatagatgagcaggttcataggccacttgacacagtgagtggcctcttaaatctctcgttactctaccatgtctggctgtgtggtgtctttctcctgacgacttggtatgtctcatggatactcttcaaaatctatgccacagaggctcatgtgtttcctgttcaaccaccatttgcagaagggtcagatgagtgccttccaaaagtgttaaatagcaatcctccccccatcataaagtatttagccttgcaggacctgatgttgctttctcaatattctccttcacgaagacaagaagttttcagcctcagccaaccaggtggacatccccacaattggacagccatttcaagggagtgtttgaatcttttaaatgaaatgactgaattttctaatccttctccatctacctctattagtgctgagggtaagacaatgagacaacccagtgtgatttattcatggattcagaataaacgtgaacagattaagaatttcttgtcaaaacgggtgctgataatgtattttttcagtaagcacccagaggcctccattcaggctgttttttcagatgcccaaatgcatatttgggcattagaaggtctgtcgcacttagtagcagcatcatttacagaggatagatttggagttgtccagacgacactaccagctatccttaatactttgttgacactgcaagaggcagtcgacaagtactttaagcttcctcatgcttccagtaaaccaccccggatttcaggaagccttgtggacacttcatataaaacattaagatttgcattcagagcatcactgaaaactgccatctatcgaataactactacatttggtgaacatctgaatgctgtgcaagcatctgcagaacatcagaaaagacttcaacagttcttggagttcaaagaatagttaagtaatataaactgtgttcattacactgctgatacaactacagatgggacagtaaatgttcagcattcttggatcagaagaaaacggactaattagatgcttcctttgtcgtggtggttgctttgaaaactatactttaatgggagaaatcatggaaagaaattctcaacagaataactgaaaactgccttttctgtaccgattgctttttgtgtgtgtggtataataaaatctttattcaattttacagaagcattgatggcagtcgaaatgtctctagctcatataacttaatagtaataactaaaaaacttttagaatttacttttgaaaggagggaagccagttctgaaatgagtataggttgatttcatagtcttcttaattaagagtttagctctttgtaaactcaaaatacataaactttttaagtgtagtttcatttactgaaggataaaaatggtaacagtgcagcaatattcacaaaaaatattgtctaacggacatattttgttaatctgttaggttgggtttttgtttccagggacaaattaaatttgtatgattacccaaaaaagggtctcagtttacagatgctaactctatataaaggaatgtggaaaaactcagttcttaagttacaagattaaaaattcacatttggtctttaagaaacaattgactgacatctatgaatttattttgtatcatgctagtaaacacgaagtattaatgtatgggtattttcccagctagttttgctttctttttctggagcaaaacattaagtgattgcagagtttttcaagcaagagaaaaaggtttgcaaaaaaacccaggaaatgttcccttttttccccaccattcatcttcattagatcaaattctgtgaaacttgtctggtctctcaaagggagcagcctctgtagtgttaaatggctaattaaaataggaagatctttatagccagaaacaacttagtcatcaaatagcaagtgaaaccaaaacgtcagagggattactgtacttggaagtatgttgtgtgtcccaaatgtgaacgaagtattgttagaatttattagatcagcttctttggagatcaaagattggaaatcctagtcatagatattcactggactggctttggactgaaatgctcctttgtaattcttttcctattgtcttttccttctagtgtcccaaaatattttctttaaagtcagcacagtactgtatatgaatctttaatgtggtatcatatatgtctacttttgtctgattcatcgatgtattatatctttataattgaatattttagctccgggtcctgttgccccttcaagcagtacatgccaaattataaataggtgctactggccttgagcatatcactgtgggacagttccccaattgtcaagtgtttagatatgtagactattgccatttgtttttttgttttggttttgctttgtgtctgaagctgaattgatttcttttttttgaatgtgaaagttgaatttcaaacgtagtcatttcttacagatggccaagacagaaaattgtggctaggttgactgagaactgttgtcttccatgtattaacacaattaagctttttatattccactctctgtgctgaccctggctgaggcattttgggagacaaggactctgaatcttctgcttccattaaagaagaactgtgatattcaacattggatttctgagaataaagataggatgattcctttgaactttgacttacttgtataaaatgtccagctaggttaggtttttgccatttcctatatactttgggtaaagctacatttgatgagcaatgtgaatgtttctgagaatgttcattcctgttttctcttaagagaatgtgctgtgtactaaatacaggccacatagtgtctgcctgttgaagatctggaaactgcctccccagatctgtattgtatttggtaggtaagggggtcagtttctttttctcattgtgtgttgataatctacacaccatctgttggaaccagggtgttattatggggaactcctcctgtgtactaggaggaggaccttagggagaccaagaggagagaagcatttcctttgatgaagtcacatcctgtctatgagcccactaatgctgtaacattggcctgaaagagagtgttctttaaaagcctttctcggctgttagtataaaaacatgatggtatcagctcttagcatgtttgcttgacccttatggaaggtataaatccacagaacttccttcccagagaactgggaaattgtcctagaaataaaccttgtacagttgagtggacatggataagcaacaatttgttactttgcaggatttgttccttggtaattgtttggtgtgtcatcctgtaaatattcatgatagtctgtttatatccttttgtatatcgttgatactggattgggtagaaaaataaattggcaatttaaaaaaatggaacagttaattg

SEQ ID NO: 32397 - DNA, 5134 bp, Homo sapiens
  source 1..5134: mol_type = unassigned DNA
gcgtacctattgtggagaagaccaccacatcctttggtttcacttttaggtgacttataaagtaatagggagaaatgagggcagatcattttgctagctctaactgaagaattccagtcaatcaatactgtggctgttatcggctttataaaagactactattcccagcatgcctcaaggcacctccaggaagaccttgactcccagcattctgtactttggaactccgagtcccagaatgcaacattcctcctacttcctctcagggggccgtcgagactacagttcccagcatgcagcgccgccacctgcttctggcgccccgctggaccctgcttcgaagggaccgtttggtcgccagagggcggttcctggagttacagccgcgtttgcgggacgtgtctgcgcggcagtcctggcctgttgagcttgtccagacgaagcctcgcagggatgggttggagcctgggccgggcttcgctcaggcagcgtttgaggcagacccagcagggtcctcctggggccttcctgcctttgaactgcggtggcgggcgggcgcacggtctcctgtacgccctagactaggggccgccatctccatggccacggccgtgagccggccctgcgccggcaggtcgcgggacatactgtggcgcgttttgggctggaggatagttgcaagtattgtttggtcagtgctatttctacccatctgcaccacagtatttataattttcagcaggattgatttgtttcatcctatacagtggctgtctgattctttcagtgacctgtatagttcctatgtaatcttttacttcctgctgctgtcagtggtaataataataataagtattttcaatgtggagttctatgcagttgtgccttctattccttgctccagactagctctgatagggaagatcattcatcctcagcaactcatgcactcatttattcatgctgcaatgggaatggtgatggcctggtgtgctgcagtgataacccagggccagtacagctttcttgtggttccctgcactggtactaacagctttggtagccctgctgcgcaaacctgcttaaatgaatatcatctttttttcctactgactggagcatttatgggctatagctatagcctcctgtattttgttaacaacatgaactatcttccatttcccatcatacagcaatacaagttcttgcgttttaggagatctctgctcttattagttaaacacagttgtgtggaatcactgttcctggttagaaatttctgcattttatattattttcttggctatattcccaaagcttggattagcactgctatgaaccttcacatagatgagcaggttcataggccacttgacacagtgagtggcctcttaaatctctcgttactctaccatgtctggctgtgtggtgtctttctcctgacgacttggtatgtctcatggatactcttcaaaatctatgccacagaggctcatgtgtttcctgttcaaccaccatttgcagaagggtcagatgagtgccttccaaaagtgttaaatagcaatcctccccccatcataaagtatttagccttgcaggacctgatgttgctttctcaatattctccttcacgaagacaagaagttttcagcctcagccaaccaggtggacatccccacaattggacagccatttcaagggagtgtttgaatcttttaaatggtatgactcagaaactgattctctatcaagaagctgctgctacgaatgggagagtgtcttcatcttacccagtggaacctaagaaattaaattctccagaagaaactgcttttcagacaccaaaatctagccagatgcctcggccttcagtgccaccattagttaaaacatcactgttttcttcaaaattatctacacctgatgttgtgagcccatttgggaccccatttggctctagtgtaatgaatcggatggctggaatttttgatgtaaacacctgctatgggtcaccgcaaagtcctcagctaataagaagggggccaagattgtggacatcagcttctgatcagcaaatgactgaattttctaatccttctccatctacctctattagtgctgagggtaagacaatgagacaacccagtgtgatttattcatggattcagaataaacgtgaacagattaagaatttcttgtcaaaacgggtgctgataatgtattttttcagtaagcacccagaggcctccattcaggctgttttttcagatgcccaaatgcatatttgggcattagaaggtctgtcgcacttagtagcagcatcatttacagaggatagatttggagttgtccagacgacactaccagctatccttaatactttgttgacactgcaagaggcagtcgacaagtactttaagcttcctcatgcttccagtaaaccaccccggatttcaggaagccttgtggacacttcatataaaacattaagatttgcattcagagcatcactgaaaactgccatctatcgaataactactacatttggtgaacatctgaatgctgtgcaagcatctgcagaacatcagaaaagacttcaacagttcttggagttcaaagaatagttaagtaatataaactgtgttcattacactgctgatacaactacagatgggacagtaaatgttcagcattcttggatcagaagaaaacggactaattagatgcttcctttgtcgtggtggttgctttgaaaactatactttaatgggagaaatcatggaaagaaattctcaacagaataactgaaaactgccttttctgtaccgattgctttttgtgtgtgtggtataataaaatctttattcaattttacagaagcattgatggcagtcgaaatgtctctagctcatataacttaatagtaataactaaaaaacttttagaatttacttttgaaaggagggaagccagttctgaaatgagtataggttgatttcatagtcttcttaattaagagtttagctctttgtaaactcaaaatacataaactttttaagtgtagtttcatttactgaaggataaaaatggtaacagtgcagcaatattcacaaaaaatattgtctaacggacatattttgttaatctgttaggttgggtttttgtttccagggacaaattaaatttgtatgattacccaaaaaagggtctcagtttacagatgctaactctatataaaggaatgtggaaaaactcagttcttaagttacaagattaaaaattcacatttggtctttaagaaacaattgactgacatctatgaatttattttgtatcatgctagtaaacacgaagtattaatgtatgggtattttcccagctagttttgctttctttttctggagcaaaacattaagtgattgcagagtttttcaagcaagagaaaaaggtttgcaaaaaaacccaggaaatgttcccttttttccccaccattcatcttcattagatcaaattctgtgaaacttgtctggtctctcaaagggagcagcctctgtagtgttaaatggctaattaaaataggaagatctttatagccagaaacaacttagtcatcaaatagcaagtgaaaccaaaacgtcagagggattactgtacttggaagtatgttgtgtgtcccaaatgtgaacgaagtattgttagaatttattagatcagcttctttggagatcaaagattggaaatcctagtcatagatattcactggactggctttggactgaaatgctcctttgtaattcttttcctattgtcttttccttctagtgtcccaaaatattttctttaaagtcagcacagtactgtatatgaatctttaatgtggtatcatatatgtctacttttgtctgattcatcgatgtattatatctttataattgaatattttagctccgggtcctgttgccccttcaagcagtacatgccaaattataaataggtgctactggccttgagcatatcactgtgggacagttccccaattgtcaagtgtttagatatgtagactattgccatttgtttttttgttttggttttgctttgtgtctgaagctgaattgatttcttttttttgaatgtgaaagttgaatttcaaacgtagtcatttcttacagatggccaagacagaaaattgtggctaggttgactgagaactgttgtcttccatgtattaacacaattaagctttttatattccactctctgtgctgaccctggctgaggcattttgggagacaaggactctgaatcttctgcttccattaaagaagaactgtgatattcaacattggatttctgagaataaagataggatgattcctttgaactttgacttacttgtataaaatgtccagctaggttaggtttttgccatttcctatatactttgggtaaagctacatttgatgagcaatgtgaatgtttctgagaatgttcattcctgttttctcttaagagaatgtgctgtgtactaaatacaggccacatagtgtctgcctgttgaagatctggaaactgcctccccagatctgtattgtatttggtaggtaagggggtcagtttctttttctcattgtgtgttgataatctacacaccatctgttggaaccagggtgttattatggggaactcctcctgtgtactaggaggaggaccttagggagaccaagaggagagaagcatttcctttgatgaagtcacatcctgtctatgagcccactaatgctgtaacattggcctgaaagagagtgttctttaaaagcctttctcggctgttagtataaaaacatgatggtatcagctcttagcatgtttgcttgacccttatggaaggtataaatccacagaacttccttcccagagaactgggaaattgtcctagaaataaaccttgtacagttgagtggacatggataagcaacaatttgttactttgcaggatttgttccttggtaattgtttggtgtgtcatcctgtaaatattcatgatagtctgtttatatccttttgtatatcgttgatactggattgggtagaaaaataaattggcaatttaaaaaaatggaacagttaattgaaa

SEQ ID NO: 32398 - DNA, 2107 bp, Homo sapiens
  source 1..2107: mol_type = unassigned DNA
atctccatggccacggccgtgagccggccctgcgccggcaggtcgcgggacatactgtggcgcattctttcagtgacctgtatagttcctatgtaatcttttacttcctgctgctgtcagtggtaataataataataagtattttcaatgtggagttctatgcagttgtgccttctattccttgctccagactagctctgatagggaagatcattcatcctcagcaactcatgcactcatttattcatgctgcaatgggaatggtgatggcctggtgtgctgcagtgataacccagggccagtacagctttcttgtggttccctgcactggtactaacagctttggtagccctgctgcgcaaacctgcttaaatgaatatcatctttttttcctactgactggagcatttatgggctatagctatagcctcctgtattttgttaacaacatgaactatcttccatttcccatcatacagcaatacaagttcttgcgttttaggagatctctgctcttattagttaaacacagttgtgtggaatcactgttcctggttagaaatttctgcattttatattattttcttggctatattcccaaagcttggattagcactgctatgaaccttcacatagatgagctcatgtgtttcctgttcaaccaccatttgcagaagggtcagatgagtgccttccaaaagtgttaaatagcaatcctccccccatcataaagtatttagccttgcaggacctgatgttgctttctcaatattctccttcacgaagacaagaagttttcagcctcagccaaccaggtggacatccccacaattggacagccatttcaagggagtgtttgaatcttttaaatggtatgactcagaaactgattctctatcaagaagctgctgctacgaatgggagagtgtcttcatcttacccagtggaacctaagaaattaaattctccagaagaaactgcttttcagacaccaaaatctagccagatgcctcggccttcagtgccaccattagttaaaacatcactgttttcttcaaaattatctacacctgatgttgtgagcccatttgggaccccatttggctctagtgtaatgaatcggatggctggaatttttgatgtaaacacctgctatgggtcaccgcaaagtcctcagctaataagaagggggccaagattgtggacatcagcttctgatcagcaaatgactgaattttctaatccttctccatctacctctattagtgctgagggtaagacaatgagacaacccagtgtgatttattcatggattcagaataaacgtgaacagattaagaatttcttgtcaaaacgggtgctgataatgtattttttcagtaagcacccagaggcctccattcaggctgttttttcagatgcccaaatgcatatttgggcattagaaggtctgtcgcacttagtagcagcatcatttacagaggatagatttggagttgtccagacgacactaccagctatccttaatactttgttgacactgcaagaggcagtcgacaagtactttaagcttcctcatgcttccagtaaaccaccccggatttcaggaagccttgtggacacttcatataaaacattaagatttgcattcagagcatcactgaaaactgccatctatcgaataactactacatttggtgaacatctgaatgctgtgcaagcatctgcagaacatcagaaaagacttcaacagttcttggagttcaaagaatagttaagtaatataaactgtgttcattacactgctgatacaactacagatgggacagtaaatgttcagcattcttggatcagaagaaaacggactaattagatgcttcctttgtcgtggtggttgctttgaaaactatactttaatgggagaaatcatggaaagaaattctcaacagaataactgaaaactgccttttctgtaccgattgctttttgtgtgtgtggtataataaaatctttattcaattttacagaagcattgatggcagtcgaaatgtctctagctcatataacttaatagtaataactaaaaaacttttagaatttacttttg

SEQ ID NO: 32399 - DNA, 4713 bp, Homo sapiens
  source 1..4713: mol_type = unassigned DNA
ctgcttctggcgccccgctggaccctgcttcgaagggaccgtttggtcgccagagggcggttcctggagttacagccgcgtttgcgggacgtgtctgcgcggcagtcctggcctgttgagcttgtccagacgaagcctcgcagggatgggttggagcctgggccgggcttcgctcaggcagcgtttgaggcagacccagcagggtcctcctggggccttcctgcctttgaactgcggtggcgggcgggcgcacggtctcctgtacgccctagactaggggccgccatctccatggccacggccgtgagccggccctgcgccggcaggtcgcgggacatactgtggcgcgttttgggctggaggatagttgcaagtattgtttggtcagtgctatttctacccatctgcaccacagtatttataattttcagcaggattgatttgtttcatcctatacagtggctgtctgattctttcagtgacctgtatagttcctatgtaatcttttacttcctgctgctgtcagtggtaataataataataagtattttcaatgtggagttctatgcagttgtgccttctattccttgctccagactagctctgatagggaagatcattcatcctcagcaactcatgcactcatttattcatgctgcaatgggaatggtgatggcctggtgtgctgcagtgataacccagggccagtacagctttcttgtggttccctgcactggtactaacagctttggtagccctgctgcgcaaacctgcttaaatgaatatcatctttttttcctactgactggagcatttatgggctatagctatagcctcctgtattttgttaacaacatgaactatcttccatttcccatcatacagcaatacaagttcttgcgttttaggagatctctgctcttattagttaaacacagttgtgtggaatcactgttcctggttagaaatttctgcattttatattattttcttggctatattcccaaagcttggattagcactgctatgaaccttcacatagatgagcaggttcataggccacttgacacagtgagtggcctcttaaatctctcgttactctaccatgtctggctgtgtggtgtctttctcctgacgacttggtatgtctcatggatactcttcaaaatctatgccacagaggctcatgtgtttcctgttcaaccaccatttgcagaagggtcagatgagtgccttccaaaagtgttaaatagcaatcctccccccatcataaagtatttagccttgcaggacctgatgttgctttctcaatattctccttcacgaagacaagaagttttcagcctcagccaaccaggtggacatccccacaattggacagccatttcaagggagtgtttgaatcttttaaatggtatgactcagaaactgattctctatcaagaagctgctgctacgaatgggagagtgtcttcatcttacccagtggaacctaagaaattaaattctccagaagaaactgcttttcagacaccaaaatctagccagatgcctcggccttcagtgccaccattagttaaaacatcactgttttcttcaaaattatctacacctgatgttgtgagcccatttgggaccccatttggctctagtgtaatgaatcggatggctggaatttttgatgtaaacacctgctatgggtcaccgcaaagtcctcagctaataagaagggggccaagattgtggacatcagcttctgatcagcaaatgactgaattttctaatccttctccatctacctctattagtgctgaggcacccagaggcctccattcaggctgttttttcagatgcccaaatgcatatttgggcattagaaggtctgtcgcacttagtagcagcatcatttacagaggatagatttggagttgtccagacgacactaccagctatccttaatactttgttgacactgcaagaggcagtcgacaagtactttaagcttcctcatgcttccagtaaaccaccccggatttcaggaagccttgtggacacttcatataaaacattaagatttgcattcagagcatcactgaaaactgccatctatcgaataactactacatttggtgaacatctgaatgctgtgcaagcatctgcagaacatcagaaaagacttcaacagttcttggagttcaaagaatagttaagtaatataaactgtgttcattacactgctgatacaactacagatgggacagtaaatgttcagcattcttggatcagaagaaaacggactaattagatgcttcctttgtcgtggtggttgctttgaaaactatactttaatgggagaaatcatggaaagaaattctcaacagaataactgaaaactgccttttctgtaccgattgctttttgtgtgtgtggtataataaaatctttattcaattttacagaagcattgatggcagtcgaaatgtctctagctcatataacttaatagtaataactaaaaaacttttagaatttacttttgaaaggagggaagccagttctgaaatgagtataggttgatttcatagtcttcttaattaagagtttagctctttgtaaactcaaaatacataaactttttaagtgtagtttcatttactgaaggataaaaatggtaacagtgcagcaatattcacaaaaaatattgtctaacggacatattttgttaatctgttaggttgggtttttgtttccagggacaaattaaatttgtatgattacccaaaaaagggtctcagtttacagatgctaactctatataaaggaatgtggaaaaactcagttcttaagttacaagattaaaaattcacatttggtctttaagaaacaattgactgacatctatgaatttattttgtatcatgctagtaaacacgaagtattaatgtatgggtattttcccagctagttttgctttctttttctggagcaaaacattaagtgattgcagagtttttcaagcaagagaaaaaggtttgcaaaaaaacccaggaaatgttcccttttttccccaccattcatcttcattagatcaaattctgtgaaacttgtctggtctctcaaagggagcagcctctgtagtgttaaatggctaattaaaataggaagatctttatagccagaaacaacttagtcatcaaatagcaagtgaaaccaaaacgtcagagggattactgtacttggaagtatgttgtgtgtcccaaatgtgaacgaagtattgttagaatttattagatcagcttctttggagatcaaagattggaaatcctagtcatagatattcactggactggctttggactgaaatgctcctttgtaattcttttcctattgtcttttccttctagtgtcccaaaatattttctttaaagtcagcacagtactgtatatgaatctttaatgtggtatcatatatgtctacttttgtctgattcatcgatgtattatatctttataattgaatattttagctccgggtcctgttgccccttcaagcagtacatgccaaattataaataggtgctactggccttgagcatatcactgtgggacagttccccaattgtcaagtgtttagatatgtagactattgccatttgtttttttgttttggttttgctttgtgtctgaagctgaattgatttcttttttttgaatgtgaaagttgaatttcaaacgtagtcatttcttacagatggccaagacagaaaattgtggctaggttgactgagaactgttgtcttccatgtattaacacaattaagctttttatattccactctctgtgctgaccctggctgaggcattttgggagacaaggactctgaatcttctgcttccattaaagaagaactgtgatattcaacattggatttctgagaataaagataggatgattcctttgaactttgacttacttgtataaaatgtccagctaggttaggtttttgccatttcctatatactttgggtaaagctacatttgatgagcaatgtgaatgtttctgagaatgttcattcctgttttctcttaagagaatgtgctgtgtactaaatacaggccacatagtgtctgcctgttgaagatctggaaactgcctccccagatctgtattgtatttggtaggtaagggggtcagtttctttttctcattgtgtgttgataatctacacaccatctgttggaaccagggtgttattatggggaactcctcctgtgtactaggaggaggaccttagggagaccaagaggagagaagcatttcctttgatgaagtcacatcctgtctatgagcccactaatgctgtaacattggcctgaaagagagtgttctttaaaagcctttctcggctgttagtataaaaacatgatggtatcagctcttagcatgtttgcttgacccttatggaaggtataaatccacagaacttccttcccagagaactgggaaattgtcctagaaataaaccttgtacagttgagtggacatggataagcaacaatttgttactttgcaggatttgttccttggtaattgtttggtgtgtcatcctgtaaatattcatgatagtctgtttatatccttttgtatatcgttgatactggattgggtagaaaaataaattggcaatttaaaaaaatggaacagttaattg

SEQ ID NO: 32400 - DNA, 1918 bp, Homo sapiens
  source 1..1918: mol_type = unassigned DNA
gcgtgtccggggcggggctgtaccgggcgctgggcggaggagccttggctggggactgcctggaaacgggctgggcctgcctcggacgccgccggtgtcgcggattctctttccgcccgctccatggcggtggatgcctgactggaagcccgagtgggatgcggctgacgcggaagcggctctgctcgtttcttatcgccctgtactgcctattctccctctacgctgcctaccacgtcttcttcgggcgccgccgccaggcgccggccgggtccccgcggggcctcaggaagggggcggcccccgcgcgggagagacgcggccgagaacagtccactttggaaagtgaagaatggaatccttgggaaggagatgaaaaaaatgagcaacaacacagatttaaaactagccttcaaatattagataaatccacgaaaggaaaaacagatctcagtgtacaaatctggggcaaagctgccattggcttgtatctctgggagcatatttttgaaggcttacttgatcccagcgatgtgactgctcaatggagagaaggaaagtcaatcgtaggaagaacacagtacagcttcatcactggtccagctgtaataccagggtacttctccgttgatgtgaataatgtggtactcattttaaatggaagagaaaaagcaaagatcttttatgccacccagtggttactttatgcacaaaatttagtgcaaattcaaaaactccagcatcttgctgttgttttgctcggaaatgaacattgtgataatgagtggataaacccattcctcaaaagaaatggaggcttcgtggagctgcttttcataatatatgacagcccctggattaatgacgtggatgtttttcagtggcctttaggagtagcaacatacaggaattttcctgtggtggaggcaagttggtcaatgctgcatgatgagaggccatatttatgtaatttcttaggaacgatttatgaaaattcatccagacaggcactaatgaacattttgaaaaaagatgggaacgataagctttgttgggtttcagcaagagaacactggcagcctcaggaaacaaatgaaagtcttaagaattaccaagatgccttgcttcagagtgatctcacattgtgcccggtcggagtaaacacagaatgctatcgaatctatgaggcttgctcctatggctccattcctgtggtggaagacgtgatgacagctggcaactgtgggaatacatctgtgcaccacggtgctcctctgcagttactcaagtccatgggtgctccctttatctttatcaagaactggaaggaactccctgctgttttagaaaaagagaaaactataattttacaagaaaaaattgaaagaagaaaaatgttacttcagtggtatcagcacttcaagacagagcttaaaatgaaatttactaatattttagaaagctcatttttaatgaataataaaagttaattatctttttgagctaacatgtgatttttaaaatcattttgactactgggtgtataaatgtgtttgtgtgtgtatgtatttatagatgttctttaaggtacccttgaaaactctacattatgtatgccacataatgacatttcagtcagtggtagactacatatatgatagtggtcccataagattataatggagctgaaaaatttctatcgcctagtgatgtcatagcctagtgatgacatatgtattgcaatacatcactcacgtgtttgtggtgatactggtgtaaacaaatctattgcactgccagtcaagtaaaagtacagcaattatgtcctgtacataatatttaataatgacaataaatgactatgttactggtttatgtatttactatactatactttttacaatttgtattagttctt

SEQ ID NO: 32401 - DNA, 2970 bp, Homo sapiens
  source 1..2970: mol_type = unassigned DNA
cccttttctctggctggctgggctcccgctcctccactgctgctcctcccactctgcgggttctttctttctccctcccctcccctcccccagccatgcctcccagcgcgcttcccttcccccgcctcctggtcctgcaccctcccctcccctccccccgcttcctgccttgtgacacatcccgggccctcccggaggcggcagcagcagcagctgcagcggcagcagcggcagcagaggcagcagcagtagccaccactccgccgaggccgcaaccccggctcggcctccccaggccccgccgctgccgcagtcatggctgctgatggggtggacgaacgctcgcctctgctgtcagcatcccactccggaaatgtcactcccaccgccccaccgtacttgcaagaaagcagccccagagcggagctcccacctccatatacagccattgccagtccagacgccagtggtattccagtaataaactgccgtgtgtgccaatcactaatcaatttggatggcaagcttcaccagcatgtggttaagtgcacagtttgcaatgaagctacgccaatcaaaaaccccccaacaggcaagaaatatgttagatgcccttgtaattgtcttctcatttgtaaggacacatctcggcgaataggatgcccaagacccaactgtagacggataattaaccttggcccagtaatgcttatttctgaagaacaaccagctcagcctgcattgccaatccaaccagaaggtacaagggtcgtgtgtgggcactgtggaaacacattcctgtggatggaactgaggttcaacactctggcaaaatgcccacactgcaaaaaaatctcctcagtgggtagtgcacttccacgaagacgctgctgtgcatatattaccattggaatgatatgtattttcattggagttgggttaactgttggcaccccagattttgcaaggcgatttcgagcaacctatgtttcttgggcaattgcttatctcctaggattgatctgccttatccgagcttgttattggggagccataagagtcagttatccagaacacagttttgcataagcttgtttatgattcagtaatgcaggtgagagtgtctagcagttcttggtaagctactctggacatctttaaattatttatcctaatggattccattctggtttatgtataatcgtttcaagactttgggagtcttttatgaacaaatgctcattgcactatattatatgcaaattgttttgctgctaggttttcaaaatttgaataataaagccttttcatgttcttttacatctcttatagatatttttggatttgttaccaaacattacatttactctcacccttttattatttttaaataagttatttcattacttgctgatacatgagtattcctaagtgtttataaatatttctataatagtttcacatttatatttacattttaattaaacagtatcaaaattgcttgcttaaaacctaagcaatatgcattttgcttgaactgcttactgtaactttaacctaagattatagtgaccttattcaggaaaaaaaaaaaaatttagtgtaacttcaaagacttgacattcttgtcagaggaaaaaaaatttctagatactgtttgcttgttttttgttgtttgtagaaagataaaatattttggtagtaatttaaaatacaagaacgaatatttatttgtccacagttggagatgttggataaatgtcttttctcaaagatcacaggacttttgtctttcatttttgcctttttatttaccatttataaaagatctggtctggattatggaatttaatgtttatcagctctatgtattcctttatagaggcttgaggaagtatttcacataacatgttttataatacttaaccatttatccaaagatatatttacattgggttgtgcccctttcccttagatcatggtaaatttttcttattgaggtaattatgtactacttatatttgaaggaagcttatgacattttacagtagctaaaatgttgagattagaggtacttttactattcttctcaaaggtaactgatcagataattacccaaattattcaagaaaatagatcagaaataaagaacaacataattttctaagaattcattgaaatttatggaatcagctctcgcactgcccatctttgcagttttgaaaaagaaattgcttaatcacaaatgttctacagtctttaaatgtagtagaattagacagtgagatcatctgagtaaattgattggtgattccagagataagactaatattttaaattatttatgatactgattagtataaaaacgtactcatcacagaatttgaagcaaaatacatgtacacttcaaagagtaaatgacaaatgtataaatgctgtagctcaggattatatgtacctttaaaaatacactaataaagattattgttcaaaaattaccttgttttattccattaaaaataatgtcacttccagagttgccttgaaatcttgctgtaaagttttcatgtttaggaatgtacctgtttctttatataatattcatttatgttttttgtactattttcaaatggttttatttttaaaatatagtttttaaatccatttgtaatacacttgatgttaggtataaaataatcttacttcttttcctaatggttaactagttgtaacagcattgtatactgaataatccattctttccctcattgattggaaagctcacattaaattatatgctatgtcatattccttctggaataataactttatgagagcaagaaccctggtagtcttgttcacagctttatccccacttagaacagttcttagtgtacatgtgctcaatttacgtgaatgaatatgcatgaatgaataaatggttgaatgaattgctattttaaattctta

SEQ ID NO: 32402 - DNA, 3255 bp, Homo sapiens
  source 1..3255: mol_type = unassigned DNA
aggctgtgaggcttccagcgtcggcccagaccttctctttccctttccagcagccggagaagtgcgacaacaaccagtactttgatatctccgccctctcgtgtgttccttgtggagctaaccagaggcaagatgcccgaggtgttacagaagatggctggaactgcatttcttgccctagtgacttaactgccgaaggaaaatgtcactgtcccattggccatattttaggctggtcttgaacttccgacctcaggtgatctgcctgcctcagcctcccaaagtgctgggatacaggcttgagccaccgcacctgaccttggcatgtactttagaaggaatgtacaacataattgaagaaattttggaaagagacattaatggaacattgttgtctcaagcaacttgtgagctctgtgatggaaatgaaaactcttttatggtagtaaatgctttaggagacaggtgcgtccgatgtgagccaacatttgttaataccagcaggtcctgtgcatgttcagaacctaacattttaacagggggattatgtttcagcagcacagggaattttcctctacgtagaatttcagctgcacgttatggagaagttggcatgtctttaacttcagaatggtttgcaaagtatttgcaatcatcagcagctgcatgttgggtatatgccaatctaacatcttgtcaagctcttggaaatatgtgtgtgatgaacatgaattcttacgactttgccacatttgatgcatgtggactatttcagtttatctttgaaaatactgctggactgagcactgttcattctatttcattttggagacagaatcttccttggctgttttatggagaccagttaggattagcacctcaagtgctcagttctacctctcttcctacaaatttcagttttaaaggagaaaaccagaatacaaaactgaagtttgttgctgcttcctatgatataagaggaaattttctcaagtggcaaactttagaaggaggtgttttacagctttgtccagacacagagacaaggctaaatgctgcttattcatttggaacaacctaccaacaaaattgtgagattcctatctctaagatcttaattgactttcccactcctatattttatgatgtgtaccttgaatatactgatgaaaatcaacatcaatatattttggctgtgcctgtgttaaacctaaatcttcaacataataagatatttgtgaaccaagacagcaactctggaaagtggcttctaactcggcgcattttcttagtggatgcagtaagtggacgagaaaatgacttaggaactcagccaagagtaattcgagttgctactcaaatatcactgagtgtccaccttgtacccaacacaataaatggaaacatctaccctcccttaatcaccattgcctacagtgacattgatatcaaagatgccaacagccagtctgtgaaggtttctttctcagtcacatatgaaatggatcatggagaagcacatgtccagacagatattgctttgggtgtattgggtgggctagctgttttagcatctcttttgaagacagcaggatggaagaggcgcattgggagtcccatgattgatttacagacagttgtgaaattcttggtgtactatgctggtgatctggccaatgttttctttatcatcacagtgggaacaggtctttactggcttattttcttcaaagcacagaagtctgtgtctgttttgctgccaatgccaattcaggaagaacgttttgtcacttatgttggatgtgcctttgctctgaaggcactacaatttttgcataagctcatatcccagattacaatagatgtattctttattgattgggagcgacctaaaggaaaggttcttaaagctgttgaaggtgagggtggtgtacgaagtgccactgttcctgtaagcatatggagaacatattttgtagcaaatgaatggaatgaaattcagactgtgagaaaaattaattcactctttcaagtacttactgtcctcttctttttggaggttgtgggattcaagaacttagcattaatggactcatcttctagtctttctagaaacccacctagctacatagctccttatagctgcattttgagatatgcagtgtctgctgctctttggctagccattggaattatacaggtcgtgttctttgctgtcttttatgagagatttatagaagataaaattcgacagttcgttgatttatgctctatgagtaatatatcagtgtttctgttatcccacaaatgttttggatattacattcatggtagatcagtacatgggcatgcagatactaatatggaagaaatgaatatgaaccttaaaagagaagcggaaaatttgtgtagccagagaggtttggtacccaacacagatggtcagacttttgagattgcaatttctaaccagatgagacaacattatgacagaattcatgagacactaataaggaaaaatggtcctgctagactactgagttcatcagcaagtacttttgagcagagtataaaagcatatcatatgatgaataaatttcttggctccttcattgaccatgttcataaggaaatggattactttataaaagataagttgcttcttgaaagaattcttggaatggaattcatggaaccaatggaaaaaagcatcttttacaatgatgaaggttattctttcagcagtgtcctgtattatggaaatgaagctactcttcttatttttgatctgctgttcttctgtgttgtggatttggcttgccaaaattttattttagcatccttccttacatatctacaacaagagatttttagatatatccgtaatacagtaggacaaaagaatttggcatccaaaacattggtggatcaaagatttttgatttaacttcctgaataaataacttaaagactcagtataatcatggccaaaaaaaagtcatgatatcaggttagtttgccatattttttaaaacttataatgcagactattctgtttttgttttttatttgcagaaagatttatttttataacttgggaatatataacctgatataatagaaaatactgttttcccattgtgtgtagtatttaatgcagtaaataataaattaatactgacagtgaggccaaaaaaaatctaaatgttgctttcagcataatactttttaatgctaattaaaacagtccccatc

SEQ ID NO: 32403 - DNA, 4651 bp, Homo sapiens
  source 1..4651: mol_type = unassigned DNA
aagccgccgcagaggctgatggggggctggaggctgtgaggcttccagcgtcggtaccatggcgacgcgcggtggggctggggtggcaatggcggtttggtccctcttatccgcccgggccgtgaccgcgttccttctgttgttcctccctcgcttcttacaggcccagaccttctctttccctttccagcagccggagaagtgcgacaacaaccagtactttgatatctccgccctctcgtgtgttccttgtggagctaaccagaggcaagatgcccgaggaacttcatgtgtatgtctaccaggatttcagatgatctctaataatggaggacctgctattatttgtaaaaagtgcccagaaaacatgaaaggtgttacagaagatggctggaactgcatttcttgccctagtgacttaactgccgaaggaaaatgtcactgtcccattggccatattttagtggaaagagacattaatggaacattgttgtctcaagcaacttgtgagctctgtgatggaaatgaaaactcttttatggtagtaaatgctttaggagacaggtgcgtccgatgtgagccaacatttgttaataccagcaggtcctgtgcatgttcagaacctaacattttaacagggggattatgtttcagcagcacagggaattttcctctacgtagaatttcagctgcacgttatggagaagttggcatgtctttaacttcagaatggtttgcaaagtatttgcaatcatcagcagctgcatgttgggtatatgccaatctaacatcttgtcaagctcttggaaatatgtgtgtgatgaacatgaattcttacgactttgccacatttgatgcatgtggactatttcagtttatctttgaaaatactgctggactgagcactgttcattctatttcattttggagacagaatcttccttggctgttttatggagaccagttaggattagcacctcaagtgctcagttctacctctcttcctacaaatttcagttttaaaggagaaaaccagaatacaaaactgaagtttgttgctgcttcctatgatataagaggaaattttctcaagtggcaaactttagaaggaggtgttttacagctttgtccagacacagagacaaggctaaatgctgcttattcatttggaacaacctaccaacaaaattgtgagattcctatctctaagatcttaattgactttcccactcctatattttatgatgtgtaccttgaatatactgatgaaaatcaacatcaatatattttggctgtgcctgtgttaaacctaaatcttcaacataataagatatttgtgaaccaagacagcaactctggaaagtggcttctaactcggcgcattttcttagtggatgcagtaagtggacgagaaaatgacttaggaactcagccaagagtaattcgagttgctactcaaatatcactgagtgtccaccttgtacccaacacaataaatggaaacatctaccctcccttaatcaccattgcctacagtgacattgatatcaaagatgccaacagccagtctgtgaaggtttctttctcagtcacatatgaaatggatcatggagaagcacatgtccagacagatattgctttgggtgtattgggtgggctagctgttttagcatctcttttgaagacagcaggatggaagaggcgcattgggagtcccatgattgatttacagacagttgtgaaattcttggtgtactatgctggtgatctggccaatgttttctttatcatcacagtgggaacaggtctttactggcttattttcttcaaagcacagaagtctgtgtctgttttgctgccaatgccaattcaggaagaacgttttgtcacttatgttggatgtgcctttgctctgaaggcactacaatttttgcataagctcatatcccagattacaatagatgtattctttattgattgggagcgacctaaaggaaaggttcttaaagctgttgaaggtgagggtggtgtacgaagtgccactgttcctgtaagcatatggagaacatattttgtagcaaatgaatggaatgaaattcagactgtgagaaaaattaattcactctttcaagtacttactgtcctcttctttttggaggttgtgggattcaagaacttagcattaatggactcatcttctagtctttctagaaacccacctagctacatagctccttatagctgcattttgagatatgcagtgtctgctgctctttggctagccattggaattatacaggtcgtgttctttgctgtcttttatgagagatttatagaagataaaattcgacagttcgttgatttatgctctatgagtaatatatcagtgtttctgttatcccacaaatgttttggatattacattcatggtagatcagtacatgggcatgcagatactaatatggaagaaatgaatatgaaccttaaaagagaagcggaaaatttgtgtagccagagaggtttggtacccaacacagatggtcagacttttgagattgcaatttctaaccagatgagacaacattatgacagaattcatgagacactaataaggaaaaatggtcctgctagactactgagttcatcagcaagtacttttgagcagagtataaaagcatatcatatgatgaataaatttcttggctccttcattgaccatgttcataaggaaatggattactttataaaagataagttgcttcttgaaagaattcttggaatggaattcatggaaccaatggaaaaaagcatcttttacaatgatgaaggttattctttcagcagtgtcctgtattatggaaatgaagctactcttcttatttttgatctgctgttcttctgtgttgtggatttggcttgccaaaattttattttagcatccttccttacatatctacaacaagagatttttagatatatccgtaatacagtaggacaaaagaatttggcatccaaaacattggtggatcaaagatttttgatttaacttcctgaataaataacttaaagactcagtataatcatggccaaaaaaaagtcatgatatcaggttagtttgccatattttttaaaacttataatgcagactattctgtttttgttttttatttgcagaaagatttatttttataacttgggaatatataacctgatataatagaaaatactgttttcccattgtgtgtagtatttaatgcagtaaataataaattaatactgacagtgaggccaaaaaaaatctaaatgttgctttcagcataatactttttaatgctaattaaaacagtccccatcatttgtctctgtagattattttataaactgagagctgcctgaatcttctcacattgacaaagtaatttgattccaagtttaagactagttttcagtttgatattttcatgttttgtgtgcttatggttaaataaatgttgaaagatattttcaagtttacttagaaattttaaattgtattattgctgattcaatttgcatcattctaattgctcatcctctttggcagtggattaattcactgttgggttaatatgcatctcatgaaatgatatcttttcattcctttgtatacctgtattaggtcagtatacgctttccatgaaatatatttgcatttctaatatagtttacatttattaagttataacgtatgacatttttcccaatatcattttttatacattttaattacttaatgttttaagagttctcttccagagttttgcttttcaattacgtttaaagactgtaaataacaaacagtaaggctgggcgctgtggcttacgcctgtaatcccagcactttggaaggccaaggcacgtggatcactttaggtcaggagttcaagaacagcctggccaacatggaaaaccccatctctacaaaaaatacaaaaattagttggatgtggtggcctgtaatcccagctatttgggaggctgaggcatgagaatagcttgaaaccaggaggtggaggctgtagtgagccagatagcaccactgcactccagccaggatgacagagcaagaccctgtctcagaaaaaacaaaaacaaaacactgtaaatgtatcatgtttctcactgctttctatgttaatgctgtgtaaatacttaaaatggaatactgtataaatattatttatattttctcagatgaaaatatatactaaaacatttggtatttctgttttctgtttcattaatgtatatctgatggagtaccatttaggaatataacattattggggcagaggtcccagccattgccaaagttgaatcttttacatttccctgaatcttgaggatgactgaaaaggaagtctttgaaactgcagtttctgaaggatcacagtacaggaatgcctttataaaagctgcagagataaatacatgtacttatatggcatggatatttaaaaccactcactcagaagcatatgaaagaaattcaaccatcattcaacatagaagaagttaattttagtgcaaaagtttttaagtattaaatttcacaataaaggatcaattggcttacttgctgataaattaaaacagaaaacatttaaaatca

SEQ ID NO: 32404 - DNA, 2018 bp, Homo sapiens
  source 1..2018: mol_type = unassigned DNA
cgggtgggaagccgtgtctcgcagtcgtggactcgtgcagctggggcgtccgcagccgctcgtcacccgcgtgatgctgtttctggcgttgggcagcccgtgggcggtcgaactgcctctctgcggaaggaggactgcattgtgtgcggccgccgcgctccgaggtccccgggcctctgtctcccgggcgtcctccagcagcgggccttcggggccggtagccggctggagtacggggccttcgggagccgcgcgccttctccggcgtccgggtcgagcgcagatccctgtttattgggaaggatatgttcgattcttaaatacgccatctgacaaatcagaagatggaaggctaatttatactggcaatatggcccgagcagtgtttggtgtgaaatgtttctcttattctacgagtctgattggccttacatttctgccatacatttttacacaaaataatgctatttctgaaagtgtgcctctgcctattcaaatcatattctatggcatcatgggaagctttacggtgatcaccccagtgctgcttcactttattacaaaaggctatgtcattcgattgtaccatgaggccacaacagacacttataaagccattacctacaatgctatgcttgcagaaacgagtacagtgtttcaccagaatgatgtgaagattccagatgctaaacatgtatttaccacattttatgctaaaacaaaatcactgttagttaatccagtgctctttccaaaccgtgaagactatatccatctaatgggttatgacaaagaagaatttattttgtatatggaagaaaccagtgaagagaaacggcataaagatgacaaatgagcctatttgttagtgttcgtgctcaaatgtgatttacgttttaatgtataataataaaattgccttttgcattccgttagtgactgattgttaaaaataatttgaaattatcaaagcttttaatttccagagaatgatgtttgtttataataaaacaagctatgtttgaaaaccaaaatgtagtatctaccattcgtgttttagaaaggtatgtgaataaatatgttcatgctagtataagagttctgtgttactgtggttgactctaaactggggatctgatgtcagtagcaaatgggagagttgctttattctttgtgtatggatttttctaagtgtataaatattttccgacattaaaagacattttctctttgaggaagacacagtcataggtggtgcggagctgtggtccacctgctcctgctcctgactcactgctctttgctgttgcctgaggaccaagtctgtcaggaagctggctaggaagccttgcagcagccatggcttttaaacataccagaaaaacacccgtggagtcagaggtggcaattcaccgaattcatatcactctaacgagttgcaacgtaaaatccctggataaggtgtgtgctgacttgatctgaggagcaaaggaaaagaatcagtgaaaggaccagtttgaatgcctaccaagactttgagaatcactacaagaaaaacttacggtgaaggttctaaggcatgggatcgtttccagatgagaatccacaagcgactcattgacttgcgcagtcctcagatagttaagcagattacttccatcagtattgagccaggagttgagatggaagtcaccattgcaaatgcttaagtcaactgttttcataaattgattaccagttgttaaaaaattttcaaaaaaccgcaaaatttcaagaaattcacaaattatgggagcagttttaagtcttctttggttcagaacacaggtttttgcctaacccctggcatgattgcccataagaacatacatgtacagttgaactggtggttagctatacgggaaatggtaagtagtgttgtcttcagtatcttaatttgtttctgcaactgtgcactcctcccttggtggcaccctatgggtgtaggaaaaccactgttattaaacaggtgaaaaata

SEQ ID NO: 32405 - DNA, 617 bp, Homo sapiens
  source 1..617: mol_type = unassigned DNA
gtcgggtgggaagccgtgtctcgcagtcgtggactcgtgcagctggggcgtccgcagccgctcgtcacccgcgtgatgctgtttctggcgttgggcagcccgtgggcggtcgaactgcctctctgcggaaggaggactgcattgtgtgcggccgccgcgctccgaggtccccgggcctctgtctcccgggcgtcctccagcagcgggccttcggggccggtagccggctggagtacggggccttcgggagccgcgcgccttctccggcgtccgggtcgagcgcagatccctgtttattgggaaggatatgttcgattcttaaatacgccatctgacaaatcagaagatggaaggctaatttatactggcaatatggcccgagcagtgtttggtaagtaattggaggtgtgaaatgtttctcttattctacgagtctgattggccttacatttctgccatacatttttacacaaaataatgctatttctgaaagtgtgcctctgcctattcaaatcatattctatggcatcatgggaagctttacggtgatcaccccagtgctgcttcactttattacaaaaggctatgtcattcgattgtaccatgaggccacaaca

SEQ ID NO: 32406 - DNA, 1741 bp, Homo sapiens
  source 1..1741: mol_type = unassigned DNA
ggcgggcgctgcccacccggcggagccgagcggcgtgcagaggctacaagtgccgtagctggtgattgggggactttctccgggaaccgtgccgggagagcgcgcggtgctggagccgcaccgggtggccgaagcagaagactttccggaagctgctgggggatgtctgactagctctcatggagctccactaccttgctaagaagagcaaccaggcagacctctgtgatgccagggactggagttcaagagggctgcctggtgaccaggcagatacagcagccacaagagctgctctctgctgtcagaaacagtgtgcatccaccccaagagcaaccgagatggaagggtctaaacttagttcttctccagcatccccctcctcctctctgcaaaacagtactcttcagccagatgcctttccaccaggacttctccactcagggaacaaccaaataacagcggaacggaaagtctgtaactgctgcagccaggaattagaaacttcttttacctatgtggacaaaaacatcaacttggagcagcggaaccggagctcgccatcagcaaaagggcataatcaccctggggagcttggctgggaaaatccaaatgagtggtcccaagaggctgccatatctttgatatctgaagaggaggatgatacaagttcagaagccacgtcttcagggaagtctatagactatggtttcatcagcgccatcttgttcttggtcactgggatcctgctcgtgatcatctcttacatcgtcccacgggaagtgactgtggaccccaacactgtggcagcccgggagatggagcgcctggagaaggagagtgcgaggctgggggctcacctggaccgctgtgtgattgcggggctctgcctcctcacgctggggggcgtcatcctgtcctgcttgttaatgatgtccatgtggaagggggagctctatcgtcgaaacagatttgcctcttccaaagagtctgcaaaactctatggttctttcaacttcaggatgaaaaccagcacgaatgaaaacactctggaactgtccttggtagaggaagatgcgcttgctgtacagagttaattctggttgtgaatatcttgagagtctgccttggcattttataatatgaaaaaagttaatttataaaaattcacagtgcaatttatttgcctggcaagaaaagtttatttcacaaaccaacagccagtaagtgtttttgttctctatgtgtcttctatttagaagaaaagccatgtaagatgtataagaaaccacaaccagccacacctatccttctgaagagctgaaggctaattaatctgtaatggccaagaacttctacttcgatagaaaaatatttctaatgacccagtctacaaattatttcttttacacaaatatatgatgttattctttggacactaggtggtcctacacacagtaggatcaattgctaatctactttgtgaaaaagaactaagcactaatcaataataaggcttacatctaattctcaaaggtgcttatccattttcttgctaaattatccttcttgtaatttggctaaacactaaaacatggaatttttagtttgaatattttgaagtttgaggatgttgggctttccttattgtaaaaaatgttatgtttgaaattattcctgttttcaaaaatggtaattaagtcattaggataaactttctaataaaaaaaaattatgtaaa

SEQ ID NO: 32407 - DNA, 2528 bp, Homo sapiens
  source 1..2528: mol_type = unassigned DNA
agccctcgcgggggcaaggcggcgaccgaggcgcgtgggtctgggaaggcgcgcggatttggcccctcttctcacatcagcgggtccaggcccaaccgacagactatgggggctccggcaaccaggcgctgcgtggagtggctgctgggcctctacttcctcagccacatccccatcaccctgttcatggacctgcaggcggtgctgccgcgcgagctctacccagtcgagtttagaaacctgctgaagtggtatgctaaggagttcaaagacccactgctacaggagcccccagcctggtttaagtcctttctgttttgcgagcttgtgtttcagctgcctttctttcccattgcaacgtatgccttcctcaaaggaagctgcaagtggattcgaactcctgcaatcatctactctgttcacaccatgacaaccttaattccgatactctccacatttctgtttgaggatttctccaaagccagtggtttcaagggacaaagacctgagactttgcatgaacggttaacccttgtgtctgtctatgccccctacttactcatcccattcatacttttaattttcatgttgcggagcccctactacaagtatgaagagaaaagaaaaaaaaaatgaaggaaacaaccactggcccagggtagagatgcctacagggtggttgcttgttggatacaatacaaggaacactgctcagaacccacgtcttcagcagcatttgaaacactggcagcaatgcacaagagcaagatggtgtcaggaaccatgtcaaaccctcaccttcttccattttttttttttttttaagacagtctcactctgttgcccaggctggagtaaagggcagtggcatgatctcggctcactgcaacctccgcctcctgggctcaagccatcttccttagcctcccaagtagctagaactacaggtgtgtaccaacacgtatggctaatttgttttgttttttttgtgtgtgtggagacagggttttgccatgttgcccaggttggtctcgaacgcctaggctcaagtgatctgcccacctcagtctccctaagtgctgggattacagacgtgaaccactgggcccagcccaaaccttcaccttctaagggcactgggatgaacagaccgatcggcttgagggtgggcaaaggggtgtgggctaggttataaggaagtggtaccaaataactgtgtgcctgagttccaccgcaagattactaaaagcaggaccagaccagaaactgctaaagaacatggcctgtttgacatgttcatgagtcacctgacccacagcatatatgcttatgactaaaccctccactcctgattctcaagagtgtatcacctgtcagcaaaatgaatagtgggatattttgggccattttaaatgtgaaattttgcctctttaatgttaattcaaaactatatcaatgttttcttgttcccacctctaacccaaggaaaaaagagaaaacatactatgcaaaggaagtttaaacttaagttttccttaagggtcagcccaacaatgactttcagtcaaatggattaaactggaaaatgtttttgtttctgttgtaaacagatcatcctaggcgaaagttttttttgtttgtttgcttttaaattagtttatttctaaatcttagtcttccacatttctagaggccacctgacacaagtccctgtatctgaagtctagcatctcaaggctgatctggaagtgtgctagtatgctccctagtggataacttaatcttttaatacagttccgtcattcccatcttgttttcagaagagaaggtggctacagccaggcataacatatccactgtgtgcatagagggtctcttcacgttgatgcttggcattccatcagctttctctaagtctttgctcaagttcaaccttaaaatgatgttagacaacaggtcccagtcagttccctctattttcacccattttgctcacaagccatattggcccgattagtggtactgtctgactcacgtgtgtgatccaaataaaggtagctgctgaccactgcctggtttgttttgtggactaggggatagagaatccagggttctctcatgaggagttaaacatatttcaagagcaacaggaaaaaaggtacatcaagccatttgaaaacaaaaatttattgcttctccttccaaagctttgtgaatttacaaaaaaaaggatgaaagtttacaaactgcttagttccaactaagcataagaggtgagaacgtacactgcagggccaccagcagcagctgtgcactgatgttaaaactggctcccccagacttgtagtgctgtcttcagggggctgcattccttacacgccacctcttgtgacataggtcattggtcaagccgctggaatgctacagaggtttttttggttttgagaggcttttttttgttttgccttcctactataaaagcgaaattttcagttcatttctgaaaaataaattggtcaataaattca

SEQ ID NO: 32408 - DNA, 2114 bp, Homo sapiens
  source 1..2114: mol_type = unassigned DNA
gggttccagttgcctctctcgggtcctgcccatgcctcccccgctcctaacccaactttagttcggtgttttcctcgggctttgtctctatcccagccccttctcccaagcggcgggggcgaacgctttgtttcctttaaagtcacttcttccctgggtttaaggtttcccgcgattccacctctggccggttgtcagtgtctgagggaagtagtctggatgaagtggtgtccaaagtcacatgtcagcatggatccgcatcctttttatttgacaagtttagaaacctgctgaagtggtatgctaaggagttcaaagacccactgctacaggagcccccagcctggtttaagtcctttctgttttgcgagcttgtgtttcagctgcctttctttcccattgcaacgtatgccttcctcaaaggaagctgcaagtggattcgaactcctgcaatcatctactctgttcacaccatgacaaccttaattccgatactctccacatttctgtttgaggatttctccaaagccagtggtttcaagggacaaagacctgagactttgcatgaacggttaacccttgtgtctgtctatgccccctacttactcatcccattcatacttttaattttcatgttgcggagcccctactacaagtatgaagagaaaagaaaaaaaaaatgaaggaaacaaccactggcccagggtagagatgcctacagggtggttgcttgttggatacaatacaaggaacactgctcagaacccacgtcttcagcagcatttgaaacactggcagcaatgcacaagagcaagatggtgtcaggaaccatgtcaaaccctcaccttcttccattttttttttttttttaagacagtctcactctgttgcccaggctggagtaaagggcagtggcatgatctcggctcactgcaacctccgcctcctgggctcaagccatcttccttagcctcccaagtagctagaactacaggtgtgtaccaacacgtatggctaatttgttttgttttttttgtgtgtgtggagacagggttttgccatgttgcccaggttggtctcgaacgcctaggctcaagtgatctgcccacctcagtctccctaagtgctgggattacagacgtgaaccactgggcccagcccaaaccttcaccttctaagggcactgggatgaacagaccgatcggcttgagggtgggcaaaggggtgtgggctaggttataaggaagtggtaccaaataactgtgtgcctgagttccaccgcaagattactaaaagcaggaccagaccagaaactgctaaagaacatggcctgtttgacatgttcatgagtcacctgacccacagcatatatgcttatgactaaaccctccactcctgattctcaagagtgtatcacctgtcagcaaaatgaatagtgggatattttgggccattttaaatgtgaaattttgcctctttaatgttaattcaaaactatatcaatgttttcttgttcccacctctaacccaaggaaaaaagagaaaacatactatgcaaaggaagtttaaacttaagttttccttaagggtcagcccaacaatgactttcagtcaaatggattaaactggaaaatgtttttgtttctgttgtaaacagatcatcctaggcgaaagttttttttgtttgtttgcttttaaattagtttatttctaaatcttagtcttccacatttctagaggccacctgacacaagtccctgtatctgaagtctagcatctcaaggctgatctggaagtgtgctagtatgctccctagtggataacttaatcttttaatacagttccgtcattcccatcttgttttcagaagagaaggtggctacagccaggcataacatatccactgtgtgcatagagggtctcttcacgttgatgcttggcattccatcagctttctctaagtctttgctcaagttcaaccttaaaatgatgttagacaacaggtcccagtcagttccctctattttcacccattttgctcacaagccatattggcccgattagtggtactgtctgactcacgtgtgtgatccaaataaaggtagctgctgacc

SEQ ID NO: 32409 - DNA, 2604 bp, Homo sapiens
  source 1..2604: mol_type = unassigned DNA
aaacctgcgaacgcttgggctgggtcggagctgcggggggcctgggaggagagaggggagaagagagaaggaaggagagcgcctgccgggatggctgagctgcctcggcgagcagccttggggttgcacgctcttgtgggagatgctgctgttgcttccaggtcggcaagagcggttctaacaccatcgcctctcaccctctttcctgtaaatccctagagaaacgtccctggcctctccgccgcgacattcccagcctgcatccccctacagcctaggcggcgcgctcccgcacgctggagcgccggtcgccagcaggacgccctctcccgcgccgactcgcccctctctgccctgctgctgctgctcctctgacacctccgcccccaccatctccagctcggagagacgccacccagccgcggcccgcactcgcggcccggggtcacgcgcggaagaggggcgctagtccggaccccgccttcggtagggggcgtcctggagcggagagtgaggcgaatggtatatgagtgtgcgggtagcccaccctgaagcccgagcttctcatttgagccatccccgcctagccccactcgggccagcgcctggcgagcgagcccatctgtggcttccgcggccgcctcctccttgcatccttgcacctcctcgtcgacccctccctcccgggacctgcatcctgctccaccaatcagagcccgactgcctcttcccacgtgaccccgggcgggctgaggacctgctgcttcccaaacgccagagggatgcgggcggcagagctcgagaggcggctgccgggctgcggggcgccttgactctccctccaccctgcctcctcgggctccactcgtctgcccctggactcccgtctcctcctgtcctccggcttcccagagctccctccttatggcagcagcttcccgcgtctccggcgcagcttctcagcggacgaccctctcgctccggggctgagcccagtccctggatgttgctgaaactctcgagatcatgcgcgggtttggctgctgcttccccgccgggtgccactgccaccgccgccgcctctgctgccgccgtccgcgggatgctcagtagcccgctgcccggcccccgcgatcctgtgttcctcggaagccgtttgctgctgcagagttgcacgaactagtcatggtgctgtgggagtccccgcggcagtgcagcagctggacactttgcgagggcttttgctggctgctgctgctgcccgtcatgctactcatcgtagcccgcccggtgaagctcgctgctttccctacctccttaagtgactgccaaacgcccaccggctggaattgctctggttatgatgacagagaaaatgatctcttcctctgtgacaccaacacctgtaaatttgatggggaatgtttaagaattggagacactgtgacttgcgtctgtcagttcaagtgcaacaatgactatgtgcctgtgtgtggctccaatggggagagctaccagaatgagtgttacctgcgacaggctgcatgcaaacagcagagtgagatacttgtggtgtcagaaggatcatgtgccacagatgcaggatcaggatctggagatggagtccatgaaggctctggagaaactagtcaaaaggagacatccacctgtgatatttgccagtttggtgcagaatgtgacgaagatgccgaggatgtctggtgtgtgtgtaatattgactgttctcaaaccaacttcaatcccctctgcgcttctgatgggaaatcttatgataatgcatgccaaatcaaagaagcatcgtgtcagaaacaggagaaaattgaagtcatgtctttgggtcgatgtcaagataacacaactacaactactaagtctgaagatgggcattatgcaagaacagattatgcagagaatgctaacaaattagaagaaagtgccagagaacaccacataccttgtccggaacattacaatggcttctgcatgcatgggaagtgtgagcattctatcaatatgcaggagccatcttgcaggtgtgatgctggttatactggacaacactgtgaaaaaaaggactacagtgttctatacgttgttcccggtcctgtacgatttcagtatgtcttaatcgcagctgtgattggaacaattcagattgctgtcatctgtgtggtggtcctctgcatcacaaggaaatgccccagaagcaacagaattcacagacagaagcaaaatacagggcactacagttcagacaatacaacaagagcgtccacgaggttaatctaaagggagcatgtttcacagtggctggactaccgagagcttggactacacaatacagtattatagacaaaagaataagacaagagatctacacatgttgccttgcatttgtggtaatctacaccaatgaaaacatgtactacagctatatttgattatgtatggatatatttgaaatagtatacattgtcttgatgttttttctgtaatgtaaataaactatttatatcacacaatatagttttttctttcccatgtatttgttatatataataaatactcagtgatgagaaaaaa

SEQ ID NO: 32410 - DNA, 3364 bp, Homo sapiens
  source 1..3364: mol_type = unassigned DNA
atggtgctgtgggagtccccgcggcagtgcagcagctggacactttgcgagggcttttgctggctgctgctgctgcccgtcatgctactcatcgtagcccgcccggtgaagctcgctgctttccctacctccttaagtgactgccaaacgcccaccggctggaattgctctggttatgatgacagagaaaatgatctcttcctctgtgacaccaacacctgtaaatttgatggggaatgtttaagaattggagacactgtgacttgcgtctgtcagttcaagtgcaacaatgactatgtgcctgtgtgtggctccaatggggagagctaccagaatgagtgttacctgcgacaggctgcatgcaaacagcagagtgagatacttgtggtgtcagaaggatcatgtgccacagatgcaggatcaggatctggagatggaggtaggagttgcctttttacatatttgaagatttactggtggatattattatgtatatttacttatgtatgttccatttcagatatttaagacaaatttcatattttgcattttaggaaaggtgaaaccataaaaaattgtcaccatattaagtacatgtatataccgtgcaaattatttggcatacttatgaatcatactctatctccagttaaccttccttgttcatttgtttgtttgtttgtttgtaagttatctttgatatggataggcataatgtaaaaacttctgaagagaagcatgtaagcatatttggcagggaagaaagaattcatgaggaaatcatttaaatattggatttttaaatatatgacactgctctcaattactaggtgctaataagacatacataacctaccatatagccaaggttttaattatcagatttataatttgaaactgaaggaactttagttcataaaagtgaaaaagataaaatgaagtccaatgaaagtaaaatattatctttgcttccttgattaaatctatagttatttttactaaagtatgatatatgttcccattatttagttttgtttagggaagtatataagatgagagagagagagagagaaactttaaaagtttgatctaatgtacttactaccaaataaagattttacctatagattgaaactaaattgtaaatgtcccaaatacttttcccgatgaaattcaaacaaaattagacttttatacacacaaagcaaaacaaaacacaacctatatataatttcaagattaagaaaaacaaaacaaataaaagcattctctcaagaccttgcttcagttgtgtaaaataattaaatgtgctattccaagttgattttagtttttaaatacagaatttgataaaagataagtaaaagaaggccttgggttcagggtggcagatatttagtgcaccctttatctagttcaggaaacacttgaaagatttatcaagtttccttatgtaatgaaagacttaactagttcaaataagcaatacccacagaacataattagagcagcatattggagcacaatttttttttcataaagactaaaactgaacagcagcagattgaaacacaatttttttcctaaagactaaaactgaacagcagtcaagactcaagcatagaatatgtttcaatgtcccatgatgttggacagtcctttgatgtctggacagtctttctctacttctaataaaagttttcctagctgattaatatagtattcccaagaaagcgtccctagaggttttgaaaataagaccttagaatagcatattaaatcttaaagaaaaaaaaaagacaggaaaaaaggcagttcctttagtagatgttttaccatgggaatattattaataagaaatcaattaattttttaaaatgttgcttttgtaaggaaacagtttctatgcaaaattctgtatattttctagctgtttagttttatatgtagactacctaattttgcaaatattgtgctgagactgaactgttccactgtttacccaccagtcttgttaattttctagcatctttaaagacaaaataaaacataccaagaatgtcttcatttctctttctgttaaagcatcatcatttacttttttctgcttgactatcctaccatactgtacttcatatctttatttttctaacaataagatgtgaactttgtttcacatactagtttctagttttcattcattgttattagcacatgcaaatggaaatgaagtcaaactcactcttccctgttgcgttttatattaaaatctttggttcattatgttgtcttgtgatctgaataagacattttttcaggaaataattttaatctcatgaatatgacatgtataacttataccatataagtgaaacatcacttggaaaacactttattttctttctctttttctgttttttaatcactcttcctttcagttagaggtgcttcatagtaacttggagaaaacaaaaacaacttccgatgtttgctttagaaaaaaaaagcatataacacatttaattctgagcttattcttttaaataactgcagttctgaaaattgtggtgatgagtatttgctcctaattgcatacaatttttaaaattagagactgatcaggtttttctcaacagaactgcttgtttttctagtctacatgttactttggtctgtaagactattagttttaattttctttaaattctttattgagggatgccaaaaatgcttagtaactaaaacctaaaaacctagtttagaataacttgcacaaattcagttcacatatccattgggttgtaatcgtaagatatatttgacttgctatctctcttatacagatgatagactttcctctgtatttttgtagaattcgtattaccaaggttttgagagggcagaatcagcttccttcatttttgaataaagcaaaagtgattgaataacttgtgattgtttggctaatccaacaattgtaactagtgattgttctaactaatctctatataacatattctcagtaatgtgtatttaattaataattgggtttacttggcaagcactttggatggttaatagttattttctaatttcttattttaacaaaagttaatataattccaaaatggagtacactgaacaaaagagtgaagggaacaaatttacttgtaaaacatttatcatgtgtgactatcataaatgatatcattaaacttacaaatctaaaatcatgtaaaaatatatcaaatattactttttaaaaattttcctatattttagcgtgaatgaatattacattagtaatgaaaattagacctgattattctaaaaataatttaagcttaacccatttgcacaaggg

SEQ ID NO: 32411 - DNA, 2959 bp, Homo sapiens
  source 1..2959: mol_type = unassigned DNA
gagaagggtgtgcgtgatggagaaaattgggcaccagggctgctcccgagattctcagatctgatttccacgcttgctaccaaaatagtctgggcaggccacttttggaagtaggcgttatctagtgagcaggcggccgctttcgatttcgctttcccctaaatggctgagcttctcgccagcgcaggatcagcctgttcctgggactttccgagagccccgccctcgttccctcccccagccgccagtaggggaggactcggcggtacccggagcttcaggccccaccggggcgcggagagtcccaggcccggccgggaccgggacggcgtccgagtgccaatggctagctctaggtgtcccgctccccgcgggtgccgctgcctccccggagcttctctcgcatggctggggacagtactgctacttctcgccgactgggtgctgctccggaccgcgctgccccgcatattctccctgctggtgcccaccgcgctgccactgctccgggtctgggcggtgggcctgagccgctgggccgtgctctggctgggggcctgcggggtcctcagggcaacggttggctccaagagcgaaaacgcaggtgcccagggctggctggctgctttgaagccattagctgcggcactgggcttggccctgccgggacttgccttgttccgagagctgatctcatggggagcccccgggtccgcggatagcaccaggctactgcactggggaagtcaccctaccgccttcgttgtcagttatgcagcggcactgcccgcagcagccctgtggcacaaactcgggagcctctgggtgcccggcggtcagggcggctctggaaaccctgtgcgtcggcttctaggctgcctgggctcggagacgcgccgcctctcgctgttcctggtcctggtggtcctctcctctcttggggagatggccattccattctttacgggccgcctcactgactggattctacaagatggctcagccgataccttcactcgaaacttaactctcatgtccattctcaccatagccagtgcagtgctggagttcgtgggtgacgggatctataacaacaccatgggccacgtgcacagccacttgcagggagaggtgtttggggctgtcctgcgccaggagacggagtttttccaacagaaccagacaggtaacatcatgtctcgggtaacagaggacacgtccaccctgagtgattctctgagtgagaatctgagcttatttctgtggtacctggtgcgaggcctatgtctcttggggatcatgctctggggatcagtgtccctcaccatggtcaccctgatcaccctgcctctgcttttccttctgcccaagaaggtgggaaaatggtaccagttgctggaagtgcaggtgcgggaatctctggcaaagtccagccaggtggccattgaggctctgtcggccatgcctacagttcgaagctttgccaacgaggagggcgaagcccagaagtttagggaaaagctgcaagaaataaagacactcaaccagaaggaggctgtggcctatgcagtcaactcctggaccactagtatttcaggtatgctgctgaaagtgggaatcctctacattggtgggcagctggtgaccagtggggctgtaagcagtgggaaccttgtcacatttgttctctaccagatgcagttcacccaggctgtggaggtactgctctccatctaccccagagtacagaaggctgtgggctcctcagagaaaatatttgagtacctggaccgcacccctcgctgcccacccagtggtctgttgactcccttacacttggagggccttgtccagttccaagatgtctcctttgcctacccaaaccgcccagatgtcttagtgctacaggggctgacattcaccctacgccctggcgaggtgacggcgctggtgggacccaatgggtctgggaagagcacagtggctgccctgctgcagaatctgtaccagcccaccgggggacagctgctgttggatgggaagccccttccccaatatgagcaccgctacctgcacaggcaggtggctgcagtgggacaagagccacaggtatttggaagaagtcttcaagaaaatattgcctatggcctgacccagaagccaactatggaggaaatcacagctgctgcagtaaagtctggggcccatagtttcatctctggactccctcagggctatgacacagaggtagacgaggctgggagccagctgtcagggggtcagcgacaggcagtggcgttggcccgagcattgatccggaaaccgtgtgtacttatcctggatgatgccaccagtgccctggatgcaaacagccagttacaggtggagcagctcctgtacgaaagccctgagcggtactcccgctcagtgcttctcatcacccagcacctcagcctggtggagcaggctgaccacatcctctttctggaaggaggcgctatccgggaggggggaacccaccagcagctcatggagaaaaaggggtgctactgggccatggtgcaggctcctgcagatgctccagaatgaaagccttctcagacctgcgcactccatctccctcccttttcttctctctgtggtggagaaccacagctgcagagtaggcagctgcctccaggatgagttacttgaaatttgccttgagtgtgttacctcctttccaagctcctcgtgataatgcagacttcctggagtacaaacacaggatttgtaattccttactgtaacggagtttagagccagggctgatgctttggtgtggccagcactctgaaactgagaaatgttcagaatgtacggaaagatgatcagctattttcaacataactgaaggcatatgctggcccataaacaccctgtaggttcttgatatttataataaaattggtgttttgta

SEQ ID NO: 32412 - DNA, 2959 bp, Homo sapiens; identical to SEQ ID NO: 32411
  source 1..2959: mol_type = unassigned DNA

SEQ ID NO: 32413 - DNA, 2959 bp, Homo sapiens; identical to SEQ ID NO: 32411
  source 1..2959: mol_type = unassigned DNA

SEQ ID NO: 32414 - DNA, 2959 bp, Homo sapiens; identical to SEQ ID NO: 32411
  source 1..2959: mol_type = unassigned DNA

SEQ ID NO: 32415 - DNA, 2959 bp, Homo sapiens; identical to SEQ ID NO: 32411
  source 1..2959: mol_type = unassigned DNA

SEQ ID NO: 32416 - DNA, 2182 bp, Homo sapiens
  source 1..2182: mol_type = unassigned DNA
atctctaacaggaggcttttctacttcatgatctccagccttcctaataaaatcctgaaagttctggtagagcaaccacagggtagtgagttccagggcagcctatttaggttcgggattgagacgtcagtgtttcctttctgctgatgccctccaggataatggggagatggccattccattctttacgggccgcctcactgactggattctacaagatggctcagccgataccttcactcgaaacttaactctcatgtccattctcaccatagccagtgcagtgctggagttcgtgggtgacgggatctataacaacaccatgggccacgtgcacagccacttgcagggagaggtgtttggggctgtcctgcgccaggagacggagtttttccaacagaaccagacaggtaacatcatgtctcgggtaacagaggacacgtccaccctgagtgattctctgagtgagaatctgagcttatttctgtggtacctggtgcgaggcctatgtctcttggggatcatgctctggggatcagtgtccctcaccatggtcaccctgatcaccctgcctctgcttttccttctgcccaagaaggtgggaaaatggtaccagttgctggaagtgcaggtgcgggaatctctggcaaagtccagccaggtggccattgaggctctgtcggccatgcctacagttcgaagctttgccaacgaggagggcgaagcccagaagtttagggaaaagctgcaagaaataaagacactcaaccagaaggaggctgtggcctatgcagtcaactcctggaccactagtatttcaggtatgctgctgaaagtgggaatcctctacattggtgggcagctggtgaccagtggggctgtaagcagtgggaaccttgtcacatttgttctctaccagatgcagttcacccaggctgtggaggtactgctctccatctaccccagagtacagaaggctgtgggctcctcagagaaaatatttgagtacctggaccgcacccctcgctgcccacccagtggtctgttgactcccttacacttggagggccttgtccagttccaagatgtctcctttgcctacccaaaccgcccagatgtcttagtgctacaggggctgacattcaccctacgccctggcgaggtgacggcgctggtgggacccaatgggtctgggaagagcacagtggctgccctgctgcagaatctgtaccagcccaccgggggacagctgctgttggatgggaagccccttccccaatatgagcaccgctacctgcacaggcaggtggctgcagtgggacaagagccacaggtatttggaagaagtcttcaagaaaatattgcctatggcctgacccagaagccaactatggaggaaatcacagctgctgcagtaaagtctggggcccatagtttcatctctggactccctcagggctatgacacagaggtagacgaggctgggagccagctgtcagggggtcagcgacaggcagtggcgttggcccgagcattgatccggaaaccgtgtgtacttatcctggatgatgccaccagtgccctggatgcaaacagccagttacaggtggagcagctcctgtacgaaagccctgagcggtactcccgctcagtgcttctcatcacccagcacctcagcctggtggagcaggctgaccacatcctctttctggaaggaggcgctatccgggaggggggaacccaccagcagctcatggagaaaaaggggtgctactgggccatggtgcaggctcctgcagatgctccagaatgaaagccttctcagacctgcgcactccatctccctcccttttcttctctctgtggtggagaaccacagctgcagagtaggcagctgcctccaggatgagttacttgaaatttgccttgagtgtgttacctcctttccaagctcctcgtgataatgcagacttcctggagtacaaacacaggatttgtaattccttactgtaacggagtttagagccagggctgatgctttggtgtggccagcactctgaaactgagaaatgttcagaatgtacggaaagatgatcagctattttcaacataactgaaggcatatgctggcccataaacaccctgtaggttcttgatatttataataaaattggtgttttgt

SEQ ID NO: 32417 - DNA, 2959 bp, Homo sapiens
  source 1..2959: mol_type = unassigned DNA
gagaagggtgtgcgtgatggagaaaattgggcaccagggctgctcccgagattctcagatctgatttccacgcttgctaccaaaatagtctgggcaggccacttttggaagtaggcgttatctagtgagcaggcggccgctttcgatttcgctttcccctaaatggctgagcttctcgccagcgcaggatcagcctgttcctgggactttccgagagccccgccctcgttccctcccccagccgccagtaggggaggactcggcggtacccggagcttcaggccccaccggggcgcggagagtcccaggcccggccgggaccgggacggcgtccgagtgccaatggctagctctaggtgtcccgctccccgcgggtgccgctgcctccccggagcttctctcgcatggctggggacagtactgctacttctcgccgactgggtgctgctccggaccgcgctgccccgcatattctccctgctggtgcccaccgcgctgccactgctccgggtctgggcggtgggcctgagccgctgggccgtgctctggctgggggcctgcggggtcctcagggcaacgggtggctccaagagcgaaaacgcaggtgcccagggctggctggctgctttgaagccattagctgcggcactgggcttggccctgccgggacttgccttgttccgagagctgatctcatggggagcccccgggtccgcggatagcaccaggctactgcactggggaagtcaccctaccgccttcgttgtcagttatgcagcggcactgcccgcagcagccctgtggcacaaactcgggagcctctgggtgcccggcggtcagggcggctctggaaaccctgtgcgtcggcttctaggctgcctgggctcggagacgcgccgcctctcgctgttcctggtcctggtggtcctctcctctcttggggagatggccattccattctttacgggccgcctcactgactggattctacaagatggctcagccgataccttcactcgaaacttaactctcatgtccattctcaccatagccagtgcagtgctggagttcgtgggtgacgggatctataacaacaccatgggccacgtgcacagccacttgcagggagaggtgtttggggctgtcctgcgccaggagacggagtttttccaacagaaccagacaggtaacatcatgtctcgggtaacagaggacacgtccaccctgagtgattctctgagtgagaatctgagcttatttctgtggtacctggtgcgaggcctatgtctcttggggatcatgctctggggatcagtgtccctcaccatggtcaccctgatcaccctgcctctgcttttccttctgcccaagaaggtgggaaaatggtaccagttgctggaagtgcaggtgcgggaatctctggcaaagtccagccaggtggccattgaggctctgtcggccatgcctacagttcgaagctttgccaacgaggagggcgaagcccagaagtttagggaaaagctgcaagaaataaagacactcaaccagaaggaggctgtggcctatgcagtcaactcctggaccactagtatttcaggtatgctgctgaaagtgggaatcctctacattggtgggcagctggtgaccagtggggctgtaagcagtgggaaccttgtcacatttgttctctaccagatgcagttcacccaggctgtggaggtactgctctccatctaccccagagtacagaaggctgtgggctcctcagagaaaatatttgagtacctggaccgcacccctcgctgcccacccagtggtctgttgactcccttacacttggagggccttgtccagttccaagatgtctcctttgcctacccaaaccgcccagatgtcttagtgctacaggggctgacattcaccctacgccctggcgaggtgacggcgctggtgggacccaatgggtctgggaagagcacagtggctgccctgctgcagaatctgtaccagcccaccgggggacagctgctgttggatgggaagccccttccccaatatgagcaccgctacctgcacaggcaggtggctgcagtgggacaagagccacaggtatttggaagaagtcttcaagaaaatattgcctatggcctgacccagaagccaactatggaggaaatcacagctgctgcagtaaagtctggggcccatagtttcatctctggactccctcagggctatgacacagaggtagacgaggctgggagccagctgtcagggggtcagcgacaggcagtggcgttggcccgagcattgatccggaaaccgtgtgtacttatcctggatgatgccaccagtgccctggatgcaaacagccagttacaggtggagcagctcctgtacgaaagccctgagcggtactcccgctcagtgcttctcatcacccagcacctcagcctggtggagcaggctgaccacatcctctttctggaaggaggcgctatccgggaggggggaacccaccagcagctcatggagaaaaaggggtgctactgggccatggtgcaggctcctgcagatgctccagaatgaaagccttctcagacctgcgcactccatctccctcccttttcttctctctgtggtggagaaccacagctgcagagtaggcagctgcctccaggatgagttacttgaaatttgccttgagtgtgttacctcctttccaagctcctcgtgataatgcagacttcctggagtacaaacacaggatttgtaattccttactgtaacggagtttagagccagggctgatgctttggtgtggccagcactctgaaactgagaaatgttcagaatgtacggaaagatgatcagctattttcaacataactgaaggcatatgctggcccataaacaccctgtaggttcttgatatttataataaaattggtgttttgta

SEQ ID NO: 32418 - DNA, 2959 bp, Homo sapiens
  source 1..2959: mol_type = unassigned DNA
gagaagggtgtgcgtgatggagaaaattgggcaccagggctgctcccgagattctcagatctgatttccacgcttgctaccaaaatagtctgggcaggccacttttggaagtaggcgttatctagtgagcaggcggccgctttcgatttcgctttcccctaaatggctgagcttctcgccagcgcaggatcagcctgttcctgggactttccgagagccccgccctcgttccctcccccagccgccagtaggggaggactcggcggtacccggagcttcaggccccaccggggcgcggagagtcccagacccggccgggaccgggacggcgtccgagtgccaatggctagctctaggtgtcccgctccccgcgggtgccgctgcctccccggagcttctctcgcatggctggggacagtactgctacttctcgccgactgggtgctgctccggaccgcgctgccccgcatattctccctgctggtgcccaccgcgctgccactgctccgggtctgggcggtgggcctgagccgctgggccgtgctctggctgggggcctgcggggtcctcagggcaacggttggctccaagagcgaaaacgcaggtgcccagggctggctggctgctttgaagccattagctgcggcactgggcttggccctgccgggacttgccttgttccgagagctgatctcatggggagcccccgggtccgcggatagcaccaggctactgcactggggaagtcaccctaccgccttcgttgtcagttatgcagcggcactgcccgcagcagccctgtggcacaaactcgggagcctctgggtgcccggcggtcagggcggctctggaaaccctgtgcgtcggcttctaggctgcctgggctcggagacgcgccgcctctcgctgttcctggtcctggtggtcctctcctctcttggggagatggccattccattctttacgggccgcctcactgactggattctacaagatggctcagccgataccttcactcgaaacttaactctcatgtccattctcaccatagccagtgcagtgctggagttcgtgggtgacgggatctataacaacaccatgggccacgtgcacagccacttgcagggagaggtgtttggggctgtcctgcgccaggagacggagtttttccaacagaaccagacaggtaacatcatgtctcgggtaacagaggacacgtccaccctgagtgattctctgagtgagaatctgagcttatttctgtggtacctggtgcgaggcctatgtctcttggggatcatgctctggggatcagtgtccctcaccatggtcaccctgatcaccctgcctctgcttttccttctgcccaagaaggtgggaaaatggtaccagttgctggaagtgcaggtgcgggaatctctggcaaagtccagccaggtggccattgaggctctgtcggccatgcctacagttcgaagctttgccaacgaggagggcgaagcccagaagtttagggaaaagctgcaagaaataaagacactcaaccagaaggaggctgtggcctatgcagtcaactcctggaccactagtatttcaggtatgctgctgaaagtgggaatcctctacattggtgggcagctggtgaccagtggggctgtaagcagtgggaaccttgtcacatttgttctctaccagatgcagttcacccaggctgtggaggtactgctctccatctaccccagagtacagaaggctgtgggctcctcagagaaaatatttgagtacctggaccgcacccctcgctgcccacccagtggtctgttgactcccttacacttggagggccttgtccagttccaagatgtctcctttgcctacccaaaccgcccagatgtcttagtgctacaggggctgacattcaccctacgccctggcgaggtgacggcgctggtgggacccaatgggtctgggaagagcacagtggctgccctgctgcagaatctgtaccagcccaccgggggacagctgctgttggatgggaagccccttccccaatatgagcaccgctacctgcacaggcaggtggctgcagtgggacaagagccacaggtatttggaagaagtcttcaagaaaatattgcctatggcctgacccagaagccaactatggaggaaatcacagctgctgcagtaaagtctggggcccatagtttcatctctggactccctcagggctatgacacagaggtagacgaggctgggagccagctgtcagggggtcagcgacaggcagtggcgttggcccgagcattgatccggaaaccgtgtgtacttatcctggatgatgccaccagtgccctggatgcaaacagccagttacaggtggagcagctcctgtacgaaagccctgagcggtactcccgctcagtgcttctcatcacccagcacctcagcctggtggagcaggctgaccacatcctctttctggaaggaggcgctatccgggaggggggaacccaccagcagctcatggagaaaaaggggtgctactgggccatggtgcaggctcctgcagatgctccagaatgaaagccttctcagacctgcgcactccatctccctcccttttcttctctctgtggtggagaaccacagctgcagagtaggcagctgcctccaggatgagttacttgaaatttgccttgagtgtgttacctcctttccaagctcctcgtgataatgcagacttcctggagtacaaacacaggatttgtaattccttactgtaacggagtttagagccagggctgatgctttggtgtggccagcactctgaaactgagaaatgttcagaatgtacggaaagatgatcagctattttcaacataactgaaggcatatgctggcccataaacaccctgtaggttcttgatatttataataaaattggtgttttgta

SEQ ID NO: 32419 - DNA, 2959 bp, Homo sapiens; identical to SEQ ID NO: 32411
  source 1..2959: mol_type = unassigned DNA

SEQ ID NO: 32420 - DNA, 2182 bp, Homo sapiens; identical to SEQ ID NO: 32416
  source 1..2182: mol_type = unassigned DNA

SEQ ID NO: 32421 - DNA, 2182 bp, Homo sapiens; identical to SEQ ID NO: 32416
  source 1..2182: mol_type = unassigned DNA

SEQ ID NO: 32422 - DNA, 2182 bp, Homo sapiens; identical to SEQ ID NO: 32416
  source 1..2182: mol_type = unassigned DNA

SEQ ID NO: 32423 - DNA, 2182 bp, Homo sapiens; identical to SEQ ID NO: 32416
  source 1..2182: mol_type = unassigned DNA

SEQ ID NO: 32424 - DNA, 2182 bp, Homo sapiens; identical to SEQ ID NO: 32416
  source 1..2182: mol_type = unassigned DNA

SEQ ID NO: 32425 - DNA, 2182 bp, Homo sapiens; identical to SEQ ID NO: 32416
  source 1..2182: mol_type = unassigned DNA

SEQ ID NO: 32426 - DNA, 2182 bp, Homo sapiens; identical to SEQ ID NO: 32416
  source 1..2182: mol_type = unassigned DNA

SEQ ID NO: 32427 - DNA, 5684 bp, Homo sapiens
  source 1..5684: mol_type = unassigned DNA
gagccctgacgcccgccctggccgagcgtagctggcggaccagagccggtagcgaggttgggagagacggagcggacctcagcgctgaagcagaagtccccggagctgcggtctccccgccgcggctgagccatgcggctccctgacctgagaccctggacctccctgctgctggtggacgcggctttactgtggctgcttcagggccctctggggactttgcttcctcaagggctgccaggactatggctggaggggaccctgcggctgggagggctgtgggggctgctaaagctaagagggctgctgggatttgtggggacactgctgctcccgctctgtctggccacccccctgactgtctccctgagagccctggtcgcgggggcctcacgtgctcccccagccagagtcgcttcagccccttggagctggctgctggtggggtacggggctgcggggctcagctggtcactgtgggctgttctgagccctcctggagcccaggagaaggagcaggaccaggtgaacaacaaagtcttgatgtggaggctgctgaagctctccaggccggacctgcctctcctcgttgccgccttcttcttccttgtccttgctgttttgggtgagacattaatccctcactattctggtcgtgtgattgacatcctgggaggtgattttgacccccatgcctttgccagtgccatcttcttcatgtgcctcttctcctttggcagctcactgtctgcaggctgccgaggaggctgcttcacctacaccatgtctcgaatcaacttgcggatccgggagcagcttttctcctccctgctgcgccaggacctcggtttcttccaggagactaagacaggggagctgaactcacggctgagctcggataccaccctgatgagtaactggcttcctttaaatgccaatgtgctcttgcgaagcctggtgaaagtggtggggctgtatggcttcatgctcagcatatcgcctcgactcaccctcctttctctgctgcacatgcccttcacaatagcagcggagaaggtgtacaacacccgccatcaggaagtgcttcgggagatccaggatgcagtggccagggcggggcaggtggtgcgggaagccgttggagggctgcagaccgttcgcagttttggggccgaggagcatgaagtctgtcgctataaagaggcccttgaacaatgtcggcagctgtattggcggagagacctggaacgcgccttgtacctgctcgtaaggagggtgctgcacttgggggtgcagatgctgatgctgagctgtgggctgcagcagatgcaggatggggagctcacccagggcagcctgctttcctttatgatctaccaggagagcgtggggagctatgtgcagaccctggtatacatatatggggatatgctcagcaacgtgggagctgcagagaaggttttctcctacatggaccgacagccaaatctgccttcacctggcacgcttgcccccaccactctgcagggggttgtgaaattccaagacgtctcctttgcatatcccaatcgccctgacaggcctgtgctcaaggggctgacgtttaccctacgtcctggtgaggtgacggcgctggtgggacccaatgggtctgggaagagcacagtggctgccctgctgcagaatctgtaccagcccacagggggacaggtgctgctggatgaaaagcccatctcacagtatgaacactgctacctgcacagccaggtggtttcagttgggcaggagcctgtgctgttctccggttctgtgaggaacaacattgcttatgggctgcagagctgcgaagatgataaggtgatggcggctgcccaggctgcccacgcagatgacttcatccaggaaatggagcatggaatatacacagatgtaggggagaagggaagccagctggctgcgggacagaaacaacgtctggccattgcccgggcccttgtacgagacccgcgggtcctcatcctggatgaggctactagtgccctagatgtgcagtgcgagcaggccctgcaggactggaattcccgtggggatcgcacagtgctggtgattgctcacaggctgcagacagttcagcgcgcccaccagatcctggtgctccaggagggcaagctgcagaagcttgcccagctctaggagggacaggacctctattcccgcctggtgcagcagcggctgatggactgaggccccagggatactgggccctcttctcaggggcgtctccaggacccagagctgttcctgctttgagtttccctagagctgtgcggccagatagctgttcctgagttgcaggcacgatggagatttggacactgtgtgcttttggtggggtagagaggtggggtggggtggggtgggggctgtctgtgtccaggaaacttaattccctggtgactagagctttgcctggtgatgaggagtattttgtggcataatacatatattttaaaatattttccttcttacatgaactgtatacattcatatagaaaatttagacaatataaaaaagtacaaagaagaaaagtaaaagtacccattgtttcacttcctggagataaccatagttgctattttgctgcctgtcccatcagtcgtttatctgttgtttgagatagaaattaaccaaaaatgacataaatattcatgagattgccttcctatatccttccttgttcctaccagtgtctgctattttgaagaagctagggtctggagggacagagaacagttccctgattaacagtattaatagcgacattggtaacagctaccatttatagagttttaatgggagtaggagctatgctaagtgtttttcatgtattatcgtttttaatcattatccccaaccctatgaggttggttattatccccattttacagatgaggaaactgaagctcaaagaggctcaatgactttcccaaggtggtcgtagtggtggagttggagtttgaacacaggcctgaccctagagtccacaccctgacccaatcaattatattgcatcttgggtccataaaccctaatccataatcccatcaagaaaagctctgctgctcttagctctaaataattcagaatctattctcttctctccagtcccgttgttatagtcttcactcatagacttaagatgatcccatcaccagagaggtttctctaccattagcttccctcttccggccattcttcacaaagtcatttttctaaattctgtgtcacatacgatgatggcatttctggaaattccttcaggtgctctcaagccctgctgcagagatccttttcagagcacacactgttccagcccatctgtctcaccctctcctgttgtatccagctccacgacaaacttctgccttccccaacacctttgtgcctttgcatatggtgttttcttgcccattttctgctcgactcgcccctgattttcaagttcaagacttaactcagggttcaggtcttccaggaggccttacttatgtcgtcagtctggggaactctccatgtgcttctatcactgtgcggttacctctttcacagcccttttaaagttctatcttccctttcccaccttttttgaccttccactagaccatgagcacctgggcggaaagccatatatcttattaagctttatatctgctacctggccgagggcctaattcatagtggagaataaatagtcaattgaataaatgaataaatatctccaccatcgtactaatcttaatcctccctgcccactcccaccactgaaaatgcaacattgtacacatcactggttgttgggagggacttaccttggaaagttgctattctaggaaagagaaaccttcatattcctggaaacagcaggtagtttccagtgctggcaatgaattccccagaactgctgttttggattttttcttgcctggcagctgttgggagcagggtgcagtgaggatggggtgagagtgggcagtttcttgtgcagatttgcctttctttcatcctggggctgacttgcagctccacacccatccatctctcaaatttcacagagggtaaaataggcatttggagagaaagaactctggcctgattcctttctctcccacaaatgtcctttattcataaaacaggaataataattcctgtatctcccaactacatggaagctgcagccctcacagaagaagatgatctgagaaattctttgatttcctcagtacagttatacccatgcatcataatactttaagcctggaaggcatcttaaaaataatgcaacagtcaaacctaattttacagagaaactgacatgaaatcacgcagctaatcatgataaagctgggtggaaaacttatcttgatgggcagtacaggaagatgcagtagaccttaagatgtcctgaaagtttcttatctcaggggaaactcccaggtaggctttatgtcagggacacagaaaaatgctccctgaaagtcaaaatattcgggctagacagacaaattcctgtaagtgtggtttgtctgggaaccacagatgtcactaatcctggtttgctccagagttctttttgttcactcctaccccccatcaccatttgattgatctccttaccctgtaatttccccttcttgtcgcttacctgcagtatctttcccacccaggcatgccttattctttctaaaggaaagtatgaatggagaggggaaagcttgggaaactgatagatttccttggatgccaaaacacctccatagcctgtctgcccggccctatgtggaaacagcattgagtttcaagtcctttatgcctccacccagggatagccacttgtaatccacatggcaattgtgaaacaagcaggaaatgcgtaattgtcagaattttgtggggaaaggactagggaataaggaaaacaaagatcttccttgtgttttagagctgtcagctagaggagcacctgcttgagtctgatgccatctaatggtcccagaagaaactgggttttgaacctagagttccatggactcttaggaattagactactactactactaagcattcactggtgcttactatgtgctattgctgtgccaagtatctgaaacctgtcttcttaccttatttttcaagataattctatgtggcaggtattactatctcaattctaagagtgagaaaatggagttttagaaacatttactaacttgcctgggtcacatagctaaggaagaggtggacttgcccagctttgcataaaactcctcaaaagagttgcctatactccctgactccacttatcttcctactatcctctttttaaaatatattatttatttatttaaataagcaatatatgaatgtggtttgaaattcaaaagacacaaagaagtatacagaggaaagcctcactctcaatccttctcaaggtttgctaattcctcttgcataggcaatccgttcttccagctttgtgtttatctttccagagaagtttactgtgtattaagcaaatatgtatatctttattcttgctcagtattttcgcaaacagcagctgtctaagttcactgttctgaactttattttttaaattaaaaatatatggctatgtagtattcta

SEQ ID NO: 32428 - DNA, 2497 bp, Homo sapiens
  source 1..2497: mol_type = unassigned DNA
gaggttgggagagacggagcggacctcagcgctgaagcagaagtccccggagctgcggtctccccgccgcggctgagccatgcggctccctgacctgagaccctggacctccctgctgctggtggacgcggctttactgtggctgcttcagggccctctggggactttgcttcctcaagggctgccaggactatggctggaggggaccctgcggctgggagggctgtgggggctgctaaagctaagagggctgctgggatttgtggggacactgctgctcccgctctgtctggccacccccctgactgtctccctgagagccctggtcgcgggggcctcacgtgctcccccagccagagtcgcttcagccccttggagctggctgctggtggggtacggggctgcggggctcagctggtcactgtgggctgttctgagccctcctggagcccaggagaaggagcaggaccaggtgaacaacaaagtcttgatgtggaggctgctgaagctctccaggccggacctgcctctcctcgttgccgccttcttcttccttgtccttgctgttttgggtgagacattaatccctcactattctggtcgtgtgattgacatcctgggaggtgattttgacccccatgcctttgccagtgccatcttcttcatgtgcctcttctcctttggcagctcactgtctgcaggctgccgaggaggctgcttcacctacaccatgtctcgaatcaacttgcggatccgggagcagcttttctcctccctgctgcgccaggacctcggtttcttccaggagactaagacaggggagctgaactcacggctgagctcggataccaccctgatgagtaactggcttcctttaaatgccaatgtgctcttgcgaagcctggtgaaagtggtggggctgtatggcttcatgctcagcatatcgcctcgactcaccctcctttctctgctgcacatgcccttcacaatagcagcggagaaggtgtacaacacccgccatcaggaagtgcttcgggagatccaggatgcagtggccagggcggggcaggtggtgcgggaagccgttggagggctgcagaccgttcgcagttttggggccgaggagcatgaagtctgtcgctataaagaggcccttgaacaatgtcggcagctgtattggcggagagacctggaacgcgccttgtacctgctcgtaaggagggtgctgcacttgggggtgcagatgctgatgctgagctgtgggctgcagcagatgcaggatggggagctcacccagggcagcctgctttcctttatgatctaccaggagagcgtggggagctatgtgcagaccctggtatacatatatggggatatgctcagcaacgtgggagctgcagagaaggttttctcctacatggaccgacagccaaatctgccttcacctggcacgcttgcccccaccactctgcagggggttgtgaaattccaagacgtctcctttgcatatcccaatcgccctgacaggcctgtgctcaaggggctgacgtttaccctacgtcctggtgaggtgacggcgctggtgggacccaatgggtctgggaagagcacagtggctgccctgctgcagaatctgtaccagcccacagggggacaggtgctgctggatgaaaagcccatctcacagtatgaacactgctacctgcacagccaggtggtttcagttgggcaggagcctgtgctgttctccggttctgtgaggaacaacattgcttatgggctgcagagctgcgaagatgataaggtgatggcggctgcccaggctgcccacgcagatgacttcatccaggaaatggagcatggaatatacacagatgtaggggagaagggaagccagctggctgcgggacagaaacaacgtctggccattgcccgggcccttgtacgagacccgcgggtcctcatcctggatgaggctactagtgccctagatgtgcagtgcgagcaggccaaaaccctttggaagttcatgatattttgaatttcaatggatatttcctgggaataatgagttcaaatgaacgaatatgtggaacaaagcatcaccaacatttattttttcaggatgaggtgatggacaaaaccatcacagggaaattgaggcaaatagtacatgtaaaacaatacttcgggtgagtccacctatcccaaagtcgtatcaaagaagtggctgcagattggagcccaaagcctttggttcctcagtttccaaatggattctcactaggtgggatcatgagtttgctttggacaccccaaattctaactatttcttttgtttcttacatcctttccctcttccccagccccttcccctcatgttacacctcttgctggtttgagacgtcaatcaccactgagaaagaattaaaccagtattttgagctggcaaaattcttagcctagtacaattccttcaattaaactgtagctcaac

SEQ ID NO: 32429 - DNA, 5684 bp, Homo sapiens
  source 1..5684: mol_type = unassigned DNA
gagccctgacgcccgccctggccgagcgtagctggcggaccagagccggtagcgaggttgggagagacggagcggacctcagcgctgaagcagaagtccccggagctgcggtctccccgccgcggctgagccatgcggctccctgacctgagaccctggacctccctgctgctggtggacgcggctttactgtggctgcttcagggccctctggggactttgcttcctcaagggctgccaggactatggctggaggggaccctgcggctgggagggctgtgggggctgctaaagctaagagggctgctgggatttgtggggacactgctgctcccgctctgtctggccacccccctgactgtctccctgagagccctggtcgcgggggcctcacgtgctcccccagccagagtcgcttcagccccttggagctggctgctggtggggtacggggctgcggggctcagctggtcactgtgggctgttctgagccctcctggagcccaggagaaggagcaggaccaggtgaacaacaaagtcttgatgtggaggctgctgaagctctccaggccggacctgcctctcctcgttgccgccttcttcttccttgtccttgctgttttgggtgagacattaatccctcactattctggtcgtgtgattgacatcctgggaggtgattttgacccccatgcctttgccagtgccatcttcttcatgtgcctcttctcctttggcagctcactgtctgcaggctgccgaggaggctgcttcacctacaccatgtctcgaatcaacttgcggatccgggagcagcttttctcctccctgctgcgccaggacctcggtttcttccaggagactaagacaggggagctgaactcacggctgagctcggataccaccctgatgagtaactggcttcctttaaatgccaatgtgctcttgcgaagcctggtgaaagtggtggggctgtatggcttcatgctcagcatatcgcctcgactcaccctcctttctctgctgcacatgcccttcacaatagcagcggagaaggtgtacaacacccgccatcaggaagtgcttcgggagatccaggatgcagtggccagggcggggcaggtggtgcgggaagccgttggagggctgcagaccgttcgcagttttggggccgaggagcatgaagtctgtcgctataaagaggcccttgaacaatgtcggcagctgtattggcggagagacctggaacgcgccttgtacctgctcgtaaggagggtgctgcacttgggggtgcagatgctgatgctgagctgtgggctgcagcagatgcaggatggggagctcacccagggcagcctgctttcctttatgatctaccaggagagcgtggggagctatgtgcagaccctggtatacatatatggggatatgctcagcaacgtgggagctgcagagaaggttttctcctacatggaccgacagccaaatctgccttcacctggcacgcttgcccccaccactctgcagggggttgtgaaattccaagacgtctcctttgcatatcccaatcgccctgacaggcctgtgctcaaggggctgacgtttaccctacgtcctggtgaggtgacggcgctggtgggacccaatgggtctgggaagagcacagtggctgccctgctgcagaatctgtaccagcccacagggggacaggtgctgctggatgaaaagcccatctcacagtatgaacactgctacctgcacagccaggtggtttcagttgggcaggagcctgtgctgttctccggttctgtgaggaacaacattgcttatgggctgcagagctgcgaagatgataaggtgatggcggctgcccaggctgcccacgcagatgacttcatccaggaaatggagcatggaatatacacagatgtaggggagaagggaagccagctggctgcgggacagaaacaacgtctggccattgcccgggcccttgtacgagacccgcgggtcctcatcctggatgaggctactagtgccctagatgtgcagtgcgagcaggccctgcaggactggaattcccgtggggatcgcacagtgctggtgattgctcacaggctgcagacagttcagcgcgcccaccagatcctggtgctccaggagggcaagctgcagaagcttgcccagctctaggagggacaggacctctattcccgcctggtgcagcagcggctgatggactgaggccccagggatactgggccctcttctcaggggcgtctccaggacccagagctgttcctgctttgagtttccctagagctgtgcggccagatagctgttcctgagttgcaggcacgatggagatttggacactgtgtgcttttggtggggtagagaggtggggtggggtggggtgggggctgtctgtgtccaggaaacttaattccctggtgactagagctttgcctggtgatgaggagtattttgtggcataatacatatattttaaaatattttccttcttacatgaactgtatacattcatatagaaaatttagacaatataaaaaagtacaaagaagaaaagtaaaagtacccattgtttcacttcctggagataaccatagttgctattttgctgcctgtcccatcagtcgtttatctgttgtttgagatagaaattaaccaaaaatgacataaatattcatgagattgccttcctatatccttccttgttcctaccagtgtctgctattttgaagaagctagggtctggagggacagagaacagttccctgattaacagtattaatagcgacattggtaacagctaccatttatagagttttaatgggagtaggagctatgctaagtgtttttcatgtattatcgtttttaatcattatccccaaccctatgaggttggttattatccccattttacagatgaggaaactgaagctcaaagaggctcaatgactttcccaaggtggtcgtagtggtggagttggagtttgaacacaggcctgaccctagagtccacaccctgacccaatcaattatattgcatcttgggtccataaaccctaatccataatcccatcaagaaaagctctgctgctcttagctctaaataattcagaatctattctcttctctccagtcccgttgttatagtcttcactcatagacttaagatgatcccatcaccagagaggtttctctaccattagcttccctcttccggccattcttcacaaagtcatttttctaaattctgtgtcacatacgatgatggcatttctggaaattccttcaggtgctctcaagccctgctgcagagatccttttcagagcacacactgttccagcccatctgtctcaccctctcctgttgtatccagctccacgacaaacttctgccttccccaacacctttgtgcctttgcatatggtgttttcttgcccattttctgctcgactcgcccctgattttcaagttcaagacttaactcagggttcaggtcttccaggaggccttacttatgtcgtcagtctggggaactctccatgtgcttctatcactgtgcggttacctctttcacagcccttttaaagttctatcttccctttcccaccttttttgaccttccactagaccatgagcacctgggcggaaagccatatatcttattaagctttatatctgctacctggccgagggcctaattcatagtggagaataaatagtcaattgaataaatgaataaatatctccaccatcgtactaatcttaatcctccctgcccactcccaccactgaaaatgcaacattgtacacatcactggttgttgggagggacttaccttggaaagttgctattctaggaaagagaaaccttcatattcctggaaacagcaggtagtttccagtgctggcaatgaattccccagaactgctgttttggattttttcttgcctggcagctgttgggagcagggtgcagtgaggatggagtgagagtgggcagtttcttgtgcagatttgcctttctttcatcctggggctgacttgcagctccacacccatccatctctcaaatttcacagagggtaaaataggcatttggagagaaagaactctggcctgattcctttctctcccacaaatgtcctttattcataaaacaggaataataattcctgtatctcccaactacatggaagctgcagccctcacagaagaagatgatctgagaaattctttgatttcctcagtacagttatacccatgcatcataatactttaagcctggaaggcatcttaaaaataatgcaacagtcaaacctaattttacagagaaactgacatgaaatcacgcagctaatcatgataaagctgggtggaaaacttatcttgatgggcagtacaggaagatgcagtagaccttaagatgtcctgaaagtttcttatctcaggggaaactcccaggtaggctttatgtcagggacacagaaaaatgctccctgaaagtcaaaatattcgggctagacagacaaattcctgtaagtgtggtttgtctgggaaccacagatgtcactaatcctggtttgctccagagttctttttgttcactcctaccccccatcaccatttgattgatctccttaccctgtaatttccccttcttgtcgcttacctgcagtatctttcccacccaggcatgccttattctttctaaaggaaagtatgaatggagaggggaaagcttgggaaactgatagatttccttggatgccaaaacacctccatagcctgtctgcccggccctatgtggaaacagcattgagtttcaagtcctttatgcctccacccagggatagccacttggaatccacatggcaattgtgaaacaagcaggaaatgcgtaattgtcagaattttgtggggaaaggactagggaataaggaaaacaaagatcttccttgtgttttagagctgtcagctagaggagcacctgcttgagtctgatgccatctaatggtcccagaagaaactgggttttgaacctagagttccatggactcttaggaattagactcctactactactaagcattcactggtgcttactatgtgctattgctgtgccaagtatctgaaacctgtcttcttaccttatttttcaagataattctatgtggcaggtattactatctcaattctaagagtgagaaaatggagttttagaaacatttactaacttgcctgggtcacatagctaaggaagaggtggacttgcccagctttgcataaaactcctcaaaagagttgcctatactccctgactccacttatcttcctactatcctctttttaaaatatattatttatttatttaaataagcaatatatgaatgtggtttgaaattcaaaagacacaaagaagtatacagaggaaagcctcactctcaatccttctcaaggtttgctaattcctcttgcataggcaatccgttcttccagctttgtgtttatctttccagagaagtttactgtgtattaagcaaatatgtatatctttattcttgctcagtattttcgcaaacagcagctgtctaagttcactgttctgaactttattttttaaattaaaaatatatggctatgtagtattcta

SEQ ID NO: 32430 - DNA, 2497 bp, Homo sapiens
  source 1..2497: mol_type = unassigned DNA
gaggttgggagagacggagcggacctcagcgctgaagcagaagtccccggagctgcggtctccccgccgcggctgagccatgcggctccctgacctgagaccctggacctccctgctgctggtggacgcggctttactgtggctgcttcagggccctctggggactttgcttcctcaagggctgccaggactatggctggaggggaccctgcggctgggagggctgtgggggctgctaaagctaagagggctgctgggatttgtggggacactgctgctcccgctctgtctggccacccccctgactgtctccctgagagccctggtcgcgggggcctcacgtgctcccccagccagagtcgcttcagccccttggagctggctgctggtggggtacggggctgcggggctcagctggtcactgtgggctgttctgagccctcctggagcccaggagaaggagcaggaccaggtgaacaacaaagtcttgatgtggaggctgctgaagctctccaggccggacctgcctctcctcgttgccgccttcttcttccttgtccttgctgttttgggtgagacattaatccctcactattctggtcgtgtgattgacatcctgggaggtgattttgacccccatgcctttgccagtgccatcttcttcatgtgcctcttctcctttggcagctcactgtctgcaggctgccgaggaggctgcttcacctacaccatgtctcgaatcaacttgcggatccgggagcagcttttctcctccctgctgcgccaggacctcggtttcttccaggagactaagacaggggagctgaactcacggctgagctcggataccaccctgatgagtaactggcttcctttaaatgccaatgtgctcttgcgaagcctggtgaaagtggtggggctgtatggcttcatgctcagcatatcgcctcgactcaccctcctttctctgctgcacatgcccttcacaatagcagcggagaaggtgtacaacacccgccatcaggaagtgcttcgggagatccaggatgcagtggccagggcggggcaggtggtgcgggaagccgttggagggctgcagaccgttcgcagttttggggccgaggagcatgaagtctgtcgctataaagaggcccttgaacaatgtcggcagctgtattggcggagagacctggaacgcgccttgtacctgctcgtaaggagggtgctgcacttgggggtgcagatgctgatgctgagctgtgggctgcagcagatgcaggatggggagctcacccagggcagcctgctttcctttatgatctaccaggagagcgtggggagctatgtgcagaccctggtatacatatatggggatatgctcagcaacgtgggagctgcagagaaggttttctcctacatggaccgacagccaaatctgccttcacctggcacgcttgcccccaccactctgcagggggttgtgaaattccaagacgtctcctttgcatatcccaatcgccctgacaggcctgtgctcaaggggctgacgtttaccctacgtcctggtgaggtgacggcgctggtgggacccaatgggtctgggaagagcacagtggctgccctgctgcagaatctgtaccagcccacagggggacaggtgctgctggatgaaaagcccatctcacagtatgaacactgctacctgcacagccaggtggtttcagttgggcaggagcctgtgctgttctccggttctgtgaggaacaacattgcttatgggctgcagagctgcgaagatgataaggtgatggcggctgcccaggctgcccacgcagatgacttcatccaggaaatggagcatggaatatacacagatgtaggggagaagggaagccagctggctgcgggacagaaacaacgtctggccattgcccgggcccttgtacgagacccgcgggtcctcatcctggatgaggctactagtgccctagatgtgcagtgcgagcaggccaaaaccctttggaagttcatgatattttgaatttcagtggatatttcctgggaataatgagttcaaatgaacgaatatgtggaacaaagcatcaccaacatttattttttcaggatgaggtgatggacaaaaccatcacagggaaattgaggcaaatagtacatgtaaaacaatacttcgggtgagtccacctatcccaaagtcgtatcaaagaagtggctgcagattggagcccaaagcctttggttcctcagtttccaaatggattctcactaggtgggatcatgagtttgctttggacaccccaaattctaactatttcttttgtttcttacatcctttccctcttccccagccccttcccctcatgttacacctcttgctggtttgagacgtcaatcaccactgagaaagaattaaaccagtattttgagctggcaaaattcttagcctagtacaattccttcaattaaactgtagctcaac

SEQ ID NO: 32431 - DNA, 5684 bp, Homo sapiens
  source 1..5684: mol_type = unassigned DNA
gagccctgacgcccgccctggccgagcgtagctggcggaccagagccggtagcgaggttgggagagacggagcggacctcagcgctgaagcagaagtccccggagctgcggtctccccgccgcggctgagccatgcggctccctgacctgagaccctggacctccctgctgctggtggacgcggctttactgtggctgcttcagggccctctggggactttgcttcctcaagggctgccaggactatggctggaggggaccctgcggctgggagggctgtgggggctgctaaagctaagagggctgctgggatttgtggggacactgctgctcccgctctgtctggccacccccctgactgtctccctgagagccctggtcgcgggggcctcacgtgctcccccagccagagtcgcttcagccccttggagctggctgctggtggggtacggggctgcggggctcagctggtcactgtgggctgttctgagccctcctggagcccaggagaaggagcaggaccaggtgaacaacaaagtcttgatgtggaggctgctgaagctctccaggccggacctgcctctcctcgttgccgccttcttcttccttgtccttgctgttttgggtgagacattaatccctcactattctggtcgtgtgattgacatcctgggaggtgattttgacccccatgcctttgccagtgccatcttcttcatgtgcctcttctcctttggcagctcactgtctgcaggctgccgaggaggctgcttcacctacaccatgtctcgaatcaacttgcggatccgggagcagcttttctcctccctgctgcgccaggacctcggtttcttccaggagactaagacaggggagctgaactcacggctgagctcggataccaccctgatgagtaactggcttcctttaaatgccaatgtgctcttgcgaagcctggtgaaagtggtggggctgtatggcttcatgctcagcatatcgcctcgactcaccctcctttctctgctgcacatgcccttcacaatagcagcggagaaggtgtacaacacccgccatcaggaagtgcttcgggagatccaggatgcagtggccagggcggggcaggtggtgcgggaagccgttggagggctgcagaccgttcgcagttttggggccgaggagcatgaagtctgtcgctataaagaggcccttgaacaatgtcggcagctgtattggcggagagacctggaacgcgccttgtacctgctcgtaaggagggtgctgcacttgggggtgcagatgctgatgctgagctgtgggctgcagcagatgcaggatggggagctcacccagggcagcctgctttcctttatgatctaccaggagagcgtggggagctatgtgcagaccctggtatacatatatggggatatgctcagcaacgtgggagctgcagagaaggttttctcctacatggaccgacagccaaatctgccttcacctggcacgcttgcccccaccactctgcagggggttgtgaaattccaagacgtctcctttgcatatcccaatcgccctgacaggcctgtgctcaaggggctgacgtttaccctacgtcctggtgaggtgacggcgctggtgggacccaatgggtctgggaagagcacagtggctgccctgctgcagaatctgtaccagcccacagggggacaggtgctgctggatgaaaagcccatctcacagtatgaacactgctacctgcacagccaggtggtttcagttgggcaggagcctgtgctgttctccggttctgtgaggaacaacattgcttatgggctgcagagctgcgaagatgataaggtgatggcggctgcccaggctgcccacgcagatgacttcatccaggaaatggagcatggaatatacacagatgtaggggagaagggaagccagctggctgcgggacagaaacaacgtctggccattgcccgggcccttgtacgagacccgcgggtcctcatcctggatgaggctactagtgccctagatgtgcagtgcgagcaggccctgcaggactggaattcccgtggggatcgcacagtgctggtgattgctcacaggctgcagacagttcagcgcgcccaccagatcctggtgctccaggagggcaagctgcagaagcttgcccagctctaggagggacaggacctctattcccgcctggtgcagcagcggctgatggactgaggccccagggatactgggccctcttctcaggggcgtctccaggacccagagctgttcctgctttgagtttccctagagctgtgcggccagatagctgttcctgagttgcaggcacgatggagatttggacactgtgtgcttttggtggggtagagaggtggggtggggtggggtgggggctgtctgtgtccaggaaacttaattccctggtgactagagctttgcctggtgatgaggagtattttgtggcataatacatatattttaaaatattttccttcttacatgaactgtatacattcatatagaaaatttagacaatataaaaaagtacaaagaagaaaagtaaaagtacccattgtttcacttcctggagataaccatagttgctattttgctgcctgtcccatcagtcgtttatctgttgtttgagatagaaattaaccaaaaatgacataaatattcatgagattgccttcctatatccttccttgttcctaccagtgtctgctattttgaagaagctagggtctggagggacagagaacagttccctgattaacagtattaatagcgacattggtaacagctaccatttatagagttttaatgggagtaggagctatgctaagtgtttttcatgtattatcgtttttaatcattatccccaaccctatgaggttggttattatccccattttacagatgaggaaactgaagctcaaagaggctcaatgactttcccaaggtggtcgtagtggtggagttggagtttgaacacaggcctgaccctagagtccacaccctgacccaatcaattatattgcatcttgggtccataaaccctaatccataatcccatcaagaaaagctctgctgctcttagctctaaataattcagaatctattctcttctctccagtcccgttgttatagtcttcactcatagacttaagatgatcccatcaccagagaggtttctctaccattagcttccctcttccggccattcttcacaaagtcatttttctaaattctgtgtcacatacgatgatggcatttctggaaattccttcaggtgctctcaagccctgctgcagagatccttttcagagcacacactgttccagcccatctgtctcaccctctcctgttgtatccagctccacgacaaacttctgccttccccaacacctttgtgcctttgcatatggtgttttcttgcccattttctgctcgactcgcccctgattttcaagttcaagacttaactcagggttcaggtcttccaggaggccttacttatgtcgtcagtctggggaactctccatgtgcttctatcactgtgcggttacctctttcacagcccttttaaagttctatcttccctttcccaccttttttgaccttccactagaccatgagcacctgggcggaaagccatatatcttattaagctttatatctgctacctggccgagggcctaattcatagtggagaataaatagtcaattgaataaatgaataaatatctccaccatcgtactaatcttaatcctccctgcccactcccaccactgaaaatgcaacattgtacacatcactggttgttgggagggacttaccttggaaagttgctattctaggaaagagaaaccttcatattcctggaaacagcaggtagtttccagtgctggcaatgaattccccagaactgctgttttggattttttcttgcctggcagctgttgggagcagggtgcagtgaggatggggtgagagtgggcagtttcttgtgcagatttgcctttctttcatcctggggctgacttgcagctccacacccatccatctctcaaatttcacagagggtaaaataggcatttggagagaaagaactctggcctgattcctttctctcccacaaatgtcctttattcataaaacaggaataataattcctgtatctcccaactacatggaagctgcagccctcacagaagaagatgatctgagaaattctttgatttcctcagtacagttatacccatgcatcataatactttaagcctggaaggcatcttaaaaataatgcaacagtcaaacctaattttacagagaaactgacatgaaatcacgcagctaatcatgataaagctgggtggaaaacttatcttgatgggcagtacaggaagatgcagtagaccttaagatgtcctgaaagtttcttatctcaggggaaactcccaggtaggctttatgtcagggacacagaaaaatgctccctgaaagtcaaaatattcgggctagacagacaaattcctgtaagtgtggtttgtctgggaaccacagatgtcactaatcctggtttgctccagagttctttttgttcactcctaccccccatcaccatttgattgatctccttaccctgtaatttccccttcttgtcgcttacctgcagtatctttcccacccaggcatgccttattctttctaaaggaaagtatgaatggagaggggaaagcttgggaaactgatagatttccttggatgccaaaacacctccatagcctgtctgcccggccctatgtggaaacagcattgagtttcaagtcctttatgcctccacccagggatagccacttggaatccacatggcaattgtgaaacaagcaggaaatgcgtaattgtcagaattttgtggggaaaggactagggaataaggaaaacaaagatcttccttgtgttttagagctgtcagctagaggagcacctgcttgagtctgatgccatctaatggtcccagaagaaactgggttttgaacctagagttccatggactcttaggaattagactcctactactactaagcattcactggtgcttactatgtgctattgctgtgccaagtatctgaaacctgtcttcttaccttatttttcaagataattctatgtggcaggtattactatctcaattctaagagtgagaaaatggagttttagaaacatttactaacttgcctgggtcacatagctaaggaagaggtggacttgcccagctttgcataaaactcctcaaaagagttgcctatactccctgactccacttatcttcctactatcctctttttaaaatatattatttatttatttaaataagcaatatatgaatgtggtttgaaattcaaaagacacaaagaagtatacagaggaaagcctcactctcaatccttctcaaggtttgctaattcctcttgcataggcaatccgttcttccagctttgtgtttatctttccagagaagtttactgtgtattaagcaaatatgtatatctttattcttgctcagtattttcgcaaacagcagctgtctaagttcactgttctgaactttattttttaaattaaaaatatatggctatgtagtattcta

SEQ ID NO: 32432 - DNA, 2497 bp, Homo sapiens; identical to SEQ ID NO: 32430
  source 1..2497: mol_type = unassigned DNA

SEQ ID NO: 32433 - DNA, 2497 bp, Homo sapiens
  source 1..2497: mol_type = unassigned DNA
gaggttgggagagacggagcggacctcagcgctgaagcagaagtccccggagctgcggtctccccgccgcggctgagccatgcggctccctgacctgagaccctggacctccctgctgctggtggacgcggctttactgtggctgcttcagggccctctggggactttgcttcctcaagggctgccaggactatggctggaggggaccctgcggctgggagggctgtgggggctgctaaagctaagagggctgctgggatttgtggggacactgctgctcccgctctgtctggccacccccctgactgtctccctgagagccctggtcgcgggggcctcacgtgctcccccagccagagtcgcttcagccccttggagctggctgctggtggggtacggggctgcggggctcagctggtcactgtgggctgttctgagccctcctggagcccaggagaaggagcaggaccaggtgaacaacaaagtcttgatgtggaggctgctgaagctctccaggccggacctgcctctcctcgttgccgccttcttcttccttgtccttgctgttttgggtgagacattaatccctcactattctggtcgtgtgattgacatcctgggaggtgattttgacccccatgcctttgccagtgccatcttcttcatgtgcctcttctcctttggcagctcactgtctgcaggctgccgaggaggctgcttcacctacaccatgtctcgaatcaacttgcggatccgggagcagcttttctcctccctgctgcgccaggacctcggtttcttccaggagactaagacaggggagctgaactcacggctgagctcggataccaccctgatgagtaactggcttcctttaaatgccaatgtgctcttgcgaagcctggtgaaagtggtggggctgtatggcttcatgctcagcatatcgcctcgactcaccctcctttctctgctgcacatgcccttcacaatagcagcggagaaggtgtacaacacccgccatcaggaagtgcttcgggagatccaggatgcagtggccagggcggggcaggtggtgcgggaagccgttggagggctgcagaccgttcgcagttttggggccgaggagcatgaagtctgtcgctataaagaggcccttgaacaatgtcggcagctgtattggcggagagacctggaacgcgccttgtacctgctcgtaaggagggtgctgcacttgggggtgcagatgctgatgctgagctgtgggctgcagcagatgcaggatggggagctcacccagggcagcctgctttcctttatgatctaccaggagagcgtggggagctatgtgcagaccctggtatacatatatggggatatgctcagcaatgtgggagctgcagagaaggttttctcctacatggaccgacagccaaatctgccttcacctggcacgcttgcccccaccactctgcagggggttgtgaaattccaagacgtctcctttgcatatcccaatcgccctgacaggcctgtgctcaaggggctgacgtttaccctacgtcctggtgaggtgacggcgctggtgggacccaatgggtctgggaagagcacagtggctgccctgctgcagaatctgtaccagcccacagggggacaggtgctgctggatgaaaagcccatctcacagtatgaacactgctacctgcacagccaggtggtttcagttgggcaggagcctgtgctgttctccggttctgtgaggaacaacattgcttatgggctgcagagctgcgaagatgataaggtgatggcggctgcccaggctgcccacgcagatgacttcatccaggaaatggagcatggaatatacacagatgtaggggagaagggaagccagctggctgcgggacagaaacaacgtctggccattgcccgggcccttgtacgagacccgcgggtcctcatcctggatgaggctactagtgccctagatgtgcagtgcgagcaggccaaaaccctttggaagttcatgatattttgaatttcaatggatatttcctgggaataatgagttcaaatgaacgaatatgtggaacaaagcatcaccaacatttattttttcaggatgaggtgatggacaaaaccatcacagggaaattgaggcaaatagtacatgtaaaacaatacttcgggtgagtccacctatcccaaagtcgtatcaaagaagtggctgcagattggagcccaaagcctttggttcctcagtttccaaatggattctcactaggtgggatcatgagtttgctttggacaccccaaattctaactatttcttttgtttcttacatcctttccctcttccccagccccttcccctcatgttacacctcttgctggtttgagacgtcaatcaccactgagaaagaattaaaccagtattttgagctggcaaaattcttagcctagtacaattccttcaattaaactgtagctcaac

SEQ ID NO: 32434 - DNA, 5684 bp, Homo sapiens
  source 1..5684: mol_type = unassigned DNA
gagccctgacgcccgccctggccgagcgtagctggcggaccagagccggtagcgaggttgggagagacggagcggacctcagcgctgaagcagaagcccccggagctgcggtctccccgccgcggctgagccatgcggctccctgacctgagaccctggacctccctgctgctggtggacgcggctttactgtggctgcttcagggccctctggggactttgcttcctcaagggctgccaggactatggctggaggggaccctgcggctgggagggctgtgggggctgctaaagctaagagggctgctgggatttgtggggacactgctgctcccgctctgtctggccacccccctgactgtctccctgagagccctggtcgcgggggcctcacgtgctcccccagccagagtcgcttcagccccttggagctggctgctggtggggtacggggctgcggggctcagctggtcactgtgggctgttctgagccctcctggagcccaggagaaggagcaggaccaggtgaacaacaaagtcttgatgtggaggctgctgaagctctccaggccggacctgcctctcctcgttgccgccttcttcttccttgtccttgctgttttgggtgagacattaatccctcactattctggtcgtgtgattgacatcctgggaggtgattttgacccccatgcctttgccagtgccatcttcttcatgtgcctcttctcctttggcagctcactgtctgcaggctgccgaggaggctgcttcacctacaccatgtctcgaatcaacttgcggatccgggagcagcttttctcctccctgctgcgccaggacctcggtttcttccaggagactaagacaggggagctgaactcacggctgagctcggataccaccctgatgagtaactggcttcctttaaatgccaatgtgctcttgcgaagcctggtgaaagtggtggggctgtatggcttcatgctcagcatatcgcctcgactcaccctcctttctctgctgcacatgcccttcacaatagcagcggagaaggtgtacaacacccgccatcaggaagtgcttcgggagatccaggatgcagtggccagggcggggcaggtggtgcgggaagccgttggagggctgcagaccgttcgcagttttggggccgaggagcatgaagtctgtcgctataaagaggcccttgaacaatgtcggcagctgtattggcggagagacctggaacgcgccttgtacctgctcataaggagggtgctgcacttgggggtgcagatgctgatgctgagctgtgggctgcagcagatgcaggatggggagctcacccagggcagcctgctttcctttatgatctaccaggagagcgtggggagctatgtgcagaccctggtatacatatatggggatatgctcagcaacgtgggagctgcagagaaggttttctcctacatggaccgacagccaaatctgccttcacctggcacgcttgcccccaccactctgcagggggttgtgaaattccaagacgtctcctttgcatatcccaatcgccctgacaggcctgtgctcaaggggctgacgtttaccctacgtcctggtgaggtgacggcgctggtgggacccaatgggtctgggaagagcacagtggctgccctgctgcagaatctgtaccagcccacagggggacaggtgctgctggatgaaaagcccatctcacagtatgaacactgctacctgcacagccaggtggtttcagttgggcaggagcctgtgctgttctccggttctgtgaggaacaacattacttatgggctgcagagctgcgaagatgataaggtgatggcggctgcccaggctgcccacgcagatgacttcatccaggaaatggagcatggaatatacacagatgtaggggagaagggaagccagctggctgcgggacagaaacaacgtctggccattgcccgggcccttgtacgagacccgcgggtcctcatcctggatgaggctactagtgccctagatgtgcagtgcgagcaggccctgcaggactggaattcccgtggggatcgcacagtgctggtgattgctcacaggctgcagacagttcagcgcgcccaccagatcctggtgctccaggagggcaagctgcagaagcttgcccagctctaggagggacaggacctctattcccgcctggtgcagcagcggctgatggactgaggccccagggatactgggccctcttctcaggggcgtctccaggacccagagctgttcctgctttgagtttccctagagctgtgcggccagatagctgttcctgagttgcaggcacgatggagatttggacactgtgtgcttttggtggggtagagaggtggggtggggtggggtgggggctgtctgtgtccaggaaacttaattccctggtgactagagctttgcctggtgatgaggagtattttgtggcataatacatatattttaaaatattttccttcttacatgaactgtatacattcatatagaaaatttagacaatataaaaaagtacaaagaagaaaagtaaaagtacccattgtttcacttcctggagataaccatagttgctattttgctgcctgtcccatcagtcgtttatctgttgtttgagatagaaattaaccaaaaatgacataaatattcatgagattgccttcctatatccttccttgttcctaccagtgtctgctattttgaagaagctagggtctggagggacagagaacagttccctgattaacagtattaatagcgacattggtaacagctaccatttatagagttttaatgggagtaggagctatgctaagtgtttttcatgtattatcgtttttaatcattatccccaaccctatgaggttggttattatccccattttacagatgaggaaactgaagctcaaagaggctcaatgactttcccaaggtggtcgtagtggtggagttggagtttgaacacaggcctgaccctagagtccacaccctgacccaatcaattatattgcatcttgggtccataaaccctaatccataatcccatcaagaaaagctctgctgctcttagctctaaataattcagaatctattctcttctctccagtcccgttgttatagtcttcactcatagacttaagatgatcccatcaccagagaggtttctctaccattagcttccctcttccggccattcttcacaaagtcatttttctaaattctgtgtcacatacgatgatggcatttctggaaattccttcaggtgctctcaagccctgctgcagagatccttttcagagcacacactgttccagcccatctgtctcaccctctcctgttgtatccagctccacgacaaacttctgccttccccaacacctttgtgcctttgcatatggtgttttcttgcccattttctgctcgactcgcccctgattttcaagttcaagacttaactcagggttcaggtcttccaggaggccttacttatgtcgtcagtctggggaactctccatgtgcttctatcactgtgcggttacctctttcacagcccttttaaagttctatcttccctttcccaccttttttgaccttccactagaccatgagcacctgggcggaaagccatatatcttattaagctttatatctgctacctggccgagggcctaattcatagtggagaataaatagtcaattgaataaatgaataaatatctccaccatcgtactaatcttaatcctccctgcccactcccaccactgaaaatgcaacattgtacacatcactggttgttgggagggacttaccttggaaagttgctattctaggaaagagaaaccttcatattcctggaaacagcaggtagtttccagtgctggcaatgaattccccagaactgctgttttggattttttcttgcctggcagctgttgggagcagggtgcagtgaggatggggtgagagtgggcagtttcttgtgcagatttgcctttctttcatcctggggctgacttgcagctccacacccatccatctctcaaatttcacagagggtaaaataggcatttggagagaaagaactctggcctgattcctttctctcccacaaatgtcctttattcataaaacaggaataataattcctgtatctcccaactacatggaagctgcagccctcacagaagaagatgatctgagaaattctttgatttcctcagtacagttatacccatgcatcataatactttaagcctggaaggcatcttaaaaataatgcaacagtcaaacctaattttacagagaaactgacatgaaatcacgcagctaatcatgataaagctgggtggaaaacttatcttgatgggcagtacaggaagatgcagtagaccttaagatgtcctgaaagtttcttatctcaggggaaactcccaggtaggctttatgtcagggacacagaaaaatgctccctgaaagtcaaaatattcgggctagacagacaaattcctgtaagtgtggtttgtctgggaaccacagatgtcactaatcctggtttgctccagagttctttttgttcactcctaccccccatcaccatttgattgatctccttaccctgtaatttccccttcttgtcgcttacctgcagtatctttcccacccaggcatgccttattctttctaaaggaaagtatgaatggagaggggaaagcttgggaaactgatagatttccttggatgccaaaacacctccatagcctgtctgcccggccctatgtggaaacagcattgagtttcaagtcctttatgcctccacccagggatagccacttggaatccacatggcaattgtgaaacaagcaggaaatgcgtaattgtcagaattttgtggggaaaggactagggaataaggaaaacaaagatcttccttgtgttttagagctgtcagctagaggagcacctgcttgagtctgatgccatctaatggtcccagaagaaactgggttttgaacctagagttccatggactcttaggaattagactactactactactaagcattcactggtgcttactatgtgctattgctgtgccaagtatctgaaacctgtcttcttaccttatttttcaagataattctatgtggcaggtattactatctcaattctaagagtgagaaaatggagttttagaaacatttactaacttgcctgggtcacatagctaaggaagaggtggacttgcccagctttgcataaaactcctcaaaagagttgcctatactccctgactccacttatcttcctactatcctctttttaaaatatattatttatttatttaaataagcaatatatgaatgtggtttgaaattcaaaagacacaaagaagtatacagaggaaagcctcactctcaatccttctcaaggtttgctaattcctcttgcataggcaatccgttcttccagctttgtgtttatctttccagagaagtttactgtgtattaagcaaatatgtatatctttattcttgctcagtattttcgcaaacagcagctgtctaagttcactgttctgaactttattttttaaattaaaaatatatggctatgtagtattcta

SEQ ID NO: 32435 - DNA, 2497 bp, Homo sapiens
  source 1..2497: mol_type = unassigned DNA
gaggttgggagagacggagcggacctcagcgctgaagcagaagcccccggagctgcggtctccccgccgcggctgagccatgcggctccctgacctgagaccctggacctccctgctgctggtggacgcggctttactgtggctgcttcagggccctctggggactttgcttcctcaagggctgccaggactatggctggaggggaccctgcggctgggagggctgtgggggctgctaaagctaagagggctgctgggatttgtggggacactgctgctcccgctctgtctggccacccccctgactgtctccctgagagccctggtcgcgggggcctcacgtgctcccccagccagagtcgcttcagccccttggagctggctgctggtggggtacggggctgcggggctcagctggtcactgtgggctgttctgagccctcctggagcccaggagaaggagcaggaccaggtgaacaacaaagtcttgatgtggaggctgctgaagctctccaggccggacctgcctctcctcgttgccgccttcttcttccttgtccttgctgttttgggtgagacattaatccctcactattctggtcgtgtgattgacatcctgggaggtgattttgacccccatgcctttgccagtgccatcttcttcatgtgcctcttctcctttggcagctcactgtctgcaggctgccgaggaggctgcttcacctacaccatgtctcgaatcaacttgcggatccgggagcagcttttctcctccctgctgcgccaggacctcggtttcttccaggagactaagacaggggagctgaactcacggctgagctcggataccaccctgatgagtaactggcttcctttaaatgccaatgtgctcttgcgaagcctggtgaaagtggtggggctgtatggcttcatgctcagcatatcgcctcgactcaccctcctttctctgctgcacatgcccttcacaatagcagcggagaaggtgtacaacacccgccatcaggaagtgcttcgggagatccaggatgcagtggccagggcggggcaggtggtgcgggaagccgttggagggctgcagaccgttcgcagttttggggccgaggagcatgaagtctgtcgctataaagaggcccttgaacaatgtcggcagctgtattggcggagagacctggaacgcgccttgtacctgctcgtaaggagggtgctgcacttgggggtgcagatgctgatgctgagctgtgggctgcagcagatgcaggatggggagctcacccagggcagcctgctttcctttatgatctaccaggagagcgtggggagctatgtgcagaccctggtatacatatatggggatatgctcagcaacgtgggagctgcagagaaggttttctcctacatggaccgacagccaaatctgccttcacctggcacgcttgcccccaccactctgcagggggttgtgaaattccaagacgtctcctttgcatatcccaatcgccctgacaggcctgtgctcaaggggctgacgtttaccctacgtcctggtgaggtgacggcgctggtgggacccaatgggtctgggaagagcacagtggctgccctgctgcagaatctgtaccagcccacagggggacaggtgctgctggatgaaaagcccatctcacagtatgaacactgctacctgcacagccaggtggtttcagttgggcaggagcctgtgctgttctccggttctgtgaggaacaacattgcttatgggctgcagagctgcgaagatgataaggtgatggcggctgcccaggctgcccacgcagatgacttcatccaggaaatggagcatggaatatacacagatgtaggggagaaggggagccagctggctgcgggacagaaacaacgtctggccattgcccgggcccttgtacgagacccgcgggtcctcatcctggatgaggctactagtgccctagatgtgcagtgcgagcaggccaaaaccctttggaagttcatgatattttgaatttcaatggatatttcctgggaataatgagttcaaatgaacgaatatgtggaacaaagcatcaccaacatttattttttcaggatgaggtgatggacaaaaccatcacagggaaattgaggcaaatagtacatgtaaaacaatacttcgggtgagtccacctatcccaaagtcgtatcaaagaagtggctgcagattggagcccaaagcctttggttcctcagtttccaaatggattctcactaggtgggatcatgagtttgctttggacaccccaaattctaactatttcttttgtttcttacatcctttccctcttccccagccccttcccctcatgttacacctcttgctggtttgagacgtcaatcaccactgagaaagaattaaaccagtattttgagctggcaaaattcttagcctagtacaattccttcaattaaactgtagctcaac

SEQ ID NO: 32436 - DNA, 2497 bp, Homo sapiens; identical to SEQ ID NO: 32435
  source 1..2497: mol_type = unassigned DNA

SEQ ID NO: 32437 - DNA, 5684 bp, Homo sapiens
  source 1..5684: mol_type = unassigned DNA
gagccctgacgcccgccctggccgagcgtagctggcggaccagagccggtagcgaggttgggagagacggagcggacctcagcgctgaagcagaagtccccggagctgcggtctccccgccgcggctgagccatgcggctccctgacctgagaccctggacctccctgctgctggtggacgcggctttactgtggctgcttcagggccctctggggactttgcttcctcaagggctgccaggactatggctggaggggaccctgcggctgggagggctgtgggggctgctaaagctaagagggctgctgggatttgtggggacactgctgctcccgctctgtctggccacccccctgactgtctccctgagagccctggtcgcgggggcctcacgtgctcccccagccagagtcgcttcagccccttggagctggctgctggtggggtacggggctgcggggctcagctggtcactgtgggctgttctgagccctcctggagcccaggagaaggagcaggaccaggtgaacaacaaagtcttgatgtggaggctgctgaagctctccaggccggacctgcctctcctcgttgccgccttcttcttccttgtccttgctgttttgggtgagacattaatccctcactattctggtcgtgtgattgacatcctgggaggtgattttgacccccatgcctttgccagtgccatcttcttcatgtgcctcttctcctttggcagctcactgtctgcaggctgccgaggaggctgcttcacctacaccatgtctcgaatcaacttgcggatccgggagcagcttttctcctccctgctgcgccaggacctcggtttcttccaggagactaagacaggggagctgaactcacggctgagctcggataccaccctgatgagtaactggcttcctttaaatgccaatgtgctcttgcgaagcctggtgaaagtggtggggctgtatggcttcatgctcagcatatcgcctcgactcaccctcctttctctgctgcacatgcccttcacaatagcagcggagaaggtgtacaacacccgccatcaggaagtgcttcgggagatccaggatgcagtggccagggcggggcaggtggtgcgggaagccgttggagggctgcagaccgttcgcagttttggggccgaggagcatgaagtctgtcgctataaagaggcccttgaacaatgtcggcagctgtattggcggagagacctggaacgcgccttgtacctgctcgtaaggagggtgctgcacttgggggtgcagatgctgatgctgagctgtgggctgcagcagatgcaggatggggagctcacccagggcagcctgctttcctttatgatctaccaggagagcgtggggagctatgtgcagaccctggtatacatatatggggatatgctcagcaatgtgggagctgcagagaaggttttctcctacatggaccgacagccaaatctgccttcacctggcacgcttgcccccaccactctgcagggggttgtgaaattccaagacgtctcctttgcatatcccaatcgccctgacaggcctgtgctcaaggggctgacgtttaccctacgtcctggtgaggtgacggcgctggtgggacccaatgggtctgggaagagcacagtggctgccctgctgcagaatctgtaccagcccacagggggacaggtgctgctggatgaaaagcccatctcacagtatgaacactgctacctgcacagccaggtggtttcagttgggcaggagcctgtgctgttctccggttctgtgaggaacaacattgcttatgggctgcagagctgcgaagatgataaggtgatggcggctgcccaggctgcccacgcagatgacttcatccaggaaatggagcatggaatatacacagatgtaggggagaagggaagccagctggctgcgggacagaaacaacgtctggccattgcccgggcccttgtacgagacccgcgggtcctcatcctggatgaggctactagtgccctagatgtgcagtgcgagcaggccctgcaggactggaattcccgtggggatcgcacagtgctggtgattgctcacaggctgcagacagttcagcgcgcccaccagatcctggtgctccaggagggcaagctgcagaagcttgcccagctctaggagggacaggacctctattcccgcctggtgcagcagcggctgatggactgaggccccagggatactgggccctcttctcaggggcgtctccaggacccagagctgttcctgctttgagtttccctagagctgtgcggccagatagctgttcctgagttgcaggcacgatggagatttggacactgtgtgcttttggtggggtagagaggtggggtggggtggggtgggggctgtctgtgtccaggaaacttaattccctggtgactagagctttgcctggtgatgaggagtattttgtggcataatacatatattttaaaatattttccttcttacatgaactgtatacattcatatagaaaatttagacaatataaaaaagtacaaagaagaaaagtaaaagtacccattgtttcacttcctggagataaccatagttgctattttgctgcctgtcccatcagtcgtttatctgttgtttgagatagaaattaaccaaaaatgacataaatattcatgagattgccttcctatatccttccttgttcctaccagtgtctgctattttgaagaagctagggtctggagggacagagaacagttccctgattaacagtattaatagcgacattggtaacagctaccatttatagagttttaatgggagtaggagctatgctaagtgtttttcatgtattatcgtttttaatcattatccccaaccctatgaggttggttattatccccattttacagatgaggaaactgaagctcaaagaggctcaatgactttcccaaggtggtcgtagtggtggagttggagtttgaacacaggcctgaccctagagtccacaccctgacccaatcaattatattgcatcttgggtccataaaccctaatccataatcccatcaagaaaagctctgctgctcttagctctaaataattcagaatctattctcttctctccagtcccgttgttatagtcttcactcatagacttaagatgatcccatcaccagagaggtttctctaccattagcttccctcttccggccattcttcacaaagtcatttttctaaattctgtgtcacatacgatgatggcatttctggaaattccttcaggtgctctcaagccctgctgcagagatccttttcagagcacacactgttccagcccatctgtctcaccctctcctgttgtatccagctccacgacaaacttctgccttccccaacacctttgtgcctttgcatatggtgttttcttgcccattttctgctcgactcgcccctgattttcaagttcaagacttaactcagggttcaggtcttccaggaggccttacttatgtcgtcagtctggggaactctccatgtgcttctatcactgtgcggttacctctttcacagcccttttaaagttctatcttccctttcccaccttttttgaccttccactagaccatgagcacctgggcggaaagccatatatcttattaagctttatatctgctacctggccgagggcctaattcatagtggagaataaatagtcaattgaataaatgaataaatatctccaccatcgtactaatcttaatcctccctgcccactcccaccactgaaaatgcaacattgtacacatcactggttgttgggagggacttaccttggaaagttgctattctaggaaagagaaaccttcatattcctggaaacagcaggtagtttccagtgctggcaatgaattccccagaactgctgttttggattttttcttgcctggcagctgttgggagcagggtgcagtgaggatggggtgagagtgggcagtttcttgtgcagatttgcctttctttcatcctggggctgacttgcagctccacacccatccatctctcaaatttcacagagggtaaaataggcatttggagagaaagaactctggcctgattcctttctctcccacaaatgtcctttattcataaaacaggaataataattcctgtatctcccaactacatggaagctgcagccctcacagaagaagatgatctgagaaattctttgatttcctcagtacagttatacccatgcatcataatactttaagcctggaaggcatcttaaaaataatgcaacagtcaaacctaattttacagagaaactgacatgaaatcacgcagctaatcatgataaagctgggtggaaaacttatcttgatgggcagtacaggaagatgcagtagaccttaagatgtcctgaaagtttcttatctcaggggaaactcccaggtaggctttatgtcagggacacagaaaaatgctccctgaaagtcaaaatattcgggctagacagacaaattcctgtaagtgtggtttgtctgggaaccacagatgtcactaatcctggtttgctccagagttctttttgttcactcctaccccccatcaccatttgattgatctccttaccctgtaatttccccttcttgtcgcttacctgcagtatctttcccacccaggcatgccttattctttctaaaggaaagtatgaatggagaggggaaagcttgggaaactgatagatttccttggatgccaaaacacctccatagcctgtctgcccggccctatgtggaaacagcattgagtttcaagtcctttatgcctccacccagggatagccacttggaatccacatggcaattgtgaaacaagcaggaaatgcgtaattgtcagaattttgtggggaaaggactagggaataaggaaaacaaagatcttccttgtgttttagagctgtcagctagaggagcacctgcttgagtctgatgccatctaatggtcccagaagaaactgggttttgaacctagagttccatggactcttaggaattagactactactactactaagcattcactggtgcttactatgtgctattgctgtgccaagtatctgaaacctgtcttcttaccttatttttcaagataattctatgtggcaggtattactatctcaattctaagagtgagaaaatggagttttagaaacatttactaacttgcctgggtcacatagctaaggaagaggtggacttgcccagctttgcataaaactcctcaaaagagttgcctatactccctgactccacttatcttcctactatcctctttttaaaatatattatttatttatttaaataagcaatatatgaatgtggtttgaaattcaaaagacacaaagaagtatacagaggaaagcctcactctcaatccttctcaaggtttgctaattcctcttgcataggcaatccgttcttccagctttgtgtttatctttccagagaagtttactgtgtattaagcaaatatgtatatctttattcttgctcagtattttcgcaaacagcagctgtctaagttcactgttctgaactttattttttaaattaaaaatatatggctatgtagtattcta

SEQ ID NO: 32438 - DNA, 2497 bp, Homo sapiens
  source 1..2497: mol_type = unassigned DNA
gaggttgggagagacggagcggacctcagcgctgaagcagaagcccccggagctgcggtctccccgccgcggctgagccatgcggctccctgacctgagaccctggacctccctgctgctggtggacgcggctttactgtggctgcttcagggccctctggggactttgcttcctcaagggctgccaggactatggctggaggggaccctgcggctgggagggctgtgggggctgctaaagctaagagggctgctgggatttgtggggacactgctgctcccgctctgtctggccacccccctgactgtctccctgagagccctggtcgcgggggcctcacgtgctcccccagccagagtcgcttcagccccttggagctggctgctggtggggtacggggctgcggggctcagctggtcactgtgggctgttctgagccctcctggagcccaggagaaggagcaggaccaggtgaacaacaaagtcttgatgtggaggctgctgaagctctccaggccggacctgcctctcctcgttgccgccttcttcttccttgtccttgctgttttgggtgagacattaatccctcactattctggtcgtgtgattgacatcctgggaggtgattttgacccccatgcctttgccagtgccatcttcttcatgtgcctcttctcctttggcagctcactgtctgcaggctgccgaggaggctgcttcacctacaccatgtctcgaatcaacttgcggatccgggagcagcttttctcctccctgctgcgccaggacctcggtttcttccaggagactaagacaggggagctgaactcacggctgagctcggataccaccctgatgagtaactggcttcctttaaatgccaatgtgctcttgcgaagcctggtgaaagtggtggggctgtatggcttcatgctcagcatatcgcctcgactcaccctcctttctctgctgcacatgcccttcacaatagcagcggagaaggtgtacaacacccgccatcaggaagtgcttcgggagatccaggatgcagtggccagggcggggcaggtggtgcgggaagccgttggagggctgcagaccgttcgcagttttggggccgaggagcatgaagtctgtcgctataaagaggcccttgaacaatgtcggcagctgtattggcggagagacctggaacgcgccttgtacctgctcataaggagggtgctgcacttgggggtgcagatgctgatgctgagctgtgggctgcagcagatgcaggatggggagctcacccagggcagcctgctttcctttatgatctaccaggagagcgtggggagctatgtgcagaccctggtatacatatatggggatatgctcagcaacgtgggagctgcagagaaggttttctcctacatggaccgacagccaaatctgccttcacctggcacgcttgcccccaccactctgcagggggttgtgaaattccaagacgtctcctttgcatatcccaatcgccctgacaggcctgtgctcaaggggctgacgtttaccctacgtcctggtgaggtgacggcgctggtgggacccaatgggtctgggaagagcacagtggctgccctgctgcagaatctgtaccagcccacagggggacaggtgctgctggatgaaaagcccatctcacagtatgaacactgctacctgcacagccaggtggtttcagttgggcaggagcctgtgctgttctccggttctgtgaggaacaacattacttatgggctgcagagctgcgaagatgataaggtgatggcggctgcccaggctgcccacgcagatgacttcatccaggaaatggagcatggaatatacacagatgtaggggagaagggaagccagctggctgcgggacagaaacaacgtctggccattgcccgggcccttgtacgagacccgcgggtcctcatcctggatgaggctactagtgccctagatgtgcagtgcgagcaggccaaaaccctttggaagttcatgatattttgaatttcaatggatatttcctgggaataatgagttcaaatgaacgaatatgtggaacaaagcatcaccaacatttattttttcaggatgaggtgatggacaaaaccatcacagggaaattgaggcaaatagtacatgtaaaacaatacttcgggtgagtccacctatcccaaagtcgtatcaaagaagtggctgcagattggagcccaaagcctttggttcctcagtttccaaatggattctcactaggtgggatcatgagtttgctttggacaccccaaattctaactatttcttttgtttcttacatcctttccctcttccccagccccttcccctcatgttacacctcttgctggtttgagacgtcaatcaccactgagaaagaattaaaccagtattttgagctggcaaaattcttagcctagtacaattccttcaattaaactgtagctcaac

SEQ ID NO: 32439 - DNA, 2497 bp, Homo sapiens; identical to SEQ ID NO: 32435
  source 1..2497: mol_type = unassigned DNA

SEQ ID NO: 32440 - DNA, 5511 bp, Homo sapiens
  source 1..5511: mol_type = unassigned DNA
gagccctgacgcccgccctggccgagcgtagctggcggaccagagccggtagcgaggttgggagagacggagcggacctcagcgctgaagcagaagcccccggagctgcggtctccccgccgcggctgagccatgcggctccctgacctgagaccctggacctccctgctgctggtggacgcggctttactgtggctgcttcagggccctctggggactttgcttcctcaagggctgccaggactatggctggaggggaccctgcggctgggagggctgtgggggctgctaaagctaagagggctgctgggatttgtggggacactgctgctcccgctctgtctggccacccccctgactgtctccctgagagccctggtcgcgggggcctcacgtgctcccccagccagagtcgcttcagccccttggagctggctgctggtggggtacggggctgcggggctcagctggtcactgtgggctgttctgagccctcctggagcccaggagaaggagcaggaccaggtgaacaacaaagtcttgatgtggaggctgctgaagctctccaggccggacctgcctctcctcgttgccgccttcttcttccttgtccttgctgttttgggtgagacattaatccctcactattctggtcgtgtgattgacatcctgggaggtgattttgacccccatgcctttgccagtgccatcttcttcatgtgcctcttctcctttggcagctcactgtctgcaggctgccgaggaggctgcttcacctacaccatgtctcgaatcaacttgcggatccgggagcagcttttctcctccctgctgcgccaggacctcggtttcttccaggagactaagacaggggagctgaactcacggctgagctcggataccaccctgatgagtaactggcttcctttaaatgccaatgtgctcttgcgaagcctggtgaaagtggtggggctgtatggcttcatgctcagcatatcgcctcgactcaccctcctttctctgctgcacatgcccttcacaatagcagcggagaaggtgtacaacacccgccatcaggaagtgcttcgggagatccaggatgcagtggccagggcggggcaggtggtgcgggaagccgttggagggctgcagaccgttcgcagttttggggccgaggagcatgaagtctgtcgctataaagaggcccttgaacaatgtcggcagctgtattggcggagagacctggaacgcgccttgtacctgctcgtaaggagggtgctgcacttgggggtgcagatgctgatgctgagctgtgggctgcagcagatgcaggatggggagctcacccagggcagcctgctttcctttatgatctaccaggagagcgtggggagctatgtgcagaccctggtatacatatatggggatatgctcagcaacgtgggagctgcagagaaggttttctcctacatggaccgacagccaaatctgccttcacctggcacgcttgcccccaccactctgcagggggttgtgaaattccaagacgtctcctttgcatatcccaatcgccctgacaggcctgtgctcaaggggctgacgtttaccctacgtcctggtgaggtgacggcgctggtgggacccaatgggtctgggaagagcacagtggctgccctgctgcagaatctgtaccagcccacagggggacaggtgctgctggatgaaaagcccatctcacagtatgaacactgctacctgcacagccaggtggtttcagttgggcaggagcctgtgctgttctccggttctgtgaggaacaacattgcttatgggctgcagagctgcgaagatgataaggtgatggcggctgcccaggctgcccacgcagatgacttcatccaggaaatggagcatggaatatacacagatgtaggggagaaggggagccagctggctgcgggacagaaacaacgtctggccattgcccgggcccttgtacgagacccgcgggtcctcatcctggatgaggctactagtgccctagatgtgcagtgcgagcaggccctgcaggactggaattcccgtggggatcgcacagtgctggtgattgctcacaggctgcaggcagttcagcgcgcccaccagatcctggtgctccaggagggcaagctgcagaagcttgcccagctccaggagggacaggacctctattcccgcctggttcagcagcggctgatggactgaggccccagggatactgggccctcttctcaggggcgtctccaggacccagagctgttcctgctttgagtttccctagagctgtgcggccagatagctgttcctgagttgcaagcacgatggagatttggacactgtgtgcttttggtggggtggagaggtggggtggggtggggtgtggtggggtggaggctgtctgtgtccaggaaacttaattccctggtgactagagctttgcctggtgatgaggagtattttgtggcataatacatatattttaaaatattttccttcttacgtgaactgtatacattcatatagaaaatttagacaatataaaaaagtacaaagaagaaaagtaaaagtacccattgtttcacttcctggagataaccatagttgctattttgctgcctgttccatcagtcgtttatctgttgtttgagatagaaattaaccaaaaatgacataaatattcatgagattgccttcctatatccctccttgttcctaccagtgtctgctattttgaagaagctagggtctggagggacagagaacagttccctgattaacagtattaataatgacattggtaacagctaccatttatagagttttaatgtgagtaggagctatgctaagtgtttttcatgtattatcgtttttaatcattatctccaaccctatgaggttggttattatccccattttacagatgaggaaactgaagctcaaagaggctcaatgactttcccaaggtggtcgtagtggtggagttggagtttgaacacaggcctgaccctagagtccacaccctgacccaatcaattatattgcatcttgggtccataaaccctaatccataatcccatcaagaaaagctctgctgctcttagctctaaataattcagaatctattctcttctctccagtcccgttgttatagtcttcactcatagacagcccatctgtctcaccctctcctgttgtatccagctccacgacaaacttctgccttccccaacacctttgtgcctttgcatatggtgttttcttgcccattttctgctcgactcgcccctgattttcaagttcaagacttaactcagggttcaggtcttccaggaggccttacttatgtcgtcagtctggggaactctccatgtgcttctatcactgtgcggttacctctttcacagcccttttaaagttctatcttccctttcccaccttttttgaccttccactagaccatgagcacctgggcggaaagccatatatcttattaagctttatatctgctacctggccgagggcctaattcatagtggagaataaatagtcaattgaataaatgaataaatatctccaccatcgtactaatcttaatcctccctgcccactcccaccactgaaaatgcaacattgtacacatcactggttgttgggagggacttaccttggaaagttgctattctaggaaagagaaaccttcatattcctggaaacagcaggtagtttccagtgctggcaatgaattccccagaactgctgttttggattttttcttgcctggcagctgttgggagcagggtgcagtgaggatggggtgagagtgggcagtttcttgtgcagatttgcctttctttcatcctggggctgacttgcagctccacacccatccatctctcaaatttcacagagggtaaaataggcatttggagagaaagaactctggcctgattcctttctctcccacaaatgtcctttattcataaaacaggaatagtaattcctgtatctcccaactacatggaagctgcagccctcacagaagaagatgatctgagaaattctttgatttcctcagtacagttatacccatgcatcataatactttaagcctggaaggcatcttaaaaataatgcaacagtcaaacctaattttacagagaaactgacatgaaatcacgcagctaatcatgataaagctgggtggaaaacttatcttgatgggcagtacaggaagatgcagtagaccttaagatgtcctgaaagtttcttatctcaggggaaactcccaggtaggctttatgtcagggacacagaaaaatgctccctgaaagtcaaaatattcgggctagacagacaaattcctgtaagtgtggtttgtctgggaaccacagatgtcactaatcctggtttgctccagagttctttttgttcactcctaccccccatcaccatttgattgatctccttaccctgtaatttccccttcttgtcgcttacctgcagtatctttcccacccaggcatgccttattctttctaaaggaaagtatgaatggagaggggaaagcttgggaaactgatagatttccttggatgccaaaacacctccatagcctgtctgcccggccctatgtggaaacagcattgagtttcaagtcctttatgcctccacccagggatagccacttggaatccacatggcaattgtgaaacaagcaggaaatgcgtaattgtcagaattttgtggggaaaggactagggaataaggaaaacaaagatcttccttgtgttttagagctgtcagctagaggagcacctgcttgagtctgatgccatctaatggtcccagaagaaactgggttttgaacctagagttccatggactcttaggaattagactactactactactaagcattcactggtgcttactatgtgctattgctgtgccaagtatctgaaacctgtcttcttaccttatttttcaagataattctatgtggcaggtattactatctcaattctaagagtgagaaaatggagttttagaaacatttactaacttgcctgggtcacatagctaaggaagaggtggacttgcccagctttgcataaaactcctcaaaagagttgcctatactccctgattccacttatcttcctactatcctctttttaaaatatattatttatttatttaaataagcaatatatgaatgtggtttgaaattcaaaagacacaaagaagtatacagaggaaagcctcactctcaatccttctcaaggtttgctaattcctcttgcataggcaatccgttcttccagctttgtgtttatctttccagagaagtttactgtgtattaagcaaatatgtatatctttattcttgctcagtattttcgcaaacagcagctgtctaagttcactgttctgaactttattttttaaattaaaaatatatggctatgtagt

SEQ ID NO: 32441 - DNA, 5511 bp, Homo sapiens; identical to SEQ ID NO: 32440
  source 1..5511: mol_type = unassigned DNA

SEQ ID NO: 32442 - DNA, 5517 bp, Homo sapiens
  source 1..5517: mol_type = unassigned DNA
gagccctgacgcccgccctggccgagcgtagctggcggaccagagccggtagcgaggttgggagagacggagcggacctcagcgctgaagcagaagcccccggagctgcggtctccccgccgcggctgagccatgcggctccctgacctgagaccctggacctccctgctgctggtggacgcggctttactgtggctgcttcagggccctctggggactttgcttcctcaagggctgccaggactatggctggaggggaccctgcggctgggagggctgtgggggctgctaaagctaagagggctgctgggatttgtggggacactgctgctcccgctctgtctggccacccccctgactgtctccctgagagccctggtcgcgggggcctcacgtgctcccccagccagagtcgcttcagccccttggagctggctgctggtggggtacggggctgcggggctcagctggtcactgtgggctgttctgagccctcctggagcccaggagaaggagcaggaccaggtgaacaacaaagtcttgatgtggaggctgctgaagctctccaggccggacctgcctctcctcgttgccgccttcttcttccttgtccttgctgttttgggtgagacattaatccctcactattctggtcgtgtgattgacatcctgggaggtgattttgacccccatgcctttgccagtgccatcttcttcatgtgcctcttctcctttggcagctcactgtctgcaggctgccgaggaggctgcttcacctacaccatgtctcgaatcaacttgcggatccgggagcagcttttctcctccctgctgcgccaggacctcggtttcttccaggagactaagacaggggagctgaactcacggctgagctcggataccaccctgatgagtaactggcttcctttaaatgccaatgtgctcttgcgaagcctggtgaaagtggtggggctgtatggcttcatgctcagcatatcgcctcgactcaccctcctttctctgctgcacatgcccttcacaatagcagcggagaaggtgtacaacacccgccatcaggaagtgcttcgggagatccaggatgcagtggccagggcggggcaggtggtgcgggaagccgttggagggctgcagaccgttcgcagttttggggccgaggagcatgaagtctgtcgctataaagaggcccttgaacaatgtcggcagctgtattggcggagagacctggaacgcgccttgtacctgctcgtaaggagggtgctgcacttgggggtgcagatgctgatgctgagctgtgggctgcagcagatgcaggatggggagctcacccagggcagcctgctttcctttatgatctaccaggagagcgtggggagctatgtgcagaccctggtatacatatatggggatatgctcagcaacgtgggagctgcagagaaggttttctcctacatggaccgacagccaaatctgccttcacctggcacgcttgcccccaccactctgcagggggttgtgaaattccaagacgtctcctttgcatatcccaatcgccctgacaggcctgtgctcaaggggctgacgtttaccctacgtcctggtgaggtgacggcgctggtgggacccaatgggtctgggaagagcacagtggctgccctgctgcagaatctgtaccagcccacagggggacaggtgctgctggatgaaaagcccatctcacagtatgaacactgctacctgcacagccaggtggtttcagttgggcaggagcctgtgctgttctccggttctgtgaggaacaacattgcttatgggctgcagagctgcgaagatgataaggtgatggcggctgcccaggctgcccacgcagatgacttcatccaggaaatggagcatggaatatacacagatgtaggggagaaggggagccagctggctgcgggacagaaacaacgtctggccattgcccgggcccttgtacgagacccgcgggtcctcatcctggatgaggctactagtgccctagatgtgcagtgcgagcaggccctgcaggactggaattcccgtggggatcgcacagtgctggtgattgctcacaggctgcaggcagttcagcgcgcccaccagatcctggtgctccaggagggcaagctgcagaagcttgcccagctccaggagggacaggacctctattcccgcctggttcagcagcggctgatggactgaggccccagggatactgggccctcttctcaggggcgtctccaggacccagagctgttcctgctttgagtttccctagagctgtgcggccagatagctgttcctgagttgcaagcacgatggagatttggacactgtgtgcttttggtggggtggagaggtggggtggggtggggtgtggtggggtggaggctgtctgtgtccaggaaacttaattccctggtgactagagctttgcctggtgatgaggagtattttgtggcataatacatatattttaaaatattttccttcttacgtgaactgtatacattcatatagaaaatttagacaatataaaaaagtacaaagaagaaaagtaaaagtacccattgtttcacttcctggagataaccatagttgctattttgctgcctgttccatcagtcgtttatctgttgtttgagatagaaattaaccaaaaatgacataaatattcatgagattgccttcctatatccctccttgttcctaccagtgtctgctattttgaagaagctagggtctggagggacagagaacagttccctgattaacagtattaataatgacattggtaacagctaccatttatagagttttaatgtgagtaggagctatgctaagtgtttttcatgtattatcgtttttaatcattatctccaaccctatgaggttggttattatccccattttacagatgaggaaactgaagctcaaagaggctcaatgactttcccaaggtggtcgtagtggtggagttggagtttgaacacaggcctgaccctagagtccacaccctgacccaatcaattatattgcatcttgggtccataaaccctaatccataatcccatcaagaaaagctctgctgctcttagctctaaataattcagaatctattctcttctctccagtcccgttgttatagtcttcactcatagacagcccatctgtctcaccctctcctgttgtatccagctccacgacaaacttctgccttccccaacacctttgtgcctttgcatatggtgttttcttgcccattttctgctcgactcgcccctgattttcaagttcaagacttaactcagggttcaggtcttccaggaggccttacttatgtcgtcagtctggggaactctccatgtgcttctatcactgtgcggttacctctttcacagcccttttaaagttctatcttccctttcccaccttttttgaccttccactagaccatgagcacctgggcggaaagccatatatcttattaagctttatatctgctacctggccgagggcctaattcatagtggagaataaatagtcaattgaataaatgaataaatatctccaccatcgtactaatcttaatcctccctgcccactcccaccactgaaaatgcaacattgtacacatcactggttgttgggagggacttaccttggaaagttgctattctaggaaagagaaaccttcatattcctggaaacagcaggtagtttccagtgctggcaatgaattccccagaactgctgttttggattttttcttgcctggcagctgttgggagcagggtgcagtgaggatggggtgagagtgggcagtttcttgtgcagatttgcctttctttcatcctggggctgacttgcagctccacacccatccatctctcaaatttcacagagggtaaaataggcatttggagagaaagaactctggcctgattcctttctctcccacaaatgtcctttattcataaaacaggaatagtaattcctgtatctcccaactacatggaagctgcagccctcacagaagaagatgatctgagaaattctttgatttcctcagtacagttatacccatgcatcataatactttaagcctggaaggcatcttaaaaataatgcaacagtcaaacctaattttacagagaaactgacatgaaatcacgcagctaatcatgataaagctgggtggaaaacttatcttgatgggcagtacaggaagatgcagtagaccttaagatgtcctgaaagtttcttatctcaggggaaactcccaggtaggctttatgtcagggacacagaaaaatgctccctgaaagtcaaaatattcgggctagacagacaaattcctgtaagtgtggtttgtctgggaaccacagatgtcactaatcctggtttgctccagagttctttttgttcactcctaccccccatcaccatttgattgatctccttaccctgtaatttccccttcttgtcgcttacctgcagtatctttcccacccaggcatgccttattctttctaaaggaaagtatgaatggagaggggaaagcttgggaaactgatagatttccttggatgccaaaacacctccatagcctgtctgcccggccctatgtggaaacagcattgagtttcaagtcctttatgcctccacccagggatagccacttggaatccacatggcaattgtgaaacaagcaggaaatgcgtaattgtcagaattttgtggggaaaggactagggaataaggaaaacaaagatcttccttgtgttttagagctgtcagctagaggagcacctgcttgagtctgatgccatctaatggtcccagaagaaactgggttttgaacctagagttccatggactcttaggaattagactactactactactaagcattcactggtgcttactatgtgctattgctgtgccaagtatctgaaacctgtcttcttaccttatttttcaagataattctatgtggcaggtattactatctcaattctaagagtgagaaaatggagttttagaaacatttactaacttgcctgggtcacatagctaaggaagaggtggacttgcccagctttgcataaaactcctcaaaagagttgcctatactccctgattccacttatcttcctactatcctctttttaaaatatattatttatttatttaaataagcaatatatgaatgtggtttgaaattcaaaagacacaaagaagtatacagaggaaagcctcactctcaatccttctcaaggtttgctaattcctcttgcataggcaatccgttcttccagctttgtgtttatctttccagagaagtttactgtgtattaagcaaatatgtatatctttattcttgctcagtattttcgcaaacagcagctgtctaagttcactgttctgaactttattttttaaattaaaaatatatggctatgtagtattcta

SEQ ID NO: 32443 - DNA, 2705 bp, Homo sapiens
  source 1..2705: mol_type = unassigned DNA
gaatgaaggccttggttggggaaacgaaagcgaaagctgcccgagccctgacgcccgccctggccgagcgtagctggcggaccagagccggtagcgaggttgggagagacggagcggacctcagcgctgaagcagaagcccccggagctgcggtctccccgccgcggctgagccatgcggctccctgacctgagaccctggacctccctgctgctggtggacgcggctttactgtggctgcttcagggccctctggggactttgcttcctcaagggctgccaggactatggctggaggggaccctgcggctgggagggctgtgggggctgctaaagctaagagggctgctgggatttgtggggacactgctgctcccgctctgtctggccacccccctgactgtctccctgagagccctggtcgcgggggcctcacgtgctcccccagccagagtcgcttcagccccttggagctggctgctggtggggtacggggctgcggggctcagctggtcactgtgggctgttctgagccctcctggagcccaggagaaggagcaggaccaggtgaacaacaaagtcttgatgtggaggctgctgaagctctccaggccggacctgcctctcctcgttgccgccttcttcttccttgtccttgctgttttgggtgagacattaatccctcactattctggtcgtgtgattgacatcctgggaggtgattttgacccccatgcctttgccagtgccatcttcttcatgtgcctcttctcctttggcagctcactgtctgcaggctgccgaggaggctgcttcacctacaccatgtctcgaatcaacttgcggatccgggagcagcttttctcctccctgctgcgccaggacctcggtttcttccaggagactaagacaggggagctgaactcacggctgagctcggataccaccctgatgagtaactggcttcctttaaatgccaatgtgctcttgcgaagcctggtgaaagtggtggggctgtatggcttcatgctcagcatatcgcctcgactcaccctcctttctctgctgcacatgcccttcacaatagcagcggagaaggtgtacaacacccgccatcaggaagtgcttcgggagatccaggatgcagtggccagggcggggcaggtggtgcgggaagccgttggagggctgcagaccgttcgcagttttggggccgaggagcatgaagtctgtcgctataaagaggcccttgaacaatgtcggcagctgtattggcggagagacctggaacgcgccttgtacctgctcgtaaggagggtgctgcacttgggggtgcagatgctgatgctgagctgtgggctgcagcagatgcaggatggggagctcacccagggcagcctgctttcctttatgatctaccaggagagcgtggggagctatgtgcagaccctggtatacatatatggggatatgctcagcaacgtgggagctgcagagaaggttttctcctacatggaccgacagccaaatctgccttcacctggcacgcttgcccccaccactctgcagggggttgtgaaattccaagacgtctcctttgcatatcccaatcgccctgacaggcctgtgctcaaggggctgacgtttaccctacgtcctggtgaggtgacggcgctggtgggacccaatgggtctgggaagagcacagtggctgccctgctgcagaatctgtaccagcccacagggggacaggtgctgctggatgaaaagcccatctcacagtatgaacactgctacctgcacagccaggtggtttcagttgggcaggagcctgtgctgttctccggttctgtgaggaacaacattgcttatgggctgcagagctgcgaagatgataaggtgatggcggctgcccaggctgcccacgcagatgacttcatccaggaaatggagcatggaatatacacagatgtaggggagaaggggagccagctggctgcgggacagaaacaacgtctggccattgcccgggcccttgtacgagacccgcgggtcctcatcctggatgaggctactagtgccctagatgtgcagtgcgagcaggccaatgggttctgggtgggtcccctgggtggtggctctgctagtgaatctgacccgactggattcctccatgactcaaggcacagactctccagtgatgtggggatgtttgtggcattgaccaagctggggcagccagatgctgagcagtggaacagccggctggatctcttggagaggagcagacaggccgtggatggggtctgtagacacaactacaggctgggcgcacccttcactgtggggagaaaagtgcaaccagaggtgacagtgtacccagagaggaccccactcctgcaccagcataatctgctgcactgctctgtgacaggcttctatccaggggatatcaagatcaagtggttcctgaatgggcaggaggagagagctggggtcatgtccactggccctatcaggaatggagactggacctttcagactgtggtgatgctagaaatgactcctgaacttggacatgtctacacctgccttgtcgatcactccagcctgctgagccctgtttctgtggagtggagagctcagtctgaatattcttggagaaagatgctgagtggcattgcagccttcctacttgggctaat

SEQ ID NO: 32444 - DNA, 2705 bp, Homo sapiens
  source 1..2705: mol_type = unassigned DNA
gaatgaaggccttggctggggaagcgaaagcgaaagctgcccgagccctgacgcccgccctggccgagcgtagctggcggaccagagccggtagcgaggttgggagagacggagcggacctcagcgctgaagcagaagtccccggagctgcggtctccccgccgcggctgagccatgcggctccctgacctgagaccctggacctccctgctgctggtggacgcggctttactgtggctgcttcagggccctctggggactttgcttcctcaagggctgccaggactatggctggaggggaccctgcggctgggagggctgtgggggctgctaaagctaagagggctgctgggatttgtggggacactgctgctcccgctctgtctggccacccccctgactgtctccctgagagccctggtcgcgggggcctcacgtgctcccccagccagagtcgcttcagccccttggagctggctgctggtggggtacggggctgcggggctcagctggtcactgtgggctgttctgagccctcctggagcccaggagaaggagcaggaccaggtgaacaacaaagtcttgatgtggaggctgctgaagctctccaggccggacctgcctctcctcgttgccgccttcttcttccttgtccttgctgttttgggtgagacattaatccctcactattctggtcgtgtgattgacatcctgggaggtgattttgacccccatgcctttgccagtgccatcttcttcatgtgcctcttctcctttggcagctcactgtctgcaggctgccgaggaggctgcttcacctacaccatgtctcgaatcaacttgcggatccgggagcagcttttctcctccctgctgcgccaggacctcggtttcttccaggagactaagacaggggagctgaactcacggctgagctcggataccaccctgatgagtaactggcttcctttaaatgccaatgtgctcttgcgaagcctggtgaaagtggtggggctgtatggcttcatgctcagcatatcgcctcgactcaccctcctttctctgctgcacatgcccttcacaatagcagcggagaaggtgtacaacacccgccatcaggaagtgcttcgggagatccaggatgcagtggccagggcggggcaggtggtgcgggaagccgttggagggctgcagaccgttcgcagttttggggccgaggagcatgaagtctgtcgctataaagaggcccttgaacaatgtcggcagctgtattggcggagagacctggaacgcgccttgtacctgctcgtaaggagggtgctgcacttgggggtgcagatgctgatgctgagctgtgggctgcagcagatgcaggatggggagctcacccagggcagcctgctttcctttatgatctaccaggagagcgtggggagctatgtgcagaccctggtatacatatatggggatatgctcagcaatgtgggagctgcagagaaggttttctcctacatggaccgacagccaaatctgccttcacctggcacgcttgcccccaccactctgcagggggttgtgaaattccaagacgtctcctttgcatatcccaatcgccctgacaggcctgtgctcaaggggctgacgtttaccctacgtcctggtgaggtgacggcgctggtgggacccaatgggtctgggaagagcacagtggctgccctgctgcagaatctgtaccagcccacagggggacaggtgctgctggatgaaaagcccatctcacagtatgaacactgctacctgcacagccaggtggtttcagttgggcaggagcctgtgctgttctccggttctgtgaggaacaacattgcttatgggctgcagagctgcgaagatgataaggtgatggcggctgcccaggctgcccacgcagatgacttcatccaggaaatggagcatggaatatacacagatgtaggggagaagggaagccagctggctgcgggacagaaacaacgtctggccattgcccgggcccttgtacgagacccgcgggtcctcatcctggatgaggctactagtgccctagatgtgcagtgcgagcaggccaatgggttctgggtgggtcccctgggtggtggctctgctagtgaatctgacccgactggattcctccatgactcaaggcacagactctccagtgatgtggggatgtttgtggcattgaccaagctggggcagccagatgctgagcagtggaacagccggctggatctcttggagaggagcagacaggccgtggatggggtctgtagacacaactacaggctgggcgcacccttcactgtggggagaaaagtgcaaccagaggtgacagtgtacccagagaggaccccactcctgcaccagcataatctgctgcactgctctgtgacaggcttctatccaggggatatcaagatcaagtggttcctgaatgggcaggaggagagagctggggtcatgtccactggccctatcaggaatggagactggacctttcagactgtggtgatgctagaaatgactcctgaacttggacatgtctacacctgccttgtcgatcactccagcctgctgagccctgtttctgtggagtggagagctcagtctgaatattcttggagaaagatgctgagtggcattgcagccttcctacttgggctaat

SEQ ID NO: 32445 - DNA, 2705 bp, Homo sapiens; identical to SEQ ID NO: 32443
  source 1..2705: mol_type = unassigned DNA

SEQ ID NO: 32446 - DNA, 2705 bp, Homo sapiens
  source 1..2705: mol_type = unassigned DNA
gaatgaaggccttggttggggaaacgaaagcgaaagctgcccgagccctgacgcccgccctggccgagcgtagctggcggaccagagccggtagcgaggttgggagagacggagcggacctcagcgctgaagcagaagcccccggagctgcggtctccccgccgcggctgagccatgcggctccctgacctgagaccctggacctccctgctgctggtggacgcggctttactgtggctgcttcagggccctctggggactttgcttcctcaagggctgccaggactatggctggaggggaccctgcggctgggagggctgtgggggctgctaaagctaagagggctgctgggatttgtggggacactgctgctcccgctctgtctggccacccccctgactgtctccctgagagccctggtcgcgggggcctcacgtgctcccccagccagagtcgcttcagccccttggagctggctgctggtggggtacggggctgcggggctcagctggtcactgtgggctgttctgagccctcctggagcccaggagaaggagcaggaccaggtgaacaacaaagtcttgatgtggaggctgctgaagctctccaggccggacctgcctctcctcgttgccgccttcttcttccttgtccttgctgttttgggtgagacattaatccctcactattctggtcgtgtgattgacatcctgggaggtgattttgacccccatgcctttgccagtgccatcttcttcatgtgcctcttctcctttggcagctcactgtctgcaggctgccgaggaggctgcttcacctacaccatgtctcgaatcaacttgcggatccgggagcagcttttctcctccctgctgcgccaggacctcggtttcttccaggagactaagacaggggagctgaactcacggctgagctcggataccaccctgatgagtaactggcttcctttaaatgccaatgtgctcttgcgaagcctggtgaaagtggtggggctgtatggcttcatgctcagcatatcgcctcgactcaccctcctttctctgctgcacatgcccttcacaatagcagcggagaaggtgtacaacacccgccatcaggaagtgcttcgggagatccaggatgcagtggccagggcggggcaggtggtgcgggaagccgttggagggctgcagaccgttcgcagttttggggccgaggagcatgaagtctgtcgctataaagaggcccttgaacaatgtcggcagctgtattggcggagagacctggaacgcgccttgtacctgctcataaggagggtgctgcacttgggggtgcagatgctgatgctgagctgtgggctgcagcagatgcaggatggggagctcacccagggcagcctgctttcctttatgatctaccaggagagcgtggggagctatgtgcagaccctggtatacatatatggggatatgctcagcaacgtgggagctgcagagaaggttttctcctacatggaccgacagccaaatctgccttcacctggcacgcttgcccccaccactctgcagggggttgtgaaattccaagacgtctcctttgcatatcccaatcgccctgacaggcctgtgctcaaggggctgacgtttaccctacgtcctggtgaggtgacggcgctggtgggacccaatgggtctgggaagagcacagtggctgccctgctgcagaatctgtaccagcccacagggggacaggtgctgctggatgaaaagcccatctcacagtatgaacactgctacctgcacagccaggtggtttcagttgggcaggagcctgtgctgttctccggttctgtgaggaacaacattacttatgggctgcagagctgcgaagatgataaggtgatggcggctgcccaggctgcccacgcagatgacttcatccaggaaatggagcatggaatatacacagatgtaggggagaagggaagccagctggctgcgggacagaaacaacgtctggccattgcccgggcccttgtacgagacccgcgggtcctcatcctggatgaggctactagtgccctagatgtgcagtgcgagcaggccaatgggttctgggtgggtcccctgggtggtggctctgctagtgaatctgacccgactggattcctccatgactcaaggcacagactctccagtgatgtggggatgtttgtggcattgaccaagctggggcagccagatgctgagcagtggaacagccggctggatctcttggagaggagcagacaggccgtggatggggtctgtagacacaactacaggctgggcgcacccttcactgtggggagaaaagtgcaaccagaggtgacagtgtacccagagaggaccccactcctgcaccagcataatctgctgcactgctctgtgacaggcttctatccaggggatatcaagatcaagtggttcctgaatgggcaggaggagagagctggggtcatgtccactggccctatcaggaatggagactggacctttcagactgtggtgatgctagaaatgactcctgaacttggacatgtctacacctgccttgtcgatcactccagcctgctgagccctgtttctgtggagtggagagctcagtctgaatattcttggagaaagatgctgagtggcattgcagccttcctacttgggctaat

SEQ ID NO: 32447 - DNA, 2705 bp, Homo sapiens
  source 1..2705: mol_type = unassigned DNA
gaatgaaggccttggttggggaaacgaaagcgaaagctgcccgagccctgacgcccgccctggccgagcgtagctggcggaccagagccggtagcgaggttgggagagacggagcggacctcagcgctgaagcagaagcccccggagctgcggtctccccgccgcggctgagccatgcggctccctgacctgagaccctggacctccctgctgctggtggacgcggctttactgtggctgcttcagggccctctggggactttgcttcctcaagggctgccaggactatggctggaggggaccctgcggctgggagggctgtgggggctgctaaagctaagagggctgctgggatttgtggggacactgctgctcccgctctgtctggccacccccctgactgtctccctgagagccctggtcgcgggggcctcacgtgctcccccagccagagtcgcttcagccccttggagctggctgctggtggggtacggggctgcggggctcagctggtcactgtgggctgttctgagccctcctggagcccaggagaaggagcaggaccaggtgaacaacaaagtcttgatgtggaggctgctgaagctctccaggccggacctgcctctcctcgttgccgccttcttcttccttgtccttgctgttttgggtgagacattaatccctcactattctggtcgtgtgattgacatcctgggaggtgattttgacccccatgcctttgccagtgccatcttcttcatgtgcctcttctcctttggcagctcactgtctgcaggctgccgaggaggctgcttcacctacaccatgtctcgaatcaacttgcggatccgggagcagcttttctcctccctgctgcgccaggacctcggtttcttccaggagactaagacaggggagctgaactcacggctgagctcggataccaccctgatgagtaactggcttcctttaaatgccaatgtgctcttgcgaagcctggtgaaagtggtggggctgtatggcttcatgctcagcatatcgcctcgactcaccctcctttctctgctgcacatgcccttcacaatagcagcggagaaggtgtacaacacccgccatcaggaagtgcttcgggagatccaggatgcagtggccagggcggggcaggtggtgcgggaagccgttggagggctgcagaccgttcgcagttttggggccgaggagcatgaagtctgtcgctataaagaggcccttgaacaatgtcggcagctgtattggcggagagacctggaacgcgccttgtacctgctcgtaaggagggtgctgcacttgggggtgcagatgctgatgctgagctgtgggctgcagcagatgcaggatggggagctcacccagggcagcctgctttcctttatgatctaccaggagagcgtggggagctatgtgcagaccctggtatacatatatggggatatgctcagcaacgtgggagctgcagagaaggttttctcctacatggaccgacagccaaatctgccttcacctggcacgcttgcccccaccactctgcagggggttgtgaaattccaagacgtctcctttgcatatcccaatcgccctgacaggcctgtgctcaaggggctgacgtttaccctacgtcctggtgaggtgacggcgctggtgggacccaatgggtctgggaagagcacagtggctgccctgctgcagaatctgtaccagcccacagggggacaggtgctgctggatgaaaagcccatctcacagtatgaacactgctacctgcacagccaggtggtttcagttgggcaggagcctgtgctgttctccggttctgtgaggaacaacattgcttatgggctgcagagctgcgaagatgataaggtgatggcggctgcccaggctgcccacgcagatgacttcatccaggaaatggagcatggaatatacacagatgtaggggagaaggggagccagctggctgcgggacagaaacaacgtctggccattgcccgggcccttgtacgagacccgcgggtcctcatcctggatgaggctactagtgccctagatgtgcagtgcgagcaggccaatgggttctgggtgggtcccctgggtggtggctctgctagtgaatctgacccgactggattcctccatgactcaaggcacagactctccagtgatgtggggatgtttgtggcattgaccaagctggggcagccagatgctgagcagtggaacagccggctggatctcttggagaggagcagacaggccgtggatggggtctgtagacacaactacaggctgggcgcacccttcactgtggggagaaaagtgcaaccagaggtgacagtgtacccagagaggaccccactcctgcaccagcataatctgctgcactgctctgtgacaggcttctatccaggggatatcaagatcaagtggttcctgaatgggcaggaggagagagctggggtcatgtccactggccctatcaggaatggagactggacctttcagactgtggtgatgctagaaatgactcctgaacttggacatgtctacacctgccttgtcgatcactccagcctgctgagccctatttctgtggagtggagagctcagtctgaatattcttggagaaagatgctgagtggcattgcagccttcctacttgggctaat

SEQ ID NO: 32448 - DNA, 2705 bp, Homo sapiens
  source 1..2705: mol_type = unassigned DNA
gaatgaaggccttggctggggaagcgaaagcgaaagctgcccgagccctgacgcccgccctggccgagcgtagctggcggaccagagccggtagcgaggttgggagagacggagcggacctcagcgctgaagcagaagtccccggagctgcggtctccccgccgcggctgagccatgcggctccctgacctgagaccctggacctccctgctgctggtggacgcggctttactgtggctgcttcagggccctctggggactttgcttcctcaagggctgccaggactatggctggaggggaccctgcggctgggagggctgtgggggctgctaaagctaagagggctgctgggatttgtggggacactgctgctcccgctctgtctggccacccccctgactgtctccctgagagccctggtcgcgggggcctcacgtgctcccccagccagagtcgcttcagccccttggagctggctgctggtggggtacggggctgcggggctcagctggtcactgtgggctgttctgagccctcctggagcccaggagaaggagcaggaccaggtgaacaacaaagtcttgatgtggaggctgctgaagctctccaggccggacctgcctctcctcgttgccgccttcttcttccttgtccttgctgttttgggtgagacattaatccctcactattctggtcgtgtgattgacatcctgggaggtgattttgacccccatgcctttgccagtgccatcttcttcatgtgcctcttctcctttggcagctcactgtctgcaggctgccgaggaggctgcttcacctacaccatgtctcgaatcaacttgcggatccgggagcagcttttctcctccctgctgcgccaggacctcggtttcttccaggagactaagacaggggagctgaactcacggctgagctcggataccaccctgatgagtaactggcttcctttaaatgccaatgtgctcttgcgaagcctggtgaaagtggtggggctgtatggcttcatgctcagcatatcgcctcgactcaccctcctttctctgctgcacatgcccttcacaatagcagcggagaaggtgtacaacacccgccatcaggaagtgcttcgggagatccaggatgcagtggccagggcggggcaggtggtgcgggaagccgttggagggctgcagaccgttcgcagttttggggccgaggagcatgaagtctgtcgctataaagaggcccttgaacaatgtcggcagctgtattggcggagagacctggaacgcgccttgtacctgctcgtaaggagggtgctgcacttgggggtgcagatgctgatgctgagctgtgggctgcagcagatgcaggatggggagctcacccagggcagcctgctttcctttatgatctaccaggagagcgtggggagctatgtgcagaccctggtatacatatatggggatatgctcagcaacgtgggagctgcagagaaggttttctcctacatggaccgacagccaaatctgccttcacctggcacgcttgcccccaccactctgcagggggttgtgaaattccaagacgtctcctttgcatatcccaatcgccctgacaggcctgtgctcaaggggctgacgtttaccctacgtcctggtgaggtgacggcgctggtgggacccaatgggtctgggaagagcacagtggctgccctgctgcagaatctgtaccagcccacagggggacaggtgctgctggatgaaaagcccatctcacagtatgaacactgctacctgcacagccaggtggtttcagttgggcaggagcctgtgctgttctccggttctgtgaggaacaacattgcttatgggctgcagagctgcgaagatgataaggtgatggcggctgcccaggctgcccacgcagatgacttcatccaggaaatggagcatggaatatacacagatgtaggggagaagggaagccagctggctgcgggacagaaacaacgtctggccattgcccgggcccttgtacgagacccgcgggtcctcatcctggatgaggctactagtgccctagatgtgcagtgcgagcaggccaatgggttctgggtgggtcccctgggtggtggctctgctagtgaatctgacccgactggattcctccatgactcaaggcacagactctccagtgatgtggggatgtttgtggcattgaccaagctggggcagccagatgctgagcagtggaacagccggctggatctcttggagaggagcagacaggccgtggatggggtctgtagacacaactacaggctgggcgcacccttcactgtggggagaaaagtgcaaccagaggtgacagtgtacccagagaggaccccactcctgcaccagcataatctgctgcactgctctgtgacaggcttctatccaggggatatcaagatcaagtggttcctgaatgggcaggaggagagagctggggtcatgtccactggccctatcaggaatggagactggacctttcagactgtggtgatgctagaaatgactcctgaacttggacatgtctacacctgccttgtcgatcactccagcctgctgagccctgtttctgtggagtggagagctcagtctgaatattcttggagaaagatgctgagtggcattgcagccttcctacttgggctaat

SEQ ID NO: 32449 - DNA, 11183 bp, Homo sapiens
  source 1..11183: mol_type = unassigned DNA
acagtctgggcaaccacaccggcgggccgttttgctcacagccccaccgcgccgggcagcgtctgcagctgctgcgtgcgagacccagaggctccggtcagcgcgccggccgcagggagtgcgagcacttgtgagccccgcgccgggccggtgaagtctggtgctgccgagcccgcttagaaagcacggccgcgcgctgtcggacgcaggcccacaggcccagccgacccaggcagcaattttcctagccccgccgccgttgccaaggcgaccgccgccgaatgttcccgccgcgggctccgccccccggccaatcggaccggcgctcggtgaagcccagattctctttgttccgcagccatttcaggccccggacaggaggcagtgccgcttcggccgaaggcccgagcgcccgaggcgtctgggatggtgtgggaccggcaaaccaagatggagtatgagtggaaacctgacgagcaagggcttcagcaaatcctgcagctgttgaaggagtcccagtccccagacaccaccatccagagaaccgtgcaacaaaaactggaacaacttaatcagtatccagactttaacaactacttgatttttgttcttacaaaattaaaatctgaagatgaacccacaagatcattgagtggtcttatcttgaagaataatgtgaaagcacactttcagaacttcccaaatggtgtaacagactttattaaaagtgaatgtttaaataatattggtgactcctctcctctgattagagccactgttggtattttgatcacaactatagcctccaagggagaattgcagaattggcctgacctcttaccaaaactctgtagcctgttggattctgaagattataatacctgtgagggagcatttggtgcccttcagaagatttgtgaagattctgctgagattttagacagtgatgttttagatcgtcctctcaacatcatgattcccaaatttttacagttcttcaagcatagtagtccaaaaataaggtctcacgctgttgcatgtgtcaatcagtttatcatcagtaggactcaagctctaatgttgcacattgattcttttattgagaatctctttgcattagctggtgatgaagaaccagaggtacggaaaaatgtgtgccgagcacttgtgatgttgctcgaagttcgaatggatcgcctgcttcctcacatgcataatatagttgagtacatgctacagaggactcaagatcaagatgaaaatgtggctttagaagcctgtgaattttggctaactttagctgaacagccaatatgcaaagatgtactcgtaaggcatcttcctaagttgattcctgtgttagtgaatggcatgaagtactcagacatagatattatcctacttaagggtgatgttgaagaagacgaaacgattcctgatagtgaacaggatatacggccacgttttcaccgatcgaggacggtggctcagcagcatgatgaagatggaattgaagaggaagatgatgatgatgatgaaattgatgatgatgatacaatttctgactggaatctaagaaaatgttctgctgctgccctggatgttcttgcaaatgtgtatcgtgatgaactgctgccacatattttgccccttttgaaagaattactttttcatcatgaatgggttgttaaagaatcaggcattttggttttaggagcaattgctgaaggttgcatgcagggcatgattccatacttgcctgagcttattcctcaccttattcagtgcctctctgataaaaaggctcttgtgcgttccataacatgctggactcttagccgctatgcacactgggtggtcagccagccgccagacacgtacctgaagccattaatgacagaattgctaaagcgcatcctggacagcaacaagagagtacaagaagctgcctgcagtgcctttgctaccctagaagaggaggcttgtacagaacttgttccttaccttgcttatatacttgataccctggtctttgcatttagtaaataccagcataagaacctgctcattctttacgatgccataggaacattagcagattcagtaggacatcatttaaacaaaccagaatatattcagatgctaatgcctccactgatccagaaatggaacatgttaaaggatgaagataaagatctcttccctttacttgagtgcctatcttcagttgccacagcactgcagtctggattccttccgtactgtgaacctgtgtatcagcgttgtgtaaacctagtacagaagactcttgcacaagccatgctaaacaatgctcaaccagatcaatatgaagctccagataaagattttatgatagtggctcttgatttactgagtggcctggctgaaggacttggaggcaacattgaacagctggtagcccgaagtaacatcctgacactaatgtatcagtgcatgcaggataaaatgccagaagttcgacagagttcttttgccctgttaggtgacctcacaaaagcttgctttcagcatgttaagccttgtatagctgatttcatgccaatattgggaaccaacctaaatccagaattcatttcagtctgcaacaatgccacatgggcaattggagaaatctccattcaaatgggtatagagatgcagccttatattcctatggtgttgcaccagcttgtagaaatcattaacagacccaacacaccaaagacgttgttagagaatacagcaataacaattggtcgtcttggttacgtttgtcctcaagaggtggcccccatgctacagcagtttataagaccctggtgcacctctctgagaaacataagagacaatgaggaaaaggattcagcattccgtggaatttgtaccatgatcagtgtgaatcccagtggcgtaatccaagattttatatttttttgtgatgccgttgcatcatggattaacccaaaagatgatctcagagacatgttctgtaagatccttcatggatttaaaaatcaagttggcgatgaaaattggaggcgtttctctgaccagtttcctcttcccttaaaagagcgtcttgcagctttttatggtgtttaatctaatacacttaagctgcagtcccaaaattaggggtccttcagtcttggagactataagggagcctctgcacccagggaaaatgttaccctttacaggggggaagggtaaaccagtagggaatacagtacaatcccaaccctactgggaggggcgggagggaggtgttgccgtcactgtattaagtcgatgttgggaaacgttttaacatctggagcctttgtgggtggaaatatgtctccagttacaactccgcagtggatgtgaagaagcaaaaaaaaaaaaatctattcagtctactcacaaaacagtacattgtggaatattatggggaattgtaccaaaacaagaaccatataaatgatgcctagggacaagaaagaggaacaattctatagcgcacaataaaggaaacctaagaatgggagttacaaatagtaaagaagctttttttttttttttaatttaaagtttttttatgtaagttttcccacatgatggggccttgttttgcatgttgatgaagaactacacaaagaaaactaatatagttaaaagtcagcttgccttcccgtagtagaagcaggttcttggaagttacaatttaaggtaccccaaaaaagttggaaataaaacaaaacaaacataaacaatgaagcaccctgtgaaatgccaaatgagtcactccttttaccttttttggggtgggcagggagggaggaataaatggggttgggcatatcaaactaaagatgacatcttaattttgcattgaacattaatgtagcggatataatttgatgattatacttcattagatttaatttctaggccaagatgttactttttaaagtgcagtttaaggttcaggcatgcattctggctcatagtggttgaaagtaatttaaattagtgggaaagtagcatgcttgcatcacatagagtgagattggtattcatttacctatgttgcgccagtttgtgttgcagtttaccaattcaatatagccctgcatttaaagttcctttttaagatttgtggattttatttttattaagaacatagatatataaagtactgtagtttacaggtaggccttgaaatatcttttttaggatctgttaggaataagattgatattgtattgtgtgtaacctgcacaatgtggaaagctgatatacctgtgcaaaatctttgcctctgtgctgtcagtgtgatgtgctttctgcatggttatatactactagtgattttatcaaaacttctaaaatttaaattacgtggtaaaagatctgtaaaaggctgcataaatgttagttggcacataaagacaattgtagaagttgaaaaatgattgctatatttcaatgtttattcccactcaacatactgccttctaagcttccctttttttgttcaaagcatgatcttaaagatatgtttaagttaatggatgtaatgcagggttcctacactgtattttggcgcatgttggtggccctctgtgccctagatatatgcacacagggtgcaagttaaaagctacagagtgaaagttggtttggatcctcttcatttcatttgtttagcttttctgttatttttctctacttacatgtattcctgtgaataaatccttgttaagttaaccctttacttttccttccatgtgtattttcttatatactgtgaatgtgaaaacctaactggtacacttgatcttgtgttcatatgaaagtgcaagtctttattaatttggattgcctgaacagtgtatcccatgatgatgaaggaaaatggagagatttttctttttaactctgctggtcagagatgaagccacgcctttccatttttcaatgctgcatatttaatctgcaacaaaaatgttaagccataacagcctttttatattttagtttgtcacctttgcattgcagaataaatactgaataaccatttttataagcagttgctcctctttgcatggttctattctctaaaagtgttgaatgatacagccattgcactgaagtttgagctgtgtgcgtgtgaatttatactgtttcaaaaatttcaaatgcatggtagcatgtagaaaggtttttgttactatgtgtgtgtgtgtgttttgttttgttttgttctgttttttaacgttctttcacctttcctctactttggctttgcaaatttcagtctgtagagcctgaaattaaattattttatagtgcctgatatttttaatattataagttggattcaaagggtatacagcattttgttttctagtaccattgcttcactgggagctcaaaatttgcctccctgttagtctttaataactgagtagagtagcttttttattcttagattatagtgatattctgtagtgcttcaaatacttagaattctaatatgagagatagtttaatattctggaatagagagtattttaaattgaaatgaccaaattcgatttaaaacaaacacataacaatcttcagtaaagttatttgaacctgtggttgacaattctgtattgactaaaggcaatattgtcacctgtctcattaaaaattagtttccagttaggcagatgaataacactattaaaaatgcacccagttttgtagtcacttgactttttttttttatttaaatgaaatttaatttgaaaatagaaaataaaattaggtaaatatgactggcaacctgaatttgagttgggattctttgtgtatttttcccccttgaggttattgtttcttcctaatttatatttcagatacatagtgtagaacaggaatttgcagaagccatttaagttatcttttgaggtaagctctgatttagcatttattctgataaaatctaatacatcatgggatatatataaagcaacttaattcttgtggtgtagtcttaatagttttgaatgttgactgaatgtctataaaattgtgagtttgtctttgttacattccagtgtttctgcctcttggcatgcttaaagcacggcttacttcatctgctccttacacactaaaatgctgttagtgtgctcaactacagaaatagccgctgctaagtgatgtagattttctacttgaatatttttatgttgtaggaacctcaggaggtcagtgtttactgttttatatatgccttctttttcctgtttgagcttctctctttgaaggattctaacagaacaaagctgctgatcaacctaagttggaaacagaaagtgtaattaatataacttaaatgcatgtttggcagttccatgttacagtccattagcgagtgaacttagtgccacaggtattcatttattcaggaaagaattttgctttttgtattgtctaatctcttcaatgacttcatactgtgtaaaaaaaaatcactttttaatattttttggttggttatttcccaaataatcaacatgtaaataatcttttaagagccagttctgatgctttacattattgctacttgattttgttatgcaagttagatttcagaagaatagattttaaaacacttaaccaagccattacatcttaaaaacaaaacaagtagcatacattttgtaattaacattgataaacactgtgatttttttggttaagactttttcattgatctgaattgcttaaattgcatatattgtaaaataggatcagatgtatattttaaactaatttcaatggattttcctcttgaaatgctttgtctactcagttataaaatattcagatacaagttttatctcaggtgaatactcttgtattgtttttgctttggtgacatgcttataaagggtcatcctagttacattctttgttttttaagtgtatttcattgagaatctttccatttagtctgatttttttcctaatattctagcaggctggggtggtataaagccctcctgacaagccttttgcctacaggtttacctgaaaatgagctacatatggtcgtcattttcttcaaactctcaaaataggaaagtggaaatttttctcccctatataaaattattctgcctagcagaaatgccagaaataaattaattgcatcttagtctaaatttaagtcctttgccatgaggaaaaagtggttttttgcttcatatggtaaatctatattattcatattgaatgtattaacagataatggtgcaaaagcattcttcccaggggaagagtgtatcatgcataactgcaatttaagtccttcctttgataatacttcaaaacatacacagctttgcttactgaattatttttgcaaataatacaaggaggggaaactaacttgctactagtgttgttaatgaagtataggccttggaacatttaagaaaactggtcttcagatagttaagggcttgggataatttaagtgaaaagtgagatcagtaatgagctgtgttgttaacaatattatctggtaataataccatgcaatatagcgttgtataccaacttagtgcattttatactgtattaaatatggagatacttctaatgcctctctaaaattaaattttacataaaagttagttttattcacctttaggctttccaagtgaattgtgactaattttttcaatcttacatagatctttcacccattagcattacttacgtagataattctttatgcctagttattatacatattaatttttaaggtatacatttaaattacacaattgttcattgtggtttgtatcccagaatgtgttgtgttttttaaaagatgcataatagctgaatgtatgcatgactttgaaagaagttaaaatggtgattttttttcacctcttgtacattttaaaaccaggccaaatctatttgccaagcagtgtatcactaataagaaaagcagtttttccttttattgcagtttttgtttatctgccatagaatttccttatactgtggcttggtattattcaagattagctatttcgctggtattacatctttttaaaagcctattataacatggttagcctataaggcagtgttggtccccttctaatattggcctcataaaggggttccactgtactttccgcatattactgtgttgttgttttcctttgtggatatataagcaaattgagcttgggtgatttttatggagacaataattagacaatactgtataattagttttacttaatagattatcatcttgtgagaagagatgtttaaacgtggtaaatcacttcatattacaaaacagttttacacttaatatgttaacattgggtgcaataatttagtagcattagctttagttacaaatataactggatctttctgctgacaacttaggttgtatgagttatgcttaaaagctttaaatctgatgtttcctgtacctgccacactatgttagaatgtgtccttcaaacatatcctcctgcaacttctcaaactgtactaaattgatatttcttgaagtctaactctgtgctaacagatctccattttaaatagaatacggttttaatttttgataagctgctgaattttaaagagagttttttggggccaccaaatattttggatcatgcagagaatatatattgtactgtagtaattttgtatttacatttgtatgatgtgacataatagatgtgaatgttaatcactgcttgactatgttaataaagttgtttaactatagatgttgcactctgatttttaatgaaaggaaatgagttttctttttccctcttaccccattttggatctagataagccttatgttttttgggatttttttccttgtttttagtttgaggttttgttttgttttttccttagcttacacattagtacacttttgttgttgaacatcatttatttcttaaaacaagtgttttcttatttgtatagtatagtaaaaacctgtttttccacattttaacttaactccttgatgtgttttaaacagttgattataggttctgctgtttgaggataggggacatactattctgtaaaaggaattaaaggcgaaattgtgaatataaaaagttgatgtaaggagagattgcatgagtgtgtatgaatgtatgtcctattaaggcttcctctttatccttcaaacagttaagatttgtaatttggggaattaacatttataagagtaattttttcttcaggttgtaaggcattaatatagttgcatgttactaattaaatgtattaacacatttcagggagtatgtgtgcataactgtcatggttttttttgttttttgtcttgtttttgagatggagtcttgctctgttgcccaggctggagtgcagtggcacagtcttgtctcactgcaacctctgcctcccgggttcaaacgactctcctgcctcagcttcccaagtagttgggattaaggcatgtgccgtcacacccggctaacttttatattttcagtaaagatgggggttcaccatgttggccaggctagtctcgaactcctggcctcaggtgatccacctgtctcggcctctcaaagtgttgggattacagctgtgagccaccatgcctggccttgtcatacagccttttgagatttagaacaggaaagagcctaaaattaaatcagtacaattccaaaacttttaagagaggtgaggcttgggtttctttttctttgttacctggccaagaaaatatttgagaagagagagttctcttgtgttaacaagaaaataaaattgaaacttggacatcatgttctaaaacacagcctcaagagtttaatattccagaattttaggacttaggttgtggggaaaagataattaaagtcatcctaattcttgttcaagattaggaaccaaaagtcttttctaagtcgtcaatattttagtgatactaaagccctatccattttatgcaaatgatctttttcttctcagttcaggtgatgaaaccatcgtaatgataaatgagtaaggctggcttaacaattcttggactggcgggcattcttgtaatgagttcataatcagtatgactccacaatttcacgtgattctttaagaatgattggaaaagtggcagcaggaactacagagctaacttgaatttcctttgtgttctatacagttgaatatggaattaccaaagctctgtcattttaaaaattctttatttctgagttgttaatttgatgtaaaagtgtaagaacccccgaaacatctccattattcagatagacacaaataatgtacacatcacaattagtatatattttttttaattgagaggactctggctctgtctcccagtcttcagtggcacgatatctgctccctgcaacttccgcctcctaggttcaagcaattctcccatctcagcctcccaagtagctgggattacaggcgcacgccaccaggcctggctaatttttttttttttttttttttttttttttttttaggagagagtttggccgtgttggccaggctggtctcgaactcctgacctcgagtgaacacctcgagtggtacgcccacctttgcctcccaaattgctgggattacagttgtgagccaccgcccctggcgacaatttgtaaatttaacgcaatttctaaaccattggcaagaacaatacagagaagagttgttatactgagaccctttaggtttttgtaccagtcaattcttacatgcatgttatggcagtctcactctgatgatttaaatcttaagtattcttttcaagctttgtgttacttcttgaagaacttgaaacaattttaagaaagacaagtgaacagttaaatgaattgtaatacaactacctagtgataactgctgttaatatcctgtgcacatatataaatatatggtgaatttgtgtttttagttatatccagaattgtttgttaatatacatggacatacctacatattattctataagcaatttatgcaactgtcttactgttgttggacattcagaagttttttctaatttttcactcttagaaataaagttttagtgagagtcgcaa

SEQ ID NO: 32450 - DNA, 863 bp, Homo sapiens
  source 1..863: mol_type = unassigned DNA
cagattctctttgttccgcagccatttcaggccccggacaggaggcagtgccgcttcggccgaaggcccgagcgcccgaggcgtctgggatggtgtgggaccggcaaaccaagatggagtatgagtggaaacctgacgagcaagggcttcagcaaatcctgcagctgttgaaggagtcccagtccccagacaccaccatccagagaaccgtgcaacaaaaactggaacaacttaatcagtatccagactttaacaactacttgatttttgttcttacaaaattaaaatctgaagatgaacccacaagatcattgagtggtcttatcttgaagaataatgtgaaagcacactttcagaacttcccaaatggtgtaacagactttattaaaagtgaatgtttaaataatattggtgactcctctcctctgattagagccactgttggtctcacgctgttgcatgtgtcaatcagtttatcatcagtaggactcaagctctaatgttgcacattgattcttttattgagaatctctttgcattagctggtgatgaagaaccagaggtacggaaaaatgtgtgccgagcacttgtgatgttgctcgaagttcgaatggatcgcctgcttcctcacatgcataatatagttgagtacatgctacagaggactcaagatcaagatgaaaatgtggctttagaagcctgtgaattttggctaactttagctgaacagccaatatgcaaagatgtactcgtaaggcatcttcctaagttgattcctgtgttagtgaatggcatgaagtactcagacatagatattatcctacttaagggtgatgttgaagaagacgaaacgattcctgata

SEQ ID NO: 32451 - DNA, 8409 bp, Homo sapiens
  source 1..8409: mol_type = unassigned DNA
gaatgttcccgccgcgggctccgccccccggccaatcggaccggcgctcggtgaagcccagattctctttgttccgcagccatttcaggccccggacaggaggcagtgccgcttcggccgaaggcccgagcgcccgaggcgtctgggatggtgtgggaccggcaaaccaagatggagtatgagtggaaacctgacgagcaagggcttcagcaaatcctgcagctgttgaaggagtcccagtccccagacaccaccatccagagaaccgtgcaacaaaaactggaacaacttaatcagtatccagactttaacaactacttgatttttgttcttacaaaattaaaatctgaaggtattttgatcacaactatagcctccaagggagaattgcagaattggcctgacctcttaccaaaactctgtagcctgttggattctgaagattataatacctgtgagggagcatttggtgcccttcagaagatttgtgaagattctgctgagattttagacagtgatgttttagatcgtcctctcaacatcatgattcccaaatttttacagttcttcaagcatagtagtccaaaaataaggtctcacgctgttgcatgtgtcaatcagtttatcatcagtaggactcaagctctaatgttgcacattgattcttttattgagaatctctttgcattagctggtgatgaagaaccagaggtacggaaaaatgtgtgccgagcacttgtgatgttgctcgaagttcgaatggatcgcctgcttcctcacatgcataatatagttgagtacatgctacagaggactcaagatcaagatgaaaatgtggctttagaagcctgtgaattttggctaactttagctgaacagccaatatgcaaagatgtactcgtaaggcatcttcctaagttgattcctgtgttagtgaatggcatgaagtactcagacatagatattatcctacttaagggtgatgttgaagaagacgaaacgattcctgatagtgaacaggatatacggccacgttttcaccgatcgaggacggtggctcagcagcatgatgaagatggaattgaagaggaagatgatgatgatgatgaaattgatgatgatgatacaatttctgactggaatctaagaaaatgttctgctgctgccctggatgttcttgcaaatgtgtatcgtgatgaactgctgccacatattttgccccttttgaaagaattactttttcatcatgaatgggttgttaaagaatcaggcattttggttttaggagcaattgctgaaggttgcatgcagggcatgattccatacttgcctgagcttattcctcaccttattcagtgcctctctgataaaaaggctcttgtgcgttccataacatgctggactcttagccgctatgcacactgggtggtcagccagccgccagacacgtacctgaagccattaatgacagaattgctaaagcgcatcctggacagcaacaagagagtacaagaagctgcctgcagtgcctttgctaccctagaagaggaggcttgtacagaacttgttccttaccttgcttatatacttgataccctggtctttgcatttagtaaataccagcataagaacctgctcattctttacgatgccataggaacattagcagattcagtaggacatcatttaaacaaaccagaatatattcagatgctaatgcctccactgatccagaaatggaacatgttaaaggatgaagataaagatctcttccctttacttgagtgcctatcttcagttgccacagcactgcagtctggattccttccgtactgtgaacctgtgtatcagcgttgtgtaaacctagtacagaagactcttgcacaagccatgctaaacaatgctcaaccagatcaatatgaagctccagataaagattttatgatagtggctcttgatttactgagtggcctggctgaaggacttggaggcaacattgaacagctggtagcccgaagtaacatcctgacactaatgtatcagtgcatgcaggataaaatgccagaagttcgacagagttcttttgccctgttaggtgacctcacaaaagcttgctttcagcatgttaagccttgtatagctgatttcatgccaatattgggaaccaacctaaatccagaattcatttcagtctgcaacaatgccacatgggcaattggagaaatctccattcaaatgggtatagagatgcagccttatattcctatggtgttgcaccagcttgtagaaatcattaacagacccaacacaccaaagacgttgttagagaatacagcaataacaattggtcgtcttggttacgtttgtcctcaagaggtggcccccatgctacagcagtttataagaccctggtgcacctctctgagaaacataagagacaatgaggaaaaggattcagcattccgtggaatttgtaccatgatcagtgtgaatcccagtggcgtaatccaagattttatatttttttgtgatgccgttgcatcatggattaacccaaaagatgatctcagagacatgttctgtaagatccttcatggatttaaaaatcaagttggcgatgaaaattggaggcgtttctctgaccagtttcctcttcccttaaaagagcgtcttgcagctttttatggtgtttaatctaatacacttaagctgcagtcccaaaattaggggtccttcagtcttggagactataagggagcctctgcacccagggaaaatgttaccctttacaggggggaagggtaaaccagtagggaatacagtacaatcccaaccctactgggaggggcgggagggaggtgttgccgtcactgtattaagtcgatgttgggaaacgttttaacatctggagcctttgtgggtggaaatatgtctccagttacaactccgcagtggatgtgaagaagcaaaaaaaaaaaaatctattcagtctactcacaaaacagtacattgtggaatattatggggaattgtaccaaaacaagaaccatataaatgatgcctagggacaagaaagaggaacaattctatagcgcacaataaaggaaacctaagaatgggagttacaaatagtaaagaagctttttttttttttttaatttaaagtttttttatgtaagttttcccacatgatggggccttgttttgcatgttgatgaagaactacacaaagaaaactaatatagttaaaagtcagcttgccttcccgtagtagaagcaggttcttggaagttacaatttaaggtaccccaaaaaagttggaaataaaacaaaacaaacataaacaatgaagcaccctgtgaaatgccaaatgagtcactccttttaccttttttggggtgggcagggagggaggaataaatggggttgggcatatcaaactaaagatgacatcttaattttgcattgaacattaatgtagcggatataatttgatgattatacttcattagatttaatttctaggccaagatgttactttttaaagtgcagtttaaggttcaggcatgcattctggctcatagtggttgaaagtaatttaaattagtgggaaagtagcatgcttgcatcacatagagtgagattggtattcatttacctatgttgcgccagtttgtgttgcagtttaccaattcaatatagccctgcatttaaagttcctttttaagatttgtggattttatttttattaagaacatagatatataaagtactgtagtttacaggtaggccttgaaatatcttttttaggatctgttaggaataagattgatattgtattgtgtgtaacctgcacaatgtggaaagctgatatacctgtgcaaaatctttgcctctgtgctgtcagtgtgatgtgctttctgcatggttatatactactagtgattttatcaaaacttctaaaatttaaattacgtggtaaaagatctgtaaaaggctgcataaatgttagttggcacataaagacaattgtagaagttgaaaaatgattgctatatttcaatgtttattcccactcaacatactgccttctaagcttccctttttttgttcaaagcatgatcttaaagatatgtttaagttaatggatgtaatgcagggttcctacactgtattttggcgcatgttggtggccctctgtgccctagatatatgcacacagggtgcaagttaaaagctacagagtgaaagttggtttggatcctcttcatttcatttgtttagcttttctgttatttttctctacttacatgtattcctgtgaataaatccttgttaagttaaccctttacttttccttccatgtgtattttcttatatactgtgaatgtgaaaacctaactggtacacttgatcttgtgttcatatgaaagtgcaagtctttattaatttggattgcctgaacagtgtatcccatgatgatgaaggaaaatggagagatttttctttttaactctgctggtcagagatgaagccacgcctttccatttttcaatgctgcatatttaatctgcaacaaaaatgttaagccataacagcctttttatattttagtttgtcacctttgcattgcagaataaatactgaataaccatttttataagcagttgctcctctttgcatggttctattctctaaaagtgttgaatgatacagccattgcactgaagtttgagctgtgtgcgtgtgaatttatactgtttcaaaaatttcaaatgcatggtagcatgtagaaaggtttttgttactatgtgtgtgtgtgtgttttgttttgttttgttctgttttttaacgttctttcacctttcctctactttggctttgcaaatttcagtctgtagagcctgaaattaaattattttatagtgcctgatatttttaatattataagttggattcaaagggtatacagcattttgttttctagtaccattgcttcactgggagctcaaaatttgcctccctgttagtctttaataactgagtagagtagcttttttattcttagattatagtgatattctgtagtgcttcaaatacttagaattctaatatgagagatagtttaatattctggaatagagagtattttaaattgaaatgaccaaattcgatttaaaacaaacacataacaatcttcagtaaagttatttgaacctgtggttgacaattctgtattgactaaaggcaatattgtcacctgtctcattaaaaattagtttccagttaggcagatgaataacactattaaaaatgcacccagttttgtagtcacttgactttttttttttatttaaatgaaatttaatttgaaaatagaaaataaaattaggtaaatatgactggcaacctgaatttgagttgggattctttgtgtatttttcccccttgaggttattgtttcttcctaatttatatttcagatacatagtgtagaacaggaatttgcagaagccatttaagttatcttttgaggtaagctctgatttagcatttattctgataaaatctaatacatcatgggatatatataaagcaacttaattcttgtggtgtagtcttaatagttttgaatgttgactgaatgtctataaaattgtgagtttgtctttgttacattccagtgtttctgcctcttggcatgcttaaagcacggcttacttcatctgctccttacacactaaaatgctgttagtgtgctcaactacagaaatagccgctgctaagtgatgtagattttctacttgaatatttttatgttgtaggaacctcaggaggtcagtgtttactgttttatatatgccttctttttcctgtttgagcttctctctttgaaggattctaacagaacaaagctgctgatcaacctaagttggaaacagaaagtgtaattaatataacttaaatgcatgtttggcagttccatgttacagtccattagcgagtgaacttagtgccacaggtattcatttattcaggaaagaattttgctttttgtattgtctaatctcttcaatgacttcatactgtgtaaaaaaaaatcactttttaatattttttggttggttatttcccaaataatcaacatgtaaataatcttttaagagccagttctgatgctttacattattgctacttgattttgttatgcaagttagatttcagaagaatagattttaaaacacttaaccaagccattacatcttaaaaacaaaacaagtagcatacattttgtaattaacattgataaacactgtgatttttttggttaagactttttcattgatctgaattgcttaaattgcatatattgtaaaataggatcagatgtatattttaaactaatttcaatggattttcctcttgaaatgctttgtctactcagttataaaatattcagatacaagttttatctcaggtgaatactcttgtattgtttttgctttggtgacatgcttataaagggtcatcctagttacattctttgttttttaagtgtatttcattgagaatctttccatttagtctgatttttttcctaatattctagcaggctggggtggtataaagccctcctgacaagccttttgcctacaggtttacctgaaaatgagctacatatggtcgtcattttcttcaaactctcaaaataggaaagtggaaatttttctcccctatataaaattattctgcctagcagaaatgccagaaataaattaattgcatcttagtctaaatttaagtcctttgccatgaggaaaaagtggttttttgcttcatatggtaaatctatattattcatattgaatgtattaacagataatggtgcaaaagcattcttcccaggggaagagtgtatcatgcataactgcaatttaagtccttcctttgataatacttcaaaacatacacagctttgcttactgaattatttttgcaaataatacaaggaggggaaactaacttgctactagtgttgttaatgaagtataggccttggaacatttaagaaaactggtcttcagatagttaagggcttgggataatttaagtgaaaagtgagatcagtaatgagctgtgttgttaacaatattatctggtaataataccatgcaatatagcgttgtataccaacttagtgcattttatactgtattaaatatggagatacttctaatgcctctctaaaattaaattttacataaaagttagttttattcacctttaggctttccaagtgaattgtgactaattttttcaatcttacatagatctttcacccattagcattacttacgtagataattctttatgcctagttattatacatattaatttttaaggtatacatttaaattacacaattgttcattgtggtttgtatcccagaatgtgttgtgttttttaaaagatgcataatagctgaatgtatgcatgactttgaaagaagttaaaatggtgattttttttcacctcttgtacattttaaaaccaggccaaatctatttgccaagcagtgtatcactaataagaaaagcagtttttccttttattgcagtttttgtttatctgccatagaatttccttatactgtggcttggtattattcaagattagctatttcgctggtattacatctttttaaaagcctattataacatggttagcctataaggcagtgttggtccccttctaatattggcctcataaaggggttccactgtactttccgcatattactgtgttgttgttttcctttgtggatatataagcaaattgagcttgggtgatttttatggagacaataattagacaatactgtataattagttttacttaatagattatcatcttgtgagaagagatgtttaaacgtggtaaatcacttcatattacaaaacagttttacacttaatatgttaacattgggtgcaataatttagtagcattagctttagttacaaatataactggatctttctgctgacaacttaggttgtatgagttatgcttaaaagctttaaatctgatgtttcctgtacctgccacactatgttagaatgtgtccttcaaacatatcctcctgcaacttctcaaactgtactaaattgatatttcttgaagtctaactctgtgctaacagatctccattttaaatagaatacggttttaatttttgataagctgctgaattttaaagagagttttttggggccaccaaatattttggatcatgcagagaatatatattgtactgtagtaattttgtatttacatttgtatgatgtgacataatagatgtgaatgttaatcactgcttgactatgttaataaagttgtttaactata

SEQ ID NO: 32452 - DNA, 3028 bp, Homo sapiens
  source 1..3028: mol_type = unassigned DNA
gccgggctgccaggagcagttccgccgggtttcactgtccgtgacttccttcggggcacctcaggcagcaaaccaagatggagtatgagtggaaacctgacgagcaagggcttcagcaaatcctgcagctgttgaaggagtcccagtccccagacaccaccatccagagaaccgtgcaacaaaaactggaacaacttaatcagtatccagactttaacaactacttgatttttgttcttacaaaattaaaatctgaagatgaacccacaagatcattgagtggtcttatcttgaagaataatgtgaaagcacactttcagaacttcccaaatggtgtaacagactttattaaaagtgaatgtttaaataatattggtgactcctctcctctgattagagccactgttggtattttgatcacaactatagcctccaagggagaattgcagaattggcctgacctcttaccaaaactctgtagcctgttggattctgaagattataatacctgtgagggagcatttggtgcccttcagaagatttgtgaagattctgctgagattttagacagtgatgttttagatcgtcctctcaacatcatgattcccaaatttttacagttcttcaagcatagtagtccaaaaataaggtctcacgctgttgcatgtgtcaatcagtttatcatcagtaggactcaagctctaatgttgcacattgattcttttattgagaatctctttgcattagctggtgatgaagaaccagaggtacggaaaaatgtgtgccgagcacttgtgatgttgctcgaagttcgaatggatcgcctgcttcctcacatgcataatatagttgagtacatgctacagaggactcaagatcaagatgaaaatgtggctttagaagcctgtgaattttggctaactttagctgaacagccaatatgcaaagatgtactcgtaaggcatcttcctaagttgattcctgtgttagtgaatggcatgaagtactcagacatagatattatcctacttaagggtgatgttgaagaagacgaaacgattcctgatagtgaacaggatatacggccacgttttcaccgatcgaggacggtggctcagcagcatgatgaagatggaattgaagaggaagatgatgatgatgatgaaattgatgatgatgatacaatttctgactggaatctaagaaaatgttctgctgctgccctggatgttcttgcaaatgtgtatcgtgatgaactgctgccacatattttgccccttttgaaagaattactttttcatcatgaatgggttgttaaagaatcaggcattttggttttaggagcaattgctgaaggttgcatgcagggcatgattccatacttgcctgagcttattcctcaccttattcagtgcctctctgataaaaaggctcttgtgcgttccataacatgctggactcttagccgctatgcacactgggtggtcagccagccgccagacacgtacctgaagccattaatgacagaattgctaaagcgcatcctggacagcaacaagagagtacaagaagctgcctgcagtgcctttgctaccctagaagaggaggcttgtacagaacttgttccttaccttgcttatatacttgataccctggtctttgcatttagtaaataccagcataagaacctgctcattctttacgatgccataggaacattagcagattcagtaggacatcatttaaacaaaccagaatatattcagatgctaatgcctccactgatccagaaatggaacatgttaaaggatgaagataaagatctcttccctttacttgagtgcctatcttcagttgccacagcactgcagtctggattccttccgtactgtgaacctgtgtatcagcgttgtgtaaacctagtacagaagactcttgcacaagccatgctaaacaatgctcaaccagatcaatatgaagctccagataaagattttatgatagtggctcttgatttactgagtggcctggctgaaggacttggaggcaacattgaacagctggtagcccgaagtaacatcctgacactaatgtatcagtgcatgcaggataaaatgccagaagttcgacagagttcttttgccctgttaggtgacctcacaaaagcttgctttcagcatgttaagccttgtatagctgatttcatgccaatattgggaaccaacctaaatccagaattcatttcagtctgcaacaatgccacatgggcaattggagaaatctccattcaaatgggtatagagatgcagccttatattcctatggtgttgcaccagcttgtagaaatcattaacagacccaacacaccaaagacgttgttagagaatacagcaataacaattggtcgtcttggttacgtttgtcctcaagaggtggcccccatgctacagcagtttataagaccctggtgcacctctctgagaaacataagagacaatgaggaaaaggattcagcattccgtggaatttgtaccatgatcagtgtgaatcccagtggcgtaatccaagattttatatttttttgtgatgccgttgcatcatggattaacccaaaagatgatctcagagacatgttctgtaagatccttcatggatttaaaaatcaagttggcgatgaaaattggaggcgtttctctgaccagtttcctcttcccttaaaagagcgtcttgcagctttttatggtgtttaatctaatacacttaagctgcagtcccaaaattaggggtccttcagtcttggagactataagggagcctctgcacccagggaaaatgttaccctttacaggggggaagggtaaaccagtagggaatacagtacaatcccaaccctactgggaggggcgggagggaggtgttgccgtcactgtattaagtcgatgttgggaaacgttttaacatctggagcctttgtgggtggaaatatgtctccagttacaactccgcagtggatgtgaagaagcaaaaa

SEQ ID NO: 32453 - DNA, 4905 bp, Homo sapiens
  source 1..4905: mol_type = unassigned DNA
gagcagagcttagggggtggggcctcggagccaggccatgtcggggctcctcaagaagagggccagtgggactgctggggtcgggctggaggggatctgattgggggaagcgtctggggactgcttggggcctgattgggggacgtcgcgaggatcggcttgccttgcgccatggactggcagccagacgagcagggcctgcagcaggtcctgcagctgctcaaagactcacagtcgcccaacacagccactcagcgcatcgtgcaggataaactcaaacaactcaatcagtttcctgacttcaacaactacctgattttcgtcctgaccagactcaagtcagaagatgagccaacgcgctctctcagtggcctcatcctcaagaacaacgtgaaggcacactatcagagcttcccaccccctgtggcagacttcatcaaacaggagtgtctcaacaacattggcgatgcctcctcgctcatccgagccaccattggcattctcatcaccaccatcgcttccaagggtgagctgcagatgtggcccgagctgctgccccagctctgcaacctgcttaactcggaggattacaacacttgtgagggagcctttggagccctgcagaagatctgtgaagactcatcagagcttctggacagtgacgccctcaacaggcccctcaacatcatgatccccaagttcctgcagttcttcaagcactgcagtcccaagatccggtcccacgccatcgcctgcgtgaaccagttcatcatggaccgggcccaggcgctgatggacaatattgacaccttcatcgagcacctatttgccctggctgtggatgatgaccccgaggtgcggaagaatgtgtgccgtgccctggtgatgcttctggaagtgcggattgacaggctcatcccccacatgcacagcatcatccagtacatgctgcagaggacccaggaccatgatgagaacgttgcccttgaggcctgtgagttctggctgacgctggccgagcagcccatctgcaaggaagtcctggcctcccatctggtccagttgatccccatcttggtgaatgggatgaagtactcggaaattgacatcatcctgctcaagggggatgtggaggaggatgaggctgtccccgacagtgagcaggacatcaagccacgcttccacaagtcacgcacggtcacactgccccacgaggctgagcggcctgatggctccgaggacgcggaggatgacgatgatgatgatgctctgtccgactggaatttgaggaagtgctcagcggctgcactggacgtcctcgccaatgtcttccgggaggaactgctgccccacctactcccactactcaaaggcctcctcttccaccccgagtgggtggtcaaggagtcgggcatcctggtgctgggcgccattgctgagggctgcatgcagggcatggtgccctacctgcctgagctgatcccgcacctgatccagtgcctgtcggataagaaggccttggtccgctccatcgcctgctggacgctgagccgctatgcccactgggtggtcagccagccacccgacatgcacctcaagcccctgatgacagagctgctcaaacgcatcctggatggcaacaagagggtacaggaggcggcctgcagtgcttttgccaccctggaggaagaggcctgcacggagctggtgccctacctcagctacatcctggacacccttgtctttgcctttgggaaataccagcacaagaacctgctcatcctctatgacgccattggcaccctggccgactctgtaggccaccacctcaaccagccggaatacatccagaagctgatgcccccactgatccagaagtggaatgagctcaaggacgaagacaaggacctcttccccctgctggagtgtctgtcatcggtggccaccgccctgcagagtggcttcctgccttactgtgagcccgtctaccagcgctgtgtcaccctggtgcagaagacactggctcaggccatgatgtacacccagcaccctgagcagtatgaggctcccgacaaggacttcatgatcgtagcactggatctgctcagcggcctggccgagggcctgggtggtcacgtggagcagctggtggcccgcagcaacatcatgacattgctgttccagtgcatgcaggactcgatgcctgaggtccggcagagctcctttgccctcctgggagacctcaccaaagcctgcttcatccatgtcaagccctgtatcgccgagttcatgcccattctgggcaccaacctgaacccagagttcatctccgtctgcaacaacgccacctgggccattggtgaaatctgcatgcagatgggggcagagatgcagccttatgtgcagatggtcctcaacaacctggtggaaatcattaaccgacccaacacacccaagacactgctggaaaacacagccatcaccatcggccgcttgggctacgtgtgcccccaggaggtggcacccatgctgcagcagttcatccggccttggtgcacgtccctcaggaacatcagggacaacgaggagaaggactcagccttccgcggcatctgcatgatgatcggtgtcaacccggggggcgttgtgcaggactttattttcttctgcgatgctgtagcctcctgggtgagcccgaaggatgaccttcgggacatgttttataagattctccacggcttcaaagaccaagttggggaagataactggcagcagttctctgagcaattcccgccgctgctcaaggagaggctggcggctttctatggggtctaggtgatcatggagactgccaggtttctgtctgcgtcgtcgtcggagggattactggggagtgcgctgcatccggaagtcgctgtgccctggttgaggggggttagggaggagtgagtgggactcaaatccagatgccttccccgtccgtccgtccgtccgtccatccgtccacttgccctcctggcaggtgggtggggccaccatgctcatcctacaaacggggaggtgggggggacttctggtgggcaagggcccctgggctctaatagggtcatctctggcagcccacttgggccagctacgtgggagggaggaattacacagctgaccgaatccggcttcggatgaggtgagggaggagcaggtcaggaggggggccctcgtagggacgcgtacactcacacggacacacatggccacacgcatgtgcgggtgccataaccggcgaggctgggccagccgctccaccatttccccgactgcatggagacagtagaattagtgaacccctgagttaacccgtaaggccttccgtgtaacctgcatctagagtttaagaagcttctgctgttttgccggaattggcggtgactggggagggctgggtgggtggggggcctcaggcgggatctcggggcggggggaggaggatggtgaccttgggagtcgccctgtcagcacgcacatgcttgggacccactccacacactccctgccagctttgttgcagcctcagctggtggtgtctccgtccttatcctagcctagctcgcagggtgagaaccactggagtggctggggctggccagaggtcaccgtttctccttcctgtgtgctccagtggcttttgaagacactgggttgggacctttttcctgaagagagctgggtgtagccagagctactggcacctaccccgagcatctctctctgtaagcagcttcaggggcagtccgtttctctgtgcttctgaaacccccttctcacgtttcaggccccagttttaactcaaggcctggggcaggggcgtttaattgatgatgacagaggacacaggtttttgccagcaaaaaggaaaaccaaggcttggtggaagggaaaggtggtgtgtcccctgttccctattccatctccctgggacttcctgctcatcatagtacccagtgagcccagagatcctactagactgggtcagcaattctagagaaccttccggaatagtctgggaacatggtcaaggtggaaggggctcccctagagagggtgggggtgtagttacttcccagttggccagaaaactgggccttgcagacccccttagcattttttccctttttttccttccctgctttctacttctttggggagccccttgtgttttggagtctgactggagtctcgcatcctggggcctgctccatccatccctcctgggcgccagaccctccatccaagccctgtgtctttccatagtcagggtcaggccctgcatctattccaaggggcactcagtacacattccataaattagctgggtgtccctgcacgcccaccccatgaaactcgagcaggtctctggaagccatttgttaaaaaaaaaaaaaaaagttttaaaaataccttttaattttctggtaattccagttctttgaagcatcctctgctgggtcttggggtgtgtggatggattggctgtctgatgggattggtaacccctcgctactcaagatggggggatacaaacaccttcagggaaggggagcctggttcttctcgttttcctttttttttttttttttaaaaaaaaactatttaattttttaatttatttttggttgttttttgcacaatgaagtttcagcttctcaaccttctcccctacccagggctgtggacccagactggccttgagccacagtccctctttccctcctcaccctcttccccctgcgggctcccgggtctgtccatttgttactgtgctgtgctggggattggcgccgaggtggcgtgagattccacttgtgtagaactttgttgagtaaagatcagtttcttgtgaactcctta

SEQ ID NO: 32454 - DNA, 2271 bp, Homo sapiens
  source 1..2271: mol_type = unassigned DNA
gagcagagcttagggggtggggcctcggagccaggccatgtcggggctcctcaagaagagggccagtgggactgctggggtcgggctggaggggatctgattgggggaagcgtctggggactgcttggggcctgattgggggacgtcgcgaggatcggcttgccttgcgccatggactggcagccagacgagcagggcctgcagcaggtcctgcagctgctcaaagactcacagtcgcccaacacagccactcagcgcatcgtgcaggataaactcaaacaactcaatcagtttcctgacttcaacaactacctgattttcgtcctgaccagactcaagtcagaagatgagccaacgcgctctctcagtggcctcatcctcaagaacaacgtgaaggcacactatcagagcttcccaccccctgtggcagacttcatcaaacaggagtgtctcaacaacattggcgatgcctcctcgctcatccgagccaccattggcattctcatcaccaccatcgcttccaagggtgagctgcagatgtggcccgagctgctgccccagctctgcaacctgcttaactcggaggattacaacacttgtgagggagcctttggagccctgcagaagatctgtgaagactcatcagagcttctggacagtgacgccctcaacaggcccctcaacatcatgatccccaagttcctgcagttcttcaagcactgcagtcccaagatccggtcccacgccatcgcctgcgtgaaccagttcatcatggaccgggcccaggcgctgatggacaatattgacaccttcatcgagcacctatttgccctggctgtggatgatgaccccgaggtgcggaagaatgtgtgccgtgccctggtgatgcttctggaagtgcggattgacaggctcatcccccacatgcacagcatcatccagtacatgctgcagaggacccaggaccatgatgagaacgttgcccttgaggcctgtgagttctggctgacgctggccgagcagcccatctgcaaggaagtcctggcctcccatctggtccagttgatccccatcttggtgaatgggatgaagtactcggaaattgacatcatcctgctcaagggggatgtggaggaggatgaggctgtccccgacagtgagcaggacatcaagccacgcttccacaagtcacgcacggtcacactgccccacgaggctgagcggcctgatggctccgaggacgcggaggatgacgatgatgatgatgctctgtccgactggaatttgaggaagtgctcagcggctgcactggacgtcctcgccaatgtcttccgggaggaactgctgccccacctactcccactactcaaaggcctcctcttccaccccgagtgggtggtcaaggagtcgggcatcctggtgctgggcgccattgctgagggctgcatgcagggcatggtgccctacctgcctgagctgatcccgcacctgatccagtgcctgtcggataagaaggccttggtccgctccatcgcctgctggacgctgagccgctatgcccactgggtggtcagccagccacccgacatgcacctcaagcccctgatgacagagctgctcaaacgcatcctggatggcaacaagagggtacaggaggcggcctgcagtgcttttgccaccctggaggaagaggcctgcacggagctggtgccctacctcagctacatcctggacacccttgtctttgcctttgggaaataccagcacaagaacctgctcatcctctatgacgccattggcaccctggccgactctgtaggccaccacctcaaccagccggaatacatccagaagctgatgcccccactgatccagaagtggaatgagctcaaggacgaagacaaggacctcttccccctgctggagtgtctgtcatcggtggccaccgccctgcagagtggcttcctgccttactgtgagcccgtctaccagcgctgtgtcaccctggtgcagaagacactggctcaggccatgatgtacacccagcaccctgagcagtatgaggctcccgacaaggacttcatgatcgtagcactggatctgctcagcggcctggccgagggcctgggtggtcacgtggagcagctggtggcccacagtccctctttccctcctcaccctcttccccctgcgggctcccgggtctgtccatttgttactgtgctgtgctggggattggcgccgaggtggcgtgagattccacttgtgtag

SEQ ID NO: 32455 - DNA, 5122 bp, Homo sapiens
  source 1..5122: mol_type = unassigned DNA
agagggaggcctttacgcatgccttggtggcggctttctgcacgtgtttctcagcccaggtttcagtccagcggaactggctacctcggaatcccaactgctcctttagggtgtcttccgcgattctccgagtggagttaggcgcctgccgacacttccctaaccttggaggcccgggacttgattttcatgaatgaacggagccgggactgactttgcctacggcaaagaaggaaaaacggtgccctactgtcttcagacgtcgcaaggatcaagaagatttctttcttcatgaccctgcccttgccagaatttcctgcgctgttccacctcattcaacttcagcttgccttgcgccatggactggcagccagacgagcagggcctgcagcaggtcctgcagctgctcaaagactcacagtcgcccaacacagccactcagcgcatcgtgcaggataaactcaaacaactcaatcagtttcctgacttcaacaactacctgattttcgtcctgaccagactcaagtcagaagatgagccaacgcgctctctcagtggcctcatcctcaagaacaacgtgaaggcacactatcagagcttcccaccccctgtggcagacttcatcaaacaggagtgtctcaacaacattggcgatgcctcctcgctcatccgagccaccattggcattctcatcaccaccatcgcttccaagggtgagctgcagatgtggcccgagctgctgccccagctctgcaacctgcttaactcggaggattacaacacttgtgagggagcctttggagccctgcagaagatctgtgaagactcatcagagcttctggacagtgacgccctcaacaggcccctcaacatcatgatccccaagttcctgcagttcttcaagcactgcagtcccaagatccggtcccacgccatcgcctgcgtgaaccagttcatcatggaccgggcccaggcgctgatggacaatattgacaccttcatcgagcacctatttgccctggctgtggatgatgaccccgaggtgcggaagaatgtgtgccgtgccctggtgatgcttctggaagtgcggattgacaggctcatcccccacatgcacagcatcatccagtacatgctgcagaggacccaggaccatgatgagaacgttgcccttgaggcctgtgagttctggctgacgctggccgagcagcccatctgcaaggaagtcctggcctcccatctggtccagttgatccccatcttggtgaatgggatgaagtactcggaaattgacatcatcctgctcaagggggatgtggaggaggatgaggctgtccccgacagtgagcaggacatcaagccacgcttccacaagtcacgcacggtcacactgccccacgaggctgagcggcctgatggctccgaggacgcggaggatgacgatgatgatgatgctctgtccgactggaatttgaggaagtgctcagcggctgcactggacgtcctcgccaatgtcttccgggaggaactgctgccccacctactcccactactcaaaggcctcctcttccaccccgagtgggtggtcaaggagtcgggcatcctggtgctgggcgccattgctgagggctgcatgcagggcatggtgccctacctgcctgagctgatcccgcacctgatccagtgcctgtcggataagaaggccttggtccgctccatcgcctgctggacgctgagccgctatgcccactgggtggtcagccagccacccgacatgcacctcaagcccctgatgacagagctgctcaaacgcatcctggatggcaacaagagggtacaggaggcggcctgcagtgcttttgccaccctggaggaagaggcctgcacggagctggtgccctacctcagctacatcctggacacccttgtctttgcctttgggaaataccagcacaagaacctgctcatcctctatgacgccattggcaccctggccgactctgtaggccaccacctcaaccagccggaatacatccagaagctgatgcccccactgatccagaagtggaatgagctcaaggacgaagacaaggacctcttccccctgctggagtgtctgtcatcggtggccaccgccctgcagagtggcttcctgccttactgtgagcccgtctaccagcgctgtgtcaccctggtgcagaagacactggctcaggccatgatgtacacccagcaccctgagcagtatgaggctcccgacaaggacttcatgatcgtagcactggatctgctcagcggcctggccgagggcctgggtggtcacgtggagcagctggtggcccgcagcaacatcatgacattgctgttccagtgcatgcaggactcgatgcctgaggtccggcagagctcctttgccctcctgggagacctcaccaaagcctgcttcatccatgtcaagccctgtatcgccgagttcatgcccattctgggcaccaacctgaacccagagttcatctccgtctgcaacaacgccacctgggccattggtgaaatctgcatgcagatgggggcagagatgcagccttatgtgcagatggtcctcaacaacctggtggaaatcattaaccgacccaacacacccaagacactgctggaaaacacaggtcgcctgacgagtccctctgccattccagccatcaccatcggccgcttgggctacgtgtgcccccaggaggtggcacccatgctgcagcagttcatccggccttggtgcacgtccctcaggaacatcagggacaacgaggagaaggactcagccttccgcggcatctgcatgatgatcggtgtcaacccggggggcgttgtgcaggactttattttcttctgcgatgctgtagcctcctgggtgagcccgaaggatgaccttcgggacatgttttataagattctccacggcttcaaagaccaagttggggaagataactggcagcagttctctgagcaattcccgccgctgctcaaggagaggctggcggctttctatggggtctaggtgatcatggagactgccaggtttctgtctgcgtcgtcgtcggagggattactggggagtgcgctgcatccggaagtcgctgtgccctggttgaggggggttagggaggagtgagtgggactcaaatccagatgccttccccgtccgtccgtccgtccgtccatccgtccacttgccctcctggcaggtgggtggggccaccatgctcatcctacaaacggggaggtgggggggacttctggtgggcaagggcccctgggctctaatagggtcatctctggcagcccacttgggccagctacgtgggagggaggaattacacagctgaccgaatccggcttcggatgaggtgagggaggagcaggtcaggaggggggccctcgtagggacgcgtacactcacacggacacacatggccacacgcatgtgcgggtgccataaccggcgaggctgggccagccgctccaccatttccccgactgcatggagacagtagaattagtgaacccctgagttaacccgtaaggccttccgtgtaacctgcatctagagtttaagaagcttctgctgttttgccggaattggcggtgactggggagggctgggtgggtggggggcctcaggcgggatctcggggcggggggaggaggatggtgaccttgggagtcgccctgtcagcacgcacatgcttgggacccactccacacactccctgccagctttgttgcagcctcagctggtggtgtctccgtccttatcctagcctagctcgcagggtgagaaccactggagtggctggggctggccagaggtcaccgtttctccttcctgtgtgctccagtggcttttgaagacactgggttgggacctttttcctgaagagagctgggtgtagccagagctactggcacctaccccgagcatctctctctgtaagcagcttcaggggcagtccgtttctctgtgcttctgaaacccccttctcacgtttcaggccccagttttaactcaaggcctggggcaggggcgtttaattgatgatgacagaggacacaggtttttgccagcaaaaaggaaaaccaaggcttggtggaagggaaaggtggtgtgtcccctgttccctattccatctccctgggacttcctgctcatcatagtacccagtgagcccagagatcctactagactgggtcagcaattctagagaaccttccggaatagtctgggaacatggtcaaggtggaaggggctcccctagagagggtgggggtgtagttacttcccagttggccagaaaactgggccttgcagacccccttagcattttttccctttttttccttccctgctttctacttctttggggagccccttgtgttttggagtctgactggagtctcgcatcctggggcctgctccatccatccctcctgggcgccagaccctccatccaagccctgtgtctttccatagtcagggtcaggccctgcatctattccaaggggcactcagtacacattccataaattagctgggtgtccctgcacgcccaccccatgaaactcgagcaggtctctggaagccatttgttaaaaaaaaaaaaaaaagttttaaaaataccttttaattttctggtaattccagttctttgaagcatcctctgctgggtcttggggtgtgtggatggattggctgtctgatgggattggtaacccctcgctactcaagatggggggatacaaacaccttcagggaaggggagcctggttcttctcgttttcctttttttttttttttttaaaaaaaaactatttaattttttaatttatttttggttgttttttgcacaatgaagtttcagcttctcaaccttctcccctacccagggctgtggacccagactggccttgagccacagtccctctttccctcctcaccctcttccccctgcgggctcccgggtctgtccatttgttactgtgctgtgctggggattggcgccgaggtggcgtgagattccacttgtgtagaactttgttgagtaaagatcagtttcttgtgaactcctta

SEQ ID NO: 32456 - DNA, 5092 bp, Homo sapiens
  source 1..5092: mol_type = unassigned DNA
agagggaggcctttacgcatgccttggtggcggctttctgcacgtgtttctcagcccaggtttcagtccagcggaactggctacctcggaatcccaactgctcctttagggtgtcttccgcgattctccgagtggagttaggcgcctgccgacacttccctaaccttggaggcccgggacttgattttcatgaatgaacggagccgggactgactttgcctacggcaaagaaggaaaaacggtgccctactgtcttcagacgtcgcaaggatcaagaagatttctttcttcatgaccctgcccttgccagaatttcctgcgctgttccacctcattcaacttcagcttgccttgcgccatggactggcagccagacgagcagggcctgcagcaggtcctgcagctgctcaaagactcacagtcgcccaacacagccactcagcgcatcgtgcaggataaactcaaacaactcaatcagtttcctgacttcaacaactacctgattttcgtcctgaccagactcaagtcagaagatgagccaacgcgctctctcagtggcctcatcctcaagaacaacgtgaaggcacactatcagagcttcccaccccctgtggcagacttcatcaaacaggagtgtctcaacaacattggcgatgcctcctcgctcatccgagccaccattggcattctcatcaccaccatcgcttccaagggtgagctgcagatgtggcccgagctgctgccccagctctgcaacctgcttaactcggaggattacaacacttgtgagggagcctttggagccctgcagaagatctgtgaagactcatcagagcttctggacagtgacgccctcaacaggcccctcaacatcatgatccccaagttcctgcagttcttcaagcactgcagtcccaagatccggtcccacgccatcgcctgcgtgaaccagttcatcatggaccgggcccaggcgctgatggacaatattgacaccttcatcgagcacctatttgccctggctgtggatgatgaccccgaggtgcggaagaatgtgtgccgtgccctggtgatgcttctggaagtgcggattgacaggctcatcccccacatgcacagcatcatccagtacatgctgcagaggacccaggaccatgatgagaacgttgcccttgaggcctgtgagttctggctgacgctggccgagcagcccatctgcaaggaagtcctggcctcccatctggtccagttgatccccatcttggtgaatgggatgaagtactcggaaattgacatcatcctgctcaagggggatgtggaggaggatgaggctgtccccgacagtgagcaggacatcaagccacgcttccacaagtcacgcacggtcacactgccccacgaggctgagcggcctgatggctccgaggacgcggaggatgacgatgatgatgatgctctgtccgactggaatttgaggaagtgctcagcggctgcactggacgtcctcgccaatgtcttccgggaggaactgctgccccacctactcccactactcaaaggcctcctcttccaccccgagtgggtggtcaaggagtcgggcatcctggtgctgggcgccattgctgagggctgcatgcagggcatggtgccctacctgcctgagctgatcccgcacctgatccagtgcctgtcggataagaaggccttggtccgctccatcgcctgctggacgctgagccgctatgcccactgggtggtcagccagccacccgacatgcacctcaagcccctgatgacagagctgctcaaacgcatcctggatggcaacaagagggtacaggaggcggcctgcagtgcttttgccaccctggaggaagaggcctgcacggagctggtgccctacctcagctacatcctggacacccttgtctttgcctttgggaaataccagcacaagaacctgctcatcctctatgacgccattggcaccctggccgactctgtaggccaccacctcaaccagccggaatacatccagaagctgatgcccccactgatccagaagtggaatgagctcaaggacgaagacaaggacctcttccccctgctggagtgtctgtcatcggtggccaccgccctgcagagtggcttcctgccttactgtgagcccgtctaccagcgctgtgtcaccctggtgcagaagacactggctcaggccatgatgtacacccagcaccctgagcagtatgaggctcccgacaaggacttcatgatcgtagcactggatctgctcagcggcctggccgagggcctgggtggtcacgtggagcagctggtggcccgcagcaacatcatgacattgctgttccagtgcatgcaggactcgatgcctgaggtccggcagagctcctttgccctcctgggagacctcaccaaagcctgcttcatccatgtcaagccctgtatcgccgagttcatgcccattctgggcaccaacctgaacccagagttcatctccgtctgcaacaacgccacctgggccattggtgaaatctgcatgcagatgggggcagagatgcagccttatgtgcagatggtcctcaacaacctggtggaaatcattaaccgacccaacacacccaagacactgctggaaaacacagccatcaccatcggccgcttgggctacgtgtgcccccaggaggtggcacccatgctgcagcagttcatccggccttggtgcacgtccctcaggaacatcagggacaacgaggagaaggactcagccttccgcggcatctgcatgatgatcggtgtcaacccggggggcgttgtgcaggactttattttcttctgcgatgctgtagcctcctgggtgagcccgaaggatgaccttcgggacatgttttataagattctccacggcttcaaagaccaagttggggaagataactggcagcagttctctgagcaattcccgccgctgctcaaggagaggctggcggctttctatggggtctaggtgatcatggagactgccaggtttctgtctgcgtcgtcgtcggagggattactggggagtgcgctgcatccggaagtcgctgtgccctggttgaggggggttagggaggagtgagtgggactcaaatccagatgccttccccgtccgtccgtccgtccgtccatccgtccacttgccctcctggcaggtgggtggggccaccatgctcatcctacaaacggggaggtgggggggacttctggtgggcaagggcccctgggctctaatagggtcatctctggcagcccacttgggccagctacgtgggagggaggaattacacagctgaccgaatccggcttcggatgaggtgagggaggagcaggtcaggaggggggccctcgtagggacgcgtacactcacacggacacacatggccacacgcatgtgcgggtgccataaccggcgaggctgggccagccgctccaccatttccccgactgcatggagacagtagaattagtgaacccctgagttaacccgtaaggccttccgtgtaacctgcatctagagtttaagaagcttctgctgttttgccggaattggcggtgactggggagggctgggtgggtggggggcctcaggcgggatctcggggcggggggaggaggatggtgaccttgggagtcgccctgtcagcacgcacatgcttgggacccactccacacactccctgccagctttgttgcagcctcagctggtggtgtctccgtccttatcctagcctagctcgcagggtgagaaccactggagtggctggggctggccagaggtcaccgtttctccttcctgtgtgctccagtggcttttgaagacactgggttgggacctttttcctgaagagagctgggtgtagccagagctactggcacctaccccgagcatctctctctgtaagcagcttcaggggcagtccgtttctctgtgcttctgaaacccccttctcacgtttcaggccccagttttaactcaaggcctggggcaggggcgtttaattgatgatgacagaggacacaggtttttgccagcaaaaaggaaaaccaaggcttggtggaagggaaaggtggtgtgtcccctgttccctattccatctccctgggacttcctgctcatcatagtacccagtgagcccagagatcctactagactgggtcagcaattctagagaaccttccggaatagtctgggaacatggtcaaggtggaaggggctcccctagagagggtgggggtgtagttacttcccagttggccagaaaactgggccttgcagacccccttagcattttttccctttttttccttccctgctttctacttctttggggagccccttgtgttttggagtctgactggagtctcgcatcctggggcctgctccatccatccctcctgggcgccagaccctccatccaagccctgtgtctttccatagtcagggtcaggccctgcatctattccaaggggcactcagtacacattccataaattagctgggtgtccctgcacgcccaccccatgaaactcgagcaggtctctggaagccatttgttaaaaaaaaaaaaaaaagttttaaaaataccttttaattttctggtaattccagttctttgaagcatcctctgctgggtcttggggtgtgtggatggattggctgtctgatgggattggtaacccctcgctactcaagatggggggatacaaacaccttcagggaaggggagcctggttcttctcgttttcctttttttttttttttttaaaaaaaaactatttaattttttaatttatttttggttgttttttgcacaatgaagtttcagcttctcaaccttctcccctacccagggctgtggacccagactggccttgagccacagtccctctttccctcctcaccctcttccccctgcgggctcccgggtctgtccatttgttactgtgctgtgctggggattggcgccgaggtggcgtgagattccacttgtgtagaactttgttgagtaaagatcagtttcttgtgaactcctta

SEQ ID NO: 32457 - DNA, 4949 bp, Homo sapiens
  source 1..4949: mol_type = unassigned DNA
gagtacgggagccgcggcggctcacctacggccgcgtttttcttttttttttttctttctttcttttttttttttttttttttttttaattctctctctttggctccctccttccgcgcgagtctctggagaagccgcagcgcgagttgccgccgctgctgcccggggccggcttgccttgcgccatggactggcagccagacgagcagggcctgcagcaggtcctgcagctgctcaaagactcacagtcgcccaacacagccactcagcgcatcgtgcaggataaactcaaacaactcaatcagtttcctgacttcaacaactacctgattttcgtcctgaccagactcaagtcagaagatgagccaacgcgctctctcagtggcctcatcctcaagaacaacgtgaaggcacactatcagagcttcccaccccctgtggcagacttcatcaaacaggagtgtctcaacaacattggcgatgcctcctcgctcatccgagccaccattggcattctcatcaccaccatcgcttccaagggtgagctgcagatgtggcccgagctgctgccccagctctgcaacctgcttaactcggaggattacaacacttgtgagggagcctttggagccctgcagaagatctgtgaagactcatcagagcttctggacagtgacgccctcaacaggcccctcaacatcatgatccccaagttcctgcagttcttcaagcactgcagtcccaagatccggtcccacgccatcgcctgcgtgaaccagttcatcatggaccgggcccaggcgctgatggacaatattgacaccttcatcgagcacctatttgccctggctgtggatgatgaccccgaggtgcggaagaatgtgtgccgtgccctggtgatgcttctggaagtgcggattgacaggctcatcccccacatgcacagcatcatccagtacatgctgcagaggacccaggaccatgatgagaacgttgcccttgaggcctgtgagttctggctgacgctggccgagcagcccatctgcaaggaagtcctggcctcccatctggtccagttgatccccatcttggtgaatgggatgaagtactcggaaattgacatcatcctgctcaagggggatgtggaggaggatgaggctgtccccgacagtgagcaggacatcaagccacgcttccacaagtcacgcacggtcacactgccccacgaggctgagcggcctgatggctccgaggacgcggaggatgacgatgatgatgatgctctgtccgactggaatttgaggaagtgctcagcggctgcactggacgtcctcgccaatgtcttccgggaggaactgctgccccacctactcccactactcaaaggcctcctcttccaccccgagtgggtggtcaaggagtcgggcatcctggtgctgggcgccattgctgagggctgcatgcagggcatggtgccctacctgcctgagctgatcccgcacctgatccagtgcctgtcggataagaaggccttggtccgctccatcgcctgctggacgctgagccgctatgcccactgggtggtcagccagccacccgacatgcacctcaagcccctgatgacagagctgctcaaacgcatcctggatggcaacaagagggtacaggaggcggcctgcagtgcttttgccaccctggaggaagaggcctgcacggagctggtgccctacctcagctacatcctggacacccttgtctttgcctttgggaaataccagcacaagaacctgctcatcctctatgacgccattggcaccctggccgactctgtaggccaccacctcaaccagccggaatacatccagaagctgatgcccccactgatccagaagtggaatgagctcaaggacgaagacaaggacctcttccccctgctggagtgtctgtcatcggtggccaccgccctgcagagtggcttcctgccttactgtgagcccgtctaccagcgctgtgtcaccctggtgcagaagacactggctcaggccatgatgtacacccagcaccctgagcagtatgaggctcccgacaaggacttcatgatcgtagcactggatctgctcagcggcctggccgagggcctgggtggtcacgtggagcagctggtggcccgcagcaacatcatgacattgctgttccagtgcatgcaggactcgatgcctgaggtccggcagagctcctttgccctcctgggagacctcaccaaagcctgcttcatccatgtcaagccctgtatcgccgagttcatgcccattctgggcaccaacctgaacccagagttcatctccgtctgcaacaacgccacctgggccattggtgaaatctgcatgcagatgggggcagagatgcagccttatgtgcagatggtcctcaacaacctggtggaaatcattaaccgacccaacacacccaagacactgctggaaaacacaggtcgcctgacgagtccctctgccattccagccatcaccatcggccgcttgggctacgtgtgcccccaggaggtggcacccatgctgcagcagttcatccggccttggtgcacgtccctcaggaacatcagggacaacgaggagaaggactcagccttccgcggcatctgcatgatgatcggtgtcaacccggggggcgttgtgcaggactttattttcttctgcgatgctgtagcctcctgggtgagcccgaaggatgaccttcgggacatgttttataagattctccacggcttcaaagaccaagttggggaagataactggcagcagttctctgagcaattcccgccgctgctcaaggagaggctggcggctttctatggggtctaggtgatcatggagactgccaggtttctgtctgcgtcgtcgtcggagggattactggggagtgcgctgcatccggaagtcgctgtgccctggttgaggggggttagggaggagtgagtgggactcaaatccagatgccttccccgtccgtccgtccgtccgtccatccgtccacttgccctcctggcaggtgggtggggccaccatgctcatcctacaaacggggaggtgggggggacttctggtgggcaagggcccctgggctctaatagggtcatctctggcagcccacttgggccagctacgtgggagggaggaattacacagctgaccgaatccggcttcggatgaggtgagggaggagcaggtcaggaggggggccctcgtagggacgcgtacactcacacggacacacatggccacacgcatgtgcgggtgccataaccggcgaggctgggccagccgctccaccatttccccgactgcatggagacagtagaattagtgaacccctgagttaacccgtaaggccttccgtgtaacctgcatctagagtttaagaagcttctgctgttttgccggaattggcggtgactggggagggctgggtgggtggggggcctcaggcgggatctcggggcggggggaggaggatggtgaccttgggagtcgccctgtcagcacgcacatgcttgggacccactccacacactccctgccagctttgttgcagcctcagctggtggtgtctccgtccttatcctagcctagctcgcagggtgagaaccactggagtggctggggctggccagaggtcaccgtttctccttcctgtgtgctccagtggcttttgaagacactgggttgggacctttttcctgaagagagctgggtgtagccagagctactggcacctaccccgagcatctctctctgtaagcagcttcaggggcagtccgtttctctgtgcttctgaaacccccttctcacgtttcaggccccagttttaactcaaggcctggggcaggggcgtttaattgatgatgacagaggacacaggtttttgccagcaaaaaggaaaaccaaggcttggtggaagggaaaggtggtgtgtcccctgttccctattccatctccctgggacttcctgctcatcatagtacccagtgagcccagagatcctactagactgggtcagcaattctagagaaccttccggaatagtctgggaacatggtcaaggtggaaggggctcccctagagagggtgggggtgtagttacttcccagttggccagaaaactgggccttgcagacccccttagcattttttccctttttttccttccctgctttctacttctttggggagccccttgtgttttggagtctgactggagtctcgcatcctggggcctgctccatccatccctcctgggcgccagaccctccatccaagccctgtgtctttccatagtcagggtcaggccctgcatctattccaaggggcactcagtacacattccataaattagctgggtgtccctgcacgcccaccccatgaaactcgagcaggtctctggaagccatttgttaaaaaaaaaaaaaaaagttttaaaaataccttttaattttctggtaattccagttctttgaagcatcctctgctgggtcttggggtgtgtggatggattggctgtctgatgggattggtaacccctcgctactcaagatggggggatacaaacaccttcagggaaggggagcctggttcttctcgttttcctttttttttttttttttaaaaaaaaactatttaattttttaatttatttttggttgttttttgcacaatgaagtttcagcttctcaaccttctcccctacccagggctgtggacccagactggccttgagccacagtccctctttccctcctcaccctcttccccctgcgggctcccgggtctgtccatttgttactgtgctgtgctggggattggcgccgaggtggcgtgagattccacttgtgtagaactttgttgagtaaagatcagtttcttgtgaactcctta

SEQ ID NO: 32458 - DNA, 5226 bp, Homo sapiens
  source 1..5226: mol_type = unassigned DNA
gggcagagtgtcgggggaaggggactcttcagggactgtgcctgcatagaagagaccacgggggccggggcgctatcacggtctggggcggggcccctggatgtggaggcggctgggccctcgcccagccgctgcgagggaggtggaagccttcgggctcggagccggggtcagcggcatgggccaccctgggacgagggctcttcgctgggtcccatgaggatccgccgggccccgccgccgccgcctgtggcccgtttccacatcccccctcccgcgctcccgagcccgcgactgcgcggccgaggatggcgcagctggcggggaccccgcacttgggcgggcgtggatcggaggcctccgcctgtccgccgagggcgttcccgtcgtcatgcggccaccgcggcctcaggggctccacctgggtctcacacggagccccagagacccagcgctgaccccggcccctacctccgcagcttgccttgcgccatggactggcagccagacgagcagggcctgcagcaggtcctgcagctgctcaaagactcacagtcgcccaacacagccactcagcgcatcgtgcaggataaactcaaacaactcaatcagtttcctgacttcaacaactacctgattttcgtcctgaccagactcaagtcagaagatgagccaacgcgctctctcagtggcctcatcctcaagaacaacgtgaaggcacactatcagagcttcccaccccctgtggcagacttcatcaaacaggagtgtctcaacaacattggcgatgcctcctcgctcatccgagccaccattggcattctcatcaccaccatcgcttccaagggtgagctgcagatgtggcccgagctgctgccccagctctgcaacctgcttaactcggaggattacaacacttgtgagggagcctttggagccctgcagaagatctgtgaagactcatcagagcttctggacagtgacgccctcaacaggcccctcaacatcatgatccccaagttcctgcagttcttcaagcactgcagtcccaagatccggtcccacgccatcgcctgcgtgaaccagttcatcatggaccgggcccaggcgctgatggacaatattgacaccttcatcgagcacctatttgccctggctgtggatgatgaccccgaggtgcggaagaatgtgtgccgtgccctggtgatgcttctggaagtgcggattgacaggctcatcccccacatgcacagcatcatccagtacatgctgcagaggacccaggaccatgatgagaacgttgcccttgaggcctgtgagttctggctgacgctggccgagcagcccatctgcaaggaagtcctggcctcccatctggtccagttgatccccatcttggtgaatgggatgaagtactcggaaattgacatcatcctgctcaagggggatgtggaggaggatgaggctgtccccgacagtgagcaggacatcaagccacgcttccacaagtcacgcacggtcacactgccccacgaggctgagcggcctgatggctccgaggacgcggaggatgacgatgatgatgatgctctgtccgactggaatttgaggaagtgctcagcggctgcactggacgtcctcgccaatgtcttccgggaggaactgctgccccacctactcccactactcaaaggcctcctcttccaccccgagtgggtggtcaaggagtcgggcatcctggtgctgggcgccattgctgagggctgcatgcagggcatggtgccctacctgcctgagctgatcccgcacctgatccagtgcctgtcggataagaaggccttggtccgctccatcgcctgctggacgctgagccgctatgcccactgggtggtcagccagccacccgacatgcacctcaagcccctgatgacagagctgctcaaacgcatcctggatggcaacaagagggtacaggaggcggcctgcagtgcttttgccaccctggaggaagaggcctgcacggagctggtgccctacctcagctacatcctggacacccttgtctttgcctttgggaaataccagcacaagaacctgctcatcctctatgacgccattggcaccctggccgactctgtaggccaccacctcaaccagccggaatacatccagaagctgatgcccccactgatccagaagtggaatgagctcaaggacgaagacaaggacctcttccccctgctggagtgtctgtcatcggtggccaccgccctgcagagtggcttcctgccttactgtgagcccgtctaccagcgctgtgtcaccctggtgcagaagacactggctcaggccatgatgtacacccagcaccctgagcagtatgaggctcccgacaaggacttcatgatcgtagcactggatctgctcagcggcctggccgagggcctgggtggtcacgtggagcagctggtggcccgcagcaacatcatgacattgctgttccagtgcatgcaggactcgatgcctgaggtccggcagagctcctttgccctcctgggagacctcaccaaagcctgcttcatccatgtcaagccctgtatcgccgagttcatgcccattctgggcaccaacctgaacccagagttcatctccgtctgcaacaacgccacctgggccattggtgaaatctgcatgcagatgggggcagagatgcagccttatgtgcagatggtcctcaacaacctggtggaaatcattaaccgacccaacacacccaagacactgctggaaaacacagccatcaccatcggccgcttgggctacgtgtgcccccaggaggtggcacccatgctgcagcagttcatccggccttggtgcacgtccctcaggaacatcagggacaacgaggagaaggactcagccttccgcggcatctgcatgatgatcggtgtcaacccggggggcgttgtgcaggactttattttcttctgcgatgctgtagcctcctgggtgagcccgaaggatgaccttcgggacatgttttataagattctccacggcttcaaagaccaagttggggaagataactggcagcagttctctgagcaattcccgccgctgctcaaggagaggctggcggctttctatggggtctaggtgatcatggagactgccaggtttctgtctgcgtcgtcgtcggagggattactggggagtgcgctgcatccggaagtcgctgtgccctggttgaggggggttagggaggagtgagtgggactcaaatccagatgccttccccgtccgtccgtccgtccgtccatccgtccacttgccctcctggcaggtgggtggggccaccatgctcatcctacaaacggggaggtgggggggacttctggtgggcaagggcccctgggctctaatagggtcatctctggcagcccacttgggccagctacgtgggagggaggaattacacagctgaccgaatccggcttcggatgaggtgagggaggagcaggtcaggaggggggccctcgtagggacgcgtacactcacacggacacacatggccacacgcatgtgcgggtgccataaccggcgaggctgggccagccgctccaccatttccccgactgcatggagacagtagaattagtgaacccctgagttaacccgtaaggccttccgtgtaacctgcatctagagtttaagaagcttctgctgttttgccggaattggcggtgactggggagggctgggtgggtggggggcctcaggcgggatctcggggcggggggaggaggatggtgaccttgggagtcgccctgtcagcacgcacatgcttgggacccactccacacactccctgccagctttgttgcagcctcagctggtggtgtctccgtccttatcctagcctagctcgcagggtgagaaccactggagtggctggggctggccagaggtcaccgtttctccttcctgtgtgctccagtggcttttgaagacactgggttgggacctttttcctgaagagagctgggtgtagccagagctactggcacctaccccgagcatctctctctgtaagcagcttcaggggcagtccgtttctctgtgcttctgaaacccccttctcacgtttcaggccccagttttaactcaaggcctggggcaggggcgtttaattgatgatgacagaggacacaggtttttgccagcaaaaaggaaaaccaaggcttggtggaagggaaaggtggtgtgtcccctgttccctattccatctccctgggacttcctgctcatcatagtacccagtgagcccagagatcctactagactgggtcagcaattctagagaaccttccggaatagtctgggaacatggtcaaggtggaaggggctcccctagagagggtgggggtgtagttacttcccagttggccagaaaactgggccttgcagacccccttagcattttttccctttttttccttccctgctttctacttctttggggagccccttgtgttttggagtctgactggagtctcgcatcctggggcctgctccatccatccctcctgggcgccagaccctccatccaagccctgtgtctttccatagtcagggtcaggccctgcatctattccaaggggcactcagtacacattccataaattagctgggtgtccctgcacgcccaccccatgaaactcgagcaggtctctggaagccatttgttaaaaaaaaaaaaaaaagttttaaaaataccttttaattttctggtaattccagttctttgaagcatcctctgctgggtcttggggtgtgtggatggattggctgtctgatgggattggtaacccctcgctactcaagatggggggatacaaacaccttcagggaaggggagcctggttcttctcgttttcctttttttttttttttttaaaaaaaaactatttaattttttaatttatttttggttgttttttgcacaatgaagtttcagcttctcaaccttctcccctacccagggctgtggacccagactggccttgagccacagtccctctttccctcctcaccctcttccccctgcgggctcccgggtctgtccatttgttactgtgctgtgctggggattggcgccgaggtggcgtgagattccacttgtgtagaactttgttgagtaaagatcagtttcttgtgaactcctta

SEQ ID NO: 32459 - DNA, 2671 bp, Homo sapiens
  source 1..2671: mol_type = unassigned DNA
agagggaggcctttacgcatgccttggtggcggctttctgcacgtgtttctcagcccaggtttcagtccagcggaactggctacctcggaatcccaactgctcctttagggtgtcttccgcgattctccgagtggagttaggcgcctgccgacacttccctaaccttggaggcccgggacttgattttcatgaatgaacggagccgggactgactttgcctacggcaaagaaggaaaaacggtgccctactgtcttcagacgtcgcaaggatcaagaagatttctttcttcatgaccctgcccttgccagaatttcctgcgctgttccacctcattcaacttcagcttgccttgcgccatggactggcagccagacgagcagggcctgcagcaggtcctgcagctgctcaaagactcacagtcgcccaacacagccactcagcgcatcgtgcaggataaactcaaacaactcaatcagtttcctgacttcaacaactacctgattttcgtcctgaccagactcaagtcagaagatgagccaacgcgctctctcagtggcctcatcctcaagaacaacgtgaaggcacactatcagagcttcccaccccctgtggcagacttcatcaaacaggagtgtctcaacaacattggcgatgcctcctcgctcatccgagccaccattggcattctcatcaccaccatcgcttccaagggtgagctgcagatgtggcccgagctgctgccccagctctgcaacctgcttaactcggaggattacaacacttgtgagggagcctttggagccctgcagaagatctgtgaagactcatcagagcttctggacagtgacgccctcaacaggcccctcaacatcatgatccccaagttcctgcagttcttcaagcactgcagtcccaagatccggtcccacgccatcgcctgcgtgaaccagttcatcatggaccgggcccaggcgctgatggacaatattgacaccttcatcgagcacctatttgccctggctgtggatgatgaccccgaggtgcggaagaatgtgtgccgtgccctggtgatgcttctggaagtgcggattgacaggctcatcccccacatgcacagcatcatccagtacatgctgcagaggacccaggaccatgatgagaacgttgcccttgaggcctgtgagttctggctgacgctggccgagcagcccatctgcaaggaagtcctggcctcccatctggtccagttgatccccatcttggtgaatgggatgaagtactcggaaattgacatcatcctgctcaagggggatgtggaggaggatgaggctgtccccgacagtgagcaggacatcaagccacgcttccacaagtcacgcacggtcacactgccccacgaggctgagcggcctgatggctccgaggacgcggaggatgacgatgatgatgatgctctgtccgactggaatttgaggaagtgctcagcggctgcactggacgtcctcgccaatgtcttccgggaggaactgctgccccacctactcccactactcaaaggcctcctcttccaccccgagtgggtggtcaaggagtcgggcatcctggtgctgggcgccattgctgagggctgcatgcagggcatggtgccctacctgcctgagctgatcccgcacctgatccagtgcctgtcggataagaaggccttggtccgctccatcgcctgctggacgctgagccgctatgcccactgggtggtcagccagccacccgacatgcacctcaagcccctgatgacagagctgctcaaacgcatcctggatggcaacaagagggtacaggaggcggcctgcagtgcttttgccaccctggaggaagaggcctgcacggagctggtgccctacctcagctacatcctggacacccttgtctttgcctttgggaaataccagcacaagaacctgctcatcctctatgacgccattggcaccctggccgactctgtaggccaccacctcaaccagccggaatacatccagaagctgatgcccccactgatccagaagtggaatgagctcaaggacgaagacaaggacctcttccccctgctggagtgtctgtcatcggtggccaccgccctgcagagtggcttcctgccttactgtgagcccgtctaccagcgctgtgtcaccctggtgcagaagacactggctcaggccatgatgtacacccagcaccctgagcagtatgaggctcccgacaaggacttcatgatcgtagcactggatctgctcagcggcctggccgagggcctgggtggtcacgtggagcagctggtggcccgcagcaacatcatgacattgctgttccagtgcatgcaggactcgatgcctgaggtccggcagagctcctttgccctcctgggagacctcaccaaagcctgcttcatccatgtcaagccctgtatcgccgagttcatgcccattctgggcaccaacctgaacccagagttcatctccgtctgcaacaacgccacctgggccattggtgaaatctgcatgcagatgggggcagagatgcagccttatgtgcagatggtcctcaacaacctggtggaaatcattaaccgacccactccatctcaaaaacaaaacaaaacaaaaaaaaacaaa

SEQ ID NO: 32460 - DNA, 3245 bp, Homo sapiens
  source 1..3245: mol_type = unassigned DNA
ccctggtaacggccaaagaggaggagatggcgccagtcagggagcggccgtggcccagacagtgaggaagcgcgaaggcggagcaaccgaggaatcctccggagaagaatcagagccgtcgctaccgccactaccgccaccaccatggaaggagcaaagccgacattgcagctcgtgtaccaggcagtgcaggcgctttaccacgacccagatcccagcggaaaggagcgcgcctctttttggcttggggagctgcagcgttcggttcatgcatgggagatctcagaccagttgttacagatccggcaggatgtggagtcatgctattttgctgcacagaccatgaaaatgaagattcagacctcattttatgagctccccacagactctcatgcctctttacgggactcattgctaacccatatccagaacttgaaagacttgtcacctgttattgtaacgcagctggctttagcaatagcagatcttgccctacagatgccttcctggaagggatgtgtgcaaacactggtggaaaaatacagcaatgatgtgacttctttgccttttttgctggagatccttacagtgttacctgaagaagtacatagtcgttccttacgaattggagctaatcggcgcacagaaattatagaagatttggccttctactctagtacagtagtatctctattgatgacctgtgtagaaaaagcaggaacagatgagaaaatgcttatgaaggtttttcgctgtttgggaagttggtttaacttgggagttttggacagtaacttcatggctaacaataaattactagcactcctttttgaggttttgcaacaggataagacctcgtctaacctacatgaagctgcttcggactgtgtatgctcagctctctatgccattgagaatgtggagactaacttgccattagccatgcaactttttcagggagtgctgacattggagactgcctatcatatggccgtggcacgtgaagatttagacaaagttctgaattactgccgtattttcactgaactatgtgaaacttttcttgaaaaaattgtttgtactccaggccaaggtcttggggaccttcgaactctggagctgctgcttatctgtgcaggccatcctcaatatgaggtagtagaaatttcatttaacttttggtaccgactgggggaacatttgtacaaaactaacgatgaagttattcatggcatcttcaaagcttacattcagaggctgcttcacgccttggctcgacactgccagctggaaccagaccatgagggggttcctgaggagactgatgactttggggagtttcgcatgagggtatcagacctggtaaaggacttgattttcttgatagggtctatggagtgttttgctcagttatattctactctgaaagaaggcaacccaccctgggaggtgacagaagcggttctctttatcatggctgctatagcaaagagtgttgatccggaaaacaatccaacacttgtggaagtcctagaaggagttgtccgcctcccggagaccgtacatacggctgtgcgatacaccagcattgaattggttggagagatgagtgaagtcgttgatcgaaatcctcagttccttgaccctgtgttgggctatttgatgaaaggcctgtgtgaaaagcccctggcttctgctgcagccaaagccattcataacatttgctctgtctgccgagatcacatggctcagcactttaatggactcctggagattgcccgctccctcgattccttcctgttgtctccagaagctgctgtgggcttgctaaaagggacagcacttgtcctagcccgattacctttggataagattaccgaatgtcttagtgaactatgttctgttcaggttatggcattgaaaaagctgttgtctcaagagcccagcaatggcatatcctcagatcccacagtgttcttagatcgccttgcagtgatatttaggcataccaatcccattgtggaaaatggacagactcatccgtgtcagaaagtcatacaggaaatatggccagttttatccgagactctaaataagcaccgagctgataatcggattgtagagcgttgttgcaggtgcctgcgctttgctgttcgctgtgtaggcaaaggatctgcagcactgctgcagccactagtcacacagatggtgaatgtgtaccacgtacatcagcattcctgcttcctgtaccttggcagtatccttgtggatgaatatggcatggaagaaggctgtcggcagggactgctagacatgctccaggcactgtgcatccccacctttcagctcctagaacagcagaatggtctccagaatcaccctgacactgtagatgacctgttccggctagccaccaggtttattcagcgtagccctgtcaccttgctgcggagccaagtggtcatccctatcttacagtgggccattgcctctactaccctggaccaccgggatgccaattgtagtgtcatgaggtttctacgagacctcattcatacaggggtagccaatgatcatgaagaagactttgaattacggaaagaactgattggacaggtgatgaaccagcttggacagcagcttgtcagccagctgctgcacacctgctgcttttgcctccccccctataccctaccagatgtggctgaagtgctctgggagatcatgcaggttgacagaccgactttttgtcgatggttagaaaattccttaaaaggtttgccaaaggaaacaaccgtgggagccgtcacagtgacacacaaacaacttacagacttccacaagcaagtcactagtgctgaggaatgtaaacaagtttgctgggccttgcgagacttcaccaggttgtttcgatagctcacactcctgcactgtgcctgtcacccaggaatgtcttttttaattagaagacaggaagaaaacaaaaaccagactgtgtcccacaatcagaaacctccgttgtggcagaggggccttcaccgccaccagggtgtcccgccagacagggagagactccagccttctgaggccatcctgaggagttcctgtttgggggtgtgagggaaaatcagcgcggattttaaaaagatggctgtggcctgcccggcgtggtgggaggggagctggtttcctggtgaactttctaaaaggaaaaataattttaagtaaagaaaaaagaaaaaaaa

SEQ ID NO: 32461 - DNA, 3771 bp, Homo sapiens
  source 1..3771: mol_type = unassigned DNA
aaaggtatcggtgctgtcgcttccggtccgggtaaacgaaccttaggtacactggtgtgtggcctcccaagataggcttctgagggcaagtcagcgactgaagacgggagcgccagaatctgtggactcaagagtctagaatcaagtggaaaaaccggaaaaaaggccaggaacctgaatacgacctaatagctgtttccgagggggcaacttccacggagagccttctgccctggtaacggccaaagaggaggagatggcgccagtcagggagcggccgtggcccagacagtgaggaagcgcgaaggcggagcaaccgaggaatcctccggagaagaatcagagccgtcgctaccgccactaccgccaccaccatggaaggagcaaagccgacattgcagctcgtgtaccaggcagtgcaggcgctttaccacgacccagatcccagcggaaaggagcgcgcctctttttggcttggggagctgcagcgttcggttcatgcatgggagatctcagaccagttgttacagatccggcaggatgtggagtcatgctattttgctgcacagaccatgaaaatgaagattcagacctcattttatgagctccccacagactctcatgcctctttacgggactcattgctaacccatatccagaacttgaaagacttgtcacctgttattgtaacgcagctggctttagcaatagcagatcttgccctacagatgccttcctggaagggatgtgtgcaaacactggtggaaaaatacagcaatgatgtgacttctttgccttttttgctggagatccttacagtgttacctgaagaagtacatagtcgttccttacgaattggagctaatcggcgcacagaaattatagaagatttggccttctactctagtacagtagtatctctattgatgacctgtgtagaaaaagcaggaacagatgagaaaatgcttatgaaggtttttcgctgtttgggaagttggtttaacttgggagttttggacagtaacttcatggctaacaataaattactagcactcctttttgaggttttgcaacaggataagacctcgtctaacctacatgaagctgcttcggactgtgtatgctcagctctctatgccattgagaatgtggagactaacttgccattagccatgcaactttttcagggagtgctgacattggagactgcctatcatatggccgtggcacgtgaagatttagacaaagttctgaattactgccgtattttcactgaactatgtgaaacttttcttgaaaaaattgtttgtactccaggccaaggtcttggggaccttcgaactctggagctgctgcttatctgtgcaggccatcctcaatatgaggtagtagaaatttcatttaacttttggtaccgactgggggaacatttgtacaaaactaacgatgaagttattcatggcatcttcaaagcttacattcagaggctgcttcacgccttggctcgacactgccagctggaaccagaccatgagggggttcctgaggagactgatgactttggggagtttcgcatgagggtatcagacctggtaaaggacttgattttcttgatagggtctatggagtgttttgctcagttatattctactctgaaagaaggcaacccaccctgggaggtgacagaagcggttctctttatcatggctgctatagcaaagagtgttgatccaaagaagccctttagcaatgctgtgtgtcgtcacagcctgttatttggccagaatataacctctgaaatcagtaactgtgagtacttaccgcctgtactcagggaaaacaatccaacacttgtggaagtcctagaaggagttgtccgcctcccggagaccgtacatacggctgtgcgatacaccagcattgaattggttggagagatgagtgaagtcgttgatcgaaatcctcagttccttgaccctgtgttgggctatttgatgaaaggcctgtgtgaaaagcccctggcttctgctgcagccaaagccattcataacatttgctctgtctgccgagatcacatggctcagcactttaatggactcctggagattgcccgctccctcgattccttcctgttgtctccagaagctgctgtgggcttgctaaaagggacagcacttgtcctagcccgattacctttggataagattaccgaatgtcttagtgaactatgttctgttcaggttatggcattgaaaaagctgttgtctcaagagcccagcaatggcatatcctcagatcccacagtgttcttagatcgccttgcagtgatatttaggcataccaatcccattgtggaaaatggacagactcatccgtgtcagaaagtcatacaggaaatatggccagttttatccgagactctaaataagcaccgagctgataatcggattgtagagcgttgttgcaggtgcctgcgctttgctgttcgctgtgtaggcaaaggatctgcagcactgctgcagccactagtcacacagatggtgaatgtgtaccacgtacatcagcattcctgcttcctgtaccttggcagtatccttgtggatgaatatggcatggaagaaggctgtcggcagggactgctagacatgctccaggcactgtgcatccccacctttcagctcctagaacagcagaatggtctccagaatcaccctgacactgtagatgacctgttccggctagccaccaggtttattcagcgtagccctgtcaccttgctgcggagccaagtggtcatccctatcttacagtgggccattgcctctactaccctggaccaccgggatgccaattgtagtgtcatgaggtttctacgagacctcattcatacaggggtagccaatgatcatgaagaagactttgaattacggaaagaactgattggacaggtgatgaaccagcttggacagcagcttgtcagccagctgctgcacacctgctgcttttgcctccccccctataccctaccagatgtggctgaagtgctctgggagatcatgcaggttgacagaccgactttttgtcgatggttagaaaattccttaaaaggtttgccaaaggaaacaaccgtgggagccgtcacagtgacacacaaacaacttacagacttccacaagcaagtcactagtgctgaggaatgtaaacaagtttgctgggccttgcgagacttcaccaggttgtttcgatagctcacactcctgcactgtgcctgtcacccaggaatgtcttttttaattagaagacaggaagaaaacaaaaaccagactgtgtcccacaatcagaaacctccgttgtggcagaggggccttcaccgccaccagggtgtcccgccagacagggagagactccagccttctgaggccatcctgaggagttcctgtttgggggtgtgagggaaaatcagcgcggattttaaaaagatggctgtggcctgcccggcgtggtgggaggggagctggtttcctggtgaactttctaaaaggaaaaataattttaagtaaagaaaaaagaaaaaaaaggaagactaaacagaaaccagaactgaaacattcacctggtagcaaatgacacatgcacgcacacacacatacacgcacaagcgccagtgcgcacgtgtacacagaaaaacaaaaggacaagctttctgtgaaacaaaatatttacttagggataatgtggggattcacatgaattaaatagctgcaattggaa

SEQ ID NO: 32462 - DNA, 3019 bp, Homo sapiens
  source 1..3019: mol_type = unassigned DNA
gccagtcagggagcggccgtggcccagacagtgaggaagcgcgaaggcggagcaaccgaggaatcctccggagaagaatcagagccgtcgctaccgccactaccgccaccaccatggaaggagcaaagccgacattgcagctcgtgtaccaggcagtgcaggcgctttaccacgacccagatcccagcggaaaggagcgcgcctctttttggcttggggagctgcagcgttcggttcatgcatgggagatctcagaccagttgttacagatccggcaggatgtggagtcatgctattttgctgcacagaccatgaaaatgaagattcagacctcattttatgagctccccacagactctcatgcctctttacgggactcattgctaacccatatccagaacttgaaagacttgtcacctgttattgtaacgcagctggctttagcaatagcagatcttgccctacagatgccttcctggaagggatgtgtgcaaacactggtggaaaaatacagcaatgatgtgacttctttgccttttttgctggagatccttacagtgttacctgaagaagtacatagtcgttccttacgaattggagctaatcggcgcacagaaattatagaagatttggccttctactctagtacagtagtatctctattgatgacctgtgtagaaaaagcaggaacagatgagaaaatgcttatgaaggtttttcgctgtttgggaagttggtttaacttgggagttttggacagtaacttcatggctaacaataaattactagcactcctttttgaggttttgcaacaggataagacctcgtctaacctacatgaagctgcttcggactgtgtatgctcagctctctatgccattgagaatgtggagactaacttgccattagccatgcaactttttcagggagtgctgacattggagactgcctatcatatggccgtggcacgtgaagatttagacaaagttctgaattactgccgtattttcactgaactatgtgaaacttttcttgaaaaaattgtttgtactccaggccaaggtcttggggaccttcgaactctggagctgctgcttatctgtgcaggccatcctcaatatgaggtagtagaaatttcatttaacttttggtaccgactgggggaacatttgtacaaaactaacgatgaagttattcatggcatcttcaaagcttacattcagaggctgcttcacgccttggctcgacactgccagctggaaccagaccatgagggggttcctgaggagactgatgactttggggagtttcgcatgagggtatcagacctggtaaaggacttgattttcttgatagggtctatggagtgttttgctcagttatattctactctgaaagaaggcaacccaccctgggaggtgacagaagcggttctctttatcatggctgctatagcaaagagtgttgatccaaagaagccctttagcaatgctgtgtgtcgtcacagcctgttatttggccagaatataacctctgaaatcagtaactgtgagtacttaccgcctgtactcagggaaaacaatccaacacttgtggaagtcctagaaggagttgtccgcctcccggagaccgtacatacggctgtgcgatacaccagcattgaattggttggagagatgagtgaagtcgttgatcgaaatcctcagttccttgaccctgtgttgggctatttgatgaaaggcctgtgtgaaaagcccctggcttctgctgcagccaaagccattcataacatttgctctgtctgccgagatcacatggctcagcactttaatggactcctggagattgcccgctccctcgattccttcctgttgtctccagaagctgctgtgggcttgctaaaagggacagcacttgtcctagcccgattacctttggataagattaccgaatgtcttagtgaactatgttctgttcaggttatggcattgaaaaagctgttgtctcaagagcccagcaatggcatatcctcagatcccacagtgttcttagatcgccttgcagtgatatttaggcataccaatcccattgtggaaaatggacagactcatccgtgtcagaaagtcatacaggaaatatggccagttttatccgagactctaaataagcaccgagctgataatcggattgtagagcgttgttgcaggtgcctgcgctttgctgttcgctgtgtaggcaaaggatctgcagcactgctgcagccactagtcacacagatggtgaatgtgtaccacgtacatcagcattcctgcttcctgtaccttggcagtatccttgtggatgaatatggcatggaagaaggctgtcggcagggactgctagacatgctccaggcactgtgcatccccacctttcagctcctagaacagcagaatggtctccagaatcaccctgacactgtagatgacctgttccggctagccaccaggtttattcagcgtagccctgtcaccttgctgcggagccaagtggtcatccctatcttacagtgggccattgcctctactaccctggaccaccgggatgccaattgtagtgtcatgaggtttctacgagacctcattcatacaggggtagccaatgatcatgaagaagactttgaattacggaaagaactgattggacaggtgatgaaccagcttggacagcagcttgtcagccagctgctgcacacctgctgcttttgcctccccccctataccctaccagatgtggctgaagtgctctgggagatcatgcaggttgacagaccgactttttgtcgatggttagaaaattccttaaaaggtttgccaaaggaaacaaccgtgggagccgtcacagtgacacacaaacaacttacagacttccacaagcaagtcactagtgctgaggaatgtaaacaagtttgctgggccttgcgagacttcaccaggttgtttcgatagctcacactcctgcactgtgcctgtcacccagg

SEQ ID NO: 32463 - DNA, 3283 bp, Homo sapiens
  source 1..3283: mol_type = unassigned DNA
aaaggtatcggtgctgtcgcttccggtccgggtaaacgaaccttaggtacactggtgtgtggcctcccaagataggcttctgagggcaagtcagcgactgaagacgggagcgccagaatctgtggactcaagagtctagaatcaagtggaaaaaccggaaaaaaggccaggaacctgaatacgacctaatagctgtttccgagggggcaacttccacggagagccttctgccctggtaacggccaaagaggaggagatggcgccagtcagggagcggccgtggcccagacagtgaggaagcgcgaaggcggagcaaccgaggaatcctccggagaagaatcagagccgtcgctaccgccactaccgccaccaccatggaaggagcaaagccgacattgcagctcgtgtaccaggcagtgcaggcgctttaccacgacccagatcccagcggaaaggagcgcgcctctttttggcttggggagctgcagcgttcggttcatgcatgggagatctcagaccagttgttacagatccggcaggatgtggagtcatgctattttgctgcacagaccatgaaaatgaagattcagacctcattttatgagctccccacagactctcatgcctctttacgggactcattgctaacccatatccagaacttgaaagacttgtcacctgttattgtaacgcagctggctttagcaatagcagatcttgccctacagatgccttcctggaagggatgtgtgcaaacactggtggaaaaatacagcaatgatgtgacttctttgccttttttgctggagatccttacagtgttacctgaagaagtacatagtcgttccttacgaattggagctaatcggcgcacagaaattatagaagatttggccttctactctagtacagtagtatctctattgatgacctgtgtagaaaaagcaggaacagatgagaaaatgcttatgaaggtttttcgctgtttgggaagttggtttaacttgggagttttggacagtaacttcatggctaacaataaattactagcactcctttttgaggttttgcaacaggataagacctcgtctaacctacatgaagctgcttcggactgtgtatgctcagctctctatgccattgagaatgtggagactaacttgccattagccatgcaactttttcagggagtgctgacattggagactgcctatcatatggccgtggcacgtgaagatttagacaaagttctgaattactgccgtattttcactgaactatgtgaaacttttcttgaaaaaattgtttgtactccaggccaaggtcttggggaccttcgaactctggagctgctgcttatctgtgcaggccatcctcaatatgaggtagtagaaatttcatttaacttttggtaccgactgggggaacatttgtacaaaactaacgatgaagttattcatggcatcttcaaagcttacattcagaggctgcttcacgccttggctcgacactgccagctggaaccagaccatgagggggttcctgaggagactgatgactttggggagtttcgcatgagggtatcagacctggtaaaggacttgattttcttgatagggtctatggagtgttttgctcagttatattctactctgaaagaaggcaacccaccctgggaggtgacagaagcggttctctttatcatggctgctatagcaaagagtgttgatccggaaaacaatccaacacttgtggaagtcctagaaggagttgtccgcctcccggagaccgtacatacggctgtgcgatacaccagcattgaattggttggagagatgagtgaagtcgttgatcgaaatcctcagttccttgggacagcacttgtcctagcccgattacctttggataagattaccgaatgtcttagtgaactatgttctgttcaggttatggcattgaaaaagctgttgtctcaagagcccagcaatggcatatcctcagatcccacagtgttcttagatcgccttgcagtgatatttaggcataccaatcccattgtggaaaatggacagactcatccgtgtcagaaagtcatacaggaaatatggccagttttatccgagactctaaataagcaccgagctgataatcggattgtagagcgttgttgcaggtgcctgcgctttgctgttcgctgtgtaggcaaaggatctgcagcactgctgcagccactagtcacacagatggtgaatgtgtaccacgtacatcagcattcctgcttcctgtaccttggcagtatccttgtggatgaatatggcatggaagaaggctgtcggcagggactgctagacatgctccaggcactgtgcatccccacctttcagctcctagaacagcagaatggtctccagaatcaccctgacactgtagatgacctgttccggctagccaccaggtttattcagcgtagccctgtcaccttgctgcggagccaagtggtcatccctatcttacagtgggccattgcctctactaccctggaccaccgggatgccaattgtagtgtcatgaggtttctacgagacctcattcatacaggggtagccaatgatcatgaagaagactttgaattacggaaagaactgattggacaggtgatgaaccagcttggacagcagcttgtcagccagctgctgcacacctgctgcttttgcctccccccctataccctaccagatgtggctgaagtgctctgggagatcatgcaggttgacagaccgactttttgtcgatggttagaaaattccttaaaaggtttgccaaaggaaacaaccgtgggagccgtcacagtgacacacaaacaacttacagacttccacaagcaagtcactagtgctgaggaatgtaaacaagtttgctgggccttgcgagacttcaccaggttgtttcgatagctcacactcctgcactgtgcctgtcacccaggaatgtcttttttaattagaagacaggaagaaaacaaaaaccagactgtgtcccacaatcagaaacctccgttgtggcagaggggccttcaccgccaccagggtgtcccgccagacagggagagactccagccttctgaggccatcctgaggagttcctgtttgggggtgtgagggaaaatcagcgcggattttaaaaagatggctgtggcctgcccggcgtggtgggaggggagctggtttcctggtgaactttctaaaaggaaaaataattttaagtaaagaaaaaagaaaaaaaa

SEQ ID NO: 32464 - DNA, 4816 bp, Homo sapiens
  source 1..4816: mol_type = unassigned DNA
taagggcgcgagggaagtggcgggcggggactaaggcggggcgtgcaggtagccggccggccgggggtcgcgggtatggccgaggccaggaagcggcgggagctacttcccctgatctaccaccatctgctgcgggctggctatgtgcgtgcggcgcgggaagtgaaggagcagagcggccagaagtgtttcctggctcagcccgtaacccttctggacatctatacacactggcaacaaacctcagagcttggtcggaagcggaaggcagaggaagatgcggcactgcaagctaagaaaacccgtgtgtcagaccccatcagcacctcggagagctcggaagaggaggaagaagcagaagccgaaaccgccaaagccaccccaagactagcatctaccaactcctcagtcctgggggcggacttgccatcaagcatgaaagaaaaagccaaggcagagacagagaaagctggcaagactgggaattccatgccacaccctgccactgggaagacggtggccaaccttctttctgggaagtctcccaggaagtcagcagagccctcagcaaatactacgttggtctcagaaactgaggaggagggcagcgtcccggcctttggagctgctgccaagcctgggatggtgtcagcgggccaggccgacagctccagcgaggacacctccagctccagtgatgagacagacgtggaggtaaaggcctctgaaaaaattctccaggtcagagctgcctcagcccctgccaaggggacccctgggaaaggggctaccccagcaccccctgggaaggcaggggctgtagcctcccagaccaaggcagggaagccagaggaggactcagagagcagcagcgaggagtcatctgacagtgaggaggagacgccagctgccaaggccctgcttcaggcgaaggcctcaggaaaaacctctcaggtcggagctgcctcagcccctgccaaggagtcccccaggaaaggagctgccccagcgccccctgggaagacagggcctgcagttgccaaggcccaggcggggaagcgggaggaggactcgcagagcagcagcgaggaatcggacagtgaggaggaggcgcctgctcaggcgaagccttcagggaaggccccccaggtcagagccgcctcggcccctgccaaggagtcccccaggaaaggggctgccccagcacctcctaggaaaacagggcctgcagccgcccaggtccaggtggggaagcaggaggaggactcaagaagcagcagcgaggagtcagacagtgacagagaggcactggcagccatgaatgcagctcaggtgaagcccttggggaaaagcccccaggtgaaacctgcctctaccatgggcatggggcccttggggaaaggcgccggcccagtgccacccgggaaggtggggcctgcaaccccctcagcccaggtggggaagtgggaggaggactcagagagcagtagtgaggagtcatcagacagcagtgatggagaggtgcccacagctgtggccccggctcaggaaaagtccttggggaacatcctccaggccaaacccacctccagtcctgccaaggggccccctcagaaggcagggcctgtagccgtccaggtcaaggctgaaaagcccatggacaactcggagagcagcgaggagtcatcggacagtgcggacagtgaggaggcaccagcagccatgactgcagctcaggcaaaaccagctctgaaaattcctcagaccaaggcctgcccaaagaaaaccaataccactgcatctgccaaggtcgcccctgtgcgagtgggcacccaagccccccggaaagcaggaactgcgacttctccagcaggctcatccccagctgtggctgggggcacccagagaccagcagaggattcttcaagcagtgaggaatcagatagtgaggaagagaagacaggtcttgcagtaaccgtgggacaggcaaagtctgtggggaaaggcctccaggtgaaagcagcctcagtgcctgtcaaggggtccttggggcaagggactgctccagtactccctgggaagacggggcctacagtcacccaggtgaaagctgaaaagcaggaagactctgagagcagtgaggaggaatcagacagtgaggaagcagctgcatctccagcacaggtgaaaacctcagtaaagaaaacccaggccaaagccaacccagctgccgccagagcaccttcagcaaaagggacaatttcagcccctggaaaagttgtcactgcagctgctcaagccaagcagaggtctccatccaaggtgaagccaccagtgagaaacccccagaacagtaccgtcttggcgaggggcccagcatctgtgccatctgtggggaaggccgtggctacagcagctcaggcccagacagggccagaggaggactcagggagcagtgaggaggagtcagacagtgaggaggaggcggagacgctggctcaggtgaagccttcagggaagacccaccagatcagagctgccttggctcctgccaaggagtcccccaggaaaggggctgccccaacacctcctgggaagacagggccttcggctgcccaggcagggaagcaggatgactcagggagcagcagcgaggaatcagacagtgatggggaggcaccggcagctgtgacctctgcccaggtgattaaaccccctctgatttttgtcgaccctaatcgtagtccagctggcccagctgctacacccgcacaagcccaggctgcaagcaccccgaggaaggcccgagcctcggagagcacagccaggagctcctcctccgagagcgaggatgaggacgtgatccccgctacacagtgcttgactcctggcatcagaaccaatgtggtgaccatgcccactgcccacccaagaatagcccccaaagccagcatggctggggccagcagcagcaaggagtccagtcggatatcagatggcaagaaacaggagggaccagccactcaggtgtcaaagaagaacccagcttccctcccactgacccaggctgccctgaaggtcctcgcccagaaagccagtgaggctcagcctcctgttgccaggacccagccttcaagtggggttgacagtgctgtgggaacactccctgcaacaagtccccagagcacctccgtccaggccaaagggaccaacaagctcagaaaacctaagcttcctgaggtccagcaggccaccaaagcccctgagagctcagatgacagtgaggacagcagcgacagttcttcagggagtgaggaagatggtgaagggccccagggggccaagtcagcccacacgctgggtcccaccccctccaggacagagaccctggtggaggagaccgcagcagagtccagcgaggatgatgtggtggcgccatcccagtctctcctctcaggttatatgacccctggactaaccccagccaattcccaggcctcaaaagccactcccaagctagactccagcccctcagtttcctctactctggccgccaaagatgacccagatggcaagcaggaggcaaagccccaacaggcagcaggcatgttgtcccctaaaacaggtggaaaagaggctgcttcaggcaccacacctcagaagtcccggaagcccaagaaaggggctgggaacccccaagcctcaaccctggcgctgcaaagcaacatcacccagtgcctcctgggccaaccctggcccctgaatgaggcccaggtgcaggcctcagtggtgaaggtcctgactgagctgctggaacaggaaagaaagaaggtggtggacaccaccaaggagagcagcaggaagggctgggagagccgcaagcggaagctatcgggagaccagccagctgccaggacccccaggagcaagaagaagaagaagctgggggccggggaaggtggggaggcctctgtttccccagaaaagacctccacgacttccaaggggaaagcaaagagagacaaagcaagtggtgatgtcaaggagaagaaagggaaggggtctcttggctcccaaggggccaaggacgagccagaagaggagcttcagaaggggatggggacggttgaaggtggagatcaaagcaacccaaagagcaagaaggagaagaagaaatccgacaagagaaaaaaagacaaagaaaaaaaagaaaagaagaagaaagcaaaaaaggcctcaaccaaagattctgagtcaccgtcccagaagaaaaagaagaaaaagaagaagacagcagagcagactgtatgacgagcaccagcaccaggcacagggatttcctagccgagcagtggccatccccatgcctctgacctccaccgacctctgcccaccatgggttggaactaaactgttaccttccctcgctccacagaagaagacagccagcttcaggggtccctgtgctggccaagccagtgagcctgcggggaggctggtccaaggagaaagtggaccagctcccatgacctcaccccactcccccaacacaggacgcttcatatagatgtgtacagtatatgtatttttttaagtgacctcctctccttccacagaccccacatgcccaaaggcctcgggacttcccaccaccttgctccacagatccagctaggcctgacctgtgcctcatcccgtgccgctcggtctctggctgatcccgaggctttgtcttcctctcgtcagttcttttggttgtgttttttgttttttttttaataactcaaaaaaaaaataaaagacttggaggaagggt

SEQ ID NO: 32465 - DNA, 5098 bp, Homo sapiens
  source 1..5098: mol_type = unassigned DNA
gaaagaggagccggaagtgtggcgcgcgaggtctaagggcgcgagggaagtggcgggcggggactaaggcggggcgtgcaggtagccggccggccgggggtcgcgggtatggccgaggccaggaagcggcgggagctacttcccctgatctaccaccatctgctgcgggctggctatgtgcgtgcggcgcgggaagtgaaggagcagagcggccagaagtgtttcctggctcagcccgtaacccttctggacatctatacacactggcaacaaacctcagagcttggtcggaagcggaaggcagaggaagatgcggcactgcaagctaagaaaacccgtgtgtcagaccccatcagcacctcggagagctcggaagaggaggaagaagcagaagccgaaaccgccaaagccaccccaagactagcatctaccaactcctcagtcctgggggcggacttgccatcaagcatgaaagaaaaagccaaggcagagacagagaaagctggcaagactgggaattccatgccacaccctgccactgggaagacggtggccaaccttctttctgggaagtctcccaggaagtcagcagagccctcagcaaatactacgttggtctcagaaactgaggaggagggcagcgtcccggcctttggagctgctgccaagcctgggatggtgtcagcgggccaggccgacagctccagcgaggacacctccagctccagtgatgagacagacgtggaggggaaaccctcagtaaaaccagcccaggtcaaagcctcatcagtttctactaaggagtctccagcaagaaaggcggccccagcccctgggaaggtgggggatgtgacaccccaggtcaaaggaggggccctgcccccagccaagagggccaagaagccagaagaggagtcagagagtagtgaggagggatctgaaagtgaggaggaggcccctgcagggacacgaagccaggtaaaggcctctgaaaaaattctccaggtcagagctgcctcagcccctgccaaggggacccctgggaaaggggctaccccagcaccccctgggaaggcaggggctgtagcctcccagaccaaggcagggaagccagaggaggactcagagagcagcagcgaggagtcatctgacagtgaggaggagacgccagctgccaaggccctgcttcaggcgaaggcctcaggaaaaacctctcaggtcggagctgcctcagcccctgccaaggagtcccccaggaaaggagctgccccagcgccccctgggaagacagggcctgcagttgccaaggcccaggcggggaagcgggaggaggactcgcagagcagcagcgaggaatcggacagtgaggaggaggcgcctgctcaggcgaagccttcagggaaggccccccaggtcagagccgcctcggcccctgccaaggagtcccccaggaaaggggctgccccagcacctcctaggaaaacagggcctgcagccgcccaggtccaggtggggaagcaggaggaggactcaagaagcagcagcgaggagtcagacagtgacagagaggcactggcagccatgaatgcagctcaggtgaagcccttggggaaaagcccccaggtgaaacctgcctctaccatgggcatggggcccttggggaaaggcgccggcccagtgccacccgggaaggtggggcctgcaaccccctcagcccaggtggggaagtgggaggaggactcagagagcagtagtgaggagtcatcagacagcagtgatggagaggtgcccacagctgtggccccggctcaggaaaagtccttggggaacatcctccaggccaaacccacctccagtcctgccaaggggccccctcagaaggcagggcctgtagccgtccaggtcaaggctgaaaagcccatggacaactcggagagcagcgaggagtcatcggacagtgcggacagtgaggaggcaccagcagccatgactgcagctcaggcaaaaccagctctgaaaattcctcagaccaaggcctgcccaaagaaaaccaataccactgcatctgccaaggtcgcccctgtgcgagtgggcacccaagccccccggaaagcaggaactgcgacttctccagcaggctcatccccagctgtggctgggggcacccagagaccagcagaggattcttcaagcagtgaggaatcagatagtgaggaagagaagacaggtcttgcagtaaccgtgggacaggcaaagtctgtggggaaaggcctccaggtgaaagcagcctcagtgcctgtcaaggggtccttggggcaagggactgctccagtactccctgggaagacggggcctacagtcacccaggtgaaagctgaaaagcaggaagactctgagagcagtgaggaggaatcagacagtgaggaagcagctgcatctccagcacaggtgaaaacctcagtaaagaaaacccaggccaaagccaacccagctgccgccagagcaccttcagcaaaagggacaatttcagcccctggaaaagttgtcactgcagctgctcaagccaagcagaggtctccatccaaggtgaagccaccagtgagaaacccccagaacagtaccgtcttggcgaggggcccagcatctgtgccatctgtggggaaggccgtggctacagcagctcaggcccagacagggccagaggaggactcagggagcagtgaggaggagtcagacagtgaggaggaggcggagacgctggctcaggtgaagccttcagggaagacccaccagatcagagctgccttggctcctgccaaggagtcccccaggaaaggggctgccccaacacctcctgggaagacagggccttcggctgcccaggcagggaagcaggatgactcagggagcagcagcgaggaatcagacagtgatggggaggcaccggcagctgtgacctctgcccaggtgattaaaccccctctgatttttgtcgaccctaatcgtagtccagctggcccagctgctacacccgcacaagcccaggctgcaagcaccccgaggaaggcccgagcctcggagagcacagccaggagctcctcctccgagagcgaggatgaggacgtgatccccgctacacagtgcttgactcctggcatcagaaccaatgtggtgaccatgcccactgcccacccaagaatagcccccaaagccagcatggctggggccagcagcagcaaggagtccagtcggatatcagatggcaagaaacaggagggaccagccactcaggtgtcaaagaagaacccagcttccctcccactgacccaggctgccctgaaggtcctcgcccagaaagccagtgaggctcagcctcctgttgccaggacccagccttcaagtggggttgacagtgctgtgggaacactccctgcaacaagtccccagagcacctccgtccaggccaaagggaccaacaagctcagaaaacctaagcttcctgaggtccagcaggccaccaaagcccctgagagctcagatgacagtgaggacagcagcgacagttcttcagggagtgaggaagatggtgaagggccccagggggccaagtcagcccacacgctggtaggtcccaccccctccaggacagagaccctggtggaggagaccgcagcagagtccagcgaggatgatgtggtggcgccatcccagtctctcctctcaggttatatgacccctggactaaccccagccaattcccaggcctcaaaagccactcccaagctagactccagcccctcagtttcctctactctggccgccaaagatgacccagatggcaagcaggaggcaaagccccaacaggcagcaggcatgttgtcccctaaaacaggtggaaaagaggctgcttcaggcaccacacctcagaagtcccggaagcccaagaaaggggctgggaacccccaagcctcaaccctggcgctgcaaagcaacatcacccagtgcctcctgggccaaccctggcccctgaatgaggcccaggtgcaggcctcagtggtgaaggtcctgactgagctgctggaacaggaaagaaagaaggtggtggacaccaccaaggagagcagcaggaagggctgggagagccgcaagcggaagctatcgggagaccagccagctgccaggacccccaggagcaagaagaagaagaagctgggggccggggaaggtggggaggcctctgtttccccagaaaagacctccacgacttccaaggggaaagcaaagagagacaaagcaagtggtgatgtcaaggagaagaaagggaaggggtctcttggctcccaaggggccaaggacgagccagaagaggagcttcagaaggggatggggacggttgaaggtggagatcaaagcaacccaaagagcaagaaggagaagaagaaatccgacaagagaaaaaaagacaaagaaaaaaaagaaaagaagaagaaagcaaaaaaggcctcaaccaaagattctgagtcaccgtcccagaagaaaaagaagaaaaagaagaagacagcagagcagactgtatgacgagcaccagcaccaggcacagggatttcctagccgagcagtggccatccccatgcctctgacctccaccgacctctgcccaccatgggttggaactaaactgttaccttccctcgctccacagaagaagacagccagcttcaggggtccctgtgctggccaagccagtgagcctgcggggaggctggtccaaggagaaagtggaccagctcccatgacctcaccccactcccccaacacaggacgcttcatatagatgtgtacagtatatgtatttttttaagtgacctcctctccttccacagaccccacatgcccaaaggcctcgggacttcccaccaccttgctccacagatccagctaggcctgacctgtgcctcatcccgtgccgctcggtctctggctgatcccgaggctttgtcttcctctcgtcagttcttttggttgtgttttttgttttttttttaataactcaaaaaaaaaataaaagacttggaggaagggtgcaagctcccagtgc

SEQ ID NO: 32466 - DNA, 3400 bp, Homo sapiens
  source 1..3400: mol_type = unassigned DNA
aggtagccggccggccgggggtcgcgggtatggccgaggccaggaagcggcgggagctacttcccctgatctaccaccatctgctgcgggctggctatgtgcgtgcggcgcgggaagtgaaggagcagagcggccagaagtgtttcctggctcagcccgtaacccttctggacatctatacacactggcaacaaacctcagagcttggtcggaagcggaaggcagaggaagatgcggcactgcaagctaagaaaacccgtgtgtcagaccccatcagcacctcggagagctcggaagaggaggaagaagcagaagccgaaaccgccaaagccaccccaagactagcatctaccaactcctcagtcctgggggcggacttgccatcaagcatgaaagaaaaagccaaggcagagacagagaaagctggcaagactgggaattccatgccacaccctgccactgggaagacggtggccaaccttctttctgggaagtctcccaggaagtcagcagagccctcagcaaatactacgttggtctcagaaactgaggaggagggcagcgtcccggcctttggagctgctgccaagcctgggatggtgtcagcgggccaggccgacagctccagcgaggacacctccagctccagtgatgagacagacgtggaggggaaaccctcagtaaaaccagcccaggtcaaagcctcatcagtttctactaaggagtctccagcaagaaaggcggccccagcccctgggaaggtgggggatgtgacaccccaggtcaaaggaggggccctgcccccagccaagagggccaagaagccagaagaggagtcagagagtagtgaggagggatctgaaagtgaggaggaggcccctgcagggacacgaagccaggtaaaggcctctgaaaaaattctccaggtcagagctgcctcagcccctgccaaggggacccctgggaaaggggctaccccagcaccccctgggaaggcaggggctgtagcctcccagaccaaggcagggaagccagaggaggactcagagagcagcagcgaggagtcatctgacagtgaggaggagacgccagctgccaaggccctgcttcaggcgaaggcctcaggaaaaacctctcaggtcggagctgcctcagcccctgccaaggagtcccccaggaaaggagctgccccagcgccccctgggaagacagggcctgcagttgccaaggcccaggcggggaagcgggaggaggactcgcagagcagcagcgaggaatcggacagtgaggaggaggcgcctgctcaggcgaagccttcagggaaggccccccaggtcagagccgcctcggcccctgccaaggagtcccccaggaaaggggctgccccagcacctcctaggaaaacagggcctgcagccgcccaggtccaggtggggaagcaggaggaggactcaagaagcagcagcgaggagtcagacagtgacagagaggcactggcagccatgaatgcagctcaggtgaagcccttggggaaaagcccccaggtgaaacctgcctctaccatgggcatggggcccttggggaaaggcgccggcccagtgccacccgggaaggtggggcctgcaaccccctcagcccaggtggggaagtgggaggaggactcagagagcagtagtgaggagtcatcagacagcagtgatggagaggtgcccacagctgtggccccggctcaggaaaagtccttggggaacatcctccaggccaaacccacctccagtcctgccaaggggccccctcagaaggcagggcctgtagccgtccaggtcaaggctgaaaagcccatggacaactcggagagcagcgaggagtcatcggacagtgcggacagtgaggaggcaccagcagccatgactgcagctcaggcaaaaccagctctgaaaattcctcagaccaaggcctgcccaaagaaaaccaataccactgcatctgccaaggtcgcccctgtgcgagtgggcacccaagccccccggaaagcaggaactgcgacttctccagcaggctcatccccagctgtggctgggggcacccagagaccagcagaggattcttcaagcagtgaggaatcagatagtgaggaagagaagacaggtcttgcagtaaccgtgggacaggcaaagtctgtggggaaaggcctccaggtgaaagcagcctcagtgcctgtcaaggggtccttggggcaagggactgctccagtactccctgggaagacggggcctacagtcacccaggtgaaagctgaaaagcaggaagactctgagagcagtgaggaggaatcagacagtgaggaagcagctgcatctccagcacaggtgaaaacctcagtaaagaaaacccaggccaaagccaacccagctgccgccagagcaccttcagcaaaagggacaatttcagcccctggaaaagttgtcactgcagctgctcaagccaagcagaggtctccatccaaggtgaagccaccagtgagaaacccccagaacagtaccgtcttggcgaggggcccagcatctgtgccatctgtggggaaggccgtggctacagcagctcaggcccagacagggccagaggaggactcagggagcagtgaggaggagtcagacagtgaggaggaggcggagacgctggctcaggtgaagccttcagggaagacccaccagatcagagctgccttggctcctgccaaggagtcccccaggaaaggggctgccccaacacctcctgggaagacagggccttcggctgcccaggcagggaagcaggatgactcagggagcagcagcgaggaatcagacagtgatggggaggcaccggcagctgtgacctctgcccaggaccaggagtcttcttgaatcccatgagctctgcccaggaccctctctcaagcacctgtggcataccttcatgtgctccactgcacccagagcttaagccacagtcctgctcaggctacacctccaagggtgggaccaggcccaccttatcttcctgtactccagaggcccaagtcagccatgctggtgtggtccaagcttctgtgtgaaccctggcccttccatcagacagcattaccctttgtcctcctctagccccaagctcccagaagcttctgccaggcacctcagagcaccagctcccctgtcccagggcctaaccacagatcctggagttctgcaacctccagaccagagcggtctcatgaaccacctccccttgaatatcacataccacattgttatcaattcatcagtaaggtcagatgctgtttgcacacctccagcaatagggtgctcactgcctctcactttccaatggcacagattacaaaagtaaagaacaaccacca

SEQ ID NO: 32467 - DNA, 4272 bp, Homo sapiens
  source 1..4272: mol_type = unassigned DNA
ggtagccggccggccgggggtcgcgggtatggccgaggccaggaagcggcgggagctacttcccctgatctaccaccatctgctgcgggctggctatgtgcgtgcggcgcgggaagtgaaggagcagagcggccagaagtgtttcctggctcagcccgtaacccttctggacatctatacacactggcaacaaacctcagagcttggtcggaagcggaaggcagaggaagatgcggcactgcaagctaagaaaacccgtgtgtcagaccccatcagcacctcggagagctcggaagaggaggaagaagcagaagccgaaaccgccaaagccaccccaagactagcatctaccaactcctcagtcctgggggcggacttgccatcaagcatgaaagaaaaagccaaggcagagacagagaaagctggcaagactgggaattccatgccacaccctgccactgggaagacggtggccaaccttctttctgggaagtctcccaggaagtcagcagagccctcagcaaatactacgttggtctcagaaactgaggaggagggcagcgtcccggcctttggagctgctgccaagcctgggatggtgtcagcgggccaggccgacagctccagcgaggacacctccagctccagtgatgagacagacgtggaggggaaaccctcagtaaaaccagcccaggtcaaagcctcatcagtttctactaaggagtctccagcaagaaaggcggccccagcccctgggaaggtgggggatgtgacaccccaggtcaaaggaggggccctgcccccagccaagagggccaagaagccagaagaggagtcagagagtagtgaggagggatctgaaagtgaggaggaggcccctgcagggacacgaagccaggtaaaggcctctgaaaaaattctccaggtcagagctgcctcagcccctgccaaggggacccctgggaaaggggctaccccagcaccccctgggaaggcaggggctgtagcctcccagaccaaggcagggaagccagaggaggactcagagagcagcagcgaggagtcatctgacagtgaggaggagacgccagctgccaaggccctgcttcaggcgaaggcctcaggaaaaacctctcaggtcggagctgcctcagcccctgccaaggagtcccccaggaaaggagctgccccagcgccccctgggaagacagggcctgcagttgccaaggcccaggcggggaagcgggaggaggactcgcagagcagcagcgaggaatcggacagtgaggaggaggcgcctgctcaggcgaagccttcagggaaggccccccaggtcagagccgcctcggcccctgccaaggagtcccccaggaaaggggctgccccagcacctcctaggaaaacagggcctgcagccgcccaggtccaggtggggaagcaggaggaggactcaagaagcagcagcgaggagtcagacagtgacagagaggcactggcagccatgaatgcagctcaggtgaagcccttggggaaaagcccccaggtgaaacctgcctctaccatgggcatggggcccttggggaaaggcgccggcccagtgccacccgggaaggtggggcctgcaaccccctcagcccaggtggggaagtgggaggaggactcagagagcagtagtgaggagtcatcagacagcagtgatggagaggtgcccacagctgtggccccggctcaggaaaagtccttggggaacatcctccaggccaaacccacctccagtcctgccaaggggccccctcagaaggcagggcctgtagccgtccaggtcaaggctgaaaagcccatggacaactcggagagcagcgaggagtcatcggacagtgcggacagtgaggaggcaccagcagccatgactgcagctcaggcaaaaccagctctgaaaattcctcagaccaaggcctgcccaaagaaaaccaataccactgcatctgccaaggtcgcccctgtgcgagtgggcacccaagccccccggaaagcaggaactgcgacttctccagcaggctcatccccagctgtggctgggggcacccagagaccagcagaggattcttcaagcagtgaggaatcagatagtgaggaagagaagacaggtcttgcagtaaccgtgggacaggcaaagtctgtggggaaaggcctccaggtgaaagcagcctcagtgcctgtcaaggggtccttggggcaagggactgctccagtactccctgggaagacggggcctacagtcacccaggtgaaagctgaaaagcaggaagactctgagagcagtgaggaggaatcagacagtgaggaagcagctgcatctccagcacaggtgaaaacctcagtaaagaaaacccaggccaaagccaacccagctgccgccagagcaccttcagcaaaagggacaatttcagcccctggaaaagttgtcactgcagctgctcaagccaagcagaggtctccatccaaggtgaagccaccagtgagaaacccccagaacagtaccgtcttggcgaggggcccagcatctgtgccatctgtggggaaggccgtggctacagcagctcaggcccagacagggccagaggaggactcagggagcagtgaggaggagtcagacagtgaggaggaggcggagacgctggctcaggtgaagccttcagggaagacccaccagatcagagctgccttggctcctgccaaggagtcccccaggaaaggggctgccccaacacctcctgggaagacagggccttcggctgcccaggcagggaagcaggatgactcagggagcagcagcgaggaatcagacagtgatggggaggcaccggcagctgtgacctctgcccaggtgattaaaccccctctgatttttgtcgaccctaatcgtagtccagctggcccagctgctacacccgcacaagcccaggctgcaagcaccccgaggaaggcccgagcctcggagagcacagccaggagctcctcctccgagagcgaggatgaggacgtgatccccgctacacagtgcttgactcctggcatcagaaccaatgtggtgaccatgcccactgcccacccaagaatagcccccaaagccagcatggctggggccagcagcagcaaggagtccagtcggatatcagatggcaagaaacaggagggaccagccactcaggttgacagtgctgtgggaacactccctgcaacaagtccccagagcacctccgtccaggccaaagggaccaacaagctcagaaaacctaagcttcctgaggtccagcaggccaccaaagcccctgagagctcagatgacagtgaggacagcagcgacagttcttcagggagtgaggaagatggtgaagggccccagggggccaagtcagcccacacgctgggtcccaccccctccaggacagagaccctggtggaggagaccgcagcagagtccagcgaggatgatgtggtggcgccatcccagtctctcctctcaggttatatgacccctggactaaccccagccaattcccaggcctcaaaagccactcccaagctagactccagcccctcagtttcctctactctggccgccaaagatgacccagatggcaagcaggaggcaaagccccaacaggcagcaggcatgttgtcccctaaaacaggtggaaaagaggctgcttcaggcaccacacctcagaagtcccggaagcccaagaaaggggctgggaacccccaagcctcaaccctggcgctgcaaagcaacatcacccagtgcctcctgggccaaccctggcccctgaatgaggcccaggtgcaggcctcagtggtgaaggtcctgactgagctgctggaacaggaaagaaagaaggtggtggacaccaccaaggagagcagcaggaagggctgggagagccgcaagcggaagctatcgggagaccagccagctgccaggacccccaggagcaagaagaagaagaagctgggggccggggaaggtggggaggcctctgtttccccagaaaagacctccacgacttccaaggggaaagcaaagagagacaaagcaagtggtgatgtcaaggagaagaaagggaaggggtctcttggctcccaaggggccaaggacgagccagaagaggagcttcagaaggggatggggacggttgaaggtggagatcaaagcaacccaaagagcaagaaggagaagaagaaatccgacaagagaaaaaaagacaaaga

SEQ ID NO: 32468 - DNA, 4644 bp, Homo sapiens
  source 1..4644: mol_type = unassigned DNA
gtgcaggtagccggccggccgggggtcgcgggtatggccgaggccaggaagcggcgggagctacttcccctgatctaccaccatctgctgcgggctggctatgtgcgtgcggcgcgggaagtgaaggagcagagcggccagaagtgtttcctggctcagcccgtaacccttctggacatctatacacactggcaacaaacctcagagcttggtcggaagcggaaggcagaggaagatgcggcactgcaagctaagaaaacccgtgtgtcagaccccatcagcacctcggagagctcggaagaggaggaagaagcagaagccgaaaccgccaaagccaccccaagactagcatctaccaactcctcagtcctgggggcggacttgccatcaagcatgaaagaaaaagccaaggcagagacagagaaagctggcaagactgggaattccatgccacaccctgccactgggaagacggtggccaaccttctttctgggaagtctcccaggaagtcagcagagccctcagcaaatactacgttggtctcagaaactgaggaggagggcagcgtcccggcctttggagctgctgccaagcctgggatggtgtcagcgggccaggccgacagctccagcgaggacacctccagctccagtgatgagacagacgtggaggggaaaccctcagtaaaaccagcccaggtcaaagcctcatcagtttctactaaggagtctccagcaagaaaggcggccccagcccctgggaaggtgggggatgtgacaccccaggtcaaaggaggggccctgcccccagccaagagggccaagaagccagaagaggagtcagagagtagtgaggagggatctgaaagtgaggaggaggcccctgcagggacacgaagccaggtaaaggcctctgaaaaaattctccaggtcagagctgcctcagcccctgccaaggggacccctgggaaaggggctaccccagcaccccctgggaaggcaggggctgtagcctcccagaccaaggcagggaagccagaggaggactcagagagcagcagcgaggagtcatctgacagtgaggaggagacgccagctgccaaggccctgcttcaggcgaaggcctcaggaaaaacctctcaggtcggagctgcctcagcccctgccaaggagtcccccaggaaaggagctgccccagcgccccctgggaagacagggcctgcagttgccaaggcccaggcggggaagcgggaggaggactcgcagagcagcagcgaggaatcggacagtgaggaggaggcgcctgctcaggcgaagccttcagggaaggccccccaggtcagagccgcctcggcccctgccaaggagtcccccaggaaaggggctgccccagcacctcctaggaaaacagggcctgcagccgcccaggtccaggtggggaagcaggaggaggactcaagaagcagcagcgaggagtcagacagtgacagagaggcactggcagccatgaatgcagctcaggtgaagcccttggggaaaagcccccaggtgaaacctgcctctaccatgggcatggggcccttggggaaaggcgccggcccagtgccacccgggaaggtggggcctgcaaccccctcagcccaggtggggaagtgggaggaggactcagagagcagtagtgaggagtcatcagacagcagtgatggagaggtgcccacagctgtggccccggctcaggaaaagtccttggggaacatcctccaggccaaacccacctccagtcctgccaaggggccccctcagaaggcagggcctgtagccgtccaggtcaaggctgaaaagcccatggacaactcggagagcagcgaggagtcatcggacagtgcggacagtgaggaggcaccagcagccatgactgcagctcaggcaaaaccagctctgaaaattcctcagaccaaggcctgcccaaagaaaaccaataccactgcatctgccaaggtcgcccctgtgcgagtgggcacccaagccccccggaaagcaggaactgcgacttctccagcaggctcatccccagctgtggctgggggcacccagagaccagcagaggattcttcaagcagtgaggaatcagatagtgaggaagagaagacaggtcttgcagtaaccgtgggacaggcaaagtctgtggggaaaggcctccaggtgaaagcagcctcagtgcctgtcaaggggtccttggggcaagggactgctccagtactccctgggaagacggggcctacagtcacccaggtgaaagctgaaaagcaggaagactctgagagcagtgaggaggaatcagacagtgaggaagcagctgcatctccagcacaggtgaaaacctcagtaaagaaaacccaggccaaagccaacccagctgccgccagagcaccttcagcaaaagggacaatttcagcccctggaaaagttgtcactgcagctgctcaagccaagcagaggtctccatccaaggtgaagccaccagtgagaaacccccagaacagtaccgtcttggcgaggggcccagcatctgtgccatctgtggggaaggccgtggctacagcagctcaggcccagacagggccagaggaggactcagggagcagtgaggaggagtcagacagtgaggaggaggcggagacgctggctcaggtgaagccttcagggaagacccaccagatcagagctgccttggctcctgccaaggagtcccccaggaaaggggctgccccaacacctcctgggaagacagggccttcggctgcccaggcagggaagcaggatgactcagggagcagcagcgaggaatcagacagtgatggggaggcaccggcagctgtgacctctgcccaggtgattaaaccccctctgatttttgtcgaccctaatcgtagtccagctggcccagctgctacacccgcacaagcccaggctgcaagcaccccgaggaaggcccgagcctcggagagcacagccaggagctcctcctccgagagcgaggatgaggacgtgatccccgctacacagtgcttgactcctggcatcagaaccaatgtggtgaccatgcccactgcccacccaagaatagcccccaaagccagcatggctggggccagcagcagcaaggagtccagtcggatatcagatggcaagaaacaggagggaccagccactcaggttgacagtgctgtgggaacactccctgcaacaagtccccagagcacctccgtccaggccaaagggaccaacaagctcagaaaacctaagcttcctgaggtccagcaggccaccaaagcccctgagagctcagatgacagtgaggacagcagcgacagttcttcagggagtgaggaagatggtgaagggccccagggggccaagtcagcccacacgctggtaggtcccaccccctccaggacagagaccctggtggaggagaccgcagcagagtccagcgaggatgatgtggtggcgccatcccagtctctcctctcaggttatatgacccctggactaaccccagccaattcccaggcctcaaaagccactcccaagctagactccagcccctcagtttcctctactctggccgccaaagatgacccagatggcaagcaggaggcaaagccccaacaggcagcaggcatgttgtcccctaaaacaggtggaaaagaggctgcttcaggcaccacacctcagaagtcccggaagcccaagaaaggggctgggaacccccaagcctcaaccctggcgctgcaaagcaacatcacccagtgcctcctgggccaaccctggcccctgaatgaggcccaggtgcaggcctcagtggtgaaggtcctgactgagctgctggaacaggaaagaaagaaggtggtggacaccaccaaggagagcagcaggaagggctgggagagccgcaagcggaagctatcgggagaccagccagctgccaggacccccaggagcaagaagaagaagaagctgggggccggggaaggtggggaggcctctgtttccccagaaaagacctccacgacttccaaggggaaagcaaagagagacaaagcaagtggtgatgtcaaggagaagaaagggaaggggtctcttggctcccaaggggccaaggacgagccagaagaggagcttcagaaggggatggggacggttgaaggtggagatcaaagcaacccaaagagcaagaaggagaagaagaaatccgacaagagaaaaaaagacaaagaaaaaaaagaaaagaagaagaaagcaaaaaaggcctcaaccaaagattctgagtcaccgtcccagaagaaaaagaagaaaaagaagaagacagcagagcagactgtatgacgagcaccagcaccaggcacagggatttcctagccgagcagtggccatccccatgcctctgacctccaccgacctctgcccaccatgggttggaactaaactgttaccttccctcgctccacagaagaagacagccagcttcaggggtccctgtgctggccaagccagtgagcctgcggggaggctggtccaaggagaaagtggaccagctcccatgacctcaccccactcccccaacacaggacgcttcatata

SEQ ID NO: 32469 - DNA, 4825 bp, Homo sapiens
  source 1..4825: mol_type = unassigned DNA
gaggtctaagggcgcgagggaagtggcgggcggggactaaggcggggcgtgcaggtagccggccggccgggggtcgcgggtatggccgaggccaggaagcggcgggagctacttcccctgatctaccaccatctgctgcgggctggctatgtgcgtgcggcgcgggaagtgaaggagcagagcggccagaagtgtttcctggctcagcccgtaacccttctggacatctatacacactggcaacaaacctcagagcttggtcggaagcggaaggcagaggaagatgcggcactgcaagctaagaaaacccgtgtgtcagaccccatcagcacctcggagagctcggaagaggaggaagaagcagaagccgaaaccgccaaagccaccccaagactagcatctaccaactcctcagtcctgggggcggacttgccatcaagcatgaaagaaaaagccaaggcagagacagagaaagctggcaagactgggaattccatgccacaccctgccactgggaagacggtggccaaccttctttctgggaagtctcccaggaagtcagcagagccctcagcaaatactacgttggtctcagaaactgaggaggagggcagcgtcccggcctttggagctgctgccaagcctgggatggtgtcagcgggccaggccgacagctccagcgaggacacctccagctccagtgatgagacagacgtggaggtaaaggcctctgaaaaaattctccaggtcagagctgcctcagcccctgccaaggggacccctgggaaaggggctaccccagcaccccctgggaaggcaggggctgtagcctcccagaccaaggcagggaagccagaggaggactcagagagcagcagcgaggagtcatctgacagtgaggaggagacgccagctgccaaggccctgcttcaggcgaaggcctcaggaaaaacctctcaggtcggagctgcctcagcccctgccaaggagtcccccaggaaaggagctgccccagcgccccctgggaagacagggcctgcagttgccaaggcccaggcggggaagcgggaggaggactcgcagagcagcagcgaggaatcggacagtgaggaggaggcgcctgctcaggcgaagccttcagggaaggccccccaggtcagagccgcctcggcccctgccaaggagtcccccaggaaaggggctgccccagcacctcctaggaaaacagggcctgcagccgcccaggtccaggtggggaagcaggaggaggactcaagaagcagcagcgaggagtcagacagtgacagagaggcactggcagccatgaatgcagctcaggtgaagcccttggggaaaagcccccaggtgaaacctgcctctaccatgggcatggggcccttggggaaaggcgccggcccagtgccacccgggaaggtggggcctgcaaccccctcagcccaggtggggaagtgggaggaggactcagagagcagtagtgaggagtcatcagacagcagtgatggagaggtgcccacagctgtggccccggctcaggaaaagtccttggggaacatcctccaggccaaacccacctccagtcctgccaaggggccccctcagaaggcagggcctgtagccgtccaggtcaaggctgaaaagcccatggacaactcggagagcagcgaggagtcatcggacagtgcggacagtgaggaggcaccagcagccatgactgcagctcaggcaaaaccagctctgaaaattcctcagaccaaggcctgcccaaagaaaaccaataccactgcatctgccaaggtcgcccctgtgcgagtgggcacccaagccccccggaaagcaggaactgcgacttctccagcaggctcatccccagctgtggctgggggcacccagagaccagcagaggattcttcaagcagtgaggaatcagatagtgaggaagagaagacaggtcttgcagtaaccgtgggacaggcaaagtctgtggggaaaggcctccaggtgaaagcagcctcagtgcctgtcaaggggtccttggggcaagggactgctccagtactccctgggaagacggggcctacagtcacccaggtgaaagctgaaaagcaggaagactctgagagcagtgaggaggaatcagacagtgaggaagcagctgcatctccagcacaggtgaaaacctcagtaaagaaaacccaggccaaagccaacccagctgccgccagagcaccttcagcaaaagggacaatttcagcccctggaaaagttgtcactgcagctgctcaagccaagcagaggtctccatccaaggtgaagccaccagtgagaaacccccagaacagtaccgtcttggcgaggggcccagcatctgtgccatctgtggggaaggccgtggctacagcagctcaggcccagacagggccagaggaggactcagggagcagtgaggaggagtcagacagtgaggaggaggcggagacgctggctcaggtgaagccttcagggaagacccaccagatcagagctgccttggctcctgccaaggagtcccccaggaaaggggctgccccaacacctcctgggaagacagggccttcggctgcccaggcagggaagcaggatgactcagggagcagcagcgaggaatcagacagtgatggggaggcaccggcagctgtgacctctgcccaggtgattaaaccccctctgatttttgtcgaccctaatcgtagtccagctggcccagctgctacacccgcacaagcccaggctgcaagcaccccgaggaaggcccgagcctcggagagcacagccaggagctcctcctccgagagcgaggatgaggacgtgatccccgctacacagtgcttgactcctggcatcagaaccaatgtggtgaccatgcccactgcccacccaagaatagcccccaaagccagcatggctggggccagcagcagcaaggagtccagtcggatatcagatggcaagaaacaggagggaccagccactcaggtgtcaaagaagaacccagcttccctcccactgacccaggctgccctgaaggtcctcgcccagaaagccagtgaggctcagcctcctgttgccaggacccagccttcaagtggggttgacagtgctgtgggaacactccctgcaacaagtccccagagcacctccgtccaggccaaagggaccaacaagctcagaaaacctaagcttcctgaggtccagcaggccaccaaagcccctgagagctcagatgacagtgaggacagcagcgacagttcttcagggagtgaggaagatggtgaagggccccagggggccaagtcagcccacacgctggtaggtcccaccccctccaggacagagaccctggtggaggagaccgcagcagagtccagcgaggatgatgtggtggcgccatcccagtctctcctctcaggttatatgacccctggactaaccccagccaattcccaggcctcaaaagccactcccaagctagactccagcccctcagtttcctctactctggccgccaaagatgacccagatggcaagcaggaggcaaagccccaacaggcagcaggcatgttgtcccctaaaacaggtggaaaagaggctgcttcaggcaccacacctcagaagtcccggaagcccaagaaaggggctgggaacccccaagcctcaaccctggcgctgcaaagcaacatcacccagtgcctcctgggccaaccctggcccctgaatgaggcccaggtgcaggcctcagtggtgaaggtcctgactgagctgctggaacaggaaagaaagaaggtggtggacaccaccaaggagagcagcaggaagggctgggagagccgcaagcggaagctatcgggagaccagccagctgccaggacccccaggagcaagaagaagaagaagctgggggccggggaaggtggggaggcctctgtttccccagaaaagacctccacgacttccaaggggaaagcaaagagagacaaagcaagtggtgatgtcaaggagaagaaagggaaggggtctcttggctcccaaggggccaaggacgagccagaagaggagcttcagaaggggatggggacggttgaaggtggagatcaaagcaacccaaagagcaagaaggagaagaagaaatccgacaagagaaaaaaagacaaagaaaaaaaagaaaagaagaagaaagcaaaaaaggcctcaaccaaagattctgagtcaccgtcccagaagaaaaagaagaaaaagaagaagacagcagagcagactgtatgacgagcaccagcaccaggcacagggatttcctagccgagcagtggccatccccatgcctctgacctccaccgacctctgcccaccatgggttggaactaaactgttaccttccctcgctccacagaagaagacagccagcttcaggggtccctgtgctggccaagccagtgagcctgcggggaggctggtccaaggagaaagtggaccagctcccatgacctcaccccactcccccaacacaggacgcttcatatagatgtgtacagtatatgtatttttttaagtgacctcctctccttccacagaccccacatgcccaaaggcctcgggacttcccaccaccttgctccacagatccagctaggcctgacctgtgcctcatcccgtgccgctcggtctctggctgatcccgaggctttgtcttcctctcgtcagttcttttggttgtgttttttgttttttttttaataactcaaaaaaaaaataaaagacttggaggaagggt

SEQ ID NO: 32470 - DNA, 5206 bp, Homo sapiens
  source 1..5206: mol_type = unassigned DNA
gaaagaggagccggaagtgtggcgcgcgaggtctaagggcgcgagggaagtggcgggcggggactaaggcggggcgtgcaggtagccggccggccgggggtcgcgggtatggccgaggccaggaagcggcgggagctacttcccctgatctaccaccatctgctgcgggctggctatgtgcgtgcggcgcgggaagtgaaggagcagagcggccagaagtgtttcctggctcagcccgtaacccttctggacatctatacacactggcaacaaacctcagagcttggtcggaagcggaaggcagaggaagatgcggcactgcaagctaagaaaacccgtgtgtcagaccccatcagcacctcggagagctcggaagaggaggaagaagcagaagccgaaaccgccaaagccaccccaagactagcatctaccaactcctcagtcctgggggcggacttgccatcaagcatgaaagaaaaagccaaggcagagacagagaaagctggcaagactgggaattccatgccacaccctgccactgggaagacggtggccaaccttctttctgggaagtctcccaggaagtcagcagagccctcagcaaatactacgttggtctcagaaactgaggaggagggcagcgtcccggcctttggagctgctgccaagcctgggatggtgtcagcgggccaggccgacagctccagcgaggacacctccagctccagtgatgagacagacgtggaggggaaaccctcagtaaaaccagcccaggtcaaagcctcatcagtttctactaaggagtctccagcaagaaaggcggccccagcccctgggaaggtgggggatgtgacaccccaggtcaaaggaggggccctgcccccagccaagagggccaagaagccagaagaggagtcagagagtagtgaggagggatctgaaagtgaggaggaggcccctgcagggacacgaagccaggtaaaggcctctgaaaaaattctccaggtcagagctgcctcagcccctgccaaggggacccctgggaaaggggctaccccagcaccccctgggaaggcaggggctgtagcctcccagaccaaggcagggaagccagaggaggactcagagagcagcagcgaggagtcatctgacagtgaggaggagacgccagctgccaaggccctgcttcaggcgaaggcctcaggaaaaacctctcaggtcggagctgcctcagcccctgccaaggagtcccccaggaaaggagctgccccagcgccccctgggaagacagggcctgcagttgccaaggcccaggcggggaagcgggaggaggactcgcagagcagcagcgaggaatcggacagtgaggaggaggcgcctgctcaggcgaagccttcagggaaggccccccaggtcagagccgcctcggcccctgccaaggagtcccccaggaaaggggctgccccagcacctcctaggaaaacagggcctgcagccgcccaggtccaggtggggaagcaggaggaggactcaagaagcagcagcgaggagtcagacagtgacagagaggcactggcagccatgaatgcagctcaggtgaagcccttggggaaaagcccccaggtgaaacctgcctctaccatgggcatggggcccttggggaaaggcgccggcccagtgccacccgggaaggtggggcctgcaaccccctcagcccaggtggggaagtgggaggaggactcagagagcagtagtgaggagtcatcagacagcagtgatggagaggtgcccacagctgtggccccggctcaggaaaagtccttggggaacatcctccaggccaaacccacctccagtcctgccaaggggccccctcagaaggcagggcctgtagccgtccaggtcaaggctgaaaagcccatggacaactcggagagcagcgaggagtcatcggacagtgcggacagtgaggaggcaccagcagccatgactgcagctcaggcaaaaccagctctgaaaattcctcagaccaaggcctgcccaaagaaaaccaataccactgcatctgccaaggtcgcccctgtgcgagtgggcacccaagccccccggaaagcaggaactgcgacttctccagcaggctcatccccagctgtggctgggggcacccagagaccagcagaggattcttcaagcagtgaggaatcagatagtgaggaagagaagacaggtcttgcagtaaccgtgggacaggcaaagtctgtggggaaaggcctccaggtgaaagcagcctcagtgcctgtcaaggggtccttggggcaagggactgctccagtactccctgggaagacggggcctacagtcacccaggtgaaagctgaaaagcaggaagactctgagagcagtgaggaggaatcagacagtgaggaagcagctgcatctccagcacaggtgaaaacctcagtaaagaaaacccaggccaaagccaacccagctgccgccagagcaccttcagcaaaagggacaatttcagcccctggaaaagttgtcactgcagctgctcaagccaagcagaggtctccatccaaggtgaagccaccagtgagaaacccccagaacagtaccgtcttggcgaggggcccagcatctgtgccatctgtggggaaggccgtggctacagcagctcaggcccagacagggccagaggaggactcagggagcagtgaggaggagtcagacagtgaggaggaggcggagacgctggctcaggtgaagccttcagggaagacccaccagatcagagctgccttggctcctgccaaggagtcccccaggaaaggggctgccccaacacctcctgggaagacagggccttcggctgcccaggcagggaagcaggatgactcagggagcagcagcgaggaatcagacagtgatggggaggcaccggcagctgtgacctctgcccagaaggacagtaactccaaacctgccagaagcaagaccctggccccagcacccccagagaggaacacggaggggtcctcggagagcagtgaggaagagctgccactgacccaggtgattaaaccccctctgatttttgtcgaccctaatcgtagtccagctggcccagctgctacacccgcacaagcccaggctgcaagcaccccgaggaaggcccgagcctcggagagcacagccaggagctcctcctccgagagcgaggatgaggacgtgatccccgctacacagtgcttgactcctggcatcagaaccaatgtggtgaccatgcccactgcccacccaagaatagcccccaaagccagcatggctggggccagcagcagcaaggagtccagtcggatatcagatggcaagaaacaggagggaccagccactcaggtgtcaaagaagaacccagcttccctcccactgacccaggctgccctgaaggtcctcgcccagaaagccagtgaggctcagcctcctgttgccaggacccagccttcaagtggggttgacagtgctgtgggaacactccctgcaacaagtccccagagcacctccgtccaggccaaagggaccaacaagctcagaaaacctaagcttcctgaggtccagcaggccaccaaagcccctgagagctcagatgacagtgaggacagcagcgacagttcttcagggagtgaggaagatggtgaagggccccagggggccaagtcagcccacacgctgggtcccaccccctccaggacagagaccctggtggaggagaccgcagcagagtccagcgaggatgatgtggtggcgccatcccagtctctcctctcaggttatatgacccctggactaaccccagccaattcccaggcctcaaaagccactcccaagctagactccagcccctcagtttcctctactctggccgccaaagatgacccagatggcaagcaggaggcaaagccccaacaggcagcaggcatgttgtcccctaaaacaggtggaaaagaggctgcttcaggcaccacacctcagaagtcccggaagcccaagaaaggggctgggaacccccaagcctcaaccctggcgctgcaaagcaacatcacccagtgcctcctgggccaaccctggcccctgaatgaggcccaggtgcaggcctcagtggtgaaggtcctgactgagctgctggaacaggaaagaaagaaggtggtggacaccaccaaggagagcagcaggaagggctgggagagccgcaagcggaagctatcgggagaccagccagctgccaggacccccaggagcaagaagaagaagaagctgggggccggggaaggtggggaggcctctgtttccccagaaaagacctccacgacttccaaggggaaagcaaagagagacaaagcaagtggtgatgtcaaggagaagaaagggaaggggtctcttggctcccaaggggccaaggacgagccagaagaggagcttcagaaggggatggggacggttgaaggtggagatcaaagcaacccaaagagcaagaaggagaagaagaaatccgacaagagaaaaaaagacaaagaaaaaaaagaaaagaagaagaaagcaaaaaaggcctcaaccaaagattctgagtcaccgtcccagaagaaaaagaagaaaaagaagaagacagcagagcagactgtatgacgagcaccagcaccaggcacagggatttcctagccgagcagtggccatccccatgcctctgacctccaccgacctctgcccaccatgggttggaactaaactgttaccttccctcgctccacagaagaagacagccagcttcaggggtccctgtgctggccaagccagtgagcctgcggggaggctggtccaaggagaaagtggaccagctcccatgacctcaccccactcccccaacacaggacgcttcatatagatgtgtacagtatatgtatttttttaagtgacctcctctccttccacagaccccacatgcccaaaggcctcgggacttcccaccaccttgctccacagatccagctaggcctgacctgtgcctcatcccgtgccgctcggtctctggctgatcccgaggctttgtcttcctctcgtcagttcttttggttgtgttttttgttttttttttaataactcaaaaaaaaaataaaagacttggaggaagggtgcaagctcccagtgc

SEQ ID NO: 32471 - DNA, 4467 bp, Homo sapiens
  source 1..4467: mol_type = unassigned DNA
atggccgaggccaggaagcggcgggagctacttcccctgatctaccaccatctgctgcgggctggctatgtgcgtgcggcgcgggaagtgaaggagcagagcggccagaagtgtttcctggctcagcccgtaacccttctggacatctatacacactggcaacaaacctcagagcttggtcggaagcggaaggcagaggaagatgcggcactgcaagctaagaaaacccgtgtgtcagaccccatcagcacctcggagagctcggaagaggaggaagaagcagaagccgaaaccgccaaagccaccccaagactagcatctaccaactcctcagtcctgggggcggacttgccatcaagcatgaaagaaaaagccaaggcagagacagagaaagctggcaagactgggaattccatgccacaccctgccactgggaagacggtggccaaccttctttctgggaagtctcccaggaagtcagcagagccctcagcaaatactacgttggtctcagaaactgaggaggagggcagcgtcccggcctttggagctgctgccaagcctgggatggtgtcagcgggccaggccgacagctccagcgaggacacctccagctccagtgatgagacagacgtggaggggaaaccctcagtaaaaccagcccaggtcaaagcctcatcagtttctactaaggagtctccagcaagaaaggcggccccagcccctgggaaggtgggggatgtgacaccccaggtcaaaggaggggccctgcccccagccaagagggccaagaagccagaagaggagtcagagagtagtgaggagggatctgaaagtgaggaggaggcccctgcagggacacgaagccaggtaaaggcctctgaaaaaattctccaggtcagagctgcctcagcccctgccaaggggacccctgggaaaggggctaccccagcaccccctgggaaggcaggggctgtagcctcccagaccaaggcagggaagccagaggaggactcagagagcagcagcgaggagtcatctgacagtgaggaggagacgccagctgccaaggccctgcttcaggcgaaggcctcaggaaaaacctctcaggtcggagctgcctcagcccctgccaaggagtcccccaggaaaggagctgccccagcgccccctgggaagacagggcctgcagttgccaaggcccaggcggggaagcgggaggaggactcgcagagcagcagcgaggaatcggacagtgaggaggaggcgcctgctcaggcgaagccttcagggaaggccccccaggtcagagccgcctcggcccctgccaaggagtcccccaggaaaggggctgccccagcacctcctaggaaaacagggcctgcagccgcccaggtccaggtggggaagcaggaggaggactcaagaagcagcagcgaggagtcagacagtgacagagaggcactggcagccatgaatgcagctcaggtgaagcccttggggaaaagcccccaggtgaaacctgcctctaccatgggcatggggcccttggggaaaggcgccggcccagtgccacccgggaaggtggggcctgcaaccccctcagcccaggtggggaagtgggaggaggactcagagagcagtagtgaggagtcatcagacagcagtgatggagaggtgcccacagctgtggccccggctcaggaaaagtccttggggaacatcctccaggccaaacccacctccagtcctgccaaggggccccctcagaaggcagggcctgtagccgtccaggtcaaggctgaaaagcccatggacaactcggagagcagcgaggagtcatcggacagtgcggacagtgaggaggcaccagcagccatgactgcagctcaggcaaaaccagctctgaaaattcctcagaccaaggcctgcccaaagaaaaccaataccactgcatctgccaaggtcgcccctgtgcgagtgggcacccaagccccccggaaagcaggaactgcgacttctccagcaggctcatccccagctgtggctgggggcacccagagaccagcagaggattcttcaagcagtgaggaatcagatagtgaggaagagaagacaggtcttgcagtaaccgtgggacaggcaaagtctgtggggaaaggcctccaggtgaaagcagcctcagtgcctgtcaaggggtccttggggcaagggactgctccagtactccctgggaagacggggcctacagtcacccaggtgaaagctgaaaagcaggaagactctgagagcagtgaggaggaatcagacagtgaggaagcagctgcatctccagcacaggtgaaaacctcagtaaagaaaacccaggccaaagccaacccagctgccgccagagcaccttcagcaaaagggacaatttcagcccctggaaaagttgtcactgcagctgctcaagccaagcagaggtctccatccaaggtgaagccaccagtgagaaacccccagaacagtaccgtcttggcgaggggcccagcatctgtgccatctgtggggaaggccgtggctacagcagctcaggcccagacagggccagaggaggactcagggagcagtgaggaggagtcagacagtgaggaggaggcggagacgctggctcaggtgaagccttcagggaagacccaccagatcagagctgccttggctcctgccaaggagtcccccaggaaaggggctgccccaacacctcctgggaagacagggccttcggctgcccaggcagggaagcaggatgactcagggagcagcagcgaggaatcagacagtgatggggaggcaccggcagctgtgacctctgcccaggtgattaaaccccctctgatttttgtcgaccctaatcgtagtccagctggcccagctgctacacccgcacaagcccaggctgcaagcaccccgaggaaggcccgagcctcggagagcacagccaggagctcctcctccgagagcgaggatgaggacgtgatccccgctacacagtgcttgactcctggcatcagaaccaatgtggtgaccatgcccactgcccacccaagaatagcccccaaagccagcatggctggggccagcagcagcaaggagtccagtcggatatcagatggcaagaaacaggagggaccagccactcaggtgtcaaagaagaacccagcttccctcccactgacccaggctgccctgaaggtcctcgcccagaaagccagtgaggctcagcctcctgttgccaggacccagccttcaagtggggttgacagtgctgtgggaacactccctgcaacaagtccccagagcacctccgtccaggccaaagggaccaacaagctcagaaaacctaagcttcctgaggtccagcaggccaccaaagcccctgagagctcagatgacagtgaggacagcagcgacagttcttcagggagtgaggaagatggtgaagggccccagggggccaagtcagcccacacgctgggtcccaccccctccaggacagagaccctggtggaggagaccgcagcagagtccagcgaggatgatgtggtggcgccatcccagtctctcctctcaggttatatgacccctggactaaccccagccaattcccaggcctcaaaagccactcccaagctagactccagcccctcagtttcctctactctggccgccaaagatgacccagatggcaagcaggaggcaaagccccaacaggcagcaggcatgttgtcccctaaaacaggtggaaaagaggctgcttcaggcaccacacctcagaagtcccggaagcccaagaaaggggctgggaacccccaagcctcaaccctggcgctgcaaagcaacatcacccagtgcctcctgggccaaccctggcccctgaatgaggcccaggtgcaggcctcagtggtgaaggtcctgactgagctgctggaacaggaaagaaagaaggtggtggacaccaccaaggagagcagcaggaagggctgggagagccgcaagcggaagctatcgggagaccagccagctgccaggacccccaggagcaagaagaagaagaagctgggggccggggaaggtggggaggcctctgtttccccagaaaagacctccacgacttccaaggggaaagcaaagagagacaaagcaagtggtgatgtcaaggagaagaaagggaaggggtctcttggctcccaaggggccaaggacgagccagaagaggagcttcagaaggggatggggacggttgaaggtggagatcaaagcaacccaaagagcaagaaggagaagaagaaatccgacaagagaaaaaaagacaaagaaaaaaaagaaaagaagaagaaagcaaaaaaggcctcaaccaaagattctgagtcaccgtcccagaagaaaaagaagaaaaagaagaagacagcagagcagactgtatga

SEQ ID NO: 32472 - DNA, 551 bp, Homo sapiens
  source 1..551: mol_type = unassigned DNA
taacgctctttaagcaaacagagcctgccctataaaatccggggctcgggcggcctctcatccctgactcggggtcgcctttggagcagagaggaggcaatggccaccatggagaacaaggtgatctgcgccctggtcctggtgtccatgctggccctcggcaccctggccgaggcccagacagagacgtgtacagtggccccccgtgaaagacagaattgtggttttcctggtgtcacgccctcccagtgtgcaaataagggctgctgtttcgacgacaccgttcgtggggtcccctggtgcttctatcctaataccatcgacgtccctccagaagaggagtgtgaattttagacacttctgcagggatctgcctgcatcctgacgcggtgccgtccccagcacggtgattagtcccagagctcggctgccacctccaccggacacctcagacacgcttctgcagctgtgcctcggctcacaacacagattgactgctctgactttgactactcaaaattggcctaaaaattaaaagagatcgatattaa

SEQ ID NO: 32473 - DNA, 737 bp, Homo sapiens
  source 1..737: mol_type = unassigned DNA
acagctgcctcttgcctcctcttcgcctccacggtggaagggctggggccacggggcagagaagaaaggttatctctgcttgttggacaaacagaggggagattataaaacatacccggcagtggacaccatgcattctgcaagccaccctggggtgcagctgagctagacatgggacggcgagacgcccagctcctggcagcgctcctcgtcctggggctatgtgccctggcggggagtgagaaaccctccccctgccagtgctccaggctgagcccccataacaggacgaactgcggcttccctggaatcaccagtgaccagtgttttgacaatggatgctgtttcgactccagtgtcactggggtcccctggtgtttccaccccctcccaaagcaagagtcggatcagtgcgtcatggaggtctcagaccgaagaaactgtggctacccgggcatcagccccgaggaatgcgcctctcggaagtgctgcttctccaacttcatctttgaagtgccctggtgcttcttcccgaagtctgtggaagactgccattactaagagaggctggttccagaggatgcatctggctcaccgggtgttccgaaaccaaagaagaaacttcgccttatcagcttcatacttcatgaaatcctgggttttcttaaccatcttttcctcattttcaatggtttaacatataatttctttaaataaaacccttaaaatctgctaaa

SEQ ID NO: 32474 - DNA, 1851 bp, Homo sapiens
  source 1..1851: mol_type = unassigned DNA
ccgaaggtgcctgggcttgctcattcagtcacagtcacagccaccatgccagggaggacctgggagctgtgcctgctactgctgctggggctgggactggggtcccaggaggccctacccccaccctgtgagagtgagatttactgccacggggagctcctaaaccaagttcaaatggccaagctctaccaggatgacaagcagtttgtggacatgccactgtctatagctccagaacaagtcctgcagaccttcactgagctgtccagggaccacaatcacagcatccccagggagcagctgcaggcgtttgtccacgaacacttccaggccaaggggcaggagctgcagccctggacccctgcagactggaaagacagcccccagttcctgcagaagatttcagatgccaaactgcgtgcctgggcagggcagctgcatcagctctggaagaagctggggaagaagatgaagccagaggttctcagccaccctgagcggttctctctcatctactcagaacatcccttcattgtgcctggcggtcgctttgttgagttctactactgggactcctactgggtcatggagggtctgctcctctcagagatggctgagacggtgaagggcatgctgcagaacttcttggacctggtgaaaacctatgggcatgtccccaatggtgggcgcgtgtactacctgcagcggagccagcccccactcttgaccctcatgatggattgctacttgactcacaccaatgacaccgcctttctacaggaaaacattgaaacactagccttggaattggacttttggaccaagaacaggactgtctctgtgagcttggagggaaagaactacctcctgaatcgctattatgtcccttatgggggacccaggcctgagtcctacagcaaagatgtggagttggctgacaccttgccagaaggagaccgggaggctctgtgggctgagctcaaggctggggctgagtctggctgggacttctcttcacgctggctcattggaggcccaaaccccaactcgcttagcggcatccgaacaagcaaactggtgcctgttgacctgaatgccttcctatgccaagcagaggagctgatgagcaacttctattccaggctggggaacgactcccaggccacgaagtacagaatcctgcggtcgcagcgcttggccgccctgaacacagtcctgtgggatgagcagaccggagcctggttcgattacgaccttgagaagaagaagaaaaaccgggagttttacccatccaacctcactccactctgggccgggtgtttctctgaccctggcgtggcggacaaggctctgaaatacctggaggacaaccggatcctgacttaccagtatgggatcccgacctctctccagaagacaggccagcagtgggatttccccaatgcctgggcccccctgcaggacctggtcatcagaggcctggccaaggcacctttacgtcgggcccaggaagtggctttccagctggctcagaattggatccgaaccaattttgatgtctactcgcagaagtcagccatgtatgagaagtatgacgtcagcaacggtggacagcccggtgggggaggagaatatgaagttcaggagggatttggctggacgaatggcgtggtcctgatgctgctggaccgctatggtgaccggctgacctcagggcccaagctgcctttcctggagccccactgcctggccacccttctgcccagcctcctgctaagcctcctgccatggtgacagccctcctctcctcacctggccccagctcctgccccattaaacctctgcaccagt

SEQ ID NO: 32475 - DNA, 1701 bp, Homo sapiens
  source 1..1701: mol_type = unassigned DNA
ccgaaggtgcctgggcttgctcattcagtcacagtcacagccaccatgccagggaggacctgggagctgtgcctgctactgctgctggggctgggactggggtcccaggaggccctacccccaccctgtgagagtgagatttactgccacggggagctcctaaaccaagttcaaatggccaagctctaccaggatgacaagcagtttgtggacatgccactgtctatagctccagaacaagtcctgcagaccttcactgagctgtccagggaccacaatcacagcatccccagggagcagctgcaggcgtttgtccacgaacacttccaggccaaggggcaggagctgcagccctggacccctgcagactggaaagacagcccccagttcctgcagaagatttcagatgccaaactgcgtgcctgggcagggcagctgcatcagctctggaagaagctggggaagaagatgaagccagaggttctcagccaccctgagcggttctctctcatctactcagaacatcccttcattgtgcctggcggtcgctttgttgagttctactactgctatgggcatgtccccaatggtgggcgcgtgtactacctgcagcggagccagcccccactcttgaccctcatgatggattgctacttgactcacaccaatgacaccgcctttctacaggaaaacattgaaacactagccttggaattggacttttggaccaagaacaggactgtctctgtgagcttggagggaaagaactacctcctgaatcgctattatgtcccttatgggggacccaggcctgagtcctacagcaaagatgtggagttggctgacaccttgccagaaggagaccgggaggctctgtgggctgagctcaaggctggggctgagtctggctgggacttctcttcacgctggctcattggaggcccaaaccccaactcgcttagcggcatccgaacaagcaaactggtgcctgttgacctgaatgccttcctatgccaagcagaggagctgatgagcaacttctattccaggctggggaacgactcccaggccacgaagtacagaatcctgcggtcgcagcgcttggccgccctgaacacagtcctgtgggatgagcagaccggagcctggttcgattacgaccttgagaagaagaagaaaaaccgggagttttacccatccaacctcactccactctgggccgggtgtttctctgaccctggcgtggcggacaaggctctgaaatacctggaggacaaccggatcctgacttaccagtatgggatcccgacctctctccagaagacaggccagcagtgggatttccccaatgcctgggcccccctgcaggacctggtcatcagaggcctggccaaggcacctttacgtcgggcccaggaagtggctttccagctggctcagaattggatccgaaccaattttgatgtctactcgcagaagtcagccatgtatgagaagtatgacgtcagcaacggtggacagcccggtgggggaggagaatatgaagttcaggagggatttggctggacgaatggcgtggtcctgatgctgctggaccgctatggtgaccggctgacctcagggcccaagctgcctttcctggagccccactgcctggccacccttctgcccagcctcctgctaagcctcctgccatggtga

SEQ ID NO: 32476 - DNA, 1720 bp, Homo sapiens
  source 1..1720: mol_type = unassigned DNA
attcagtcacagtcacagccaccatgccagggaggacctgggagctgtgcctgctactgctgctggggctgggactggggtcccaggaggccctacccccaccctgtgagagaacaagtcctgcagaccttcactgagctgtccagggaccacaatcacagcatccccagggagcagctgcaggcgtttgtccacgaacacttccaggccaaggggcaggagctgcagccctggacccctgcagactggaaagacagcccccagttcctgcagaagatttcagatgccaaactgcgtgcctgggcagggcagctgcatcagctctggaagaagctggggaagaaggtatcagcgtcctgggcctgcccaaggcctgaccaagggaactgaagagaggaatgtgcctggggcccacagtgtcttcggagcacagatcagggactcctactgggtcatggagggtctgctcctctcagagatggctgagacggtgaagggcatgctgcagaacttcttggacctggtgaaaacctatgggcatgtccccaatggtgggcgcgtgtactacctgcagcggagccagcccccactcttgaccctcatgatggattgctacttgactcacaccaatgacaccgcctttctacaggaaaacattgaaacactagccttggaattggacttttggaccaagaacaggactgtctctgtgagcttggagggaaagaactacctcctgaatcgctattatgtcccttatgggggacccaggcctgagtcctacagcaaagatgtggagttggctgacaccttgccagaaggagaccgggaggctctgtgggctgagctcaaggctggggctgagtctggctgggacttctcttcacgctggctcattggaggcccaaaccccaactcgcttagcggcatccgaacaagcaaactggtgcctgttgacctgaatgccttcctatgccaagcagaggagctgatgagcaacttctattccaggctggggaacgactcccaggccacgaagtacagaatcctgcggtcgcagcgcttggccgccctgaacacagtcctgtgggatgagcagaccggagcctggttcgattacgaccttgagaagaagaagaaaaaccgggagttttacccatccaacctcactccactctgggccgggtgtttctctgaccctggcgtggcggacaaggctctgaaatacctggaggacaaccggatcctgacttaccagtatgggatcccgacctctctccagaagacaggccagcagtgggatttccccaatgcctgggcccccctgcaggacctggtcatcagaggcctggccaaggcacctttacgtcgggcccaggaagtggctttccagctggctcagaattggatccgaaccaattttgatgtctactcgcagaagtcagccatgtatgagaagtatgacgtcagcaacggtggacagcccggtgggggaggagaatatgaagttcaggagggatttggctggacgaatggcgtggtcctgatgctgctggaccgctatggtgaccggctgacctcagggcccaagctgcctttcctggagccccactgcctggccacccttctgcccagcctcctgctaagcctcctgccatggtgacagccctcctctcctcacctggccccagctcctgccccattaaacctctgcaccagt

SEQ ID NO: 32477 - DNA, 1717 bp, Homo sapiens
  source 1..1717: mol_type = unassigned DNA
gtgcctgggcttgctcattcagtcacagtcacagccaccatgccagggaggacctgggagctgtgcctgctactgctgctggggctgggactggggtcccaggaggccctacccccaccctgtgagagtgagatttactgccacggggagctcctaaaccaagttcaaatggccaagctctaccaggatgacaagcagtttgtggacatgccactgtctatagctccagaacaagtcctgcagaccttcactgagctgtccagggaccacaatcacagcatccccagggagcagctgcaggcgtttgtccacgaacacttccaggccaaggggcaggagctgcagccctggacccctgcagactggaaagacagcccccagttcctgcagaagatttcagatgccaaactgcgtgcctgggcagggcagctgcatcagctctggaagaagctggggaagaagatgaagccagaggttctcagccaccctgagcggttctctctcatctactcagaacatcccttcattgtgcctggcggtcgctttgttgagttctactactgctatgggcatgtccccaatggtgggcgcgtgtactacctgcagcggagccagcccccactcttgaccctcatgatggattgctacttgactcacaccaatgacaccgcctttctacaggaaaacattgaaacactagccttggaattggacttttggaccaagaacaggactgtctctgtgagcttggagggaaagaactacctcctgaatcgctattatgtcccttatgggggacccaggcctgagtcctacagcaaagatgtggagttggctgacaccttgccagaaggagaccgggaggctctgtgggctgagctcaaggctggggctgagtctggctgggacttctcttcacgctggctcattggaggcccaaaccccaactcgcttagcggcatccgaacaagcaaactggtgcctgttgacctgaatgccttcctatgccaagcagaggagctgatgagcaacttctattccaggctggggaacgactcccaggccacgaagtacagaatcctgcggtcgcagcgcttggccgccctgaacacagtcctgtgggatgagcagaccggagcctggttcgattacgaccttgagaagaagaagaaaaaccgggagttttacccatccaacctcactccactctgggccgggtgtttctctgaccctggcgtggcggacaaggctctgaaatacctggaggacaaccggatcctgacttaccagtatgggatcccgacctctctccagaagacaggccagcagtgggatttccccaatgcctgggcccccctgcaggacctggtcatcagaggcctggccaaggcacctttacgtcgggcccaggaagtggctttccagctggctcagaattggatccgaaccaattttgatgtctactcgcagaagtcagccatgtatgagaagtatgacgtcagcaacggtggacagcccggtgggggaggagaatatgaagttcaggagggatttggctggacgaatggcgtggtcctgatgctgctggaccgctatggtgaccggctgacctcagggcccaagctgcctttcctggagccccactgcctggggccacccttctgcccagcctcctgctaagcctcctgccatggtgacagccctcctctcctcacct

SEQ ID NO: 32478 - DNA, 2770 bp, Homo sapiens
  source 1..2770: mol_type = unassigned DNA
gccgaaggtgcctgggcttgctcattcagtcacagtcacagccaccatgccagggaggacctgggagctgtgcctgctactgctgctggggctgggactggggtcccaggaggccctacccccaccctgtgagagtgagatttactgccacggggagctcctaaaccaagttcaaatggccaagctctaccaggatgacaagcagtttgtggacatgccactgtctatagctccagaacaagtcctgcagaccttcactgagctgtccagggaccacaatcacagcatccccagggagcagctgcaggcgtttgtccacgaacacttccaggccaaggggcaggagctgcagccctggacccctgcagactggaaagacagcccccagttcctgcagaagatttcagatgccaaactgcgtgcctgggcagggcagctgcatcagctctggaagaagctggggaagaagatgaagccagaggttctcagccaccctgagcggttctctctcatctactcagaacatcccttcattgtgcctggcggtcgctttgttgagttctactactgggactcctactgggtcatggagggtctgctcctctcagagatggctgagacggtgaagggcatgctgcagaacttcttggacctggtgaaaacctatgggcatgtccccaatggtgggcgcgtgtactacctgcagcggagccagcccccactcttgaccctcatgatggattgctacttgactcacaccaatgacaccgcctttctacaggaaaacattgaaacactagccttggaattggacttttggaccaagaacaggactgtctctgtgagcttggagggaaagaactacctcctgaatcgctattatgtcccttatgggggacccaggcctgagtcctacagcaaagatgtggagttggctgacaccttgccagaaggagaccgggaggctctgtgggctgagctcaaggctggggctgagtctggctgggacttctcttcacgctggctcattggaggcccaaaccccaactcgcttagcggcatccgaacaagcaaactggtgcctgttgacctgaatgccttcctatgccaagcagaggagctgatgagcaacttctattccaggctggggaacgactcccaggccacgaagtacagaatcctgcggtcgcagcgcttggccgccctgaacacagtcctgtgggatgagcagaccggagcctggttcgattacgaccttgagaagaagaagaaaaaccgggagttttacccatccaacctcactccactctgggccgggtgtttctctgaccctggcgtggcggacaaggctctgaaatacctggaggacaaccggatcctgacttaccagtatgggatcccgacctctctccagaagacaggccagcagtgggatttccccaatgcctgggcccccctgcaggacctggtcatcagaggcctggccaaggcacctttacgtcgggcccaggaagtggctttccagctggctcagaattggatccgaaccaattttgatgtctactcgcagaagtcagccatgtatgagaagtatgacgtcagcaacggtggacagcccggtgggggaggagaatatgaagttcaggagggatttggctggacgaatggcgtggtcctgatgctgctggaccgctatggtgaccggctgacctcagggcccaagctgcctttcctggagccccactgcctggggccacccttctgcccagcctcctgctaagcctcctgccatggtgacagccctcctctcctcacctggccccagctcctgccccattaaacctctgcaccagttcctgccttcccctgcctcttcatgccctcctacctcccagcctgtcctcagagcgaagtggagggcagggtcacgacctggaggtcatgggtaggggcctagctccctcctggaaccttgaatagggtggaaatcctgctctggagggaagacctatccccaagtgcctcagcgccaagccccacaccggccttccactcacttccgtagtccaaaggctttattgttctgctgaaatgcttacaaatactgaaaacccccagcctgggcccaggcaaccaagggctcaatgctgggaaggagagcaggggaggtgggcttagtgttaaggcgtgaagggcgaggccagacagctggaggcctggtcctccactctccatttccatcacccttcggaggctgaaggaagggcggcggcaccacagggcccttcccctctgctgcatcatctcctgctcaggctttctctctaggagcattggaggaatcctctttccctgtcggaaactcaacactgtacagaactccaaccataacccttctagcttcctctcccaactgcatcgctcctcctctgttccatagatcccccggcttcatcccttctggctctaagcaaggcaccagtggaagggagagggctggactggggggctggcagcctgtgcatcagggctgaagacacaggcagggggaaggaaaaaggtattcagtcccttccccccagcatgagatgcccaggggcctgggctggagagatgatggcacgtaccctcagatggcccacagctgaagcagtgggctgggccacagagctgcagcaattagtatgtaaccatggcaatgaagcagtcactatggtaaccatggtgatgagtctgcaactaggggatggagctgggacctcaaggttga

SEQ ID NO: 32479 - DNA, 735 bp, Homo sapiens
  source 1..735: mol_type = unassigned DNA
gcagaggagaggcaaagttcaacaggacaacaaagaagcagcagaaacagccaggaaaacgaagagcccccaggttttgacacagaaccctccaccagagttctcaaatccccaaatactctgcaaagtgcaacttgacgggaacttttcaactgacttttacttttgacgaccaccatgactgagatcactgctgaaggaaatgcatctacaaccacaactgtgatagacagcaaaaatggatctgtgcccaaatcccccggaaaagtgctgaagaggacagtcacagaagacatagtgacgacgttcagctcccctgcagcctggcttctggtcattgccctgataatcacgtggtcagctgttgccatcgttatgtttgatttagtggattacaaaaacttttcagcaagctctattgccaagattggctcagatcctttaaaactggtacgtgatgctatggaggaaaccacggactggatctatggcttcttttctttgttatctgacatcatctcatctgaagatgaagaagatgatgatggtgacgaagatactgataaaggagaaatagatgagcctcccttgagaaaaaaagaaatacacaaagataagactgaaaaacaagagaaacctgaaaggaaaatacaaactaaagattggtcagccaattcttcaacaatcagaacattgaagctcactcagttgaaacctatttatatttgtacttag

SEQ ID NO: 32480 - DNA, 961 bp, Homo sapiens
  source 1..961: mol_type = unassigned DNA
acttttacttttgacgaccaccatgactgagatcactgctgaaggaaatgcatctacaaccacaactgtgatagacagcaaaaatggatctgtgcccaaatcccccggaaaagtgctgaagaggacagtcacagaagacatagtgacgacgttcagctcccctgcagcctggcttctggtcattgccctgataatcacgtggtcagctgttgccatcgttatgtttgatttagtggattacaaaaacttttcagcaagctctattgccaagattggctcagatcctttaaaactggtacgtgatgctatggaggaaaccacggactggatctatggcttcttttctttgttatctgacatcatctcatctgaagatgaagaagatgatgatggtgacgaagatactgataaaggagaaatagatgagcctcccttgagaaaaaaagaaatacacaaagataagactgaaaaacaagagaaacctgaaaggaaaatacaaactaaagttacacacaaagaaaaagaaaaaggaaaagaaaaagtaagagaaaaagaaaaacctgaaaagaaagcaactcacaaggaaaaaattgagaaaaaagaaaaaccagaaacaaagacactggcgaaagaacagaagaaagctaagactgcagaaaagagtgaagaaaagactaaaaaggaagtgaaaggtggaaaacaggagaaagtgaagcaaacagctgcaaaagtaaaagaagtacagaaaacaccatcaaaacccaaagaaaaggaggacaaagagaaagcagctgtgtcaaagcatgaacagaaagggttcccaggtcctgggatcagaaactccagctattactgccagtacatcaaagggcaaatcaatgcatggaatgacctgaggactagcctccttcccattccctacctctcctgtgggaaaatgtgctccaatttcaacaactaa

SEQ ID NO: 32481 - DNA, 4746 bp, Homo sapiens
  source 1..4746: mol_type = unassigned DNA
ctctagagtgccaaaaaagaaaaaaaaaagtgctgaagagtcctagggagatgaggctatttttgtttgaagctgatacttctagctgagccacaagtgctgcttggaaagggcttaggttgtttccagggggagaactctgcagaggagaggcaaagttcaacaggacaacaaagaagcagcagaaacagccaggaaaacgaagagcccccaggttttgacacagaaccctccaccagagttctcaaatccccaaatactctgcaaagtgcaacttgacgggaacttttcaactgacttttacttttgacgaccaccatgactgagatcactgctgaaggaaatgcatctacaaccacaactgtgatagacagcaaaaatggatctgtgcccaaatcccccggaaaagtgctgaagaggacagtcacagaagacatagtgacgacgttcagctcccctgcagcctggcttctggtcattgccctgataatcacgtggtcagctgttgccatcgttatgtttgatttagtggattacaaaaacttttcagcaagctctattgccaagattggctcagatcctttaaaactggtacgtgatgctatggaggaaaccacggactggatctatggcttcttttctttgttatctgacatcatctcatctgaagatgaagaagatgatgatggtgacgaagatactgataaaggagaaatagatgagcctcccttgagaaaaaaagaaatacacaaagataagactgaaaaacaagagaaacctgaaaggaaaatacaaactaaagttacacacaaagaaaaagaaaaaggaaaagaaaaagtaagagaaaaagaaaaacctgaaaagaaagcaactcacaaggaaaaaattgagaaaaaagaaaaaccagaaacaaagacactggcgaaagaacagaagaaagctaagactgcagaaaagagtgaagaaaagactaaaaaggaagtgaaaggtggaaaacaggagaaagtgaagcaaacagctgcaaaagtaaaagaagtacagaaaacaccatcaaaacccaaagaaaaggaggacaaagagaaagcagctgtgtcaaagcatgaacagaaagatcagtatgcattctgtcgatatatgattgacatatttgtccatggggatttaaaaccaggacaaagcccagccattccacctcccttaccgacagaacaagcttccagacccactccggcatcacctgcccttgaagaaaaagaaggggaaaagaagaaggctgagaagaaagttacttctgaaacaaaaaagaaagaaaaagaagatatcaaaaagaaaagtgagaaggaaactgccattgatgtggaaaaaaaagagccgggaaaagcttctgaaaccaaacaagggactgtaaaaattgcagcacaagcagcagctaagaaggatgaaaagaaggaagattccaagaaaacaaaaaaacctgcagaagtagaacaacccaagggaaaaaaacaggaaaagaaagaaaaacatgtggaaccagcaaagtcaccaaagaaagaacactcagttccaagtgacaaacaagtaaaagcaaaaactgaacgagccaaagaggagattggtgcggtttcaattaaaaaagctgtacctggaaagaaggaagagaaaacaaccaagacagtggagcaagaaattagaaaagaaaaatctgggaagacttcttcaattctgaaagataaagaacctattaaagggaaagaagagaaagttccagcttccctaaaggaaaaagaacctgaaactaaaaaagatgaaaagatgtccaaagcaggcaaagaagtcaagcctaaacctccacaactacaaggaaaaaaggaagagaagccagagccccaaattaaaaaagaagcaaaaccagctatatctgaaaaagtgcaaatacacaaacaagacatagtgaaaccagaaaagactgtttctcatggtaaaccagaagaaaaagttctcaagcaggtaaaagctgtcacaatagaaaaaacagccaagcccaaaccaacaaaaaaagctgaacatcgagaaagagaacctccatctataaaaacagacaaaccaaaaccaactccaaaaggaacatcagaagtcacagaatcaggaaagaagaaaactgaaatatctgaaaaagaaagtaaagaaaaagcagacatgaagcatcttagagaagaaaaagtctcaacaagaaaagaaagtcttcaattacacaatgtgacaaaagaagatgttgaagatgtaccagcttcaaagaaagctaaagaaggaactgaagatgtgtctcccacaaagcagaaaagtcccatcagtttcttccagtgtgtctacttggatgggtacaatggctatggatttcagtttcctttcactcctgcagaccgccctggagagagctctggtcaagcaaattctccaggacagaagcaacaaggacagtaaacacacatgtatgacccttacaagtgctttaagattttaaaaatgtgatgttttgtccacagtagttcaggcaattaagaatatgcaacccagagaatttctgtgaaaacattttgctctttggcctggtgtggacggaaagggtggccaaatggattgagtgatgagcagacatgtttaagggtctaagtctcaagaatctgttatgtgtgtttgctgcggtgggagggggtgcttgtatttatcttatttccagtcactataaggttgtacacaaactaatttaaagtttacttaataatggtatctttaaaataattgacacaattgcaaaatgaattcctggcttcagttagctattatttttttaatgacaacatagactgtgctctaagtttaaaagatggggaagcttatataaaagtgacccttttgcatcatatgggtatctaaacttaatttacccaataagttgatgcttaatgattttattttatttttgtctatttctattttagttgtggctttgctctaagaatgggtaatagttgtactacagactgctataaatttcttgtgatactcttttagagctcaaaatatctctgagctttagacatggtaaggtggagagtaaatgcttgataaatctttaagatatgtcttgaatgataattaggacattcagtccagtggaaatacaccattcaattagtcaggtctggtgaatcgtttgtttaaaatattagcaaatgagatgtggaattctgaaatttctccagactgtgtcttaataaaaatgtcacctgggtgaaattttagatcaatcactaaatttgggtgacaaatataaaaatattttcatttcactttaatacattctttctgtgaagtaaaatgtttttctttctcataatggcaaaatatgaatgccatcaaagtttaaggaattcattttagccttaaatgccttcgtgagatgtcttacttgtattttaggtaactggtcatcagtgccaatgacatggataacaatttttaatctactcgacagtgcatccctgggaatgactgttatgtttttgtcatattcctggtaatataaatactcgtgttctttactacattgtttttatcaactctaaaagtcatgcctctgtgacctttatcatgtttacaattgcaactgaacttatgacaaattaactcaggaaataaattgagttatcctttctagcattgtaattaccatcagcaaggcctgagatagccagagccaatactagccaagtgatttattttcaaggattgccactaactacggttctttaggaccaagatataaaacagtcactaaaaatcattaggctaggtatcagtaatacattcattactaataatgcatttttggagacttttgtgaaagaagttggtctctgccaaaagctggtggaccacattcacaccacgaaagccagtgtcacatgaaccagattaatgactctctttatggggtatgtgggacatcctggaagtgtataatttcaggaatgaccagacaataccatcttgcaaagccccttcaggtgacaatctaaacttgtgggtaggagagtgcataaagtttattgctcaactgctcctccagcctgctgaatttactgagtaaagaaatagcaaatatgatagatgttttagatttcatagaacagaatggtttgtccattaattctttcattcaatgactgtttattgaatacctactcttttagggcgctgtgttaggtgctgtattgtacaagaaaaatataataaattagattcccagcgctattctgacatagtgaatgaccttgaaaaatttactaaacatactatgtttgtttctccatgagtaaaatagggatatagggacaaacagtctaatatctcatagaaataccatggagacaaataaaatattttaatataaatatgatattaaagtaaatttctgaagtaatacttttgggtatggcactagtttttcctctgactattttactgtttctttcactctcaatataaaaactatttgataagataaaacgatatattttattgtaattagaatttagacaaatcagctataatgtaaaaatgttaataataattacgttttatctgattaaagttacaatgatcatagcactttaaaaatattatctgaactgtcatttgtttatatattaccgtctaataaaatagttatagatcttccaa

SEQ ID NO: 32482 - DNA, 766 bp, Homo sapiens
  source 1..766: mol_type = unassigned DNA
aaatacacaaagataagactgaaaaacaagagaaacctgaaaggaaaatacaaactaaagaagttggacacagctcttgagtacggattgactaagcgaaccatgactgaactggctctgtgtttctatctgctgaaggttaaacagaaactcaactggttccacaccatttgggtccctgctgtttttttcttgcagactgtgctattaatttaataacagtgctgctggagtggcggtagtaatgtagatggcaccatttgcattttggacctggctatattagaattctgatgtcaaagaccgagcagtgggctgtagagtaggtttattaaactagcaagtcttccataattaagacagtgaatttggctgaagtctaaaataaatttctcaaagactgagctggagattatcaacctgaatatatttcttgagtagaccaaatatgttttgtaaaagtaactatttcttaagaaagtgaaagtagagcttcagttgctccacactgagctggaaatcagagagagcttatgttttccacagtttttctgtgtgaatatgaacaaaagatttcactttattgcttagtttcccgtctgtaaatggggtagactaatgcctgctctttattctcaaatagttcagtgaaaataaatgttttgctttacaactgctcttgtatgtggataaatactgttttctgtatgccatgttccatgtcagttatggttgtatgtgatggatagttaggaatttaagttat

SEQ ID NO: 32483 - DNA, 766 bp, Homo sapiens
  source 1..766: mol_type = unassigned DNA
ttacacacaaagaaaaagaaaaaggaaaagaaaaagtaagagaaaaagaaaaacctgaaaagaaagcaactcacaaggaaaaaattgagaaaaaagaaaaaccagaaacaaagacactggcgaaagaacagaagaaagctaagactgcagaaaagagtgaagaaaagactaaaaaggaagtgaaaggtggaaaacaggagaaagtgaagcaaacagctgcaaaagtaaaagaagtacagaaaacaccatcaaaacccaaagaaaaggaggacaaagagaaagcagctgtgtcaaagcatgaacagaaagggttcccaggtcctgggatcagaaactccagctattactgccagtacatcaaagggcaaatcaatgcatggaatgacctgaggactagcctccttcccattccctacctctcctgtgggaaaatgtgctccaatttcaacaactaaaatacatctaaatttttggaactttatgagttttggcctgcccttatttaggtattaatgaaaaagattatatttttatatcttcttcaataactatatttattttttaaagacctaacagaatttcataataaaatggattcctctaaaaatgctgttactactctaaaaagaacgagatttacaaaaatccttagaggtgtatctgtttagtaacaagctttgttatttcatatgtttgatatgcataatttggagcaattaagaatgtaacatgttgcttaaattcaataaactctcttggtcctaaa

SEQ ID NO: 32484 - DNA, 4459 bp, Homo sapiens
  source 1..4459: mol_type = unassigned DNA
atcgtggaaatctatcctcaaggaaatgcatctacaaccacaactgtgatagacagcaaaaatggatctgtgcccaaatcccccggaaaagtgctgaagaggacagtcacagaagacatagtgacgacgttcagctcccctgcagcctggcttctggtcattgccctgataatcacgtggtcagctgttgccatcgttatgtttgatttagtggattacaaaaacttttcagcaagctctattgccaagattggctcagatcctttaaaactggtacgtgatgctatggaggaaaccacggactggatctatggcttcttttctttgttatctgacatcatctcatctgaagatgaagaagatgatgatggtgacgaagatactgataaaggagaaatagatgagcctcccttgagaaaaaaagaaatacacaaagataagactgaaaaacaagagaaacctgaaaggaaaatacaaactaaagttacacacaaagaaaaagaaaaaggaaaagaaaaagtaagagaaaaagaaaaacctgaaaagaaagcaactcacaaggaaaaaattgagaaaaaagaaaaaccagaaacaaagacactggcgaaagaacagaagaaagctaagactgcagaaaagagtgaagaaaagactaaaaaggaagtgaaaggtggaaaacaggagaaagtgaagcaaacagctgcaaaagtaaaagaagtacagaaaacaccatcaaaacccaaagaaaaggaggacaaagagaaagcagctgtgtcaaagcatgaacagaaagatcagtatgcattctgtcgatatatgattgacatatttgtccatggggatttaaaaccaggacaaagcccagccattccacctcccttaccgacagaacaagcttccagacccactccggcatcacctgcccttgaagaaaaagaaggggaaaagaagaaggctgagaagaaagttacttctgaaacaaaaaagaaagaaaaagaagatatcaaaaagaaaagtgagaaggaaactgccattgatgtggaaaaaaaagtccaagagccgggaaaagcttctgaaaccaaacaagggactgtaaaaattgcagcacaagcagcagctaagaaggatgaaaagaaggaagattccaagaaaacaaaaaaacctgcagaagtagaacaacccaagggaaaaaaacaggaaaagaaagaaaaacatgtggaaccagcaaagtcaccaaagaaagaacactcagttccaagtgacaaacaagtaaaagcaaaaactgaacgagccaaagaggagattggtgcggtttcaattaaaaaagctgtacctggaaagaaggaagagaaaacaaccaagacagtggagcaagaaattagaaaagaaaaatctgggaagacttcttcaattctgaaagataaagaacctattaaagggaaagaagagaaagttccagcttccctaaaggaaaaagaacctgaaactaaaaaagatgaaaagatgtccaaagcaggcaaagaagtcaagcctaaacctccacaactacaaggaaaaaaggaagagaagccagagccccaaattaaaaaagaagcaaaaccagctatatctgaaaaagtgcaaatacacaaacaagacatagtgaaaccagaaaagactgtttctcatggtaaaccagaagaaaaagttctcaagcaggtaaaagctgtcacaatagaaaaaacagccaagcccaaaccaacaaaaaaagctgaacatcgagaaagagaacctccatctataaaaacagacaaaccaaaaccaactccaaaaggaacatcagaagtcacagaatcaggaaagaagaaaactgaaatatctgaaaaagaaagtaaagaaaaagcagacatgaagcatcttagagaagaaaaagtctcaacaagaaaagaaagtcttcaattacacaatgtgacaaaagcagaggaagtggacagtactctagaagatgttgaagatgtaccagcttcaaagaaagctaaagaaggaactgaagatgtgtctcccacaaagcagaaaagtcccatcagtttcttccagtgtgtctacttggatgggtacaatggctatggatttcagtttcctttcactcctgcagaccgccctggagagagctctggtcaagcaaattctccaggacagaagcaacaaggacagtaaacacacatgtatgacccttacaagtgctttaagattttaaaaatgtgatgttttgtccacagtagttcaggcaattaagaatatgcaacccagagaatttctgtgaaaacattttgctctttggcctggtgtggacggaaagggtggccaaatggattgagtgatgagcagacatgtttaagggtctaagtctcaagaatctgttatgtgtgtttgctgcggtgggagggggtgcttgtatttatcttatttccagtcactataaggttgtacacaaactaatttaaagtttacttaataatggtatctttaaaataattgacacaattgcaaaatgaattcctggcttcagttagctattatttttttaatgacaacatagactgtgctctaagtttaaaagatggggaagcttatataaaagtgacccttttgcatcatatgggtatctaaacttaatttacccaataagttgatgcttaatgattttattttatttttgtctatttctattttagttgtggctttgctctaagaatgggtaatagttgtactacagactgctataaatttcttgtgatactcttttagagctcaaaatatctctgagctttagacatggtaaggtggagagtaaatgcttgataaatctttaagatatgtcttgaatgataattaggacattcagtccagtggaaatacaccattcaattagtcaggtctggtgaatcgtttgtttaaaatattagcaaatgagatgtggaattctgaaatttctccagactgtgtcttaataaaaatgtcacctgggtgaaattttagatcaatcactaaatttgggtgacaaatataaaaatattttcatttcactttaatacattctttctgtgaagtaaaatgtttttctttctcataatggcaaaatatgaatgccatcaaagtttaaggaattcattttagccttaaatgccttcgtgagatgtcttacttgtattttaggtaactggtcatcagtgccaatgacatggataacaatttttaatctactcgacagtgcatccctgggaatgactgttatgtttttgtcatattcctggtaatataaatactcgtgttctttactacattgtttttatcaactctaaaagtcatgcctctgtgacctttatcatgtttacaattgcaactgaacttatgacaaattaactcaggaaataaattgagttatcctttctagcattgtaattaccatcagcaaggcctgagatagccagagccaatactagccaagtgatttattttcaaggattgccactaactacggttctttaggaccaagatataaaacagtcactaaaaatcattaggctaggtatcagtaatacattcattactaataatgcatttttggagacttttgtgaaagaagttggtctctgccaaaagctggtggaccacattcacaccacgaaagccagtgtcacatgaaccagattaatgactctctttatggggtatgtgggacatcctggaagtgtataatttcaggaatgaccagacaataccatcttgcaaagccccttcaggtgacaatctaaacttgtgggtaggagagtgcataaagtttattgctcaactgctcctccagcctgctgaatttactgagtaaagaaatagcaaatatgatagatgttttagatttcatagaacagaatggtttgtccattaattctttcattcaatgactgtttattgaatacctactcttttagggcgctgtgttaggtgctgtattgtacaagaaaaatataataaattagattcccagcgctattctgacatagtgaatgaccttgaaaaatttactaaacatactatgtttgtttctccatgagtaaaatagggatatagggacaaacagtctaatatctcatagaaataccatggagacaaataaaatattttaatataaatatgatattaaagtaaatttctgaagtaatacttttgggtatggcactagtttttcctctgactattttactgtttctttcactctcaatataaaaactatttgataagataaaacgatatattttattgtaattagaatttagacaaatcagctataatgtaaaaatgttaataataattacgttttatctgattaaagttacaatgatcatagcactttaaaaatattatctgaactgtcatttgtttatatattaccgtctaataaaatagttatagatcttccaag

SEQ ID NO: 32485 - DNA, 4475 bp, Homo sapiens
  source 1..4475: mol_type = unassigned DNA
acttttacttttgacgaccaccatgactgagatcactgctgaaggaaatgcatctacaaccacaactgtgatagacagcaaaaatggatctgtgcccaaatcccccggaaaagtgctgaagaggacagtcacagaagacatagtgacgacgttcagctcccctgcagcctggcttctggtcattgccctgataatcacgtggtcagctgttgccatcgttatgtttgatttagtggattacaaaaacttttcagcaagctctattgccaagattggctcagatcctttaaaactggtacgtgatgctatggaggaaaccacggactggatctatggcttcttttctttgttatctgacatcatctcatctgaagatgaagaagatgatgatggtgacgaagatactgataaaggagaaatagatgagcctcccttgagaaaaaaagaaatacacaaagataagactgaaaaacaagagaaacctgaaaggaaaatacaaactaaagttacacacaaagaaaaagaaaaaggaaaagaaaaagtaagagaaaaagaaaaacctgaaaagaaagcaactcacaaggaaaaaattgagaaaaaagaaaaaccagaaacaaagacactggcgaaagaacagaagaaagctaagactgcagaaaagagtgaagaaaagactaaaaaggaagtgaaaggtggaaaacaggagaaagtgaagcaaacagctgcaaaagtaaaagaagtacagaaaacaccatcaaaacccaaagaaaaggaggacaaagagaaagcagctgtgtcaaagcatgaacagaaagatcagtatgcattctgtcgatatatgattgacatatttgtccatggggatttaaaaccaggacaaagcccagccattccacctcccttaccgacagaacaagcttccagacccactccggcatcacctgcccttgaagaaaaagaaggggaaaagaagaaggctgagaagaaagttacttctgaaacaaaaaagaaagaaaaagaagatatcaaaaagaaaagtgagaaggaaactgccattgatgtggaaaaaaaagagccgggaaaagcttctgaaaccaaacaagggactgtaaaaattgcagcacaagcagcagctaagaaggatgaaaagaaggaagattccaagaaaacaaaaaaacctgcagaagtagaacaacccaagggaaaaaaacaggaaaagaaagaaaaacatgtggaaccagcaaagtcaccaaagaaagaacactcagttccaagtgacaaacaagtaaaagcaaaaactgaacgagccaaagaggagattggtgcggtttcaattaaaaaagctgtacctggaaagaaggaagagaaaacaaccaagacagtggagcaagaaattagaaaagaaaaatctgggaagacttcttcaattctgaaagataaagaacctattaaagggaaagaagagaaagttccagcttccctaaaggaaaaagaacctgaaactaaaaaagatgaaaagatgtccaaagcaggcaaagaagtcaagcctaaacctccacaactacaaggaaaaaaggaagagaagccagagccccaaattaaaaaagaagcaaaaccagctatatctgaaaaagtgcaaatacacaaacaagacatagtgaaaccagaaaagactgtttctcatggtaaaccagaagaaaaagttctcaagcaggtaaaagctgtcacaatagaaaaaacagccaagcccaaaccaacaaaaaaagctgaacatcgagaaagagaacctccatctataaaaacagacaaaccaaaaccaactccaaaaggaacatcagaagtcacagaatcaggaaagaagaaaactgaaatatctgaaaaagaaagtaaagaaaaagcagacatgaagcatcttagagaagaaaaagtctcaacaagaaaagaaagtcttcaattacacaatgtgacaaaagcagaaaaacctgcaagagtatcaaaagatgttgaagatgtaccagcttcaaagaaagctaaagaaggaactgaagatgtgtctcccacaaagcagaaaagtcccatcagtttcttccagtgtgtctacttggatgggtacaatggctatggatttcagtttcctttcactcctgcagaccgccctggagagagctctggtcaagcaaattctccaggacagaagcaacaaggacagtaaacacacatgtatgacccttacaagtgctttaagattttaaaaatgtgatgttttgtccacagtagttcaggcaattaagaatatgcaacccagagaatttctgtgaaaacattttgctctttggcctggtgtggacggaaagggtggccaaatggattgagtgatgagcagacatgtttaagggtctaagtctcaagaatctgttatgtgtgtttgctgcggtgggagggggtgcttgtatttatcttatttccagtcactataaggttgtacacaaactaatttaaagtttacttaataatggtatctttaaaataattgacacaattgcaaaatgaattcctggcttcagttagctattatttttttaatgacaacatagactgtgctctaagtttaaaagatggggaagcttatataaaagtgacccttttgcatcatatgggtatctaaacttaatttacccaataagttgatgcttaatgattttattttatttttgtctatttctattttagttgtggctttgctctaagaatgggtaatagttgtactacagactgctataaatttcttgtgatactcttttagagctcaaaatatctctgagctttagacatggtaaggtggagagtaaatgcttgataaatctttaagatatgtcttgaatgataattaggacattcagtccagtggaaatacaccattcaattagtcaggtctggtgaatcgtttgtttaaaatattagcaaatgagatgtggaattctgaaatttctccagactgtgtcttaataaaaatgtcacctgggtgaaattttagatcaatcactaaatttgggtgacaaatataaaaatattttcatttcactttaatacattctttctgtgaagtaaaatgtttttctttctcataatggcaaaatatgaatgccatcaaagtttaaggaattcattttagccttaaatgccttcgtgagatgtcttacttgtattttaggtaactggtcatcagtgccaatgacatggataacaatttttaatctactcgacagtgcatccctgggaatgactgttatgtttttgtcatattcctggtaatataaatactcgtgttctttactacattgtttttatcaactctaaaagtcatgcctctgtgacctttatcatgtttacaattgcaactgaacttatgacaaattaactcaggaaataaattgagttatcctttctagcattgtaattaccatcagcaaggcctgagatagccagagccaatactagccaagtgatttattttcaaggattgccactaactacggttctttaggaccaagatataaaacagtcactaaaaatcattaggctaggtatcagtaatacattcattactaataatgcatttttggagacttttgtgaaagaagttggtctctgccaaaagctggtggaccacattcacaccacgaaagccagtgtcacatgaaccagattaatgactctctttatggggtatgtgggacatcctggaagtgtataatttcaggaatgaccagacaataccatcttgcaaagccccttcaggtgacaatctaaacttgtgggtaggagagtgcataaagtttattgctcaactgctcctccagcctgctgaatttactgagtaaagaaatagcaaatatgatagatgttttagatttcatagaacagaatggtttgtccattaattctttcattcaatgactgtttattgaatacctactcttttagggcgctgtgttaggtgctgtattgtacaagaaaaatataataaattagattcccagcgctattctgacatagtgaatgaccttgaaaaatttactaaacatactatgtttgtttctccatgagtaaaatagggatatagggacaaacagtctaatatctcatagaaataccatggagacaaataaaatattttaatataaatatgatattaaagtaaatttctgaagtaatacttttgggtatggcactagtttttcctctgactattttactgtttctttcactctcaatataaaaactatttgataagataaaacgatatattttattgtaattagaatttagacaaatcagctataatgtaaaaatgttaataataattacgttttatctgattaaagttacaatgatcatagcactttaaaaatattatctgaactgtcatttgtttatatattaccgtctaataaaatagttatagatcttccaag

SEQ ID NO: 32486 - DNA, 776 bp, Homo sapiens
  source 1..776: mol_type = unassigned DNA
aaatacacaaagataagactgaaaaacaagagaaacctgaaaggaaaatacaaactaaagattggtcagccaattcttcaacaatcagaacattgaagctcactcagttgaaacctatttatatttgtacttaggaaactaatgtctccttactgttctctttccttttttcggttcttaattcctttgatcacagaagttggacacagctcttgagtacggattgactaagcgaaccatgactgaactggctctgtgtttctatctgctgaaggttaaacagaaactcaactggttccacaccatttgggtccctgctgtttttttcttgcagactgtgctattaatttaataacagtgctgctggagtggcggtagtaatgtagatggcaccatttgcattttggacctggctatattagaattctgatgtcaaagaccgagcagtgggctgtagagtaggtttattaaactagcaagtcttccataattaagacagtgaatttggctgaagtctaaaataaatttctcaaagactgagctggagattatcaacctgaatatatttcttgagtagaccaaatatgttttgtaaaagtaactatttcttaagaaagtgaaagtagagcttcagttgctccacactgagctggaaatcagagagagcttatgttttccacagtttttctgtgtgaatatgaacaaaagatttcactttattgcttagtttcccgtctgtaaatggggtagactaatgcctgctctttattctcaaa

SEQ ID NO: 32487 - DNA, 1035 bp, Homo sapiens
  source 1..1035: mol_type = unassigned DNA
atcgtggaaatctatcctcaaggaaatgcatctacaaccacaactgtgatagacagcaaaaatggatctgtgcccaaatcccccggaaaagtgctgaagaggacagtcacagaagacatagtgacgacgttcagctcccctgcagcctggcttctggtcattgccctgataatcacgtggtcagctgttgccatcgttatgtttgatttagtggattacaaaaacttttcagcaagctctattgccaagattggctcagatcctttaaaactggtacgtgatgctatggaggaaaccacggactggatctatggcttcttttctttgttatctgacatcatctcatctgaagatgaagaagatgatgatggtgacgaagatactgataaaggagaaatagatgagcctcccttgagaaaaaaagaaatacacaaagataagactgaaaaacaagagaaacctgaaaggaaaatacaaactaaagttacacacaaagaaaaagaaaaaggaaaagaaaaagtaagagaaaaagaaaaacctgaaaagaaagcaactcacaaggaaaaaattgagaaaaaagaaaaaccagaaacaaagacactggcgaaagaacagaagaaagctaagactgcagaaaagagtgaagaaaagactaaaaaggaagtgaaaggtggaaaacaggagaaagtgaagcaaacagctgcaaaagtaaaagaagtacagaaaacaccatcaaaacccaaagaaaaggaggacaaagagaaagcagctgtgtcaaagcatgaacagaaagatcagtatgcattctgtcgatatatgattgacatatttgtccatggggatttaaaaccaggacaaagcccagccattccacctcccttaccgacagaacaagcttccagacccactccggcatcacctgcccttgaagaaaaagaaggggaaaagaagaaggctgagaagaaagttacttctgaaacaaaaaagaaagaaaaagaagatatcaaaaagaaaaaaaaaaaaaaaaaaaaaaaa

SEQ ID NO: 32488 - DNA, 1292 bp, Homo sapiens
  source 1..1292: mol_type = unassigned DNA
gtttccagggggagaactctgcagaggagaggcaaagttcaacaggacaacaaagaagcagcagaaacagccaggaaaacgaagagcccccaggttttgacacagaaccctccaccagagttctcaaatccccaaatactctgcaaagtgcaacttgacgggaacttttcaactgacttttacttttgacgaccaccatgactgagatcactgctgaaggaaatgcatctacaaccacaactgtgatagacagcaaaaatggatctgtgcccaaatcccccggaaaagtgctgaagaggacagtcacagaagacatagtgacgacgttcagctcccctgcagcctggcttctggtcattgccctgataatcacgtggtcagctgttgccatcgttatgtttgatttagtggattacaaaaacttttcagcaagctctattgccaagattggctcagatcctttaaaactggtacgtgatgctatggaggaaaccacggactggatctatggcttcttttctttgttatctgacatcatctcatctgaagatgaagaagatgatgatggtgacgaagatactgataaaggagaaatagatgagcctcccttgagaaaaaaagaaatacacaaagataagactgaaaaacaagagaaacctgaaaggaaaatacaaactaaagaagttggacacagctcttgagtacggattgactaagcgaaccatgactgaactggctctgtgtttctatctgctgaaggttaaacagaaactcaactggttccacaccatttgggtccctgctgtttttttcttgcagactgtgctattaatttaataacagtgctgctggagtggcggtagtaatgtagatggcaccatttgcattttggacctggctatattagaattctgatgtcaaagaccgagcagtgggctgtagagtaggtttattaaactagcaagtcttccataattaagacagtgaatttggctgaagtctaaaataaatttctcaaagactgagctggagattatcaacctgaatatatttcttgagtagaccaaatatgttttgtaaaagtaactatttcttaagaaagtgaaagtagagcttcagttgctccacactgagctggaaatcagagagagcttatgttttccacagtttttctgtgtgaatatgaacaaaagatttcactttattgcttagtttcccgtctgtaaatggggtagactaatgcctgctctttattctcaaatagttcagtgaaaataaatgttttgctttac

SEQ ID NO: 32489 - DNA, 1006 bp, Homo sapiens
  source 1..1006: mol_type = unassigned DNA
acttttacttttgacgaccaccatgactgagatcactgctgaaggaaatgcatctacaaccacaactgtgatagacagcaaaaatggatctgtgcccaaatcccccggaaaagtgctgaagaggacagtcacagaagacatagtgacgacgttcagctcccctgcagcctggcttctggtcattgccctgataatcacgtggtcagctgttgccatcgttatgtttgatttagtggattacaaaaacttttcagcaagctctattgccaagattggctcagatcctttaaaactggtacgtgatgctatggaggaaaccacggactggatctatggcttcttttctttgttatctgacatcatctcatctgaagatgaagaagatgatgatggtgacgaagatactgataaaggagaaatagatgagcctcccttgagaaaaaaagaaatacacaaagataagactgaaaaacaagagaaacctgaaaggaaaatacaaactaaagttacacacaaagaaaaagaaaaaggaaaagaaaaagtaagagaaaaagaaaaacctgaaaagaaagcaactcacaaggaaaaaattgagaaaaaagaaaaaccagaaacaaagacactggcgaaagaacagaagaaagctaagactgcagaaaagagtgaagaaaagactaaaaaggaagtgaaaggtggaaaacaggagaaagtgaagcaaacagctgcaaaagtaaaagaagtacagaaaacaccatcaaaacccaaagaaaaggaggacaaagagaaagcagctgtgtcaaagcatgaacagaaagatcagtatgcattctgtcgatatatgattgacatatttgtccatggggatttaaaaccaggacaaagcccagccattccacctcccttaccgacagaacaagcttccagacccactccggcatcacctgcccttgaaggtgacaaagcatcaaaagaaaaaaaaaggaaaatgaaaagaatgagtgagaaa

SEQ ID NO: 32490 - DNA, 1658 bp, Homo sapiens
  source 1..1658: mol_type = unassigned DNA
gaaacagccaggaaaacgaagagcccccaggttttgacacagaaccctccaccagagttctcaaatccccaaatactctgcaaagtgcaacttgacgggaacttttcaactgacttttacttttgacgaccaccatgactgagatcactgctgaaggaaatgcatctacaaccacaactgtgatagacagcaaaaatggatctgtgcccaaatcccccggaaaagtgctgaagaggacagtcacagaagacatagtgacgacgttcagctcccctgcagcctggcttctggtcattgccctgataatcacgtggtcagctgttgccatcgttatgtttgatttagtggattacaaaaacttttcagcaagctctattgccaagattggctcagatcctttaaaactggtacgtgatgctatggaggaaaccacggactggatctatggcttcttttctttgttatctgacatcatctcatctgaagatgaagaagatgatgatggtgacgaagatactgataaaggagaaatagatgagcctcccttgagaaaaaaagaaatacacaaagataagactgaaaaacaagagaaacctgaaaggaaaatacaaactaaagttacacacaaagaaaaagaaaaaggaaaagaaaaagtaagagaaaaagaaaaacctgaaaagaaagcaactcacaaggaaaaaattgagaaaaaagaaaaaccagaaacaaagacactggcgaaagaacagaagaaagctaagactgcagaaaagagtgaagaaaagactaaaaaggaagtgaaaggtggaaaacaggagaaagtgaagcaaacagctgcaaaagtaaaagaagtacagaaaacaccatcaaaacccaaagaaaaggaggacaaagagaaagcagctgtgtcaaagcatgaacagaaaggacaaagcccagccattccacctcccttaccgacagaacaagcttccagacccactccggcatcacctgcccttgaaggcaagtacttttttttttcttaaagatctctattgtagataaaatagaatgtagaggaacagcaacaacaaaaatagtcacaaagaaacagcaaaatccaatattttcttaaatacttttagtatgtctaaactatacttttcctaaaattgcaatttgcttcttttagaaaaccaaaaatgtccccttaagattctatattggtgaccctcagcttccagaaggatgcccactctagcactttgggaatcaagcaaaaaaatatagggacaaatagataaggctatgccttgcaactctgggagttttaccacaacttgatcaatttagtctctgaagaggctggtgccagatttgctgggtttgaatctgagctccaccttttcctagctttgtaaatttggaaagttatttaaattaactcttcatgagttttgccatctctaagatgatataagcagagcactgatctcctagcgttattgtgaggattgaaatatatatatacacacacactcacacacacacaaatactgttttatgtatatgtatagtttataagtactatatacaactggtggttaatactactaataattcttgaaaatatgatgtctcaagatcagctttgtaataaattttgctggaacgtt
